United States Patent Application Publication US 2019/0348154 A1 - sequence listing, part 104

SEQ ID NO: 388093 - DNA, 1302 bp, Salmonella enterica
atgatccttcaggataaaggattagatcctttttgtgaaaacccctgcactgcttggcttgctcattggcgtttagccggtttaccggctgctaatagtaaacatcgctctacaacatggagctatctttttaacaatataacgtcttcgtcattttcacgagacaatcttgtagagcgtattagagattacgcatctgaaagaaatgtaaaaatctcagaggcaacattaaagagagatgttgaggcatgcattagatcatactgcccaaaatcagataataatatagaggaaaatgcagaacctctgttatcagaattaggtttgattcaagattttgccttatcagagcttcgttcccatgttcaagcagaggaaaaagttcagaaaaaagaaactgaaaaccagcttcttgatgaaggaatcgattctattgaatcaagacttaaagagtctgaaaaaattattcatgaaatacaaactaaatcaccggaatgtaaaacacaaattgtatcattgcatcaaaacatgcagtttataactaatagcgtcaagggttttcgtgatgctataaatacacttcaagagcaaagggaagatatcttagagttagcaggtgtaggtaatgtcatgagaagtgtaatgcatgaattaactagaaccacatctcaaacacgttctctactaagtaaaatcgctaaaaatgctgatgacgaaacttccgatttactaaataagctcgaagtcgaaattaaaacattgaatacaagattgagacagttagatccactaagcacaagcggacgcaatcgaaaaggtcagtttgaattggtcggtttgataaaaacaataataaatgggtataaggcccgatttttaaggcataatataaaatttgttcttacatttaacagtatacccattaccaaccaaacttttttggttaaaatggttaaaggttttgttagtttaactattgaaaacattatattgaattctgtacactggcttaaaacaggtttcatcatgcctggtgatgattctgccactatatatattaatatcgactcggatgccagtgtcattgaaatttatgacaatggtccaggcatttctccttcagatcgtgaacgtatattcagtccgggtttttctctgagaaaagacggacatggctacggactatacattgctaaggaagtttctgctaattatgattctgatatttacttagactcagaaccattcccggacggtcgcctaagacgttttgttatcgaacttccaaagagggatgattaa

SEQ ID NO: 388094 - DNA, 1365 bp, Salmonella enterica
gtgggtaaggagaatgccggaggacacgaccagtccatcacggtggcgcatgaccggagcatcacggtacgcaacgaccagacgctgaaagtgaagaacgaccggatggtgagcatcagccatgatgacgggctgtacgtggcgaatgaccgtaaggtgacggtggaagggaaacaggagcacaccaccaccggagaccatatcagcctggtgaaaggcagccacagtctggaagtgaaaggcgaccttgcgcggaaggtgtcgggcgcgctggggataaaagtggaagacgatattgtcctggagagcagcagccggataagcctgaaagtgggcggttcgtttgtggttatccatccgggtggcgtggacattatggggccgaagataaacctgaatggcggggggaatccggggggacctgtggggacgctgcaacttggggtgctagcggctctggtggatgagggtgatgatgcgggagccggtgattccggtagtgacgaaaattctggggatgtcagtggttctgctaatgactcaggcaatccagacgatgagaataaagatgttaatagtccagatgtgattactacagaaactatgaaggctgttcccgcagatcgtgccaggagaaagatcgggataggtgagcaggtaaatttaacatgcagcaatgaagtctctgattggtctctgtctccgagtgacagtgggacattattaaaaacgggttcctgtacagccagtttcactgcctctgacaaagcggttatcgctacagtgacggccattacagctaatggcaagagtgatgttcaattcactgttgttgaaccatcacgcttcttgatgcatcggataaccggtacctcattaatacatcactatggatacgctgattgtggatggcttggtagaccctatgttgaacctgttgatgttaacttctccgctatttggataagagaaagagattctcaggctacaggtacaggatgttttgattttttgacgggagcgacgcatggaggtccaggctacgcagccaataatggtacttcccaatggttcgcaatagaggatcagttctattctccttctatgggaaactccgggcaaatcactgatactatctttgctacacccggtcccagagcaggaataaaaccaccatttactccaggtgtacttactatgccaattgaatgggagtggagcttagatatgactaaaatccatagtttccctctggcagaacaaaagcatgaggtttttacagatggtaaatgcgcaacaactaaaacagaacatagtgaaacaacgatgtatacagatcctgatagtggtcttaactttctatag

SEQ ID NO: 388095 - DNA, 597 bp, Salmonella enterica
atgaaaaacgatatccgcattagattaaataatgtcaagagtcatatagttacttttagagaaaaaccgattcttgatgcccagcaatccaatttacgattcgcgctttttacgctcatgggcatagatttgtctaaggaaaagataacattatcagagtttaaagagtatagagttgagatgttgaagtatcatatagaaatcatcgaattatttaatgagtattatatagaggattataaaccggccccctataaattacgcatataccctccctttggctcggttgatggcccggtatttggtagcgtggatcctgccataattaagaacaaagagattcgtgataaatacatatcagatttggaagaaaataataaaattggggaaatgaatgcttttcaatcagcactaaccgctgtcaaacatctccttgaaactccgaattctaaacttggcattattgcaacccttgtctggtttattaagtataattataaagacaatgtggcagaccaggtggaattaaaaatgtccattgatacatcccagctaagtgaacctattaaaaacagaattattaatacaacaaaataa

SEQ ID NO: 388096 - DNA, 285 bp, Salmonella enterica
atgcccacagcagccagacttaacgataaaggcacccagcacgatggttatcacgaaaccgttattacagcgggttcccccacggtatttatcgacggattgcctgctgcccgtatgagtgatccgctgacgcctcacgataaacccaaacatccccctcacccccgaaaaatagccagtggttcaggtaccgtattcattgatggccttcctgccgccagaaccggtgatgccattgactgcggtggtgtggttatcggcagcggtaccgtcagtatcggttga

SEQ ID NO: 388097 - DNA, 1941 bp, Salmonella enterica
atgagcaaggaagcgaaaccgaaactaatcaaaccccagacgagggaaattaatgtaacacaaatcagtaatgcaattgatgatagtacacgtaccgttgaaattgcattcatgagtgaagaaccagtagtacgcgatattgacggtactctatataacgaaattattctaactactcccgacaatgtagatctatcgcgactaaataacggcggtgcacttctatataaccataatatggattggttaatcggtgtagtagaaaacgcccgtatcgacgaagaccgcgtaggacgtgcattagtacgattcagtaccggaacatttgccgaccagaaatataaacaagtacaggaagccgtactaactaagatttcatttggatataacatcctagattactatttcgaaggtaataacttaatcgttacgcgagtacagccatatgaaattagtttcgtgtctgtacctgccgacgattctgtaggcgtaggtcgatcactaaatacagaagaaaacaacgcctataaggattatttaaaaatggatgaaaaggatattcaagaagtacaggaaccagtagagcaagaagccgtactagaaccagtagaagaaaccgtagaagcagaaacagaaactaaagccgaagaatctgtagaagaaattgtagtaccagaagtagaagtagaactagaagtagaacgccagctacaggaagcaaaggacgctttaaaagtagctcaacgtactattgaagttgaaagcgagctagaagaagtacgcaaacaactacaggcaattgaagacgcaaaagccgaacaactaaataaagaaagaattcgcgaaattgaatctattgcaaaagtatttgaagtagatccgagcgaagcaataaatacaaatgtgagtgtagaagatttcaaacgtggaattgaaacacaaaaagaaaaatcaaataaaaatcttaacgttaaggatgataataagatgaaacaaaaacgtactatcgacgcactagtagaatttgcaaaaggcgatcacaatgcactaaatgatctagaaatgggatcacgtggttatgcaatcgcagaaggtgaattcgcactagcacgtgcaaacactactaccgtcacagcagcaggtgcaattcaaactgaatattcagatgattttattcgcccactactagcagaatctattttaggccgtctaggtctagaagtgctaactggcatgaataaccgtgaatttaccattcctcgcctaacttccctagatgataaagctagctttaaattctataacgaaggtgaagcaattgcagaaaccgtagctaattttgataacgtagttctaaagccacgtctatttgctggtgcaattcccgtaactaaatctctaatgctatctagcccagatattggtacatgggtacaacgtgcactacttgaaaacgttgctaactccctagaaaaagaagtaattgcagaagtagaagcaactgctactaaaatggaaactgccgcttccggcactctatccgatgcagatattgaagcagcactacaaaaacttctagaagcaaatatccgcagccgtgaatgtgttgcaattgtttccccacaaatgtatgcacgtctacgtcaaactgcattcctatctaacgtagctggtgttgcacttgctcaagggatgcgtttttcagatagccaatggttgtgtgaagaaatgccgctaatcgttagcactttcgtagcagatgatactattctaatgggtaatttctcattcgttactattgctaactggattggaagtactctagatgtggataccactacttaccgtagttcactaactacagtattccgtaactatcattatcttgatattgtacagaaacatccagaatctgtaattcaactaaaagttaaagcgtaa

SEQ ID NO: 388098 - DNA, 1329 bp, Salmonella enterica
atgcctatagaattagcctttcttatcgggatagccgttttactatttttagcgttgaagctgaaagtaaatgcatttatggctttgttagctacagcattagtaattggtgttttatcaggaatgcctcaaactaaagtggtcgatgctattgttagcgggttctccggtacagtaaaaagtattggtattgttattatatttggcattatgctagggaactatctggatgcttcgagaggaacaactcgaatggcgttagataccatcaggatggtagggcagaaacgttcaggtattgcaatggtcattactggctatattgtatcgattcctgtttttagcgatgctgcttttgttattctttcaccattagttaaagctattgccaagagaactaaaatatcaatagctattctctcggtatcattatctgctggactgcttgcaacacacgtttatgttccaccaaccccaggacctttggccgccgcaggtatgctgggtattgatattggtcgggcgattttatatggctcttttgcggcattattcatggctcttgctggttggttgtttgctgaaatttatttcaaaaataagaaagatgatttttatacttatcaggaaacagaggctcaaaagcccgatgttgatatgaatagtgacgatcttcctggttctttggcatccattatgcctttgtttgtgccgatccttctcattattctaaatacttcttgcagtatgctgctgccgaaaacatcacctatcgcacaagttgcggcatttattggtgatgccaatattgcgttggctattggtgcacttctggctatcgccacattaggtaaacgcttaggtcataaagcagtaatgaaagtaatggatagctcgttaaaagatgctggccccattgtttttatcaccgccgctggaggggcacttggacaagtattaaaatcctcaggtgcgggtgatagtattgcccatatggtaattaatttagggctgccttttattcttattccttttgttatttcagctctgctgaaagtagtacaaggatctgggactgtttcggttataaccgcagcaacattatccgccccaattggcacacagttaggacttgatcccattcttattttcctcgcgtcaggagcaggggccagagcctgttgtcatgtaaatgacagctatttttgggtttatactaactgcatgggatttgatatgaaaacagggttgaaaacattaagtatctctaacatatttatgtcgatcggtggactgttagctacatatatagccagtttgtggttgtaa

SEQ ID NO: 388099 - DNA, 1593 bp, Salmonella enterica
gtgtcctccggcattctccttacccacggtgaccgtctgccccagccccacggtgattttctggttattaccgatggtttctgtgtggtccactttcacatcagtggtacggttgttcagcacttcggtatccatgttcttctgcgcatggatataaacctgctcctggcccgtcgcatcctcgaagcgcagctcgttaaaaccaccgcctttgtaggttttcgagcggatggtcatctgcgttttggtgcccggcagactgcccggcgaacggttatcctggtggtaggtgcgtcccatgataatgggctggtccgggtcgccgttgaggaagtcgactatcacttcctggccgacacgcggtattgccaggttgccaaatccggcgccggcccatgcctgcgacacccgtatccagcaggagctgtcttcgtttcccggacaatagcggtcccagtgaaaacgtacccgcacacgaccatgctcatcgcagaagatttcctcgcccgccgggccggtaacaatggcgctctgcgggccgtcaacggaaggtttgggcaggggggaggagcgccatgtccggtcagccgggatgacgtccaggcggttactgagcgtggtgccttcaccccggtggccatgctgtgcctgtggctgctcacctttcagcacactgccggttacctgccactcccggttcagcgtgagggaaggatggccggtgagggtgaaccgttttccgggccacagtttcggggagttgctcgcgcaggcagcggtttctgcatcatgccggaagccgtctgccaggtagcgggcaaagtcctgaccgtgctgctcgtccttgaagcgtcccggatagtcgaagatttcatactgggttcgctgaccgttcaggtttgtggcatggtggctgaagtaaccgggccatccgggggttttaaaggtgtaatcctgattttccaccgaggaagggcgtacctgcgcccggtaatggaactcactgatgcattctgtggagacttcacgggtgttcgggttaaagggcagggagccgagggtggagaccccggcgacgtcatcgcagagcaccagtttctggtcggggccggtcgggtggaaccagtcaaagaagaaaatgccttcttcggcccacaggcgggtcaggaaggcgaggtcagtttcgccgtactggacgcagaactcccgtgccgggtgggcttcataaaaggaaggcacccagtcggtgacaccgttttcggtgagcagggtggtggaaatggcccggatatcctgctgctgaaagatgcgaaagttctgtcgcaggccacagcgccagagcggaggagaaatagtcaggctgtagttcatctgccagtggttgttttccccggtttccattccggtgatgatgccgtggagatagcgcagtggggtgttaccctgccagagggtcagcgtggcgtttttctcgaggaaactgacggcggtgaggccggagcggtcgctggcgatatcgacagtgagcaaaaagggtgtggagagatgctggtaaagggtgaagcgggcgacagcggttgccgccggcgttaa

SEQ ID NO: 388100 - DNA, 738 bp, Salmonella enterica
atgcttaatggtcaaccggatgttgggttgaaaccattggcaagaagtaagaatgattttggatcagacattactttaaatgtcattcagctaaaaagagcgtttttatctatacttgaacaagaaggtaaggtaggtagtaaggaagattgggtaaaagcaatttctaagataccggcatattcaaatcaaaaagaaattactcgttttattttactcgctgcagctcatgatagtgtagaggacaaagcaaatcctggcctgacggtagctggtaggaacggtattttacctctccttgatgtaaaaaattggacaggggatcagtctaaaacaattgagcatattgcacctcaagaaagaacttcagagggctggttagacgatatctatgaggaaccggaattaatagatcgattaggtaatttaacactgctaccaattagagaaaactcatctctaaaaaatggtagttgggcaaagaaaaaattattttataagattctgtccgcaatgactccggatgagcttgatccattacaggaacaaggtaaggcgcaggggataaatttagctcaatcaacaaatgatttattgactgaatcgaaatatttaccacttgttaaatctgttgctactgttgaaggtgattggacgaaagaacttatagagaaacgcagtgtaagaattgcagagttagcatggagtcgtattcatgcttggttagctgttgaataa

SEQ ID NO: 388101 - DNA, 258 bp, Salmonella enterica
atgttcaggtccacatttcagcatgtcgccaacacgaaacagaagcgcttatccccggtatacgcgttgagttttgtcgtattaatggcctccgcggacctaccgccgccaacgtttatctttcataattcgtcactcggcattttttcagaaaaatttagcgagcccgtatacctccgctgtctgtgctatgaggctttgcctgaaaggctgcagaatgttttcagtggcgaaaatctaaaggatttattttgctaa

SEQ ID NO: 388102 - DNA, 123 bp, Salmonella enterica
atgtacgatccaccgtttcttgaagcgctgatgattacggcgtcgtttttcgccatttttatcattatcgttgtgtctgtattgctccttgaaggggaagggactaagagcctatcccattag

SEQ ID NO: 388103 - DNA, 1665 bp, Salmonella enterica
atgtcactaagtgtggtaagagaacaaattcttaactttgtttctaaatcagccccttcggttatggcaattaaaggagagtggggggttggtaagacatttagttggaataaatttcttctggaagcaaagagtgaaaatatgatttcagcttcacgttattcttatgtttctcttttcggcatatcttcgttagatagattgaaatattctatttttgaaaatgcagtttcaaaagactccataggacatgatccaagtttagatagcttaagaaaaaatacattaggtatgcttgaaatattggggagaggttcttggagtaaattgaaagagctgccgtatataaaatctgccgctcctgccatagacgcatggtcatttatgtctgtgtcagattcattaatttgcatagatgatttagaacgtaaaggctcatcattagaactcaaagatgtattaggccttatttctttgttaaaagaacaaaagaaatgtaaggttatacttttgctcaatgatggtactaaagaagttgctgattatgaaaaatttaaagaaaaggtaattgatattgaattacatttttcacctacaccaaatgaatctgcacagatagcatatgataatagtaaagacttccataagccgttagcacaatatactatttcgttaggtatcaagaatattagaattttaaagaaaatagaacgaaatgtagaaaatgcatggcgtgcctttgaaggttgcgaaagtgaagttaaaatgcaatttttacatacggttgtattaatgaattgggcctatttttgctctaaatcagataaggatattcccactttagattttctggagtctatggaaagtatttactcaataggtaaaaaggatgctacagaagaagagaaaaaatggaagagtattctactgagctataattttaccagagttgatgaattagataggaaaattgcaaagctagtcaggaatggatatatagatctgacagagcttagtgagtcaataaagattgtaaataaacaggttttagataataaaaaatcaaactcatttagaagtgcatgggatttgttccataatagttttgatgataatgtagaagaagttgtttctcatttttataagtgctttacagatagtgtaactcaagtatctcctaatgatcttgatagccttgtcggtgtcttccgtgaactaggcgaggatacaaaggcatctgagatgattacgtattatattcaagaaagacgaagtgaaattgagttgtttgatgtagataatttttatctttttagaccaatcaaagatgaagaaattattgagaagttcaaaggtgtatatctaactgattcaccaaagcgcactttaggagaggtcttggatgtgctcagtgggcaaaatggctggaatgatgatgatatagaagtattaagcagtgccactgaagatgattattatcattattttaaaagtttgcatggaaatcatttaacatcccacgttgctacttgtatgaaatttggccgcattagtaatgctaacgagcaaacgaggtcggtttctgtaaaagctaaggaagctttaatgaggatttctggagagagtaaactgaatgagttaagaatacataaattcaacttgtag

SEQ ID NO: 388104 - DNA, 378 bp, Salmonella enterica
atgaaaattttattgtcgattaaaccagagtttgctgaatccattttaaatggatataaaaaattcgaattcagaaagacaatttttcggaataaagaagcccgtgtggttgttatttatgcgacaatgcctgttggaaaggtaattggtgagtttgaaattgatggggttttatcatctcagcccgatgaattatgggatatgacaaaaaagtatgcaggtattacgcgagatttctttgatgaatatttttccgaaagagacaggggattcgcaatagcagtaaaaaaccctcagcgctatgatactccagtttcgcttaatgaattgatacctggtgctgtacctcctcagtcctttaggtatatacgtggataa

SEQ ID NO: 388105 - DNA, 1056 bp, Salmonella enterica
atgtctcttagttatgtcgagtttgggaaagttgacctctctgacgttttttttgactcgcttaaaaatgactacccagcttttgaaaactggttcctaaaaaaaagaaatgagaaagcatacgtatcttatgacgactatggaaaaatagatggttttttatatctcaaaattgaaaatgaagagttaaatgatatgaccccatctttccctatgaaaaaacgacttaaatgtgggacatttaaaatagatgctcgtggaacgaaaatgggggagcgatttgtaaggaaaatatttgactttgcaatgcctcatgatattcaggaagtgtatgttactatttttgataagcatcagggattgatcggcttacttgaacgctatggtttcaaattgtgttcaagaaaaaaccttgagacagaaaacggttgtgaaggagtctattttaagaattttaactggaagtcgtcatcagcatcagcttatgataattatcctatgataaaaatgaatgaaagaaattttttattagccattaaaccagagtttcattcaaagcttttccctgagtcgattttaagaaatgaaaatgattctattttagaagatgttacctatactaatagtattcataagatatatattggtgcaatgaaaggtatggagtttcttcagcctggagataatatacttatttatcgaacgtcagatgggcttggtccagctaaatatcggtcggtggctacttctgtttgtacattacaggagtataaaaacattcgagaatttccctcatataatgaatttaagtcttattgtggaggcgctagtattttttctgatgaagaattacaagcttattataggaaaggttatcctccacatgtaattaagttgacttacaattttcctttgcgaaaaagaataattagagatgaattattgaatgttttaggttatactccaagttactcaggattctttacgttaagtgatgtccactttaaagcagttttaagtgcgggaaaggtaaatgaaaattttattgtcgattaa

SEQ ID NO: 388106 - DNA, 909 bp, Salmonella enterica
atgaaagcgtggtcaacagggtcgttgcctctgcttcttctgctatttagtactgcggtgtttgccggagaatccccggagcaggcgattacccgactgtatcagccgctggtggaaaatagcgacaaaatattgtcaggtggatttatcgtcgatttacggacgaatgccaatgtgacaacgggaggtataacgccctggctgagcaataatcttctttgccgctgtcaggacgagatgtttgtctccgccgaattgattgataccacgccgctgaatgccggacgtattcatgctctggtacaactgacgcttaataaagagaacgtcggcgctcatcgcttgttagggctaacgctggttcgcgatcgcgacagcgaactctggttagtggaagataccgacgacggaagcgaactccccaaaagtctgcgcagtgaaatccgtgaagatacgaggataaaaagtacggcgacaagagctgaaccggggagagattcattctcctggccgatatctatggcggccttgctggccaatccagaaaaataccatctgcaaaaaatagtggtcatcggcgtcggaaatatcgaatttgaaggtaacgcgctattccttgataaagacgcttggttgaataacgttgacggcaacagcctgtggctggatatcggctttcctaacccggtcattaccctcgccaaagcgcgtcagcttaacggcgattatgtgatgatcgcgggaacgttcgatatggacatgaacggccatttcggcgcgtggcccggcggcattaccgatatcacacgctacgagcgcgtagcaccgcgggcggaaaatgaacgtaaaaggcagcaggatattaaagaactcgaggccgaaatggctaaacaaaagagtaaaaaataa

SEQ ID NO: 388107 - DNA, 1053 bp, Salmonella enterica
atgaaacatatcctcctcttgctcagtttttttttgacgattcccgcgctggcgcgaacgccgccgttatcgccagagcagacggtcaggcagatttaccatagctatgaaatagaatctgattccctctattttggtgatacaacggaaaaatcgcttatttccacgcggatgaaaaacgtcattctcctgaacgatcggttgaccttaccgggcgatattggctggctggactccgatccgctttgtgactgccaggaatatgaccacctggtgttggaaaatataaccattcaccagacggatgtctctcatgctgacgccaccgtacagtttcgccctttcaaagactctccggaagccatcacacaaacgctgaaactgatcgccgaaggcgaccgctggcttattgacgatattatcagcccgcaaggcagtctctggcaggcaattaatagcgaaaatcagaaaacccttgcgtcgctgcgatcgctgcaaagagagcgcccgcaacattttgtccgtgaacttttcaaccgtctggatgattatagctggccgtggacatgggttgtttccgcacagtatcgccaggcggtgaatgattattctcagacagcatataaaaataatgatattcctgcatttggccgccttagccattttgcctggccgtggcgctggacgacatcatctgcgtatcgtaacgcctttcttgccgacgcccctataaccatcgaacctgataacgatcaggatacggaaatggaaaccgataagttatatttctatgataatccgatattttttggcaaagaatcgcaatttgccaggttgaatagcattcaggtgattgcagaaaataacgatcgcgcacgtatccatgtccgttttacgctgaccgattcgtcaacgaaagtgcaggatttattgcttcaccgcacgcagggccaatgggagattgaagactttatccgcccggatggcggaagcctgctaaaagcaatgcaacagaccacccgccgacgcttatctactatttcacccaaataa

SEQ ID NO: 388108 - DNA, 234 bp, Salmonella enterica
gtgggaaccattattctggcgaccagtctgttaagcggttgcgtgaatgaagaaagagttaatcatttgtcctctgatattcagactctgaatgccaaaatagacagactccagcgggatatcaacgccctgcgcccggaggtttatgcggccaaagccgaggccagtcgtgcgaacacgcgtcttgatgcgaaggatttcttcgattgcctgcgcctgtattcagattattaa

SEQ ID NO: 388109 - DNA, 1707 bp, Salmonella enterica
atgaccgttgcagataccgtattgattaacggcaaagtggcgacagtcgatcgtcattttcgtttcacccgcgccatcgcggtgaaaaacggctggatcatcaacgtcggcgaagatgaagagataaaaacacatatcggccccgacacgcagattattgatctgcaaggcaagctgattctgcccgccgcccacgatgcccatgtgcacattagctggttggcggcgagctggaaatgcgttaattgcagcacggcacgcacgctggaggcgcttttagcgctgctgcgcgagcgagcggcaacaacgcctcccggccagtggatccacgcctgcggcttcaaccccgccatcatcgacagccgccgcccgctgacgcgtcatgacatcgacagcgcgacgcccaaccaccctgcctttctggccctctgggatggtcactcctgcctcgtcaacagcaacgcgctggagatcgtcggcatcacccgcgagacgcaagatcccatcggcgggtacattggtaaaacgccagacggcgaaccggacggcaacttcctggatatcccggcgctgcaattgattacacaagccatgccgcgcccgacggtggaagaactaaaagaaaacattatcgcggcccagcgctttatgaaccgtgaaggctatgccagctatacggaaggcgctatggggccgggcgagacgggcgccgctggcgtatccggcattgccgcttaccgccagctactggaagaaaaaaagctcacggcgcgcgtctctctcgccttttatgccgccgataaaggcgttcagtcttatgagattttaaaacacacgctggacgccagcgggctaccggaattccccgataaaaactggctggactgccacagcgtgaagatattctgcgacggcgtgccgatgtcgcacacggcgtggatgaatcaggattacgccgacaggccgggttgggctggtcgttcggtattttgcggcccaacggccagcgaagaagaacaaattcaggaatttcataaaatggccctgctggcgcatcagcgcggctaccagttagccgttcacgcggtcggcgataaagcggtaaaggtcaccatcgacggcttcattaacgccattcaaacctgccctggcccgcagcgccgccactatgtgctgcatggttcaatgggggatcgcgaagatttcgtcaaggcggcgaaatacggcattatcttgtccgaacaaccctcccccagcggatcggcatacgactacgagcgccgggcgcaggtctgcggaatcaaaggcgaaatcgggaaggggctgaaagatatcatcgaccttggcgtcacggtggcgggcggctccgacggtattatggatctcgtcaactggcggcaaatggtgcaggcggcggtcacgcgcaaatcggcgtccagcggcaagattatccgcccagagctggcgataagcgtggcggacggcgtgcgaatgtacactatcaatgcggcgtatcaggagtttcaggaacaggttcgcggctctatcgaagtgggaaaagtagccgattttcaggtactggacagggacattttctcggtgccgcatgaggatatcggcaatagccaggtactgctgacgatggttgacggcaacatcgtctggcaatgccaggaacaggtattgcagataaggaaaggcggatga

SEQ ID NO: 388110 - DNA, 1146 bp, Salmonella enterica
atgaaaaccgggcggcggtgttttttcttgttaatactttgcgcttttagccagggcgcgcagtgtagtgaaacgcttgcgcaggcgattatgcgtatttacggctccccacaggatcggatgaattatgacatctggctgcgcggtgagatgttagagaaccaccgtaccgcatccgtcgccagcaaaccactttttgacacgccggctaatgcgctgtgtttttgccataacccaaacgatatctccgttgaaatacgtcaggcaaactcctttgccagtgataaattcgctgaggcggacattaccctgaaagaaaaaaatcactcgcgctggctaacgcttcagttgcataaaccgcacgatcgctggctgattgccgatgttgataatatcgatgatccgctgccgtcactggggcgacagcttcacaatgacacacaattaaaattattaatcgccccgcaactggcaatcaataatcaaaaaattgcagatgttactattgcagaattacttgctcatccagacgaataccatagcagaaaagttcgcattcgtggtctggtcctcattggctttgagcgccacgctatttatggcgatccacagcaagatggattatggctggaaaattttctcgtgccctataccgtaagccgtaaccacacagaggcgtcgatggtggttgaaggcatctttgatatgcgtgtatccggacatttaagtcattatcctggtggaataacaaatattacccgttatgagaaagtgcagcccacaagggcgagtgcggttacagatatttcattcaccgatcttcttcagcatccggatcattatcatcagaaaaaaatacgtttacgcggatacgttattctcggttttgaacatgcggcgatttatgccaataaagacgcaacgcagagagaaaatggattttggttgggaaatttcgtcactaatattcctctcgacctccagaaggacggaggatacgaggtgctgattgaaggcacttttaacaaagacgggcatggtcatatggggctcagcgcaggcgagataaccgacatatctcactacgagacaatcacgctcccagaaaacgtaatccagattaaaaaccagggagcaaaggaatga

SEQ ID NO: 388111 - DNA, 129 bp, Salmonella enterica
atgccaaaagacgccagccacgtcgatgcaaccgcgcgcgtgcagattcaactcacgcctggcgaaaacaagacagctacgttgttcaggcaggagattgtgctacagggtattgaggggcacggatga

SEQ ID NO: 388112 - DNA, 195 bp, Salmonella enterica
atgggtatgattattataccttgtctttttgtcgttgctctaatggctattttgataatcatactggccgttaaagcatgtaattctgaaaaaagtgaaaacagactatcgttttgtgcaggaatcattttagctggcatcattgctgcggttcctggatggtggctatatgagctttttagctacgggccgtaa

SEQ ID NO: 388113 - DNA, 846 bp, Salmonella enterica
atgatgaaaataatacggactttatttttgctgctgattgccgtttatggcagttcggtagtggctaaacccatgctgaaagcgacgttttcaagtaccacgctctattacggcataggtccgagtaccttcgatcgctcgattctgctgaatgtgatggtggatacgcatgacggagtatactatggcacctggcagctaggaggggtttttaaaaatcgtccggtacccttacaatcctggtcggggccagagcccgcgccgacggttgtgttacgcgatttcgataacagcgttgcgcgctccagttgccagaatatgccagcgagttggcacgattgtggctcttttaccgtggatattacggtacaaagcgatgactatggttgcccctggctggcaacgagtcgtgtcactgctgctgatggtatctctggcgaaacgtattccccgccggatacgcgcagttcagtttgcccgaaagttcccgttgatacttttgatatctcctgggatgcgaacgtttcgaaacagaaaacaaccctcatgcttgatgccaccggtggcacggtgaatcgcacgttacatacctatttgatggagggggggaaactttgcgatggcagcaaatttgacgaccgtggcgcttattgccgttttgtctcatcgggtattacgctcaatgtgctgggctgcgaccagtcgagcgtcacgaccagcgccgttgatcatccgataaccgatgttgagcttcatgacattaatgtggcggtgaacacccgcaacattggctccgggcagttcacgtcgacctgtagcttccagtatattattgatgagctttag

SEQ ID NO: 388114 - DNA, 159 bp, Salmonella enterica
atgggtttctgcttcggcagacaactgttagcgaaaaaacccgcttcggcgggtttttttatgggcaatgcatttatctgtcacgatgaaatgcggattgttgtctctttttccccaattccagaatcgactcaccacaaaggccacaaaatctggtaa

SEQ ID NO: 388115 - DNA, 660 bp, Salmonella enterica
atgagctttatgttttttgtcagttgccttgccatcgcttttgccctgggaatcgttgttgcacggaaattaatgcctcgtactggctataagttgccaccgactgcgccagcgcaaccagcgacgtatacgccgaaaccttatgttccagtaaaaaaatatcgcgattcccgttggcaagagcgtgacgaattatttcagggaatggttgatgaaggcgtctggttagaaggaaaggagtggctcatcacccgtagtgaaaaaatctattttgataatcttgaaaaatggtttgggcaatattgtcatattcattgccaggtttctttaggtcgtttggttaactttcctgaacaacctgggtttagtgaagaagaacgaaaacgtttttttatgatttataataatatggcgatggattatgttctggtatcaaaaaagaacaataaaattgtctgcgtcattgagttggatgatccgagtcatgagcgagcagaccgtataacgcgcgatcgttggttaaacattattatgtcgattgcgcaaataccttttgtccgggcctctgtaacgaagatagatgaagaaccgccggtctggcagacccgtgatgctgttcgtccatttgtatcggcgacaaaaagcgaaaaagtacactga

SEQ ID NO: 388116 - DNA, 195 bp, Salmonella enterica
gtgaagttaaatcctgagcagacgtggaatgagctgcacctgttgatggggaatgtggagccggtgctgctgtgctgggaaaagcctggggagttctgccaccggcaactggtctcacggtggttccggcgtgagctggggatttcaattgaagagtacgatcctcgggccacgccgcagtttgatttgttctga

SEQ ID NO: 388117 - DNA, 945 bp, Salmonella enterica
atgaacataccatcatcattatataaatatactacgtttgacagtgccactcgcattatacagaatcagagtttcagatggtcatctatcctcgactttaacgatccattcgagtcaagatttcacctcgatgaaaaaaatgaaaacaatgcaataagattaatggctatagcttcatcaatcacttgcaaactgctaacagtaaacgacacaaacactatatatgaacaatttaaagaaaaaagaccggataaatatcaagaactagtgaaagcaaataacatcataaacacttacattaaattattcattaaaaataagacagtcgataattatttaaatatagagaaagctataaggcgtagcatgtcaatctcagacataatggagaaaaccatatatggatataaaggatttatcgatgcaactcataaaataatcaaagaaaaactcggtgttttatgtttaagtaaaataccgaacaaccatttaatgtggtctcattacgcacaaaaccatacaggcattatgttcgaaatcgatatagaaaaactaaaagaatgcactgtaatcgctaacacactaaaaaaaataaagtacacagaacaattccctgagataacctttgaaatcattaagggcatgaatgaggagttattccccgaagaagccaaaaagctttttgaagcattgcttttgacaaagcaagaaatttggaattatgaaaatgaatacagatcaataataccaataaaaaatcttgctgaaaacggactattctctctcccgaaagaatgcttcaaatcagttacacttggctgcgctatgcaggaacaggataggaataaaatattatgtatgattcataatcatttacccgaaactagtatattcgaaaataaaataaacaaaagaaattacagtttagaccatcttaaagtctga

SEQ ID NO: 388118 - DNA, 216 bp, Salmonella enterica
atgaaaaaaaccgtattagctgtactcgcagcggtttcgctgtgcgcgttatcggcgtgctcgacttacaccgaagcaactggccttaacgggacgacagtgaagcatgttgccgtggcaccgggaaccagtgcggtcatatcgaacggtgggtatattaattcaggtggtggagtgtgtgagcagcagacgaccagcacaactactgcccagtaa

SEQ ID NO: 388119 - DNA, 300 bp, Salmonella enterica
atgaaacttcctgaacttaactggccctgggccgcatacttctggatcggctgtatctggcttggctctattgcgcattcagcgtttcgtgtgctggtgggtgatgatgtcactgtcattggtgtcattctgcaactgatcgtcgcgtcgttcgccgggctgctggcaatcctcattgccatccgctttaactggagcgctgaaacagcggggagtgtctgttcaatcgctggctgggccggtggccggttcgttcaggttgttgagcacaaggtaatgacgatgatcgcgaaaaagtga

SEQ ID NO: 388120 - DNA, 312 bp, Salmonella enterica
atgcatgtcatatcaaaagagccttttgatgaagcggcaagacgatatcccaatgactcgttagccataaaagccctgtatcgcttagtccgcgaaaaagatttctcttctccggcagagctacgaacggtcataccgagcctcgataactttaagtaccgtaacaagtggtgggtactggatgtcggaggcaacaacctgagggtgatcgcttacatcaactttataaacaaacgcttttatgtgaaacacatcgccactcacgctgaatatgacaagctgacccgctattacagggagaataaagaatga

SEQ ID NO: 388121 - DNA, 420 bp, Salmonella enterica
atgattgccaacaccgcaaaagctatcgaagccacaaaggcgctggtcgccgccgttcctttcctgggtggcagcgcgtcagagaaagattatcgtgatgcgctggcgctggttgattatcttatcgaaaatgacgatgaaaacccgctgattgacttcctggcaagcaaaattgccgagtacgaagataacagcaagcagttcgccgagttcaacaaatctgttgctgaaatgccggttggcgttgccctgctgcgcacgctaattgaccagtacaaactctcatactcagatcttaaagaagaaatcggttccaaatcactggtaagtcagatcctgtccggacagcgctcgttaacgattacgcacatcaaagcgctttcagcacgatttggcgtgaaacctgagtggttcttataa

SEQ ID NO: 388122 - DNA, 159 bp, Salmonella enterica
atgactgagctcgtaaaagagggggataccggcttccatttgcaggagccaatgaccccggagaccattgccagggacattaataaagcgctggcatcccctgatttaaacaatattgccttacatggacaacgttgtgtggaagagaaattcccgtga

SEQ ID NO: 388123 - DNA, 477 bp, Salmonella enterica
atgcttaagaatatcggttttatttcggctctggcgttatatggtgttgttggttgtgttacagccgaacctggcaacattccgttagatggccttaacactattagtttcaacgttggtgaaattgctgatggagagattgctgatttgagacactccacttgcactcttcgtctggtcaataataagaaggaggattcctataactatattgaaggggcaatttgccctgttagtggagaagagtgtacatactctgccatcatgaagctgaatgggaatataacaatattgaaacagatatcatcagatgaaaataactcagtctataaaaataatgatttatctctttccataacacagactccgatgacagaggcaaatgatgatgagggaagcgacgttaaagctactattgtcctcaaaacaaaacacggtgaaaagatatttaatatgactggatactgtggggtttaa

SEQ ID NO: 388124 - DNA, 360 bp, Salmonella enterica
atggcggcattactggcaacgctggtgttactgtttgcgtttcagggcgaagccattctgcaacagccgctggtcattgccctgctggcggtgccgattctgattcaggtgctgtttaactcggcactggcctatgggttgaatcgactggtgggcgaaaagcacaatattgcctgtccatccagcctgatcggcgcatcgaacttctttgaactggctgtcgcagcggcaatcagcctgtttggttttcattccggtgcggcgctggcgaccgtggttggggtgctcattgaggtgccggtgatgctgctggttgtgcgggtggtgaatcgttcgaaagggtggtatgagagagcttag

SEQ ID NO: 388125 - DNA, 492 bp, Salmonella enterica
atggatcgccaggcattcccgactaaaattatccactacagtcagcgcccaaaaacgccgcccgttaaacagattatctggcacaaaatccatactccagcactgatcgacatgcgtcaggaccgggcgctgctgacggcgtgctacactgacatgtctgcgggggcgttttctgcgcaggttcaggccttccggacaataaatccggtgggttttcttgtggttaacaggccatccctcccggcgcaactgaatatggatacgcgggcaaccgtagcgtatccggggttccgctatttcccggatacgcagggttatcgcccgatcgtcacgctggctctgccagtggtaaacgattctgctctgcatcagcaacccgcatccccgccggacgctgatacggtaagcctccagcaaaaatgtcaccacgacccgctactctctgaccctaaaaggattcttcgttattgctatcaaccaaatcagttatga

SEQ ID NO: 388126 - DNA, 1482 bp, Salmonella enterica
  misc_feature (29)..(38): n is a, c, g, or t
  misc_feature (740)..(749): n is a, c, g, or t
ttgtggaatcgctttgcttgcttttttannnnnnnnnngcctattgatgcgtcagattacaaaacgtacatttttcccatcctgttcttcaaacgcatttgtgatgtatatgacgaagaatttgccgatgcgatggagagcgttggggatgcagagcttgctaaagggaagatgtttcaccgtattcagataccagagaattgtcactggcgtgatgtattcgctgagaccaaagacattggtcaggccttaaaagactctttccgtggtatagagctggcaaaccctaaactgcatggcatttttggcgatgccagttggaccaataaagaacgcctttctgatgagttactggctacgttacttaatcacttcaacaaagtgaatctcggcgttgccagtgtccgtgatgatgatatggggcgcgcatacgagtacctgatcaaacgttttgctgataaagctaacaagaaagctggtgagttctacaccccacgtactattgttcgcttgatggttaacattcttgatccaaaagctggtgagagtgtctacgatcccgcctgtggtactggtggtatgctgcttgaaactatccaccatgtaaaagaaaacggcggtgatccgcgcttgctaaaaattaaaggtcaggaaaaaaacctgactaccgaagccatcgcgcgaatgaacctgttcctgcacggtcaggaggattttgatattgttcgcggggatacgcnnnnnnnnnngcgtgaacctaagtttttacaaagcgatcgtttagaaaccttcgactgcgtggttgccaacccaccatttagcttgaaggaatggggatacgatctgtggtcgaacgatccctatggccgtaagcaatatggtctggcgcctaaaacaaatggtgattttgcctgggtgcagcatatgtttgcttcacttaacgacaatggacgtatggctgtcgtgttacctcatggtgtgctgtttcgtggcggcgcagagggagtaatacgaaccaaattgctgaaagaaaatcgcatcgtagcgattattggtgtcgcttccaacctgttctatgggactgggattcctgcgtgtattttggtgctgcgcaaatcacgcccggcaacgcataaagatcatgtattgattatcaatgctgaagaaatctataccaaggggcgtgcgcagaatacactgtccaacaagcaggctgatgacatataccaaatctatcatgaccaagcgcaacaggggccggatgcaaaagaaatcgaaggagttgcacgctgggtacctctgaaggagattgaagaaaatgacttcaatctaaatattgctcgttatgtgcaaaagccactcgaagaagaaaccatcactgtggaagaggcgctcaaagattttcaacggaagttggctgaactggaaaaagcagaagaggagctggaaaccctgcttatcaaagaagggttcgaggtatga

SEQ ID NO: 388127 - DNA, 327 bp, Salmonella enterica
  misc_feature (304)..(313): n is a, c, g, or t
atgagtaataaaaagctggaagagctgctctggggggccgccgaatttcttcgtggccaaattgacgcatcagactacaagcagtatatcttcccgttgctgttttacaaacgcctgtcagatgtctatctggaagaatataatgaggcgatggagctccatgaaggcgatgccgaatatgccgccatgccgatgtttcaccgttttaacattccctctgaggcagcttgggaaaaggtccgcaataccagtaaaaacattggcgaagcgatccagaatgcgcttcgactaattgaagtcaatnnnnnnnnnnggcgtcttcggtga

SEQ ID NO: 388128 - DNA, 1200 bp, Salmonella enterica
  misc_feature (12)..(21): n is a, c, g, or t
  misc_feature (997)..(1006): n is a, c, g, or t
ttgaagtcaatnnnnnnnnnnggcgtcttcggtgatgcgcagtggaccaataaagagcgcctgcccgatcatctgctggctgatctgattgaacatttcagtaaaattccgctcggtattaaatctgtcgcccaggatgatcttggtgaagcctacgaatacctgattaaaaagttcgctgatgattccggtcacacggctgcagagttctacaccaaccgaacagtcgtgcatttaatgacgcgcattatgggattaaaaccgggtgaaaccgcctatgatccgacgtgcggcactggcgggatgttgctaaatgcagtgatggatctccgtgcaagaggtgaagagtggcgctcagtgcatctttatggtcaggaggtgaacctgttgacctccgctatcgcccgtatgaatatgttcctgcacgatatcgaagaatttgatgtgctgcgcggtgatactttggctgagccaaagtttattgaaaacgatcggctcaagcagtttgatgtgatttttgccaacccgccatactccataaaaaaatggaatcgtgacaagtttgctgccgatccatatggtcgtaatctttatggtgtaccaccgcagggctgcgctgattatgctttttatacccatataatcaaaagtttaaaaccagatactggtcgcgccgccatgctctggccacatggcgtgctgttccgtgattcagagcaaaccattcgtaaacaggtggttgaatcggacatcattgaagcggtgattgggttaggcccgaatttgttctacaactctccgatggagtcttgcgtggtagtgcttaactgcaataaacctgctgagcgtaaaaacaaggtgttatttattaatggggtggaacacgttactcgtgagcgcgcccatagtcgcttatccaaagatgatttggctgtgttatgcgaggcttattttagccctgaaaaccaaaataatatcactgcactggtggatatcnnnnnnnnnnctattaaagggaatctctacaacctgtcgatcccgctgtatgtgcaagcgcaacaaaacggtaaagtacataatattgaacatgcgattgaagcgtggaaagtaagccgtatacagttgaaaaaacaaactaataaattattccaaagccttgcggagcttgggtataatgttcaaagcaaggtggggcagtaa

SEQ ID NO: 388129 - DNA, 1149 bp, Salmonella enterica
atgacggaacagcaattaccggaaggctggcaaatggtgaagtttggcgatattgcgaaacatatctctaaacgtgtagaaccgagcgagacagaccttaaaatctatgttggcttggaacacttagatcctgatagtctgaagattaagcgacatggcgtaccggcggatgttgaagggcaaaagctgttggtaaagaaagggcagatcatttttggcaagcgtcgtgcgtatcaacgtaaggtagctgtggctgattgggattgtatctgctcagcgcacgcaatggttcttgaagaaaattctaaaatggttattcccgggtttcttcctttctttatgcaatccgatatatttatgaatcgagctgtagctatatcggaagggtcattatcaccaacgataaagtggaaagttttagccgaacaagttttcctattcccgtcaaaaaatcgacagctgaaaatgttgccaatattatcatcatgtaatttggcaagtttaaaaaacgatgcagccttagaatcattactcttttttaggaaggttatttttagggaacatatatctaagctaataatccgtcataatgtttctagagaaaaactaggtgatgtttgtcgaatcagtacagggaagacgcctcctcctaatgaacgtgaatactgggagggggatattccgtttataactccgggtgatattagctctgattcattatatattaatagcggcgagcgtaatattactcataaagggctagaaaaaactccatctgtgcctaaaggatcggttttactgacttgtataggttcaacaataggaaaagcagcaattgcatcgtgtgatttatctactaaccagcagataaattcattaatttgtagtgaaaaaatattgccagaataccttattgtttggattcagaataatttggaagttattaaaaaatacacaggcattcaggccgtccctattattaataaatccacgttagcaaatattgatgtcgatgttccttttctcgaagaacagttaaagcttgtgatggtagttagagaaatggatagcttgagacataaattgaaaaaaaaaggtgtaattcttacaaatttaacaaaatctctctttgttcaggatagtgattaa

SEQ ID NO: 388130 - DNA, 3063 bp, Salmonella enterica
atgtttaacgaacaaaccgtcacagaaaatggaattatcgatcgcttaaaagggttgagtggggtcaagtggtcttactgccacggtgaaaaactgcctaaaaaagcgcaggatatcttcgttgatgagtggctaaaagacgcgctttgttcgttaaaccctgatatcggcagacagcctgactatgccgatgaggtcatttacaaacttcggggagtggttttagaagccagacataccggtttagtaaaggccaatgaaaacttccaggaatggttgatggcagacaaaaccttgccctttggcgaaaatggcgaccatatcaccatcaatctgattgattttgagaacatagagaacaaccatttcgtggtggcacagcaggttcactatatcgcggccactgaagtctattttgatattgtcctttatgtgaacggtataccactagttgtaggcgaagttaaaaccgcaacacgtcctagcgtaacctggcaagacggtgccgccgactttatgggcggcaaaaagtactactggaaaaatgttgaatctttctttgtacctaacttgctgtgttttgccagcgaaggtaaaacctttgcctatggtgccattaatgcccgagttaaagattggggaccatggcataatactgagcttcgtgatgagattctgccgggcctggcatcggtactcaacagctgcgagggtttattaaatccgcagaccttattgcaactactggaatcttttgcattattttcaaccgtcaaaacaggcaaaaatactccacctaaacgcgttaaaatcctgccgcgttatccgcaatttgaagcagcaaaacaaatcgttgagcgtgttcgcagaggttatccaaaaaaaggtctgatttggcatttccagggatcgggtaaatccttgttgatgctttacgccgctaaaatgctgcgtgccgataatgcgttaaaaaacccgacggtacttatcgttgtggaccggcgagatctggacagccaaattaatgaaacttttggtggggccgacgttaagaatctgattaaagtgcaaagctgcaaaaagttgggtgaatacattgagcaagacagccgtggcattttaatcaccaccatctttaaatttaaagatatcgaaattgacgatagcaaccctaatggcctgaacaaccgtgacaacatcattgtgttggttgatgaagcccaccgtacccaggaaggtgggttaggtgagaaaatgcgttgggcgttgcctaatgcgcacttctatggcctgactggcacaccgatttctggcattgatcgtaatacattcaagttgttcggtgctgaagaagatcctggtcgctatatgagccgctatagctataagcagtcgatccgtgacggagcgactaacccagtgaagttcgaacctcggttggctgaactccgagtggatcgtgatgctatcaacgaagagttcgagcaactggccaccgaaaacaacctggatgaagaagaaaaagcagcattgtccagacgcgctggcaagctggctattatgctgaaatcccccagacgcatggctgcggtgagtaatgatattgttgagcattttaccagccatgttatgccgaaaaagatgaaaggcatggttgtggtatacgatcgtgaagcctgtgtgcagatgtattatttgctcggtgaaaagctcggttttgatgcggttgaagtggttatgaacgttgaccaggctccggttaaagttgaagagggtggcaaaaaagataagcttaataaggactggctcaaatggcatgacgaattggagctacctattaaacaagccgatttcgaacgctggcagcacattgatgcggaagagcaagtgcaaaaggatctgattgaatgctttaaagatcctgtgcatccgttacagcttatcatcgttaccgccaagctgcttacgggctttgatgcgccaatttgctattgcatgtacctcgataagcctctacgcgatcatactcttcttcaggccatgtgccgaaccaaccggttgtacgaaaccgatgatgtgcgcaaggacatgggattaattgtcgactacctcggcgttttcgaaaatctgcgtactgctctggcctataaccctgaagaaattgaaggggttgtagaggggatcgaggcatttaaagagctattgccgttacaactgaataaatgtctggccttcttccctggtatagatcgttctatagaaggttttgaaggcattatggctgcgcaggaatgcctgccaaccaacgagaaacgcgatgaattcgctgccagctttggtgtgttatccaagttatggtcagctatcaacccagatccttttttgactccttatcgtcaggactataaatggctagcgcaaatttatgaatcggtgcgtccggtggggcagacaggtgcgcttgtttgggcagcccttggccccgaaacaattaagatgatccatgagcatactgatatcaatcgtattcgcgatgatattgacgagttgatcatggatgagcacgcaatttttaccctgacggttaaagaacaggaacaacgcgcaaaacgcctggagattgatcttatggggcgtttacgcggtagccatgatcctaaatttgtggcattgggtgagcgtctggaaaaactgcgtcaggactatgaagctggtgttatcaaggccatcgactggttgaaaggcctgttggatgctgcgaaagataccgtacaagccgagcgcgaaacgggcgagcgcccagtaactgaagctgataataaacaggctttgaccaaacttttcctcgaaacacgcccagaaactacccctaagttaatcggcgacgttgttgagcaaatcgataaaatcgtcaaagcaactcgctttgatggctggcaaagttcccacagcggtccacgcgaaattcaaaaggcgcttttgctcactctggctcaatttggattaggtaaagataaagagttattccagaaggcttacgggtatatcgaggagcattactga

SEQ ID NO: 388131 - DNA, 363 bp, Salmonella enterica
atggcattaaccgatccgaaaatccgcgcattaaaatccctcgataaaccctacaaagtcatcgattccggtgggctgtatatccttgtcaaacccggcggcgcaaaacactggtatcttcgttatcgtttcggcggtaaagaaacccgtattgcctttggcgtatatcctgctgtgacgcttgctgctgcccgcgagaagcgcgaagaagtccgccggatgctggctgaaaacgtgcaccccgccttacagcgcgtggcggagaaagtcgccgccgatccttcccggacactgcaacatatcgccagtgaactgcaccagaatatattacccggtcatatccattgtcgggtaataatataa

SEQ ID NO: 388132 - DNA, 270 bp, Salmonella enterica
atgaagcaggcgggcggcgcgcacaaaacggtcagcgatcgcatggcgctggcggagcgtttttgcaaacggctggtgacagaactgaacgtgcagatccgcaatgtcaggcacctgaacgcgcggcatatcgaggattacatccgccaccgactggcgcagggattcggtcaaaaagaggcgctggccatggtggcgatggagctggggcacggtgacggacgcgggcggtatgtggcgcaggtgtacaggttacgtggggagggctga

SEQ ID NO: 388133 - DNA, 486 bp, Salmonella enterica
atgtcaacaggattacgtttcacgctggaggtggatggcttaccgcccgatgtgtttgctgtggtttccttccatctgagtcagtcttattcctcactgtttactctcgatatctcactggttagccagcaactgcacagcattgagttctctcagatcctcgaaaaaatggcgtacctgaaaatctggcagggtaatgagacagagggatccgactggtttgttcctgatggattatggggggttaatttcatggatgcctgtcgaaatcatgataaatgctatgcgactaaaggcagtgataaaataacttgtgatgttaatttaggcaatgacattgcgttagcatgtggtgtactgaaaagtgaagatccacgatataatgatatttatactcaatgtttaattacttctgctgcttatcgggtcgcagtggggaccttcggtaaaggtgcttataatgatgcacaagctggtgccgaataa

SEQ ID NO: 388134 - DNA, 672 bp, Salmonella enterica
atgtccttgagattagtggttttatttatattggcatatattatgactgtatgtgatttatatggagatgataaccaacatgactttcgattaggcttaatagcgggttctattgcatctgtagatgagttaaaggaacgatggtttttctgtgagaaatgcttgaatgatttccaatgtaaatttgattatgtagaacaatgtaagtcagtaacaattccggaaagaaacaacgcgttaagtttggcggtaacacatgctaatactgaagcagtttattttcttgtaaatcaagcaaaaacagatgtaaatggaattactggcagatatcacgagacaccgttaatgatagcagcatattacggtactaaaaagcatcaggagatagccagtttcctcatttctcgtggagcaaatgtgaatgcaatagatttgacaaaaatgactatacttcaaacagctatatggaaaaataatatggattttgtcaagatgcttcttgaaaatggagcagacccatccttaacatataatggtaaaaaggaaggggcagcatgtatgactgcaatcaggagaaaacgttttgaatttatctcaattatcccaggatgttgctctttagttaaagataattcagaactaatacctaataacgtgtatgtatgtcagtaa

SEQ ID NO: 388135 - DNA, 285 bp, Salmonella enterica
atgaagttaaatataaataggtcgtaccgttacgataaagacacgctgcaactgacagaggtgataaatccacaggacgaatcttaccgcgatctccaggataacaaccaggtggaaaacgtcatcaggtcggtggcggtgaaccggaaaaactggttgtttgccggttcctcagaggtcagccagcgcgcggcggccatcatgagcttgttggtgacggcgcggatgaccggtattaacccgcaccagttgctgcacaatgtgctgatgcgcctgccacagtag

SEQ ID NO: 388136 - DNA, 387 bp, Salmonella enterica
ttgatcacctccgagaacctggacgagagcttgcaggagacgcagggctggctggcgaggctggcggcgcagcatatcacgccggacacgatgcggcgcgggcggctgacggagcaggtggaccagctatgggcgatgtggcagccggggccgtggtgggcgcagtggctgcgcgggttacgacgtacatcgcaacgcagccgggaactgaccgggctgtcggatgaagcaccggtagtggaactgccgggcgtgcgttatctgccgtggccgggctggccgggtaagacgctggggcaggggtggttctggcagcagaacagtgaagggcggtatgtggatgcgctgctgctggtggatagaacaaatagaggtcacatgctgtga

SEQ ID NO: 388137 - DNA, 432 bp, Salmonella enterica
atgaaactaactgaatttatgcgatcagatttttatttgagttatcttgatgatttagataagaaaatgccagttaaaattgatcgagtctcaatagtgcaagatattattataaaaatagaactagattctttaaattatgcatcattgaccttatgtgatataaaatggctaattgaaaattacagatttaaaacaatgcattatatattaaaaaaacaagtaaaatatactgaaccagatggcggcaaggataatattgtcaatctagcacctaagataaattttcctattggtcatctgattgaatattatttattatcgaaaagaccgagtgatttgcttgagtatgtaaaaaaaattcggattcccggccctaataaatatgtaaaggaaattgaaaagatattttctgaaatacaagaatcataa

SEQ ID NO: 388138 - DNA, 258 bp, Salmonella enterica
atgaatgcctccggcgtcagcgtccgccacatcaacagcgaaacctgtataaccacctgttactcacaaatccccagccagcaccttaagggtgactggcaggaagaagcgggatttgagaccgggcgcagcgtgacggtgaagatttcacaggggtgtattgtgctaatggcggacggtaacgaggtgcagaagctgtgcgaacagctttatcaggctgaacgggtggttaaggggttgaaggatgtactggtttag

SEQ ID NO: 388139 - DNA, 183 bp, Salmonella enterica
atggggctgtttttgggcagccggaagttaagcccataccagaaacgttgcagtgtactgaaaaatggcgccaggttgcacctgttcaacgattttctgaaggcgcaggagtattcattactgatatcctccattgcgccttcgggaacccacaggaccagctattttaccgatagtgtttaa

SEQ ID NO: 388140 - DNA, 291 bp, Salmonella enterica
atgtttgatcccagcgcaacaatagagaatcttcatggcattgtcagtcatgtggatatcgttgcgaaaaaggttgtgctgcgaatgagttcagagaggactgtaaccttcactattgacgaaaacacactgtatattggcgaatatggtggggattttgacatggaagatttggtttcgttcaaaggcaaagaagcatgggtttggtataaaaactgtgatattaaaaataagaatgaaccaatagtactgattaattttttattaggtggtggagtacatggggagtaa

SEQ ID NO: 388141 - DNA, 405 bp, Salmonella enterica
atgaatatctactttaaatatattatacttttttgttttattattccaggcacgaatacgtttgccgtggaagttccgtggatcacgaaaaaagagagacaggaggtaacgacgtattatctctacgagacctgttccgttattggtgaaactcgaggtgggatgatcccctattttgattgtgagagctacgtatatggcgtcctggatgcctaccttgccgttcgtgatacgattccggtggctcagcgggcttgcttccccaaaaatctggcaccgtggcaggtgcttgaactttccgcagattatgatgaaaatgtgatgcaacaaacaattattcagggttatcggcctgcctcggaggttttaattgaacatttaagagagaaatatccgtgtgagtga

SEQ ID NO: 388142 - DNA, 348 bp, Salmonella enterica
atgaaggtagacctgagaaaactatctattggctggattgacaccatagaaacgcgtaatgatagcttgattatgagcgtagtttcatttgcagacgagctaaaaataaaatgtgatggtgtgattttcttgtcagtacactatcgtggtgatgatgagcctggtactgaatttggtactgtggttgaagttcggcatgaatatcggagcgttagaagtgaagatattccgttgcataattactattatcaatcaaatataccattgaatattgtaaggctggagggggacttcatagttaaccttgtctgcaaatccatctctactataggtcaggagaatgaataa

SEQ ID NO: 388143 - DNA, 375 bp, Salmonella enterica
atgaaaataaatctatttttagccttttcacttatctctttagcttcaatcacttgcgccgagaataaaataaaggtcacaggaatatactccgatctcaaatttcatgatggcactggcgatgttgtgggaacggagattattatcggttactccagtaaaggatattgggtttccttccagtacagtgaaggtgagcccacgttcccggtaatcgttctggcgagtatcaataaaggtaaaatcacctttaaagtgccttctgagttcaatgaatttaatggtgagatttcatcagacggttggcttgttggtgagtttgatgggaataagcagaaaatcattttacagagagggaaaagctattggcagtaa

SEQ ID NO: 388144 - DNA, 519 bp, Salmonella enterica; identical to SEQ ID NO: 379869

SEQ ID NO: 388145 - DNA, 1854 bp, Salmonella enterica
atggaattcgaagaacgctattacaggcaggagttggatcacctgcggcagttgagcaagctgctggcgaccgaaaagccgcatctggcccggtttctggcagaaaaagaggccgatccggatatcgagcgtttgctggagggcgtggcctttctgaccggcaatctgcgccagaaaatcgaggatgagtttccggagctgacgcacggactgatccggatgctgtggcccaattatctgcgcccggtgccgtcgatgacgctgattgaatatgcgccggatatggataaaacctccgtgccggtactgatcccccgtaatgagcagttcacaaccggggcgaaggggactcagggaaacgcggtattgtctgcgtattccggcaatgagcacgatgtagccccgccctgtacgttcactctttgccgggatatctggctgttacccgttcaactggatcaggttgaaaatcgcagtacgccccgccacggcattattgatattacgtttgccgtcgcaccgggcactgattttgccacgctggatctgaacaggctgcgcttctggctgggcaacgatgataactatacccgctaccagctttatctgtggttttgtgaatatttacagggcgcagagttgatggcgggcgggcagtcgatcccgatgcctgaatttatgctgaaagcggtgggttttgagtcagaggacgccatgctgccctggcccggtaatgtccacagcggctaccgtgttctccaggagtttttctgctacgccgacagttttctgtttttcgatgcctgtggcattccggcattgccagaccggttgaaggagaaccgtttcactctgcggctacggttttcacgccccttaccggcagatatccggctgcgggatgattccctgcgcttatattgtgcgcccgccattaatctgtttgcccaccatgccgaagccatcacgctggatcatcagcggcaggattacgctctggttcccagccgtcattttccggatcattacgatattttttcggttaacagcgtggtgagtcagacacaggggaagcacagaaaagcggatcttggacggccagtgatcacagaggccgcgcgccactggcctgcttttgagagtttccgccaccagatggagtacagccgtaagcgggaagtggtctactggcagcaccggaccaggacctcgctgtttcaccggggctttgatcataccctggcttttattcatgccgatggcagcctcccggatgcctcactgcttaataatgaagtggtttcggtatcgctgacctgcaccaaccgggagttgccggtacagctacggcccggcgatatcaccggtacgacaggtaaaaacgcgtcagtggcgtcatttcgcaatatcacccgccccaccagaccgctctggccggtgattgacggcagcctgcactggtcgttgctgtctgccatgaacctgaattatctgtcgttgctggatgctgatgcgctcaaacaggttatcgccaattttgatcgccacgccattcatcatccgcagatggcccgtctgtcacaacagaagctggacgccattgaacggctggaaactacgcctgttgatcgcctgtttaccggcataccggtgcgcgggctggcgtccaccctgtccattcatccggagccgtttgtctgcgagggtgaaatgtatctgctgggcgcggtgctgtcgcattttctgtcgctgtacgccagcgtcaattcgttccacatgctgaccgtcgttaatacggaaagccaggagtcatggaaatgggcggaaagaaccgggcaacacccgctcatctga

SEQ ID NO: 388146 - DNA, 480 bp, Salmonella enterica
atggcgaatttaagttatttgacacttaatggagaaaaacagggactgatttcagcggggtgttcatcaatggcatccattggcaataaggcacaaatcgctcacatcgatcaaattttagtcctggcccttgaacatggcgtcacgcggaatcaaaacgtaaaccaccttgctctgactattcgaaaaccagtggataaagctactcctttgttaaataaagcaattacagaaaatgaaattctgacctgcgatattgagttttaccggactaatcgcttcggtataaatgagatgtattacaaaatacagttgcttaaagcccgtattgcaagcattcatttaatagttccacatacggtaagcagcagtgacgggcaaccggaagaaaatatatcatttatttatgaaacatttacgcatgaacattgtattgcggggaccagtgcattcagcacctggaatacgcgtcttttttaa

SEQ ID NO: 388147 - DNA, 843 bp, Salmonella enterica
atgccttcgatcagagagcaaaacaatgaaaaaatgagtaacaagcgttccaccttatgtggtaatgagacatactcatcagatggagatatatactccatgagtaatcattacgtcataaatatgggtaacagcacgttgcccgtcgatgcgtattgtctaagtgagtactatgatgttgttagaaggcttatcaaaataatggtatctcctgaatctgctggtggtataccagatgggatattatctgtcccagtagatatattttaccttggacgggcttttctggacacggagaatagatatagaaatgaaattgagcactaccgattagcaacacttataaaaagagagatttctgatgaagacacatttaccagactaatcaatttaatattcgatgagttattttctcacgttccagaaaaaacgcaaaataaaatattcagccatattggtggcgctatctttggtagaactatagctaatgcctttgtttctggagaaattgctaaagcaaccatgaagaaagcaataagttctgtatcatcagcacagttaagcaaaatcatatcaataagcgcttccatttcaggtgcgataattggtaatatactattaacaggaggtatggcagaaagagcgatttatacatccagggcattgaaagaagactgtcctgagatttataacagattaagaccaaccgatttagatttattatacttccttgttgaatcaattatggaacctgttgttgacgcaataaaaataagacgaaatgatggtcagattgctttcgaaaaaatgatggagctaatggcaaatgagatcagaaaataa

SEQ ID NO: 388148 - DNA, 216 bp, Salmonella enterica
atgagatcagaaaataaaaaagcgtcaagaaaaatcattgattttctcatatatggtctaatttcagcaatcagtggatggacctttattctgtgtctttactggttgctctatttaaacacatggacactaagaatagtctacatcattatatcaatactgattgctgggttcattatatggttgctatccatcttttttgaaaatgatagttaa

SEQ ID NO: 388149 - DNA, 240 bp, Salmonella enterica
atggtgcgtaacagaatgaattgtttggcaggcattgttttggcatcatgcatgattctttcagcatacatgacattaccactccttatcgctgtttttagaatattagataagttcaagtatttttctgaatcaagtttatttaatccccatgcgataaataatcctattacaataatagcagcagttgcaataattatcggagcgccagaaagtccaaaataccagcaactgctttaa

SEQ ID NO: 388150 - DNA, 447 bp, Salmonella enterica
gtgagacattcagataaggcaaagcgaatatggtctcttttttttctcttttttattttttttggcattatttctgtcttaataatcagtgctggaaatgacacatactcgttaataaaaggttctgatcgtatctactatgactggaaaggtattgttggattgtatagtatacctttccttttttttacttatatctatcttgttatcagctttatcatttccgaaacaaatgttttagtgaaaaaaaacaagaaaaaatctcataatattataatgaaatatcttggcccaatcatcgcactcagtttactctgtatcattattggatttatttcaacattttttatcacctcttacgtacacagtcattatactccgtgtgatggcagttcaggaatttactccggaaaaaactatgttaaaggtggcgcaacatgccattag

SEQ ID NO: 388151 - DNA, 2133 bp, Salmonella enterica
atgagcaccattctgatttttatagctgctttgctggcctgctctctactggcaatatggcggttccgggtaaagtccagacgagggagcttaccgtggatcagcgcctttcaggacgcgcaaacgcgtaaactgttgcccgaagagcgcagcgcggtagaaaactatctcgataaccttagccagatccagcaagttccggggccgacaggcgccagtgctgcgcccatctcgctgacgctgaacgcggaaagcaacagtgtcgtgatactgacccactccatcacccgctacggcattaccactgacgatcctaataaatggcgctactacctcgactccgtcgaagtccatctgccgcctttctgggaacagtacatcaatgatgaaaacaacgttgagctgatcctcacggatacgctgccgctggtgatctctttaaacggccatacgctgcaagagtatatgcaggagtcgcgcggctacgcgctacagaatactgcctctacgcaggcgtcgattcgcggcgaagagagcgagcagattgagctgttgaatatccgtcaggagacccacgaagaatatgcgctcagccgcccggctggcttgcgcgaagcgttgttaatcgtcgcctcctttttgttattctttttctgcctgataacgccagacgtttttgtaccgtggatgataggcggcgcgatcctgctgctggcagccggactttggggactttttgcgccgccgtcgaaaagcgcgctgcgggaaattcactgtctgcggggaacgccccgccgctggggactgtttggggagaataatcaggagcagattaacaatatttcgctgggcatcatcgaccttatttaccctgcccactggcaaccctacattacgcaggatcttgggcaacaaacggatattgatatttaccttgatcgccatgtcgcccgccagggccggtttttatccctgcatgatgaagtgaaaaactttccgttgcagcactggttacgcagcactgttattgctatcggttcgctgctggtgttgtttatgctgctgttctggatcccgctggatatgccaatcaagttcacgctatcgtggatgaaaggcgcgcaaaccattgaagcgacaacggtaaaacagcttgaaaaagctggcgtgcgggtgggcgatacgctgcacctgagcggtaaaggaatgtgtaatattcattccggcgcgacctggagcggccagtctaactcaccgtttatgccattcgattgctcgcaaatcatctggaatgacgcgcctgcgctaccgctgccggaatcagacctggtgaataaagcgatggcgctaagccaggcggtaaatcgtcagctccatccaaaacccgaagacgactcgcgcgtcagcgcatctttacgctccgcgatccaaaaatcgggcatggtattattagatgattttggcgatattgttctgaaaactgctgatttgtgcgcggcggaagacgagtgcgtgcgtctgaaaaatgcgctggttaatctcggtaacagtaaggactggaacgcgctggtgaaacgcgcgaacgccggcaaactggacggcgtcaacgtgctgctacgccccgtaagcgcagagtcgctggaaaatctggtcacgacctcaacggcgccgtttatttctcgcgagaccgcgcgtgccgcccagtcgctgaatagccccgctcccggcggattcctgatcgccagcgatgaaggcagcgaactggttgatcaggcctggccgtcaacgccgctgtatgactatcccgcgcaggaacagtggagcgccttccagcgtctggcgcaaacactcatgcagacgccatttagcgccgagggcattgtcaccagcgtgtataccgatgccaacggtacgcagcatatcagcctgcatcgtatccccgataaatccggctggtggcgttacctcggcaccacgctgctgatgctggcaatgatagtgagcgcggtctacaacggcattcaggcgttcaggcgttatcaacgccaccgtacccgtatggcggacatccaggaatactatgaaagctgcctcaatcccaggttaaccgtctctccggaaaatctcatctga

SEQ ID NO: 388152 - DNA, 492 bp, Salmonella enterica
atgtttcagggagtggataccgtttttacaccgcgttcaagcaacctttctctacccaagaattttaccgatctggataaagatcgcgccagacgtgaaggctttgaatatgttgcccactattttgagaactcgttagatgaactcaaaaatcgccactccggattagacatcgattttaatcggcttgatacagattcattcacctgtgctgtttatatcaatggcagtaaggtcggtcaatgtggcatctggcgtggaaatcaacaccatggaatgggggatatttgttacagccaggataatgttgttcgaaacagtattaacgaaagtctaagccttgctgataatggtcagactcttggttttcgtgctctgatgggaggcttcagtcgtggcacctcacgagacgaactattgacgaatgaagggatgtcggaacatttctgggaaatgttcttcgggctaatcaagcaaagaatgtcccgataa

SEQ ID NO: 388153 - DNA, 528 bp, Salmonella enterica
atgaataaatctaaagttattgtttggcatatactggtagttttggttgtaacttatttaagctacagctttaggctagatatagattttaaagatgttgaacctataatttctatcttgcaaaatacatcagcaatgatttttacaataatggggatctggattgcttatgtttatccgaacgctgtattaaaaattgttcaaccctcaaaggtgacagtgatattttctgacgatgacttaaagagagttaagttgctggtgggggtagttatttcctcagcattaattttgttattgttattggttggggttgtcgtaaaaacgtttgtgataaagacttatctatttatgcagtaccaatcagcatttacagttattggtttatggtttttactctctttaatttatgcacaattattttgcatatatgcggtaatagcatctagcgtaaatttcattatcgatttaaaaaaccttaacactaaaaaacggctatcagaaaaactcgatggcaaaattaaataa

SEQ ID NO: 388154 - DNA, 1116 bp, Salmonella enterica
atgagcgtcggtattgttacatttttcaagtatacacagcttggtttttatcgttatggcaatgatgattattgcgagccacttgaaatggatacccttctttcatccctccatgtgtggtttcaggatagaatttcactagaagatacacttctttgggatgacgaaactcctggctattctcatcgtaaaaaggtttatctaaaagcaatcgaaaaagatgaagaaacgggtgaatatatccttgttctttggagagccgtaggaagtggtgatggtgtttatggaataaaagctgatgcgcggctcgatgacaacactttatatgatgctaataatgcagccgctggagatcgagtcatttggggtgaagcatcctattattggtttattccatctaaaaatttgtttgcatcaatccgattctctaattcaattgcagataccaatctaatgaatttatttttcagagattttgtctgcttacacgctgattttagagaaaaacgccgagaaattaaagaagggagcacaggttcttacacaaaaataacgttccctgcgcagcaagcaggtgaaactggaaatttgtggtttcgtatcagctcaaagcaatacacaaaactcactacacgagctgatctgggcgctatcgcccgtgacataactcattttgttaagcgtgaagtgattgcagcaagagatgtaaatcaatccgattggacaaggtttttcggaaggctcccttttgtctctgctgaggttacaaaagatactcgtaaagttgaggtgaatattgaagctaaaccaacggcagaagaattgcagcaaattttcgaacaatatgccgaggattacaacggtggtttagatggttggcgtaaccttgggtttagaaaagagggagtgggtggtatttgttggttgaatagttttgtggtaaaaaatgttctgccgattgatgatacaacaggcggtggtgtggatgaaacgggccattatacagcgcagcgccttttcacagccctacaatttaaacgcgatggtttgcttgcaccatttggcgttggcgcggaggaagccactgccccccaagctattcaggaattaccatga

SEQ ID NO: 388155 - DNA, 1329 bp, Salmonella enterica
atgcgtcgaacacagcagcgtttatcaatatggatgaatggaatccgggtcggattctgggagaaggccagaggcgaggatttattacaataccttccagaatggataattgatgaacagggaagacctttatcgctttctttgcctttcactccaggtaatcagctttggcgtggtaatgttgttcgtgactattttgataatttattgcctgacagcgaaagtatacgcagacgtttagccgtgcgttaccaggctgaaagccttgagccttttgatctattggctgagctgggaagagactgcgttggtgcaatacagttactgaatgttgatgaagagcccacagatttattttccgtaaattatcgcccactttctgaagctgatatcgcaactacattgcgtaatactacggcgatatcgttgcctggtcggcaggacgaaactgacgatttgcgattatcaattgccggtgcgcaggaaaaaacggctttattgtggcatgaagaacgatggtgtttacctgaaggtaataccccaacaacgcatatcttcaaactaccgcttgggttggttgggaacatgcaagcggatatgagtacatcggttgaaaatgaatggctgtgttctttgcttgttgagcactacgggatccctgtagcaaaaacacagattgcgcagtttgaggatcagaaggcattagtagttgagcgtttcgacagaagatggtcaggcgatcggcaatggatcattcgtttgccacaagaggatatgtgtcaggctttaggtgtttctccgttacgaaaataccagtctgatggtgggccgggtatttccgatattatggaaatactgagtcattcagatcaggctgagcaggacaaagagcagttcttcagggctcaaattattttctggttgatggctgctactgacggccatgccaaaaatttcagtatcgctattgagccacaaagtcgttaccaccttacgcctctttacgatattttatcagcatggccggtaattggtcatggtaataatcagatttcctggcaaagatgcaaactggcaatggctgttcgcggtagcagtaattattaccacatttatagagttcaacgacggcattggattaatcaaggtgaattaaacggattgggaagacgacaagttgagtccatgatggatgacattatatccagcacacctgaagtcattgagcgtgtatctgcgttgcttccagagtcgtttccatctgagcttgctgagtgtatttttgaaggtatgcggcagcagtgtaggcgtttggctggaagggaataa

SEQ ID NO: 388156 - DNA, 471 bp, Salmonella enterica
atgcgtattcgatattacagccgcgtcccgtttatctttcctgcactaggcttggtcgctgcgctgatttatggttgggtatcacaactgacatccccctctagagaagatgatgcgggactaaccgagcaggcaaagattgactgttataccccatctgtaagctcaactgattttgccgcatgcgctagtaatgtcttggtgaatggtaacgcacccagtgcaaaaaaggatattcagcagttgatggcgtggcacaatcagcaaatcaaaggctattacatgaaggagtgccaaaaacagaacctgcaaaatatagctaatggttatggagatggtgtgtgcgatggaacctctcctttaccgcaaatgctggatgaggatttcaagcccgcgaaagaagttaaagatcccaagttgctggaacaactcaactcaaaaaatgtgcaaagtgacgttgaaaaaccctga

SEQ ID NO: 388157 - DNA, 237 bp, Salmonella enterica
atgcgggatacttacacccacagtagctggaatctggccgggcttcagaactcgcaggatgatgtgattatcaatctggtgatgggatcgatgtttctggtgctgccgacattttggctgggggcgatgacgtgggctggagtgagggttggggtggcggtgaatggggcgctgggggcggagctaaggtggcgcaggatagtggggggaaggctgtggggagattattgtgaataa

SEQ ID NO: 388158 - DNA, 1389 bp, Salmonella enterica
atgagctataatgcaaaaggcaaccgcccatttgagtgggctagtaaatcacagcatactcatgtgatcaatgatccttctgttcaaaatttgatgaaaagatgtaaattcccctctaccaatgaagagtcgaaaaatgatgtccttgagcattctattgaaataaatacaggtgcatctagagacgtaacgaccatcatagctgttgatggcggttatactgaggttactgtaaggaaaaattatccgagctcgaaggttgcattttttcaatttggtggactggaatttagtttggatgacttaaaacagttgggagattatccctttatccatccagaaaaaatggaaaaatttaaaaaactagcaagatttaaacttgccatccctacaaaggcaacgtctttagattctctttcaatggttgattctgtcagaatacctataattgagttttttaatgagaatagggacggtaaaaaatatatagatacacttaagtggttggtatttcatgagtttaaaaggaaaagcattgactgtgattcatctcttcatcaaataacatttgggagtttgcctaaacggaatggtgagatatttaaagatgttgttgtcaataaatctgatatagatggtcaagggtattttgtttatggtggggagatatttaatcttattgatattttaagatttcatgaggttgtagatgaggagttaggggctagcggtattttaggatacttgacgaatgtgattgagcatataattattgttcattgtataaaagaaattgtaactcggaagccttcatttttaaaacgatttcttttcattaaagatggtcctttaggtttttttggacaaacggcaaagttgcataaagatatgagggagttatgtaatttatatattgatgaacattcgctaaaattagtcggcttagaaaaatcaggttcttttgttgaacacgcagagcaaatctcttctggagatagcgcttgtttgctaaaaggtcaagcgctgccactttttaataattatatttataaacatatacttcctggcccttctactgaagaggaattagataaggttcctccatatgcctcaacttcctattacagtggaaaattgatttatcgtagcaaatcggatagggtttgggttttaactatacctattaaaaccagtgaggaaataaaaaagttaaatagagcttcattttctaatttagatgaaattcttaatgttgttgaacatctgaagtgtgacatgtatgagaatgctattgtccctatcgcgttagttaatcagctagtatctcttgcaaatcacccatcttctaatatgttagaaaaatttgctattcaatcaatgaatgaataa

SEQ ID NO: 388159 - DNA, 2013 bp, Salmonella enterica
atgaatttaaatgcggctttatcaacagatttattaaaagaaggtagaaataaggaacagtttgttggtcgaccgttctatttatcttatgatattgctaggctgttagtttgtgatgcctggaaagcacaggttaaagggataccagccggttgttttctacttgcattttacgatggtgaagacggtgttgaagaggctgtattgcttagagcactttctcagacaaaactccctactgataatgatgtaatatcatcaatgatagagtattacaaggataacttagatatatcagggcgagctggtagtttgaaaggcgggaagttagatgaatttacacgttacgaatttagtttttcaggtttagaatgtagggttcttggagtattttatagaacacagaaagggaatatagaatttggtgctgaccttgagaacttttatgcagctaataattacactgtatacaaagccaatagagatgttcttgaatttatagtaaatcaacgagatgatggcggtttagttggtcaggactctgaatttaaaattggtagtgtaagatattcatctagccgtagacatcaatctcaagaggaaaatgttaatgtatgggtaaatcctaaagattttttaggaaaaaggtctgctatgtttgggatgacccgtactggtaagtcgaatactgtaaagaaagtgatagaagcaacagaggaaatttcaagaaaagctttaatactattggattcagcttctcctgaaacatctgagtttacatcttctggaagtccaacattccccgtagggcagattatatttgatgtgaatggtgagtatgcaaatgcaaatagacaggattctggaacggctatatatgatctatataaagaaaaagtttatagatatagtgtattagagaaagatgattttaaagtgatgaaagttaatttctttaaagacattgaaagtggttttagtcttatatctagttactttcaagagcagtctttagggggcgactatgttaacaactttattgctgttagttttgaaaaacctgaaagcacaaatctgaatggttcagaatggacaagatataatagattaattgctgcctataaatgttgtttgtacagagctggtttcaaagcgccaaatggtgaaaaaattagatttactggggcggcagaaattaatggtgaaatcctagagggtagagttttggatcctaaacaaggattaacccttgaagaggcttgtacatggtttgaaagagtatgggaacagtatgatgagctgaagtttttcaaagattatataaataagaaaggatatgaatgggcaaatgatgatttaaaatcaatgatggtatttttaacgacttacaaattaccgggtaaaaaaaatcaagtaagtggttataagaagattcgtgtaaaacaattgcataatttacacactacgagtatggatgaatcgtttgaaatagaaattcctcgtctgctacaacaaggaaaaattgttattgttgacttgtcacagggggaaccggtagttcagcgattattctctgagaaaatttgtcgttccacatttaacatctctatggatcgctttatcaataaccttccaaataattttatccaattttattttgaagaggcacataacttatttcctaaaaaagatgataaagatcttagtcagatatataacagaattgctaaagaaggagctaagctacatttagggatgatatatgctactcaagaggttagttctattagctcgaatatattaaagaatacacaaaactggtttattgcacatctaaataatattgatgaaacaaaagagcttgagaaatattatgattttaaagatttcacacattcattagttaatttttctgcaaccaatgataaaggttttgttaggatgaaaacttatacaaatccttttattgttccagtccaaattgatcgttttttagcaaataagggtatgtga

SEQ ID NO: 388160 - DNA, 969 bp, Salmonella enterica
atgaatctctactataaaacagaacttggaaagctttatcttggggactctcttgatgtccttaatgacgaggacatcagtaaatacgtagggaaagtaaaccttatcgttacatcaccacctttcccattgaataataagaaaaaatatggaaatgagataggcgaagcataccgcgaatggtttaaaaaactgacacctatatttaatcaactccttgctgatgatggttcacttgtcattgagataggtaacgcttgggaaccggagaggcctgtgcaatcaactttgcacttagaatgtttgtttgaaatgacaaaacagaagaattctgaactcagattaattcaggagtttatttgctataaccccgcaaaattgccatctcctgctcaatgggtcacagttaataggttgcgtactgttgatagctatacccatgtttggtggcttgctaagactgattatccgaaagcagacaataaaaaagtcttacggccttatagtaaaagtatgcgaaaactattagagcgccaaacttacaatgctggaatgcggccatctgaacacaaaattagtgaaaaaggtttcctaaaggatcatggtggaagcatatcccacaatttttttgaacttgagcctatagatgaatatcgagatgttcgattgccgcataatgtaatgtctttttcaaatgtatcatctaatgatttttttattagaaaatgcaaggaaatgggtattaaacctcatccagcacgaatgaataaaggtatagttaatttctttatcgattttctaacagatgaaaatgatcttatatttgatcctttcggtggtagtaatacaacaggattttgtgcagaattaaaaaaaagaagatggttagcaatagaagcggatgagaaatacgcagaacaatcaaaagtcagatttgaagaccctgaattgaaaaaggaaataatatga

SEQ ID NO: 388161 - DNA, 303 bp, Salmonella enterica
atgaacagaagcaacgatctttaccagaaagtcaccgatgaaattatcgccgcgctggagaaaggcgtgatcccctgggttcgcccatggcgggaaggggaaccggtggtgccgatgaatgccttatccgggcggttgtatcacggcatcaatattcctctgctctggaacagcgctgagcgacagggatatgagagcgatcgctggctgaccttcactcagattcgcaatgcgggcggtaacattcgtaaaggcaaaaaatccacactgccgtgttctatctgccccagcagcgcgaggtag

SEQ ID NO: 388162 - DNA, 639 bp, Salmonella enterica
gtgttctatctgccccagcagcgcgaggtagtggacagcaacgggaacacggttcttgatgccgacggcaaccctaatgtgacgtcttacgctgtagtacgcgaattccggctgttcaatactcagcaatgtgaaggactgctggaagcgttttcacagcctgtcgtgatggtcgatgatcccatcgccgccgctgagcaggttgcccggcaaagcgcggtgacgatcactcaccgacgacagaaccgggcgtattactcgccaggacgcgactgcatcatcatgccgcatcctgagcagttcacttcgcgtgaggattattacggcacactactacatgaactgacgcacgcgaccggacacgcttcgcggttgaaccgggacggcatcactgctggaaaccatacctttggcgatccgacgtacagttttgaggaactcatcgccgaaatgggatctgcatttctctgcgcccatgtcggcattcaggcgaaactacagcatgacagctacatcgcatcgtggctgaaggtattgcagcaggacaaaaaagcgattttccgcgccagcgggttagcgcgtaatgcctgcgagtatctgcttgaacgggcgcagcaaccgttagcgctgagcgcataa

SEQ ID NO: 388163 - DNA, 927 bp, Salmonella enterica
atgacctttgaacagatcctggaagagtatttttttgcccgcttattgcgacctgacacccagagctgttatcgcacggcagtaaaccagttcactcactggcgcaacgtgttacccgccgaagtgacgtcgcatatggtgctggagtggcgtcattaccttctaaatgtgcgctgtatcaagccggtgagctggaatcactatatgcgccatatgcgggccttatataacttcgcgattgaacaagggctgctggagcagtttatcaatccgttccagaaaacatcactgcgggaatctcgtaggaaaaagaaaaccctgacccgcgagcaaatcctcgcatcccgcaaagtgctgaaccaatttatcgaacgggagaaaatgcagcgcggctatcgttcgcctttatatccggcatggttttggctgaccgtggttgaaaccttcaactataccgcgatccggctgaatcagcttattcacctgcgggtcagggatatcgatctggtccatgacacgctatttattcagagcgaaggcagcaaaagccatgatgaacatatcgttcccatcgcctcccggctgcggccctatctggaacatctgcttgaagaagcgaaaacaaagggaatgcgggctgacgatcagttgttcaacatcaatcgtttcagtcggcggacgctgcgccagggtaaaccaatgacggaaaatcaggtcagttatttctttgccaaactcagcgatgcctgccacagccgtttttcatcacatcgctaccgtcataccgttgccacagaattgatgcagaaaccggagcaaaatctgtatgtcacgcagaaactactcggccaccgcgatattaaggtgacgctcagctatattgagcacaatgtcgagatgctcagaagttgcgtggagagagattga

SEQ ID NO: 388164 - DNA, 795 bp, Salmonella enterica
atgtcgagaaatattattacacctaaggaagcagtaagtatttgcaggaagataaggaattcgtgtgaccgggattttattaccaaaggattccggtttttgttaagccaactgcccatgggatttcatgatgttactgaggccactttgtggcgggcaagaaaaacagatgaagcccatcctgaaggatttgattatatcaaggatgttatctgccctcctgcacaatcagccaaaaccgggcgactcaataatgaaggcatgcctgtattgtacgcatctatcagcaatcatggttgtcttgctgagattggtgccgtaccgggagataaggttcaggtatctgcatttgacctaaaacctgagcaaaaattgcactgtggctttgtcggtgacattgttaaagcgcacaaatggaatagtgaagattttactctcgtccagaaaacactggaaccatttactgaagagcaaaaaaccagtattttcttgattgatagttttatcgcagaaatactcgccgataattatgctaacataaatgaatatctgcacacgacaactcttgcagatgttataaggaatggtaagaataaactggatgcgattgtatatcctggagttgaatctgtaggggcaaaaaattacgctatacacgctgattcgttgattaaatttaacatccccgacatatatcttcttgaaataaaaaacaagtatccttatggtttttatgaatggaccgtacttcggcaaagagaccattatgatggtgacatgattatttggaagtaa

SEQ ID NO: 388165 - DNA, 1962 bp, Salmonella enterica
atggattatctcgacgattttcccaagcgcgatcaaaatcatgtcaacgatacaatggccaagactgcgtttgaggcttttatcgcttcgtcggacgtggtcctcaaacaaggttcagatgataatgattacggcagcgattaccagcttgaaatagtacacgatgggatggctactaatgttcggcttcaagtgcagttaaaaggaactgctgcagatttgaatgctgatgggtctgtcagtatttcagttaaacgttcaaatctgaattaccttctgatgagtcctggttccctttatgtctgtttccatattcctacaaacacgctgaaggttacctctgctcagagtgttctggcacaataccgaaatacaggcaaagattggcaatctcagaaatctgttaccgtcaatttcactgaaactttgaccgatcagcgccttatcagggttgtctcgctaattcggcttagctctcttgatgcgagaaatcgccgtgtcgctcatagtaatatcgatgataataacatggtagactatgctagggcttcgcaaactatttatgaagtttctgaagatattgattctgcgactaaacagcttgtgaatctctaccgtagtaaccagactgaaattatcagtactgcatatgaacgattcaaagcaatattaggagaagaacatccagcaatgatttattgctggatggctgagattgaccttgcaagtgccaataaaattttcgaccatcatcgtattgaattgggtattctgaaaatgaaggcactttcacttattaatggtaaggaggatgctggtttgcattactccattggcaacggttttgctgctctgaatgattttaacggcgcgttgaacgaatatgagatagcatgtgagcttaataaacagagcattaatgatgagcttatggcgatgatttacaagaatatgggggggagctacgctgcgctagaaaatgaaaagcaggcagttgaatgctatttattagcattagagcataatcctcatctggccgaagcacattatgctttaggtctttattatcacaatacgagccagttcgaaatggccttggagcatctggataaaacaattttttctaaaaatacgcaaggaaacctgattaatctacagggctggcgtatatcgactctcttcaatgttggagaaggtaggtctgcgtttagagagattaatactctactgagccaggcagataaagcgcagtggatatggtcatggtgtttaaaaatcgtcgcacagtttggccgtaaatcaattgagaatgcaaaactcagcctcccattttgggagtcagttttgcgccatttccctaataactcagacgttcaacgagaatcgctgctggctataatctacctacaaaaccgcaatatgaatagtcataaaacttattcccagtttaaaaatgatcttgagtcatactcagataatatagggtcagatgcagcgagtctgctctgggacctgttgggccattgggcggaagatgaagatcgcggagatgaagctatattatgctttgaaaaagcctattctcttcagaaaggtgattacggattatgtttttcaatcgcactgaacaaccaacaacgctatgaagaaagtgaaaaattgatgaaatcctatatatcagtttttcctgatgatgctcaaggttggtatcagttggctagtacctatgacttgatggggcaactggagaagtgcatcgcatcctatcgtcaaagtttgtctctaaatgtcgataacgaccatgcttggtttaatcttgggggagcatttttcaatatgggtaattactccgaagcacgacaaatctggaaagaagcagtaaacagatacccagaccatgaattgaccgcaaaactcagagctgatatacctttcatacttagcgatgagccactcccataa

SEQ ID NO: 388166 - DNA, 3861 bp, Salmonella enterica
gtggcaatctttgatattgagaaagatgaattactccgactgtccgatgctcaactggaagagctgatcgctcgcctcgctgaggctgaaattgccgctcttggccatagccctgcatgggtaagttggtccggttcaatcaatgctcctgatgggggaattgatattcacgttcgggttcctgctgataaactgagtactgggtttctcgaaaggcctgacactatcctccaagccaagaagcattcgatgccaagggcgtctataaagaaggaaatgctcactgggagaaggttatcatcaacactcgctgagcaggcaaaaaaaggtggaagttatatcatcgttagccttggtgatgattgctctcctgttatgcaaaaggatcgtctcaaagcaatgcaggatgcagtggagaatgatccaaatagtggcaatatccatctgaatttctatgaccgctcaaaattagctcagtggctgcgtcagcatccgtcaatcatgctgtgggtaaaggataaactcggccagggatactccggttggcaaccatatggagcatggagtaatccgccacaaggtgccgtggatacctttatttccgcgccaggcgtaacggttacattgccgtcaggaaaaggtacgaagcttaaccttgaagatgctattaatcctatgcgagaccttattcgctcaacagcaaaggctgttcgcattacggggttgtccggcgtaggaaagaccaggatcgtgcaagcgcttttcgacgaaacgattggaaccggtgctctcgatcggactgtcgtaatctatgtcgatacgggggctgaaccgacgccttcggcaacagcaatgctggacagacttattgctgaaggtcgatacgccatcatgatccttgataattgtccatctgaattgcattctttgttggctagcaaggtatcaacttcaggcaacaaggttagccttgtcacgattgagtacgatatcagagacgataaacctcaaacaactgaggtaatccacatagaagctatcggtccgggagttgctgaacagctgctgcttcgacgtttcccctgcatcggtcagaataatgcccatcggattgcagagtttgctgatggaaatgcaagggtatccctggctatcgctgagagagtagaagaaggcgagagtttggcccagctttctgatgctcagttgtttaatcgattgtttgagcagcgcaatcattcagatgagaatttgcgggaacaggctgaaatattgtccctcgtatattcattctcggtctcggctcctgatatgggatacagcgaactggaagtcctggggtcgctctcggggcatacgcaaaaccaattatttagagcagttaagaacctgctggatcgccacatcgtacagaaaagatctcattggagggctattctgccccatgctatcgcgaacaagctggcttcatcagcacttgatagtattccggtcgagcaactcagagccacctttgaagcctccggccatcaacgtttgttaatgtcatttgcgcatcggctggggcttttgcacaatcatcctgtggcgaaagagatcgttaaagcctggcttcagccaaatgggctattgggacaaataacagaactggacgatatgctagcacgaatgctgaactatatcggaccggttgcacccgaagccctactcaacagacttgaggaagaacttactgcgcccgattttaaatatatggaaccgagttacgatccacggcggagaactgttctcaatcttttacaattattggcatatgaaccaaatgcttttgaccggtgtgtaaggctccaggcccgtatggcagactacgaagatgagggtacggataacaacctcgatacagctcgcaataaaatcgcaaagtttttccaggcatacctttcaggcacacatgcctctctaggccagcgcattgcattcatgaacgaatgtctttcatcagtagtagctggacgcaggtctctgggcttcaaaatactctcgactgctttagatggcccgccgtggacagggtttgggataaatgaattcggtgctcgtccgcgcgattttggatttcaacctactcacaatgaacttgtggaatggcgtagtgcctttatcgacgttgctgtgcaattagggacctctggtaatccagagcttgaagcccctgcgcgactgctgctggcagacaaatttccaggaatttggtatcaggaagcgatgagggacaaactcatcgatgcagctcaccagttaaacgcctacagcccttggggtgaaggctggaaagccgtccgttcaatcatctatttcgactacaccagacaaaaagatgaggatgatttagatccgctgccggataacctcgctgcattggagagggaattgaagcctgacgacttgattgcaaaaatcatgacatatgtgttgagcaacggggccgatctttgggagctggatgtcgatttttgccatgatgacaccactgcctatagtgaatcggtgaagcggcttgaatccaaagcgttcctgttaggtgaggatttggccgcttcaggccatgaactaagggaattgggccccaatctgttctcctacggtgggatgccctatcgtgtagcattcggtcgagggttagctaaaggggcgtgtaatctgagggttggctggcagcaacttgttgaacaagtggaagtacaatcagaaattaacaaggactttgcagtttttgctggtttcatcgaagaagttgactctattgatccagtattagcacaagagttacttgatcagtgttcacagcatcctgagcttcggcaggtattagtcggcttgcatccccggcagaaatttacagacagcgatttggatcgttgcatggcacttctggatgccccggatattcggccatttatgtatggaccaatcttgtggaaagagcaatatgctcatttgccgaaaggtcgtgttcttgaccttgctcagcggcttctgaagaagccaaacggcgatgatgtcattttggaagctctgagcctgaggctacataataaagataaagctgtggatacacttggttgcgaccttagacagactggtcttaaggccgcaaccctgagattctacaggaatgactctgaccgaggtggttctacggattataagatggaacgcgtcgttgatgctgcgttacgcttcggtggcaacgaggttgaaaagcagctgtggctggatacgattttttctgttgttgataagcactatggttatattaatacgtttgaaaataccattgggacaacagctgcattggtgcctgaagcatttctcaatcgcatttttgagggctctgaagaacaacaacaacgaagattatttttcattcgtcatggcggtttacgccgattaccacttagtaaaatcaatgcggacgtattgattgaatggtgcagaaacaaaagtgatcccggtgcatggtccactatcgcatcaggtataggtctttggccaaaaaatatgaatcagcaggacggcattaatttatgggacgctgctctcaggttccttgagaattcacctgagccaaaagctgtccttgagtctttctctgaacaagtcagaccttcatcatggtctggtagtctagcgaatgtgatgcaatctagagcggatgtcattggcaaattagtcgaacacgaacgcacagatatttctggggcggccagagcagtatatgcagaattgactaaattgattgagcgtgaaaaggtgcgtgaacagcgggaagatgaggaacgtgaacaacggtttgaatga

SEQ ID NO: 388167 - DNA, 480 bp, Salmonella enterica
atgtcctcccatccggttgagctggtttatgaattattaaccagtattgttgtcccctatatgcccgagccagaagatgtgcagggaacatgttcatgttgtcagcgccctgcggaagcatttgattatcttgggtacagatttaaaaattgttatcagcagtcggtcaaagcaatactgaaaaatggaagatcccggttcatcaccgggatcgttctgtcacctgctacgtttaatcaccggaatatcgcccgtatcattcagcgcaccgggaaaatctttcagccacgccttaactttccgctggttgatataggtcacgctcatgccttcaagacagccccacagttcgcgggtgttttgcggcgtaatgacgatacagtctttcatcacccgaattttaacgggcattccgttaataaacccggcctgcggcatccactcgccgtacaaacgaaccgaatgcgccacaacgcgtga

SEQ ID NO: 388168 - DNA, 240 bp, Salmonella enterica
gtgaagaaaaatgaactgaaggttcttcttgagaaaggaaaaatatccaaatctatttactcattggatggcgggttacctaatgaaaagctatgtattgacttcgaaaataataaatggatagtatattactctgaacgaggaataaaaacgggtattattgaattccttaatgagagtgatgcatgtgattatctatataatcaaataaatgcaatagttactggtaaagtgagataa

SEQ ID NO: 388169 - DNA, 264 bp, Salmonella enterica
atgttaagaaaattcgagcgctggctaagtgataatacttcgtatgattttttgcataatacaaacaccttatctgaaagcatggtaattgatgttgaaaatgaaaaatatatagcaagatttactgtctgggatgatcttagttgcatgtcggaagtcatggatgctgatactggagattataaaatgaataaaagaaccgaattttcgacatttgatgaacttcttgatacatttaatgtatttttgaaaaattttgaatga

SEQ ID NO: 388170 - DNA, 252 bp, Salmonella enterica
atggaaaatgagaacttaagaacaaggtatgaaggactcaaaaaacgatatcctacaagggatttagtcccttttgctcgggtggatggtaatgatgatgtcgcttgttgggaaaaaaataaaaacgggaaaattgttattattcatgattatgccagcgaaggatatgagaatgtaacggagtttgataatttttgggactggttgcgaagtgctctggaagctacaatagagtacgatggtgaatggtaa

SEQ ID NO: 388171 - DNA, 357 bp, Salmonella enterica
atggaaaaattattaacagataaagaattgccagcatggttctcttatcctgattcctttaaaaggattattgatcagggattactttattttgacccttgggtcattatggaagatgagtggttaagaacaagatatgaagggataaagaagcgatatccatccaaggaattagtcccttttgctcgaagagaagataacgatgacgttgcttgttgggagaaaaataaaaatggaaagattgttataattcatgacgttgccagtgaaggctatgagaatgtaaaagagttcaataacttttgggactggctacgaagtgctttagaagccaccatagaatacggcggtgagtaa

SEQ ID NO: 388172 - DNA, 330 bp, Salmonella enterica
atgtgtatactttggtctaaggaaattgatagtatcttgaatataggaatttcacttgaatctttgggtgtgaaaaattgggctttaaatcgtaagaatgcactggatgtcttgcatcattttgaatcattaaatatttgtgtgttaggtggtgatgtatatattcttacagataaaggtatggaacagaattatgatagttggtattttgatattgataaagatattccaaaacatgaaaatatatgctttagtataaaaaaggcaatagattatatagaggcatatccaattaaagatgcttttttctcaatagttcctttagtttaa

SEQ ID NO: 388173 - DNA, 4464 bp, Salmonella enterica
atggctgacaatgtcgcggcgaggcaggccacaggctggattgttgtctgtacaacaccggatgtctgtaaaacacctatgggctcatcaacgccgcctgttccttaccgggtaacggcgcagatgtctgacgcggtacaggtggtgcccacggtaaacgccaacggcaggccactggtggtgctgacgcaaagttttatcccgaaaaccgatggcgatgaacagggggtggcaaagggggtacagagcggtactgtagccgatatctgtgagccgctggagcacagcagcagcgtcaaagcggcggggtattatgtactgcgtcatgatgaccggttttacatgaactgcaaaaacacggtcggcaaaatcgttggtcagacgccgtcagtcagtaaatcaacgtcagattcgaatccggaagtggtgccggaaacaccggaggaaaaggggttctggaaaacgctggttgactcgcttaatcaggaaacggactccagagtggcagctatcagaaatctcaatgacgttcttggggattcgccacccgccatacctccacccaaagggctggccaatttttccgttcttgcagcagtgacaaacccgcaaattccttctgatgtgttccgtaaaatagctgcaaacggtgggccagaagaacaggcagtgtttgaccatgcatatgataaatatggtggggcccttacggcattgttcagtgtagggttaatgtacgtctcgggcggaggggcggccggattaaaaagcatggcctcggctgaagccggattaaagggaccggccttagctgaaggaaggggaatgatcaacatggaaacgaggctgacagatgaaggtgcctcgctgataaaccacagtaaggtggggccggaaggcggcgtgattgtaaccggagaaggcgcagaactgactgccgcaaaaacggtgccgccgaacacaatcactgaaccgggtatgcaggtcagacagaacccatcagtaaaaccagggaatgaagggacagggcagacggctggaaatgtgagttcagcaggcgagccggtcgatatggtcaccggtgatttcctccagcacctgtccgtcctcaccgttcccggtacgctccccctcacgctgacccgcctttaccgctcccgcactgacgccagcggtctgttcggcgcaaaatggacggacgagtggtcgcgttttctcgaactggacgccggaaaaatccatttcaccgaccatgaaggcgtcacgctgacctacaccatcccggataacggcctgctggtggatgcggtgaacagtcgcgtcagcagctatgtgctctccggcgatatccgtggcgaactgtcggtgttcgaccgccgctcacagcagtacctgatttttggtgagaagcaggggccactgcgccgcctgtccgccattcgcgacggctacggcaacaccgcgacatttgtttaccgggatgaacggctggtacaggtcacacacagcgacgggtatgtactggacctggactggctgaacggacaactggcgtccatcaccctcgccatgcaggagaaaacgcagcgccttgtcacctgccgctacgatgagcagggaatgctggcggagtgcgactccttccagtttgcccaccgctggcaccgttatgacccggaaggccggatggtgttctggcgggatgaagacggcacgcaggtggacttatgctatgacgcacagggtcgcgtgacggagacgaagaccccggaagggtattacaacgaccggtttatttataacgacgcggagcggcagaacagctatgtggatgcagaaggcggccggacggactactggtacaacgaagacggtctgacggtacgccggactgacccgctggggcgggagacgctgactgaatgggagaacagccgccgaaaaaccgtgaccgatgcgctgggccgcatcactgcgtgggaatacaaccgctacggggatatcacccggctgtcgctgccgggcggcgtggtgctgcattaccgctatgacgacagcggcaacctcattcgctttcagggaccgggcaacaaaatctggcagtttgactatgacgaacacggcggcctgctgacgataaccgacccgcagggaaggcagagcagccgcctgtacggcgaccacggcgaactgttgcagcaggtgttgccggacggcgagacctggcattacggacacgacccgctgcaccgcctgaaccggataacggacccgtttcagggcgagacgcagctggcgcaggacatgctgggccgcctgctgacggtgcgtgacccgctgaaccaggagacggcgtggcagcacagcacgcagcacgccagtcccggcggcagcgtcacgaaaatcaccctgccggacggcgtggagcagcagcaggagcacagtgcggggaaaaaagtcgccagcgtgacggacggggaaggaaaaaccacgcgctatgaatacggcagttttgacctgctgacggcggtggtgcgcccggacggccagcgctaccgttttgcctatgacggcctgctgcggctgaaacaggtgacaaacgccggaggaaaaacctggcagtatgactatgacgccgccgggcagcttatccgcgagactgatttcagcggacgaaccctgtgttatgaatacgacgccgccggacggcggatttgcacccgatacccggatgagcaccttatccgctggtattacgacgacggcgaccggcttttcagccagcaggtgctccggttgcgggacggggctgaaaagccggtcagcagtacggaataccgttacgacagtgagtaccggctggtcagcgccacaaccccggatgcgcgggtggagtttgagtacgacgcagacggccatgtcatcgccgagagcatcaacggtcgccggggggagcaggattacaacgcgctgaacggcaggccggtcgcctggcggctggacggggtggcgatgagcttcacgcacggcccggcagggcggctgacacagtggcaggtggacggccatgcgccgttgcacctgagtcatgatgcgctgggccgggagacggtgcgccgaagtgaggcggggtttgtgtccggccagcggcacggcgcgacgggtaacctggtggagcagtgggcagggcggctgacggcggagtccgggacagtgccgcaggatgtgtaccggcagatggagtatgaccgggcgtataacatgacgcgcatccgggacgggcggtggggtgacacggcttaccgctatgacgtgaacgaccagataacgcaggcgaaagggggagtccgcaccctgccgcgtgaggaagcgttcagctatgacgtgaacctgaacatccggcagtacgggcagacgccgaaccggcattttgaggtgatggcgtttacgaagcaggcgcagcagtcggggcgggtgataaagcgggacgaggatgattaccgttatgacgactgcgggaggctggtggagaaaacggtcctgacggacggttttcgtccgcagcgatggcgttaccggtgggatgcgcaggggcagctgtcagagcttatcacgccacagggggagtgctggacgtaccgatacgatgcctttggccgccggataagcaagcggcgggcgaaggtaaccagaggcattgtgggttatgactaccagtggcgcggcgaccagttggtggcggagacgccggtgcaggcggatggcaccgcagttgtggagagcagcgtgtactggctgtacgagccgggtgcgctgacgccgggggcgaggtacgaaaaagggcaactgcattatgtggtcagggaccatatgggtaccccgcgcgagctgctgacagaaagcggtgaggtggtgtgggcgcagaagctgagcgtatgggggaggtcggagcgataccggtttggtggctggaatgcgccgaatgatgagagtggtccgggctgtccgtggcggttcgcggggcagtgggaggatgaggaatcggggctgtactataaccggttcaggtactatgatagtgaggcggtgcagtatctgacgccggacccgataggactgacggggggaataaacaattactcgtatgtaccgaatccattaaaatatattgatccgcttggcttgtgtaagggcgatgtaaatagtgatttctttgctaatacgaaatatacagataaggttattgctcaaatgaaatctggtgacctgcattcgtttccagagagtgtacgaacattccaggacgccggaacagtaacgaaaattactggtggagatggtattgttcgagatatgctgaaaatacctggtcgttatcgtgggaaaaatggtaattttgaatttataaaagaacctgatggatcaataaatcatcgtttatttaaacctgattctggacaatag

SEQ ID NO: 388174 - DNA, 1188 bp, Salmonella enterica
atggagtttcgtaatctgacgccgttttccaccctgtgttattcgatgctggataaacaggatgtggagcaccgtgtggtggccatgaaggtggggtttacgctggaacgcgtcgctggtgatattttcagcgtgcgcgttcaggaaaacccggcgatgccgttgtgtatgcaggatgaatacgccggtgagcagagcctttcgcaggtcttacaggaaagcgatctgtccccgttcaaacctcgctgtgatgttattgttaatggttcagcgtatgcgcccggcggtctgcccgtccgggaaatatccgtcagcctgcgtctgctgacagcagagcgccagatactgctggataagccgcttcgggtgagcggagagcgttttttcgtccgccacccgttaacaggccagtggtcgttgtcagagccggagccgttcatctccctgcccctgcattatcagtatgcttttggcggtgagtgccgtattgataaagataatgatgcggccggacgggtgccggataaataccgccttacccctgaacaacaggccggacatccgcagccggataacccgccggttgcccatacggcctgcatcacgaatccgtcggggcggggttttattgagcgctggtacgcggacactctgcggcagtcgcaatttcctgctccgcgcattaccgatccccgcaatccttttaccctggattcctttttgcgttgtcaggatggacaggcggattttgcggcggcggcgtttcagccagccggatttggttttctggcgcagagctggcagccacgtctggcgctggccggaacatacgacaggcactggctggagacccggcatcccggcttaccggcggattttgatttcagccactggaatggtgcgccggaggaacagcaaattccttacccgtcaccggggctgcgttttgaggtgcaggggatgcatcctcatggcgatatcaccgttcagcttccggcagataaagcggctgtgttgttgcgtatgggcgatggttcgctggttccgcaatggatggtgatggataccttgattctggatacggagaaaatgacgctgaccgtcacctggcgttaccacatcagcgccagtgcccccgtgcgggtcatggaagcacgttacatcacggaaatgtcacaggagggatag

SEQ ID NO: 388175 - DNA, 594 bp, Salmonella enterica
atgaccatccgctcgaaaacctataaaggcagcggctataacgagctgatgttcgaggacaagaccgggcaggagctgctgtcgatgcacgcgcagaaggatatggacaccaaagtgctgcatgaccgtaaaaccaccgttattcacgatcacaccgaaaatgtcggtcataaccagaaggtgaggatcaaaagggatcgaaaagtgttgatcggtcacaatctgcgacaggttgtgctgaacaaccagagaaccaccaccctgaaacataaaaaagatttcaccgggctgaccagccgggaaacggtgggggtgctgaaagccgtcacggtgggcggcgtctatcagaccacggttgtcggggagatgaacacctccgtcattatggcccagaccgaagaggtgggtctgctgaaatcagtcaccgtgaatggtcccctgaatgtgagttcggccacgtccatcacgttcacctgtggcgccagttccatcacgatgaatgaggcgggtgtggtgaccatcagcggaactgaatttaatttcagcgccagcggtccggtcgccataaagggcaaggatgtggatatcaactga

SEQ ID NO: 388176 - DNA, 1056 bp, Salmonella enterica
gtgataaaaagcccgctagatttaaaaaatctgaacataaccgatctgatcattcatagagtctacttgcccgggcaacaggctcattttgacgtagaacattcgaacaacattatccccctgtctgggaaagcaaagcagacgctcgaacaaagattgaccaaagttctatctaaggggtcaaaatgtattgagatggacatagttgaagacgacccactcgaaaaaatacatactttgcatgatgctggtgaggagctttttgtatcgaaaaccaaagatatcgccaacaagctcggtaaagctcaaactagtaaaaagcatccagaaggtgtccttgtcatcgtgagatgttcctacgggatcacaaagaaaatccgggctgtcgctataattaaagctgagctacatgaaggcttcacatccacagttaaagataatgtagctactatcggttatttaactaatttatttcttactccagaacaaaaactttataaagtcgcttttttttcagaaaaaactcgaatgtcaactctgaataaaaatgcctatgaagtctttttatttgataataatttgacatcaaaagatgattcaggcgcagcagcctatttttacaaagcgttcttagggctttctatatctgctgactccagtagacttacaagaagtttttatgagataacagaagattatattaacgccacaagtagttctctggaagaaagaatcgatctatcaagtgcattaagaatatacattaaagcaggacaatctgaaattattggaacaaacgatttcgcagaaaactatatgtcagtagaaaaacgcgatgattatattatgttttgcgaagagaaagaccctgtgatctcatcatttaaaaaagatgacacattaatcaaaaacagaataaaaaattccacctttaaattcagtaatgaagtaaaaataatctatccttctatagatggcaatacaccttgtgaaatcatcgagcgagatgataagtataccacagtaaaaataaatggatatttgataggaaactaa

SEQ ID NO: 388177 - DNA, 129 bp, Salmonella enterica
atgaatcagtgggttaaccagttaaaggaacggcgcggatttaataaaacgaccgtggcggtcgctaacaaaaacgcgagaataatctggtcgatgctgagaaatgagaccgagtatcaggtagtgtga

SEQ ID NO: 388178 - DNA, 966 bp, Salmonella enterica
atgaagaaaaacatattaatgatggtttttacagtaattgttttatttggaggagttattgcttggctttatcattcaaatgatagtttggaaaatgtgagtgcgaatagtgatatagcacatctaaccaagttagcagaacagggggatatgaaagcacaaacagatctggggcttgcttatgggagtggtaacagtatcccacaggattacacaaaagcaatgtattggtataatcaggctgcaaaacaaggttacgcaccagcacaatttaatctcggtcttttctatgaaaatggttggggtggaagcagagatcttcaattagcaaaagaattttaccgtaaggcggcaaatcaaggctttaccaatgctcaaataaatttaggcattctatttatggatggcaaagggggagagattgattatgttcaagccagaaaattatttataaaggctgctgaatccaataatccagttgctatttataatctgggacacatctataattatggattgggcattccaagagatgatgttcaggctgcaacatggtatagcaaagcggaagatcttggttcaatgagcgcaagaaattcacttgctctattttatgcaaaaggattgggtaatctgcctgttgacagaaacaaggcattaaaattattgaatatttctgcttgtcagggatatgcggtagctcaaaataatcttggaatattatattctgatggtacagatgaattatctaaagattatcagcaatcctacgcctggttctcagtggcattttataatggttttaaagaggctgatacctcacgaaacgtaatcatgggaaaattagaaactaaagaaattgaaaaagctaaagcactttccactgaatatattgaaaaataccatactaatctcaatggagatgacacagatagagataaagagtgtaagcatttatacccgtga

SEQ ID NO: 388179 - DNA, 744 bp, Salmonella enterica
atgaccatccgctcgaaaacctataaaggcagcgggtttaacgaactcatgttcgatgatgcgacagggaaggagcgggtgtatatccacgcgcagaagaacatgaataccgaggtgctgcacaaccgcaccaccgatgtgacgaataaccatgctgaaaccattggcaataaccaggtgatcgctgtcaccaataaccagatacagaccatcggcgtcaaccagatccagaacgttggcgtcaaccaggtggagaaagtgggcagcaatcaggtgatcaaggtggggacaaaccagattgaaacggtgggactcctccgcgccctgaatgtgggcgtggtgtaccagactacggtgggcgccattatgaacacctcagtggccatgatgcagtcttcacaggtgggcctgcataaatcgctgatggtggggatggggtacagcgttaatgtggggaacaaagtcaccttctcggtggggaaaacaaggtcagacaatgccgggcagacagcgatttattctgcgggtgaacatctggagcttcgctgcggtaaagcccggctggtaatgacgaaggacggaaaaattttccttaacggaacgaaaattgatctggaaggtgcggaaagcgtcaatggtgatgcgctgacgatcaactggaactgcggcgcaacagaaaccgtgccggatgcgccgaaggatgactcgccggagccgaagatgccggatatgaggaagttctga

SEQ ID NO: 388180 - DNA, 231 bp, Salmonella enterica
atgaggaagaatactatattcctcctcattgacaataagcgtaatgacacatttacatttatccccacttatatgggcattttaagctatattaaacacaagcataaaaatatttggtatatgtcctacagtgatcgttcttaccaccactacatgactgttgtgaatccgtatttatcaaaatactgtttagacctgatgaacaagaacaaccacctgtcgctctgttag

SEQ ID NO: 388181 - DNA, 825 bp, Salmonella enterica
gtgttccgtcagctgaatacgccgtcccggccatatcgccggcgaacggcttttcccctgcgccacttcggcattattacgccagccctccatctgccagcgggtgaagttctgaccgtggccgtccttgaagcgccccggatagtcaaacacctcgtactgcgtgcgctggtaatcctgatgttcaccctgatgctcaaagcggcctgcccagccggggcgtttgaaggtgtagtccttgccgatgacggaggaggggcggatttgcgcgctgtggcggaactggctgacgcacggcgtgctcacctcggtgcgggtgttcgggttccatgggatttcaaaggcttccggcagaaaacgcaccgtgtcgcacagcaccaggctctggtcgtcgctggtctgcgcatgttcctcgtaaaagaaaataccttcctccgccgccatccgcgccagaaagtcgtaatccgtttcgctgtactgcacgcagaactcccgcgccggatgcggctcgctgaacagcgggctccagtccgtcacgccgttttcctgcagtatcgtcccgagaatgctttttatgtcttcgttctggaaaatacgcgagttctggcgcagcgcggcgcgccacaccggcgggcgaactttcatgctgtacagcatctggtgtccgtcgttttccccctgctcaaaccaggtcacgatgccgttcacccggcgctgtatctccgtgccctgccagattttcaggtgcgccggttgttccagtacctgggagaagtcaatattaagcagctgctggctgaccagcgagatatcgagggaaaataa

SEQ ID NO: 388182 - DNA, 288 bp, Salmonella enterica
atgaataaattaattgaatctatagaacgcggtaaggttagaggtattgaagaatataaactcattgatggtgaacggtattgttaccaatatgctctgaaaaagatcgcaaataaatacgtcacttatctgttttttatccccgaatctaaaatggatgtaatggaggattatggctcggaagagataaaggaatttttctctataacagatgcaattaattattttacatctattggtgtagatttttctctatttagacctatcaaaggtgtgttaccattttaa

SEQ ID NO: 388183 - DNA, 189 bp, Salmonella enterica
atgcgccacccgatacaaaaaagcggcttacagccgctttttttatgcatggcaaatcagatgtgtcaaatgatggcgaaggataacgaaaccgcaaaatttatcgtttccgcagcagtgcgtttttcaaagcgtatgccgtcagtagtgcctttgtctgtcattttcgaccaactaattgtttcataa

SEQ ID NO: 388184 - DNA, 246 bp, Salmonella enterica
atggctattttcatggaagtgcgctgtgagggtctcggtgatattgatggctgtttctctagccagaacgccggttcaataacgtcagcacgtgaaagtgttaagagtgtttccatagcgctgaaatttcttaaagatgattcgcttaataacggctgggtgctgcataaaggcgagctctattgcccggtatgcgccaaagcaaaagcattggccgctgctggcatcaagtggaaggctgaatga

SEQ ID NO: 388185 - DNA, 1215 bp, Salmonella enterica
atgactgacacagcatattctaagtcacttgaaaaggaagttgaccctgaacaatatcttgtactcacagggcatactatcgatactattcacacatttgcgcgagaagatattgtctgcccaatatgcgaggcaactggtggaacgtttgtccgtggcggtactaatgctcgctttaacagaagagcacatttccggttcagaaacacaaaagacaaaagcaatcaccatccttcttgcgatttctacgatgagcgcatctcacctgatgtcaaaaaccatctggtttacttctctaccgacagaaccaagattacgcatgttataagaaaaatggtatgcgcagggatacaggagggtttttttgatcaagaatccatgaggcagatgcgtaagtggttcttccagaagcgtgtcgactcaacgtttaagctgtctcttactgaagagcaggtcagttggcttcattacataacagataatacaagtgtcaattgggggtatgtgaatggcgtagcgccatttagcccagtgcaagccaccatccccggtttttcatgggaagatgctatccaacgagagttcactctggtgcatctgcccaccctgcgtaaacttcaagacttaaaagtttggagaaaacaactttcaatgctgaccaagttcgtcagcagcccatcgcagggcgtattgattgaccctaccttactaaaagatgagtatgagaaaacactccagctcaacgctttcatcataagcagttatgatgaatttaagaataaatctgtaagagaccgtgctgatggcgaagttaaacttctcgccttttccgcgcttttgctgtttgtttcaggctgggatataaatcaggccatcgaaaagttcgcggtcatcgcaaatgtagacgaggtttatgacgaccttgcaggtaacttcattggcctaaacccgtacctaaaattcgaacttgctgatactgcaagaaaactacaagaaaactggcctattgagtataaggaaattaactactggcaggttgagaagagaatgcgggctatgtacgaggaagaccaaaaatcgcgttcgactccactccccccgcttcccgctgatatctatatcaccgagcacctaaagaggaaagaagaagaggaaagagtaaggcgttggcttgaagccgacaggatagagtttgataatgatattaccgagtag

SEQ ID NO: 388186 - DNA, 327 bp, Salmonella enterica
atgaagccgaagaagctaaatgctaggcagcagtaccaattagaccttgaattagtcaagaagaagcctgcgaaccggacagaggcaaaagcacatttagcggcacagttacggattagcaagtacaagttgcagacctcttccaaaattcgcgttggcagtttcaggggaagaaagaaggtgcatttcagtaaggccgaagaagatgccagggcggcactaaataaagcaaatgccattagattttctgaaggggaggttgaatccgttgatacagatcgaatctctaagagtaataaacgctggcgtgggagaactgctgactaa

SEQ ID NO: 388187 - DNA, 123 bp, Salmonella enterica
atgtcgggcaacgggccgggtgcgacgattaccgaggacgacggcgttaaatcgccgctagtgacatcaatattaatccagatggggtacggcgaaagagcggggcagaaaaccaagagttga

SEQ ID NO: 388188 - DNA, 318 bp, Salmonella enterica
gtgttgcgcatctctgtttctattgttttagatagccatgagagctctgttgctgagagttttagtcgtggggttctttcttctgtaccgggtggtcgcatttcaaaactgcaggaacatctgctgaatactgtatactcctgtattttgcatgttgttgagatcagtgtgcaattcctcggtactggcttgttctgtataggtctggagatttctgggcaatgtccttttggacctgaacatatgtttttgattgaaaatggcatcgtgttttatcctttacgctgtgaaatgttgttttgtgcgcttccgttgtga

SEQ ID NO: 388189 - DNA, 1893 bp, Salmonella enterica
atgaacaatatgtacattaaagactatatagaatattaccttagccttacaactgaacctcaatacgccattatgcttaaaggtgcttggggatcaggtaaaacttggttcattgaacgagttcttgaagaatataagcagaaacattcagagttcaaatttctaaaagtgagcttgtatggcgtcaactctattgagcagattgaagatgagttctatcgccaactgcatcctgtcctatcaaacaaagcccttatctttggtgcaaatgtactaaaaaatacgcttaaggctactttcaagatcgatctcaatggcgataataaatctgacgtagatgtcaataccaatgttcccaccattaatcttagcgactttagcagaaaaccagatggttttgtgctggtctttgatgatgtcgagagagctggtataaatttaccaatcttatttggatatataaaccactttgtggaagtaaacggatacaaagcgatcttggttgccaatgaagatgaaataatcaacagagaaaagcgaataaataatgatgatgggaaatctagcagtgaatatatgaggacaaaagaaaagcttgtaggtaaaacatttgaagtaacgtcagatttacatagtgcttgtaaggttttcttgagcgtaattagcagtttgcatgttgctaatatatttaaagaagatatgcaggcaatagaagacctctatgtgtcggcgaaatataataatctaagacacttgaggcagttctttctcgatgtacaacgcatcatttcccttttgggagataaatatgtcaacaacgacgattttatgaaggtatttttccagcagttgttaattttctcgatggagtatcggggagggaaccttaactacgaggatttcaattcaataggcaatgttaattatggtatgtttttaggtaaagagcgtaccaaaactaagtatgacatgatcgtcgagaaatattcatctcctgtattaaccgagaagatactggatggtgcgttgtggagggagctaatctgtgatggaaaggtaacgagtgagcttctcgctcagctggatattacgcgtttttttagaagcaccgatacccaagcatgggagtatttgtggaactatcgagaacttaatgaaactatgcttaatgaacagtacgccattgccaaggataatctattttcaggtaagatcacttctttaggtgaactcctgatgaccgcgagtattttgctggcaatggcgaaagaaggactaaccacagatgctattcataacatcataaatgagacaaaacaacatataaatatttattacaatgggttaggacctgaagatatacataaggagtatgcgcaaagacattataacgaattaacggcatggcgtggttttggttttcttgacagggatagcgatgaattcaaactcattattgagtatattaagatagcgaagaagaaacggtttgatgaatcaattccggaatttgcattgcagttcagagatgagttgcaaaggggggatttatcgtttgtatctgaatttagtcattctaataataggcagctaaatcttcataacgtgccttttttacacttggttcctcctgaaattttcattgaaagctataggaaacttgacccagtcatcatgaagaaactggcatttagcttgcggaatcgttattctgatggggatgccagaaccagactgaccgaagaatacaactggttgattagcctaaaagagacagctgtagatttcactcaaaacgcagccaataacgcctttcagatttttcacgtaaagttttttattgactatgtactaactgacgcaatcaaattctttactgagggaacagattaa

SEQ ID NO: 388190 - DNA, 1011 bp, Salmonella enterica
atgaatgccatcgatccgcgctgcttcgctgccagcaccatcaataccatcagtatttcaggcggcaaagatagtcttgcacagtggctaagagctattgaaaacgatgttccgcatatttctgtctttgctgatacgggccatgaacacccgcagacgatggaatatctggattatctggaatcaaagctgggcaaggttatccgcgttaaagccgatttcacgcgccagatagaagggaaacgtaaatttattgcggaaaagtggcccgtttctctggttcaggaatgcggtatgtcgccggatgaggctgcagagcgtatccatcgggcactggaaatccttaaaccaaccggcattccgtttcttgatttgtgcatgtggaaaggccgttttccttcaacaaaagttcgtttttgtacttttgagctgaaacatgagccggtgcgtacgcaggtgatcgtcccggctctggatgaatacgacgaggtaatcagctggcagggcgtcaggggacaggaatccccagagcgtgctttgctgcctgagtgggaggaagacgcagacgatacaccgggccttcatgtctatcgtccgatcctcaactggctgcatgaagatgtgttcgctcttgccagacgccatggcattaagcctaacccactttatctgcagggctgcagccgtgtcgggtgtatgccatgtattcacgcccgcaagtccgagcttgcagaaattttccagcgctggcctgaagaaatcagccgtgtggctgaatgggagaggatggttgcagaatgttcacggcgtggcaattcaacattcttcccgtccacgcatgacccgcgccgtgctgaaaaacgtattgaagtcattaccgttgatgcttatggcattgagtcttatcgcgactgggccttaaccactcgtggcggtgtgcaattcgatctgctagcaggcatgaatgataaggcggtgtgtagcagtgtttatgcgggagtctgcgagtga

SEQ ID NO: 388191 - DNA, 894 bp, Salmonella enterica
atgttatccgatgttttatttaagaaaataatcaataacattagccagtatggtttatctccagagataggtcgtagatatcattttaaagatacaataaaacaatatttgttagatcctgccagtttcttaacttttgattgtgatggtattagccatatatctgttgaaatgaagggacaagactataggaatgcgttgttcagtgattattattatggtaagatcagaattcaagaacaaatcaataatctccaattacaaataaaaaatacaagtcaagcgtcatgggttttggttacagcgtattatgcatcttttttcatggctactgagatttcaaaactttgtggcaaatatataatcaacttttcagatgaagatattaagtttattttaaatcactcatataactctatacctaccaatatgagactggatgaagtaaattacggttatcaagtaaacatcacacattcagaaaatgataaaatgattagacttgtttttcataaaagatcccctagacctcatgttgaagtatggaaaaatatcgttgagatagtaaatcagttgaacattacagattcaaatattcattttaaaaatctcttcctgaatatttgtgaagaaagcaatgatagatggcataatcctagcaggataagaaatgactggaactacaaatttgcaaattattatggtgaaaaaggaaacacccttggtgcaacattctataaaaacattaaaaattatagttcgtcgatgaactgggccggaaatagaacaatacaaccacatgacgaaaatatagttgctggattatcttatatctaccatattttatcaaagactatgaactctattaacgatagaataattttcactcagtaa

SEQ ID NO: 388192 - DNA, 990 bp, Salmonella enterica
atgatcgatttattagcatggaacatcggcaatgaagatgttgattgtttcgtaaccgtaatgaaagccaaagacatctttcagttatcagaagtttctcgtgcaagtgaaaaacctgaagatggatatcaaagacttttaaatataaagagagctcaagatattgctgcttatctggacgaaggtaatataataccaggagccattatattaagcgccagaaaagagtataacttaagctttgacaaagctaataatataattagttttcatgaaaataataatgaaaaactgctcgtaattgatggtcaacaccgattatttggtgccagcatggcagaaaatgatatactcctgccagtttgcatatttaaagggcttgatctaaaacaagaagttcaatatttcatagatataaactctaaccaagttggagtacctaaaacattaagaattgaactccttaaatttttatctgaacctgaatcaattgaagccactttgatcaaattgttccgtgaattaagcgaagacattgaatccccgctttatggtaaaacctcatccacagtatcaatacccgggaaattatcgcatgttccctttcaggcaagcctatccggtttaatcgaaggccgtatacttaactcattcaattatgataataaaaagaaaataataattaactttctctctgccacttcccgcgtattgaaagatattgaagacactgacaaaagattaattacatctgttttcttccaggcattatttaaaatatttgaaacaacttgttctctatcactaactttttataaaaattatcaagaagaatcattatacaaaatacttagcggtttcaataaaattaattttgaggctcatagaggtactaacacacaaaatatcaaagcactttctgatgatatgcttcaattgattgaattgcatgtcaaaatgcttgaaacgccagatgatcttttagggtaa

SEQ ID NO: 388193 - DNA, 1125 bp, Salmonella enterica
atgacagtctatctagattacaacgccactacacctgtacttccagaagtagctgatctcgttcataaaatgatggtcgaagaattcggcaatgcgggcagtcgcacgcacgaatttggagtcaatgccaaaagagcagtggaactagctcgtgcccaggttgcagcggtaattaaagcagataaatcggatgtaatttttactagtggtgcaacagaaagtaataacatagccatattaggcttgcgtgaatttgctgagaaaactgggaaaaaacatattattactagtaaaatagaacataaagctgtactggaaccaatagcgcatttagaacaacatggttttaatgtgacctaccttgatacaactccggatggccaaattgatactacgcaactacaaaaatcgttgagagaagaaacaatacttgtatcaattatgcacattaacaatgaaacaggcgttattcaaccaattgatgaagtgtgtcgattacttaacgagcatgatgcttattttcatgttgatgcggcacagagttttggtaaatatccatttaccctcgataataaacgtattgattttattagtgtcagcggtcataagctttatgcaccaaaaggaatcggtgcccttattttgcgacgccgtgattattctaaacccccattaaaaccaatattttttggtggtggtcaggaaaaaggattacgccctggtacgttagccactcccctcatagcaggctttggcttagcttgtgagttagcaactaaaaatgccgataattggtttaatcacgtatccactttgaaaaataatttcatttctgccattactgaaattggagccattataaatggcaataatacttcaccttatgttttgaatttttctattcctggaattaactcagaagctgcaatggtaaaattgaaaggtgttattgcagtttcaaatggctcagcctgcacttcaagtaactacaaaccgtcccatgtactggttgctatggggatggatgccgagcgagtagatggtgcaattagggtttcgttcggtgcttgcaccccaattataccttataaagagattgtgaataggttagaaacgttacgataa

SEQ ID NO: 388194 - DNA, 1356 bp, Salmonella enterica
atgagtaagcgcaagcggccacaaccgccccactccgttgaagcggaacaatcggtactcggcgggctgatgctggataacgatcgctgggatgacgtcgccacactgatttccgcgcaggacttctttatatccacgcaccgcactatctatagccatatgcaaaccctggtcgaacaaggaaaccctatagacctgatcaccctgagcgaatcgctggaacagcaggagcaactcgaacaggtgggcggttttgcttatctggcggagctttccaaaaacacgcccagcaccgccaatatcattccctacgcgcaatacattgccagctacggcgagctgcgccagttgctgttactgggcaatgaactgagcgatatggcaggccacccgcgcagcaatgtggccgatgtactgaactttgccgaacaaaagctgtttgccattgcgcagtcacatcaggagggaggcctgaccgacatgaacgcctgctttgacaacgtgctggcaggcatcgctcagcgctatgaggccgaacgcggtagcctcagcggtacgccatccgggctggaacagctcgacgccctgacctgcggcttccagcctgccgacctgattatcgccgccgcacgcccttccgtaggtaaaaccgctttcgccctgacgctgtgcgtcaacgcgctaatgctcctccccacccagccagtacaaatctacagcatggaaatgtcggcagagcagctactgctacggctggtttctctgattggccatgtctcgcagacccggctacgcagcggcgatctgagtgatgacgactggcagcagattggcctcagcgccagtatcctgatgaacgagtggaaagatcgtctgctgctcgacgattccggaatcctcaccccatccctgctacgcagtcgggccagacgatcgctgcgccagtacgggcttccctcgctgatcgtggttgattacctgcaactgatgcgctgcggcggagcggagaaccgtaatcaggagatctcgacgatctcccgctcgctaaaagcgctggcgaaggaactacactgcccggttctggcgctgtcgcaacttaaccgggcgctggagtcacgccttaacaaacgcccctgcaatgccgatctgcgcgattccggatctatcgagcaggatgccgacgtgatcttatttctctatcgcgacgaactgtacgatcccaacacgctggatcgaggtatcgctgaagtcattgtcagcaaacagcgcaatggcccgattggcacagtacgaacccgctttatcagcgatcaaacccgcttcgaatcgctcagccagcagggagtggggtcatga

SEQ ID NO: 388195 - DNA, 1806 bp, Salmonella enterica
atggaaattattgattttttacgtcaaacccagaatgagattcgcaaggaatatcaggatcaaatggctcagccaggggttgagtcgccttttccggagctgatttttaccgatattgttatgcgtcatatggccgatatcggcatgacattcgatgatgccgagacgtgtcactttatggcgaaagtcagtggacacaatgtgcgtctcagcggttatgccttctcagaagatggcgatcaacttgacctttttgtcagtatttatcacggtagcgacgagctctgtcacgtcccggatgctgagacaaaagcgattgccggccactgcattcaatttttgcagaagtgcgttgacggtaaattatcatccacgctcgatcagtccaatgatgcctggcaactggtgacgaccatcgaacagtcctatgcggaactggagcaaatcagaatttatgtactgaccgatggtcaggtgaaaacccgctggtatcagtcacgggacgtggccggtaaaaccattaaattagaggttatggacattgtccgtttgtttaaccactggcaggaaggtaagccacgcgatgaactgcaggttaattttgatgaggtggctgggggggcgcttccctgtgtctggatcccggatgaaatgggtgagtacgattatgcgctgacggtggttccgggagagacactgcgatttatctatgaaaaatatggcaaccggattctggaagcgaacgttcgctcgtttctgagtcagacggggaaagtcaacaaggggattcgtgacactttacgtgagcagcctgagcgttttatggcttataacaacggcattgtgattgttgccgatcaggtcaggcttggtgaagcaccgggaggtggccctggtattgcgtggatgcaggggatgcagatcgtcaacggtgggcagacgacggcttccatgtttttcaccaaaaagaaatttccggcaaccaatctgcgtaacgtgcgtgtacccgcaaaagtaattgtgctgaaacagacgaataatgcacaagaagagatgttaattgcggatatttcgcgcttctcaaatagccagaataaagtcaatatttccgatctgtcagccaatcgaccagtacatgtacagctggaaaaaatggcaaacacggtgtattgcccggacggatacagtcgttggttttacgagcgagcaaatggcagttataaggttatgctggaacgagaaggtaaaacaccggcgggcattaaacggttaaaagacgcaattcctccatcccgtcggataacgaaaacggatttcgcaaaatatcactgtgcctggctccagcgtccggatttagtcagcctcggtgggcagaaaaactttgccgcattaatgacgatgattgacaaggatactgagcgttatggggatgaactgaacattgaaacttttaaaaattacattgcacaggctattatttataaaaaagcctataagttgattaattcacttttccccgcatttaaggcgaatatcgccgcctatactgttgccgcctattcacatctttatggtaacaaaacggatctggcagagatctggaatcaacagggtatcgaggaaacgatggggaatcgtcttgtcagcttggctcaccgagtaaatagccttctgactgaatcggcaaatggcaggatgatttctgaatgggcgaaaaagccggagtgctgggactacgtgcgcagtaaaatctatttctccgcacagggaaaaaaggatgacttctcgcatggtgaaattgcatga

SEQ ID NO: 388196 - DNA, 1029 bp, Salmonella enterica
atggtgcggctgagtaaagacgatctgctggcggcctggaaagccttagatcgatctcagatagacgaactgcctggcgctcagggctggcgcgggattcggctttttacgcaccagggctgtagctttcatgccgggcgtcgtcagcctgataatgaagaaatgctgattgccgtgtttcctcatcctctttcgcctgggtcggcggcgctgccatcttgtaaaggattccgcgttgagatggccggaacagaggagggggggcagaacggtttgatgatccgtcgccagcaaacagggaatgtggatgtctttacgacgatgattctggatattctccattcgctcctgaacgtttcgaaaccgcgcctgtttgaaactctgcttcgtcggattcgtttatggcaggcgtttatggagcgcgatacccgtccactcagtcaagaagaagaagttgggttaatcggcgaattgacgtgtctggagcggttgatcgagagcggtcttgctccgtcaacggcagtcgaagcatggataggaccgcagcatgggctacaggattttgcactcgatgaacgcgccattgagataaaaagcactacggcagcgaagggtttttgcataactatccactctcttgaacaactggactggcagcgggcaggatcgcttgtattgtgtggtttgcgcttcagcgagcatcccaccggcgcaaccctgaatgacatcattagccgtcttcgtcaacggtttgagggaaacgctacggcggcttgtatttttgagggatcactttgtcatgtcggatatttcactgaacatgctgaattctatacacgtcatttcttgctgacagaggcgttcgcactccccattgaagcggattttccctctttgacgcatgccaatgtcccgttgccggtggtgagtgcgcgctatcaactcgaactccagacacttattcctcaggcccaagattttaaccattgcttgtcagactttgcaggattaccgcatggaaattattga

SEQ ID NO: 388197 - DNA, 2859 bp, Salmonella enterica
atgagtcttaatcccttggatgacacgcaactgagtgtattgcagattgtgcaaacgttcctgcaaagtcaggataaaagcacgatcacgcccggtattctgcgccaacatattgatatggtttgtcagatgaaacctgagtggagccgccttgatagtcgggagatcctggtcgaagagttgatccgccgttacagcatctggatgggagcagattcttctctgagtaatgacgaagggcatcaaccctggctgaccgctgatgcgaaacgcgagtggcgctactggcatcgatatcgccagtggcttggcaaaacgatgccttggggagtcctggatacccttgaccgttcaacggatcgtgttctgggattacttgagcaaccggggcgggaagggcgttgggaccgacgtgggctggtggtcggccatgttcagtcggggaagaccagccactataccggtctaatctgtaaagccgcggatgcgggatataagataatcattgtgctcgctggtttgcataacaacctccgctcgcagacccaaatgcgtcttgatgaaggatttcttggttacgagacgagcccactcagagaaaaagtgaccatcattggggtgggcgctattgatagcgatcctgtcattcgtcccaactacgtcactaaccgatctgaaaagggcgacttcagcgccggagtggctaagaatctggggatcagccccgagcaacggccctggctgttcgtagtaaagaaaaataagtctattttgaagcgcctgcatacctggattgagaaccatgttgccaccagcgttgaccccatcaccggaaagcgttttgtttcggaattaccgctgctgatgattgatgatgaagcggataacgcctcagttgatactggggaaatcgtctacgatgacgatggaaaaccggatgctgaacatcagccaacggcaataaatagtctgattcgtaagctgttgatgcagtttagccgtaaggcgtatgtcggatataccgctacgccctttgccaatatttttattcacgagagcaatgaaacacgtgacgaaggtccggatttgttcccttccgcctttatcattaatctcggcgcaccctctaactacatcggccctgcgagggtatttgggcgggccaccgcggaaggccggagcggagagttgcctttgattaggcgagtgagtgatcactgtagcgatgacggaaaaagggggtggatgccggtttctcataagagttcgcactatcccacactggatacgctaactcatttcccggactcgttaaaacacgctatcgacagttttttactagcatgctgtgtcagagaattacgcagtcagggagagaaacacagttcgatgctggtccatgtgactcgcttcaataaggtgcaatcggttgtttatgaaaatattgatgcctacattcaggacgtgaggcagcgactgacgcgaaggattggacacgaaccttttttacatcagcttgagtcactctggcaggccgattttttgccgacgaatcaggcgatccgcgaagttatgccgcagcaggttccggacgacgccttcgaatggcaggagatcgtcgacaagctgtataccgtgatagaaaacgtgtcggtacgaatgataaacggaacggcgaaggatgcgcttgattattcggacagtgcgacaggcttaaaagtcattgcgattggcggagacaaactggctcgagggctaacgcttgagggattatgcactagttattttttacgcgcctcccgcatgtatgacacgttaatgcagatggggcgttggtttggttatcgccagggatatctggatgtatgccggctttataccaccgatgagctgattgaatggtttgagcacattgcggatgcgtcagaagagctgcgggaagagtttgacaatatggtcgccagcggcggcaccccacgtgatttcgggctaaaagtgaaatcacaccctgtgttaatggtgacctcgcccttaaaaatgcgtagcgcgcgttcactatggctctctttcagcggcacagtggtcgaaacgatttcgttgtttaaagaacaggagtatcacaagcgtaactacgtggctttccagcgtctaaccgggcgcgtcggtgctggcgcgccgatacctgagagacgacgcggagataagattgaaaaatggaatggggtcatttggcaaaatatctcccctgagccgatcatcgatttcttaacggaatatgagacccatgctcaggccagaaaagctaacagcaaactactggcggattttgttacgcggatgaatcgcgttgatgaactcacccaatggacggtggcggtgatagggggtggcatcgatcgccatcacgatgtttgcggcttttccgtaccgcttatgatgcgtaaagcgtctgaaggggtcactgaccgttattccattggccgtttactttccccacgcgatgaagggattgactgtgatgaatcaacttggcttgctgcgctggaagaaacgcagcgtatttttcatgccgatcccggacgcaatgaagggcgagaggagcccgtcgttccaggtggcgtggtactgcgtcggattaaaggatttggcattaacgacattccagcacagcgtcaaaaaggtttattgctcatttacttactggacccgcagcaggcattgtcggcagcggaatatcaggaagatgccttacctgtggtggcttttggcatcagttttccgggaagccgcagtggggtaacggtggagtacaaagtgaacaacgtactatgggagcaagagtatggtgcggctgagtaa

SEQ ID NO: 388198 - DNA, 1503 bp, Salmonella enterica
atgacgaccatgcgccatgcgccaccgaatgcagccattatgatcgaagcgctgcgagggctcggttacaacactgccaccgcactggctgacatcatcgacaacagcattagtgccggtgcccgtaaggtcgatctgacctttcactggcgtgagtcggatagctatatcgtggttcgggataatggttgcggcatgtcggccgctgaactggatgttgcgatgcggctgggggtcaaaaacccgctgacaaagcgttcaggacacgatctgggccgcttcggtctgggactcaaaaccgcctccttttcgcaatgtcgccgtctgacggtcgcctccaaaaaagaggagataacgaccatcctgcggtgggatctggacattctcgccgccagtacggacgacggttggtatttgcttgaaggcgctgacctaggaagtcaggaggcgttagcaaatgaggaacctgactcccacggtacggtggtgctgtgggacgttttagaccgaattgtcacccccggctacggtgagaaagatttcctcaatctgatggatggcgttgaacaacatctggcgatggtatttcaccgattccttgaggggaacgctccccgactcactctcaccctcaatggtcgcaaaattaaagcttgggatccctttctcagcgggcatccttccaagccctggcattcgccttcggcaatggcgccaggcgctcctgccgtgaaggtggagtgtcatgttctgccgcatcaggatcacctgacgacgcaggagtatcaacaggctcaaggaccggcaggctggacggcccagcaaggattttatgtataccggaatgagcgattgctggtggcgggcaactggcttggactcggaagcccccgggcctggacgaaagatgaaacccaccgccttgcgcgaatccgtctggatatccctaatgatgccgacatagactggaagattgatattcgtaagtcgatggcccgcccaccggtttcgctgcggccttggttaacccaactggcgcaatcaacgcgtgatcgtgcggtacggacatttgcaaaacgcgggaaaatgaataagcgcaagcccggcgaggaacttgttcagctctggcaagcgcagaagacgccatccggtgttcgttatcagatttcgttacaacatcctgttatcagcaatgtcctttcgcaggccggtgagttatctccacaaattcaggccatgctaagactgattgaggaaaccgttccagttcagcaaatctggcttgatacggctgagacaaaagagacgccgcggacaggttttgaaactgcaccgcccgcagaggtgttgtccgtattgcaggtgatgtaccagactatggttggacagcaggcgatgtcaccggcgctggcgaaacagcacctgcaaaatatggaacccttcgataattatcccgaattaattgcactactccccgacgatcaacatgagaaatcgctatga

SEQ ID NO: 388199 - DNA, 2040 bp, Salmonella enterica
atgcatcgcactatttctgagttttatcgcattccccctttacttattcgggcgctaaaaagtggaatttcctccgtggtggagtttcatctcaacaggggattacccaaagattcacgagattctctgggaaacagcccattgatgattgcggcccagtatggacatttcgctatttgcgaaatgttgttgagtgcgggtgttgatgttgaacatcaaaacaacctcgggcttcgcgctagtgaccttgcgcaggagcaaaaattgcgtgatctgttggcccgttatcgtcagcctctttcacttgccgaactggaacgctctgtggtttcagtcgaggactcagaaacagaggcagaattacccagcgctgaaatcccgatggattttatgctgtgggatgcagaagttgaattgaagcccgccgaagataatctgacgttaagacatgcttccgctgaagcccagcaattattatcacgctatcgcccgaaagataactctgctgagtggagcgatatcgaactcacgctccctgaaccactgacgccagtttctcactctccgcaaaattaccctcatctctcaacgttgctcattggcgcactggatacggggcgtatctctttgcgtgacatctggcatgccggggaagaggatttcggtatgcagtggcctgaattccggctcagcgtagaggcattgatcagggacttaccgctgattgtggatgacgatgatattattccgcctgacgctgctccggcgacattatcggtgagtgaacctcttgaaccctggtttgatgctttcaatgcattgcggcagttcggcatcgttgaaaactatctcgtggatatccgccagtgggatgtcgtggataaaacaaaagaagaacgactcggccagcgcatggatacggcgctaattaatctgataagaatcctggcgggtttatccgaagcggaatatatgcagttgctgcagcccaattaccttccggagccagcgcctgagatttctgaagaggaagacgtcgcagaagaagcggatgaggaaatgcctcccgtatccgatgacgatgacgataacgatgacactatcagctttatcgagcttcttgttctgctgagaagtgggaaagcaggcgagtatcaggataatcatatcccccgcccggagtatgccgacctgcaacagatagttgagcgcgcccgaacgctcatccctgatgaaggtcataaaataagtctgtatgtcagcagttacagagaggcttgggaggggctgatccacgccaacttgcgtctggtcgtcaccatcgcgaataaatatcgcgggcggggattagatgtcgaggacctgatccaggaaggtaatctgggtttgatcaaggccgttgaaaaattcgactatcgacgcggatttaaattctccacgtatgccacctggtggatccgccagaagatcagccgcgcgattgccgatcaggcgcagctcatccgtttacccgttcacttctatgagcaattcaggcgctggcgaaacagtcgggatcaattgctgtatcgccaggggataacgcccacgatcaaacggctgcaagcattgactgaccttccagaaaatcaactcaagcggatggcaaaatatgaagaacagacggtgttgattggcgattttcatgatgacgcccaggacagcgaagcggcgctgtcgggagacgcgatcctgaccggaaaggatttcaccagtgctcccgttcagtctctcgagctaagagaatgtgtttcattggtgctggaaacgttgttgccacgcgaaaaacagatcataaaaatgcgttttggcatcggtatgacgcaagatttcacgctggaagaggtgggtaaacagtttgatgtcacgcgagaaaggatacgtcagatagaagccaaagcgctccgtaagctccgctatcacagccgggcgtcgaaattaggcggcttcgtcgaacagtgggaaaccgcgttgagcgagatgcaggaagaagaagaatga

SEQ ID NO: 388200 - DNA, 276 bp, Salmonella enterica
gtgcagcgtgctgaaggggtcactgttcgcgtagggttacgcgcgatttctgccagcagtgtaaatcgcaataactggcgcttgcgcacaaacggatcccgttgttatccggtgggcgccggaaaaatgcaggaggtccgggcggatagcgagacggctgtcggctggctatccgcccggaatgaggctgaacaggagcgtaaagggtgttttgcgcgacggaaacgtcacgagcgcgaacaggcaaaacaagccgcgcagtcaggtatggcgtga

SEQ ID NO: 388201 - DNA, 609 bp, Salmonella enterica
atgcttaaacgtctggcttatctgatagcaggcagcgctctccttctgctggcggcagcggtgttctggtgtttcaaccgcctgaacaccctgacgctggcacagcaacagacgcaacgccagataacacagtggcacgatcagccgcagccagacagtgattttcagcaactacagactgccgtaaaaaacattaccggacgcatagaagctcttgccagacagcttaacgatgccgccagcactcaggccgaacgacttcaccccattaacgaacagatcaaggcgctggagagacaggtccagaccctgaacaccagttatcaacacctgcaacaacagaccgccacgcgcagccgcgcaaaggcaaaacgccccgtcctatctccgctttgggccgcaaaggcccctttttctcttatcagcagcgagtttcgcgccgggcggcagttcgccgtcatcgcgccatccggctatcgctcgctctcacagcttcagcttgttgcccccggcgacagcgtgcagggctggcaactgctgcaactggacggcagtcacgccactttccgtaaaggcagtcagcggttgacgctgaacgccggagagtaa

SEQ ID NO: 388202 - DNA, 681 bp, Salmonella enterica
atgcccgaacatgcgccacaccctgtgcgccaccccggattgctcggctggctcgcattattacccggcgtgctggttggcttttgcctcggcacatggatgctggcaatagcgctggagtggctgggtgatgcatttttctggcggaacgcctgcgccagccatagtgaacaggtattgaaggcaacatggcagtggtggcggagttccgctggcgcaccagcgtggttagtagaagatctggcgcttgtcagcgataagctgcaacaagggatcgcggcactgattacctcgctcaacgggcaaagtgggttgttctggacggaaaccgtcactacggtgatccgctgtgcattactgtctgtgggcaatatcacccttacttttctattgcgcctggcaattctgttgcaggccctgccgttatttgcgctagctatcatcatcgggctgattgacggactggtaagacgtgacttacggcggttcggcgcaggccatgagtccgggtttgtttatcaccacgccaagcgtatgatttcatcctgcttgatagcaacgggactaatgtggctggcgataccggtttttcttgagccgggggttgtgttagcgctgggagcaatggtaactggaattggcatatctgtggctgtcggcacattcaaaaaatatttataa

SEQ ID NO: 388203 - DNA, 687 bp, Salmonella enterica
atgtctacggataaatataataaatactttggtatcactaaattcacgattaggcctacagataaacatattcgagcgttttctcaagttgccgatatacgaaaatttgaaatcgatatgtattggaaaagagcagcttacttctggactattatagctgtaacatttactggttttttcgctttatctgcctcaagttcttttccttataaagatctctttttattgttgctttctaatatgggattggtcttcacattttcatggtatttggtgaatcgcggtagcaaatattggcaagaaaattgggaaaatcatcttgatcacatggaggataaaatcacagggcctctttataagacaatattagaaaggcctaaagttagcaataaaaagaataataaaattgatcatttttttactggccccagtaaattatctgtttctaaaataaatcaatgggttgctatatatatatgctttatctggttttttctaataatgatagcgtcatcgagtgtttttattgagttgaaaaacatcatgcccattccaaaatcatatgtggccatgggttttatagtgctttcttttattacaatgattcttatgtattggaaaggaaagacgcattcgggggagcatttatcatcattagttgaaaggcattctcgtatagttccatga

SEQ ID NO: 388204 - DNA, 321 bp, Salmonella enterica
atgaaaccctgttatacgtttttcatacttttcataactctatgccatacgagaggtattttcgccgcccctctcaccgagcgcgaagagctaaccctgtcccttaaccagcttacccaaatagaagcctcacttcaccgcgcccagcaaagcgccagaaccggcatcaacgagcgctactacttcgactacccgcgcatccacgacgatatcaccaccctgcgcagcgggattgaacattacttcacacccacccgcgcccagccacgagatacggcgacgctcgtcgggcaataccgtgaggagaaaaccacgccatga

SEQ ID NO: 388205 - DNA, 525 bp, Salmonella enterica
atgcttaagcgtcgcactctcaaaactgcacttgcggcggttatatccctcgctgtccttgctgtaccggtttatgcgaacccaggtaacggtaatggaggtggtgggcatggcaatagtggtggtaatcacggtaatagtggtaaccatggcaatagtggtaacagtggagaccatggtaacaaaggcctgggtaatggaaagtcggatgatgaccatggaaatcctaaaaattacggtaagccagatcatgtcgactctgatatcagcttctccaaagcccgttctcttgcggtgaattatggtcttgttggatatcaggcgctccctccgggtatcgctaaaaatgttgtacgtggaaaagcattacctccgggcattgctaagaaaacgttacccgcatcaatgattaacgatttgccgtattaccctggctacgaatggcgtgccattggtgatgatttggtacttgttgctttaagcacggctattgtgacttcagtcattaacggcgttttcaattag

SEQ ID NO: 388206 - DNA, 1302 bp, Salmonella enterica
atgtcagagagcctgcaatctaatacaactcaaacgttacctgacgatagggaagagctgtataaccttgtctggcgcgagcctgcagagcgaatcacttccctctatagcattagccaagaacaactgacaaaacgatgcgttgagttacggataccgagaccgcttgcaggatactggaaagcactggcgaaaggggccgctccgtcggtaccagcgctgcctgatttgaagaagggcaagatagaaaaatcccccagaaaaactagccaggccattcctcctcccacaaaaatatcatcgaaagtagcagcgccagcaccgcgaaagcgagccagggctgcgggcagtggctatgcgctgattgatgatctcaaaacttactttcccgtctcttccgtcacaaaagacggctactacaaaccaacaaaaaagaaattgctcgatctgaatgtttcagaaacggggtttaacagtgccatcgattttctgagtcggttctttgctgcactgggaaagcaagggtattgggttcgattagctgaaagcagcgaggggcttcattgtcaggacatcgatattaacgaagatccaaaagggggcggctttcgctgcgacagcttatggcggccttgttcagccagcattatttgcgttgaggatatgctgtttgcctttagccttgcagaaatgacggaatatgttccggcaaaagaggttaatggccggtatatccgcgatgaaacgatgatccgctggatgagggggaagtatgacaagccatttcgctatgtcgttaaacataccttaccgaccggacgatttctgctacagctctattcgccatactcatcaacaaactggcaggcgcagttccggcagacaaaacagtgtggattgataagcctgatccccaggatgatttcggcattgcaggaaactgttccgctaatttcaaaacagttagaagaggccagaattaaagccgaagaatggcgtattcagcggaagcgggaacacgccatctatctggaaaaggaacggatacgtcaggaagaggaggcgtataacgccagccgcacggagctgaaatcgattatggcccagtgggctgaagacaaacggatggatcagttttttcgcgaagcagagtcagatgcggaactgcttgatgagcaaaaaaaggcacaagttaagatacgcctgcaacttgcccgtcagctcttgtcagaggatacagcggttgagcggttgctgaagtggaaaacacctcaggcactgttgaataaggggaaaaaataa

SEQ ID NO: 388207 - DNA, 258 bp, Salmonella enterica
atgaagcggttaattctctccggctccctgcttctggtctgtatggctgcggtgtgttatctgtcatcaggtaacgcgtcgcagcttaaccgcagcaatctgctgctctggcgcatcacgctgtatggagtgatcttttgtacaggctggcgtctgtatgactatttaccgccacatcgtccggcaatccgccgtatcgcactgatatttataataatgattgtgctcaacgaaatcgtgccggaggtaatccggtga

SEQ ID NO: 388208 - DNA, 1692 bp, Salmonella enterica
atgcagaataggtaccaagccattcgatgtaagcagaccagtgatggtaactggctagttttcttctcggcatcagctcatgagattgatatttgggctggtattccagagaaaaagaactttgattctgtcgaatcaacaggatttcagcgatctttcaaaactgaacgtcttgatagtctaataaatttttattcaaataatgataatattttacaaaatcctctcctatgtgcacctagaaaaataggaaatgaagatagtgcggttcatttcattccagatgatggtgtaagcccagatgattatattcaaaagggaacagttgttatcaattatgagaatcttcacaatcttaaattgattgaattacttcagttattcagtaattatctcagtagtagggttgaagatattgataaacaaggtttggatactaatcttcttactaaattaaaagagcgcctatcattaggcaacgatgatcagcccgagaattatcccataaatactgataacaatgaagggggagaaccatttgatgaagaaattactattattgagtcatcgcatataaatgatttatggcaagaagttgcttgccgaatttcaatacttaaagaatatggtcaggagtatgacactcctgaaattttgggttttaaaaaagaatctattatttcttatcttaaaccagtaattattgttgatggccagcatagacttattggagctatagaacattcaaacagagaatccaaatctactgattctatggctaaatatttcgattttatgacaaccgatggactaaatgaacaagaagctaaattgagggttcaaaatgaggtatgtcgacatttacccatttctctagttttatcagatgatcctgcagaacatgtttttcaatttgttgttgttaatcagaaagctacgcctattaacaatgcattattaggcacaatagtgtcaacaactctttctacaaatgagttagaacgagttgcggatagattaaaaaatgctgatattgagctagaagcatctcaagcagtttcatttgcaacccgaaattgcaatagcccattttttggactagttcaaaccgggattagtggagagcagtcaggtaaattaccgtggactgtaatgagatcgttaataacaatctttaaagatcttaaaggaggtaaattttttagtgatgaaaatcgcatcgattatgctgacctgtggaaaagacgttatcttgaagcatcagaactcatctctgagaatgataaattctccacgtggagcgctgaagaaggagtatggagagatgtatttataaacttctggacttgtataagagataaattcggtaattgtaatgatccaagcagccataattattgggggcatactagttcaaatttattcaataaaatttctttaactatattggcggcagatttctttaaatacttatgtgaatcaagaactaatctaaattctgtagactcagtgccacaattagtaaatgattggttaactgatgttgatcctaattattttaatagggactggaaactagctaacgtaaaaaaagatgctccaggaactagaaagcagtggtccagattatggctgacgtatcgccaagatccaaggcagcttcctcctgtaactagttataaaaagatataa

SEQ ID NO: 388209 - DNA, 828 bp, Salmonella enterica
atgaaaaatgatatcaatttacagtggttggcttggttttgtgagtcactatgcaatttagatgagtgtttggaagaggttgaccaatataagatattttctcttgttagacgagggttaatccatgtagatattgatcagaataaccccaactttctaaatttatgcagcattatatcttattttttgttcaaaaggatagagagcgtttcagggcgattaagacaacgtgttaccaaacaacacaaattagacttaattgaatcttcacaaggagaaccaagatgttggatctgtaattcaaaattcagcaaagatgccattgagctcttcctgggaagaactggaaatatagttctccctgagtttgttgactacatgatgcccagaggattaattgaacgagatcttaaaattgaagtcgagcataaattacctttttctaaaggaggcggtgatattgatgacctaaataatattgcattgagttgcggatggtgcaaccgatacaaatcgaatctaatttctatatatgatgtcggtcgaaatctaaaaaactataaaaatagtaattttatcggatttagcatacctgaaccttattgggttataagaaaaatggcattagccaatcgttgttcacatccaggttgtactgcaacgcggaaaaacaatttatatatagatttaatcaatcctcgaggcgcagctaatccgataaaccttaaagttgtgtgtaaacggcatgtccatgattatcatcatcgattagtaccagcaagtaactatgcagattgtgtttctagtaaaagaaaccgattaatataa

SEQ ID NO: 388210 - DNA, 1419 bp, Salmonella enterica
ttggatttactttctcaattgcaaattgacttagctcaagtgaataaaaaagttcttgcatccaatgtagaacaaaatgttattgcaaaaatagaaagctgtgaacaagagataagtcaatgcaatatttcaatatcagagttgaaaaaagaattagttgaaatagaacataatattgaaaaaaataatatagctgtcaataaggcccgtcaagctgttcggaatgcgggggctcatctgatcgaaaaacgtgacgaacttaagtttgaattaggtattattgattccagacttaagcaaaatagagctgagcaaatcaaattggcagctggagttgggccacttggtttggtaaaagatctgattgaaaatactaaagctcagatccatttggaaactagagccacacaggctaaagtattggacaaggcaataagtatttataacgaaaaaattgtaaatacgctaaaaaaagcttctgcacctaatgaaaccatttcatatgttaatcaaatgatggcaaaggaagaacaaactagacaagagctggttaatacagaatgctttctgaatacggaacttagtatttttgatggattagatgaacgaatgatacaagaggaagtgcatcgtcaacaactaaaaaaagaagaagctcaattaggtgaacaacaagtgacattacaaatgcagcttgatgcggttccggattatgaatcggtccaacatttaatttccgaacttgctaggcatgaagtgatgtttaaggaatccttgatactgcttaataataagcagggattacttgagcaagtaatgtccaaaagaaatatattatcacaacgttatgctaattatttatcacaacaaaataaagatactttcgagcaaaaacgctctattcaggttagtgagcatattaagaagctaaaaaataccttgcaaggttttgctaatttattgattagtgaaaatatcgaaaaattacagtcactggtaaaagaaaaatttgatgccttgggtcgtaaatcacaacttattagtgagttgaaaatttgccctataaacttttcgattacattatatgatgcggttggtaatatactggaacctgccaaactttctgcaggggagcgccagctcttagcaattgcaatactatggggattagctgaagcttcaggtaaagaacttcccacggttattgatacaccacttagcagattagatggcaaacatcgtagtaaattggtgaaaaattatttcccaaacgcgggtccgcaagtgatattattatccacggacgaagaaattatttctgattactatcaggaaatcaaaccctatataagtcgtcagttctatattggttatagtgatgagaacaaaacatccagtttcaatgaaggatatttctga

SEQ ID NO: 388211 - DNA, 630 bp, Salmonella enterica
gtgccggtgaacgcggcactgcaggcccgtgtgctggaaggggctgccccggtgacctgccgcccggcggacctgctgaagccggagctggctgaactggaagcggacgtcaggtgccaggcgcaggagaagggcattcagcttgcgggaaacgccattgacgacgtgctcaccgtggcgctgttcccgcaaatcggcctcaaattcctcgaaaaccgccacaacccggcggcgtttgagccggtgccgcaggcggaaaccgcgcagccggtggcaaaagcagagaagcctgccgcctccggtatctacaccgtggaagtggaaggcaaagcctttgtggtgaaggtcagcgacggcggcgatatcagccaggtctccgcgtctgcgccggtcgcggctccggcttcggccagcgcgggcactccggttaccgcgccgctggcgggcaatatctggaaagtgatagccaccgaagggcagagcgtagcggaaggcgacgtgctgctgattctggaagccatgaagatggaaaccgaaatccgcgccgcgcaggccgggacggtacgcggtatcgcggtgaagtccggggatgcggtttccgtcggcgacaccctgatgacgctggcgtaa

SEQ ID NO: 388212 - DNA, 525 bp, Salmonella enterica
atgttatggagtaaaggtcttggcgatctcattgaggcaaaaaagatcctcagacaaaaaaatattcattttgttttaaatgttgcaggtatattggccgaggacgataaagatgctatccctttggagctcattcatcactggcataatgaaggactaattaactggctgggacgctcttcgaatgtatatgagcttattcagaaatcgaatatcgttgcattaccatctatttatccggaaggagtaccacggcttttattagaggcatcatctgtaggacgtgcatgtattgcttatgataccggcggatgtgatagcttaattattcataactataatgggttgatcgtgaaaagtaattcagctcaggagttagcggtagaattagagtatttgttaaaaaatccacagattcgcttagagatgggggcgaatggaagaaaacgtgtaaaggaaatgttttccagcatattagtcattaataagacattgcaaatttataaagacactattggttgctaa

SEQ ID NO: 388213 - DNA, 408 bp, Salmonella enterica
  misc_feature (321)..(330): n is a, c, g, or t
atgcttgatgtgaataagaaaatcctaatgactggcgctactagctttgtaggtacccatctactacatagtctcataaaggaaggttatagtattattgcattaaagcgtcctataaccgagccaacgattatcaataccttgattgaatggttgaatatacaagatatagaaaaaatatgtcaatcatctatgaatattcatgcgattgtccatattgcaacagactatggtcgaaacagaacccctatatctgaacaatataaatgtaatgtcctattaccaacaagactgcttgagttaatgccagcgcttaaaacnnnnnnnnnnctgactctttttttgggaaatatgagaagcactatggatatatgcgttcttacatggcatctaaaagacattttgtag

SEQ ID NO: 388214 - DNA, 189 bp, Salmonella enterica
atgatgcaggcacctgtgataaccgcagccctgctggtcagcccggtgctgatggtttgtctggtgttctgcctgctggccgtgttgctgatgcttatcctgcggggaggggggcgaaaacagaaatgcgcccggacctgccgccatcagcgttaccgcgtcaccgcacccgggtgctggccagactga

SEQ ID NO: 388215 - DNA, 366 bp, Salmonella enterica
gtgtcgaaaggtcgggcggacagcccgaccagagtatcagaagtagtacttgaggcctgcagtggttatgaaactgtaattttcaatacctgcgccattcttgatgtagtcataagtgttatcattatggtcataaagtgctgtatcacctttcttattagtgacccgattccacgtaccttcaacataaacttttgcattcggcgttacataataaccagcgttaatggctacagagtagtaattctggtctttgactttttctcgataggtgattcttttactcgggtcataatgctcatcattatcagaggattccacccagccactgtatttaaatgtgcccccagttcaaaatcttcataa

SEQ ID NO: 388216 - DNA, 1866 bp, Salmonella enterica; identical to SEQ ID NO: 377853

SEQ ID NO: 388217 - DNA, 1782 bp, Salmonella enterica; identical to SEQ ID NO: 381649

SEQ ID NO: 388218 - DNA, 654 bp, Salmonella enterica
atgaaattaggtaatgaaattgccttagaaagtggtaaacaatggactttcgataataatgtagctccttattttgatagtcatgtgcagcaatctgttccagtttatcttgaaggccatgaactaatttgtttcattagtgatttctttgttagagataacgctattatatatgaagttggttcatcgacaggagcgttgattaataaaatttttgaccggcaccatatgaaaaataatgttcggttcattggcatcgaacctgtaaaaagtatggttgaacaagcaaaaaaacaatcaaagggaaagcatattgaatacattaatgaatgtatagaagtagtggaactagaaccgtgtaatcttatcgtatcatattattgcgtacagtttatagaaatgggaaatagagaatatatattccataaattctatgaaaaattacagccggatggagctctgattattttcgagaaagaaataattaatgattcaaaaattaatgaaattgttgagtctaaatttagcttagaaggtgtaatgaacactaacactgaaaatcaaaacatacgtctattgatgaatgctgggtttacccagtttgagacaatcatgaaatacggagaattccatggatacctttgtatcaaatag

SEQ ID NO: 388219 - DNA, 159 bp, Salmonella enterica
atgctggaaggtaaacgagaaggacttcaggaaggcaaaactgaggagcgacgtaatatcgcccgccgtatgctggagagcggaatgacgcgtgaggcggtggcgcagataaccactttaacggatgatgagatcgagcagataatccgctggcgctaa

SEQ ID NO: 388220 - DNA, 1218 bp, Salmonella enterica
  misc_feature (1174)..(1183): n is a, c, g, or t
atggctaagaaacccactaccggaaaagccgtcaaaaagcagactaacagcaaattaagttttcataagcagctggttttaaatcgctttatgttccgtttttttaaagacggtacactgcatggtttgaaaatccgtttaggtgaagaccgatttgaaggtattcatgaagatggccaaagcctgttcttccatgagttaagtaactacttattcgaggtcgatctcatcgacctcgatgaattacgtcgctacgatcttaatattgttaagcactggcaacaaataacagagcatcgtaatcttaaagaagatactgtattgaatatgaaatattttcaatacctgtctcttttgtttactgagatctatctcgattggtacttcaatcgtaaacaagaattacttgatggtcttaacagtgaactcaatatatacaatgctgaaaataatgaaacagcaaaggatagagctaatcagtttaaatcatacatcctggatgatttgaataaactggcatactggaatgctacaggttccggtaaaacattgttattacatgtaaatattttacagtacctacattactatcagaatggtaatactcatcattatcctgataaaatcatcctgcttacgccagacgaacgtctttcacaacaacacttggatgagttgtataattctggcttttcccacattcagttgtttgataagaacaaatcagctccgtttaaaggtaccgttgaagttattgatatcaataaacttgctgatgacatgggtgataaaaccgttgctgttgaggcatttgaaggcaacaatctggttctaattgatgaaggtcataaaggaacagggactgctgctggtgcctggatgcgtcgtcgcgacaaattaacacgagacggttttgcattcgaatactcggctacttttggacaagcagtatctggcggaaataatgttgaagctgtcgaagccgaaatcaaaaagaaaaaagcaaaattactctttgagacaactgcattaggaaaactgactgctgagcagttagaaaaattagagctgacctcagaggaattacgtgatgcgcgtattcaggccacaagagaagtttatggtaaatcaattctattcgactattcctataaatttttctatgaagatggcnnnnnnnnnngaagatggctatggaaaagagtctctgattcttaa

SEQ ID NO: 388221 - DNA, 225 bp, Salmonella enterica; identical to SEQ ID NO: 377927

SEQ ID NO: 388222 - DNA, 654 bp, Salmonella enterica
gtgaatttctttaaacgagatgatggtgttttagacgtaattacaaaagcaattactgttgttagttttatttttggtatctggatctattttcacacaatacaccctgtatttcaaaaagagtcggaattgcaagatttaaggaaagacaaagtaaatattcaaactgacaatgaaagactgggcaaggaaactgcaaaaataaaaaatgatttgcacattcaaacagaaaaaatcaaagatctaaatgagagggcgggtaatttatcattagaaattgaatctaaaaactctgagttggcatctataaatgagaagttagaaacagcacataatgaggctgttttgagtaagttgaatttaataatggataaaataatttctgcatatttaatttctattgcacaaggtaaaaataaagagttcaatgttattgaatattctcatggcttaatagaaattcatgatcgagctagggaattaaatatatacgataaagaggcatactcttattttgttaagtatctggatgaaaataaaagcagaaagtttataacggatgaggaaatattttcttatgctatcatgattccatattattataagatgagtaagcatctagttaatactaaaggaatcgaaaaacataaataa

SEQ ID NO: 388223 - DNA, 174 bp, Salmonella enterica
atgagtacagaaaaaacactccccccgacacctaaaaaattacgggaagcgcgtgaagaaggacaggtagccaaaagtaatgaactggcagcaggtgttcagcttgctgttattttattatacctctatacttttggtaatgatatttggaagtatagaggtataataaaataa

SEQ ID NO: 388224 - DNA, 363 bp, Salmonella enterica
atgagcagtaaagatcaacaatctcaatgtaaaaaaattaaattatataattctgaaataatggatttacaatttaaaatagaaaaaatatctcagattctgaaagattttgatgagcatagcttgcaggttgatgacaaaaaaaagatcactataaaaacaacgcctaaagtaaataaaaacattgctaatgtattaaacatcagctacgaagaatgcgtaaatttacctacaaaaatcatcttgaagaaattatcagaagaacaaaaaaagagcaagaatgtagcaatggaaaaactaaaattcattacaaccattagccaatctctactacacctggcaacaataagacacaaaaagtag

SEQ ID NO: 388225 - DNA, 1056 bp, Salmonella enterica
atgacgcatcaatggcagaatgtgcttattggaccagacagtacgatacgtgaagcgctggaggtcattaaccatgaggcgctgaaaattgttttagttgtggataaagaacagaagttacttggcgtaatcactgatggtgatatccgtagaggcttgttaaacaaccttgatctccaggcgtttgttccacaggtgatgaatccatcgccagttgtagctagcggtgaaatgtccgcccaagaattgagcagaattatgtctgagaccgggatcactgcggttcctgttgtgaaagatggaagggttataggcctaaagacgcttcaatttattaatgaaaataaaagatacgataatcccgtttttattatggcaggtggttttgggacgagactacgaccattaaccgacaattgtccaaaacctatgttaaaaattggtgataagccgatattggaaacacttattcgcagttttgttaaagctggcttcagtaatctttatatttcaacacattacatgccagaagttatccgtgattattttggtgatggtgaagcattcaatgctcaaattcactatgtccatgaagataaacctttgggcacaggtggagctttggggttgctccctgaatcgttatctgctgacctgccactgattatgatgaatggtgatattcttacaaatgtcgattttgagtgtttgttgaaattccataacgaaagccaggctgatgctacattatgtgtacgtgaatatgattaccagatcccgtatggtgtgattaaaggcaacggtagtagaattatatctatggaagagaagccggttcatcatttctttgttaatgctggaatctacgtcatttctccagctattttcaagagtgttggcaagaaccaacatatcgatatgccaactctactcgaacaatatatacaaaaaaatagcaatgttttaatgtttccaatacatgaatactggctggatattgggcgtatggatgattttaagcgtgctcaggcggatattttttcactggggttataa

SEQ ID NO: 388226 - DNA, 1074 bp, Salmonella enterica; identical to SEQ ID NO: 377355

SEQ ID NO: 388227 - DNA, 585 bp, Salmonella enterica
atgccaaacacacagttaaatacgtcggtttcaacaatgtctccttctacttatagtacaagggatgatcgtagcgataaccataaaaatggttgttttcataaattcaggatccgtctaagaaggaacccggagaaatcactaaatgatttaaactatagtttatctttgtgcgagcagacattctccatcacactttacatgggatataaatataaaactatagaagcttgccgcgatgaactaataagagaaaagataaaagcctttggggtcacgaaggatcatccttatgtatataatagagaggccgagacaaaatttttaatagctttggtgaacaaaaacgctagtcgtttggaagcggggaaatttcattccctccaggatactataaaagctacaaatatgtttgggaaagcggtagataaaaaaagaattcaatatagagaatatcaacttatgcgagacagacgccaaaattattttagaaaccaacccatagattacaaattgcaaattgaagtaatggtcaatgagtattataagagatatcaagagcaaagcgcggcacgtaatcagtaa

SEQ ID NO: 388228 - DNA, 849 bp, Salmonella enterica
atgaagataacaaatagcaattcttatgctatgaatatcagtagagctcaggtgttgcctcaagttctggcagaagagattgatagccttattcacaacaccccaatactgccaggttcggatgcttctactgcagaagcgcatagacgtgacatgatagcatgtaagaatatattgatatcggatggtatatggagtcagcaacaagacgatgagaagaatagaaaaatcacggtaggtatgcaagcaacaattgaaactgggctgatgaattgtttaacttgcgatcctacagcgcgtttatctgtaatagtccatacaaataatcccccaacaccattatgtgcagaatatcttcctcagtcattacttcactctgatattcgaggaaacagggcgatagaatcaacggttactagtcgtcaagaaacaaatgagttctttttgcgatcaaataatcaagtttcattctctgcattgtatggaacaaaacgtgcatccgatgcagagcagacatattttgataaaaaagtagcttccaatccaggcttgtttgcgtttcatacccaagaaaatccacctgtagaattatcaggggcaacctatgtttatactaacaggctaaatgagaaagtgattattggtgtcagaatcacccaagctaatgatccttcgaagatgtgttcgctatttatcgggcgtgatagtcatgccagacaggtaagcccacatctccgaatgcttaatgattacattagaacgatacaatctaatttactcgaaaatagttcggtcgctgatcgacgaaactattttgagttaatgtctgtttgtagtctgatctcatag

SEQ ID NO: 388229 - DNA, 912 bp, Salmonella enterica
atgatcaccggtgctgcgcagatggacggcgcgatcctggttgttgctgcgactgacggcccgatgccgcagacccgtgagcacatcctgctgggtcgtcaggtaggcgttccgtacatcatcgtgttcctgaacaaatgcgacatggttgatgacgaagagctgctggaactggtagaaatggaagttcgtgaacttctgtctcagtacgacttcccgggcgacgacacgccaatcgttcgtggttctgctctgaaagcgctggaaggcgacgcagagtgggaagcgaaaatcatcgaactggctggcttcctggattcttacatcccggaaccagagcgtgcgattgacaagccgttcctgctgccgatcgaagacgtattctccatctccggtcgtggtaccgttgttaccggtcgtgtagagcgcggtatcatcaaagtgggcgaagaagttgaaatcgttggtatcaaagagactcagaagtctacctgtactggcgttgaaatgttccgcaaactgctggacgaaggccgtgctggtgagaacgtaggtgttctgctgcgtggtatcaaacgtgaagaaatcgaacgtggtcaggtactggctaagccgggcaccatcaagccgcacaccaagttcgaatctgaagtgtatattctgtccaaagatgaaggcggccgtcatactccgttcttcaaaggctaccgtccgcagttctacttccgtaccactgacgtgactggcaccatcgaactgccggaaggtgtggagatggtaatgccgggcgacaacatcaaaatggttgttaccctgatccacccgatcgcgatggacgacggtctgcgtttcgcaatccgtgaaggcggccgtaccgttggcgcgggcgttgttgctaaagttctcggctaa

SEQ ID NO: 388230 - DNA, 600 bp, Salmonella enterica
atgctaatggcagcactggcaatacgaggaatctttacctttgatcgttttgctattaaagatataggtggtttggatgtgttgggggcttatgtattttttgccagtatggcatcggcagttcaatcatttttagatacaattgttatttctttcgcttttcctgaactaagcaaactagccgctgaaaagaaacatgaagaattttggattacgtttaaaagatttttacttaaaacttttttgatgagtatatttctttgtatctgttgttggctgtcagggttaattgtgcttcattggcttaataaccaaatttatgatagaagttattctctatttatatttttgatattttcgacgcttatatattgtctaagccttatccctcatcttgggttatatgcattacgagaggatacggttattattaaaagtcaggttgtgtcattaatagtttttataggagcgataatcatatcgataatgttagaggagctatatatggtaatggtaggcatgatattaagcttttctgttttacttctatggaaaagtattatgctgtttagcaaaagaaaaatactttgcgcagagtaa

SEQ ID NO: 388231 - DNA, 276 bp, Salmonella enterica
atggaacgcaataaaatccagtgtcctttctgcttaaaagaaagtcagcatggtgtgcgagtttgcactggctgtatggcgactgttctgtatagagcctatccgcagtggtatgcgcttttggttatctttctgtcgtttggtctgtcaatcctgataggaatgtctacaggtatagctggggctactatcagtttgccgattataggcattgtcggacttattgctgggaaggttatcttttctgataatgttgttttcaggcgaaggatgtag

SEQ ID NO: 388232 - DNA, 438 bp, Salmonella enterica
atgacaactttaaatagaacattcttaataagcaatccaaatacaagttcagcggatagtagccatccgcaaccgcacaacagaaaacagttaccaggaataagagcaagagcatctgtagaacgactaagtgagtctgagactataaaccgactcaaaaaaatcatacaacaaaacatatctaatcatggtggtatgaatgaaatatctcatattaatctgattaacaaaataaatagcaaccatattttacctgctaagaataaagatcacaatttttttattagtcagtccacccatgcctgtacacaactaaagaaggcaatttgtcatgctgatatttgcatgcgaaaactggaagattacaaacttaacgatttttcaactcattcagattcagaagtatttaaggcgcttaatcaagctgttaaagcgtaa

SEQ ID NO: 388233 - DNA, 156 bp, Salmonella enterica
gtgaagatgatagatttgtctaaagggacgagaggtcgcatacaacacagaactacccaactgtctgagcagttgtatgagcctgctaagaaatggaagccacacctggaagtgggattggtgttgtctggatatctgatgggccgtaaagcgtag

SEQ ID NO: 388234 - DNA, 660 bp, Salmonella enterica
atgtatcaacatcgtaactggcaaggtgccttgcttgattacccggtaagtaaagtggtctgcgtgggcagtaattacgcaaatcacattaaggagatgggcagcgcgacgccggaagaacccgtgctttttatcaagccggaaaccgcattgtgtgatattcgccagccgctggcgattccggcggatatgggcgctgttcatcatgaagttgagcttgccgtgctgattggcgcaacgctccgccaggcgaccgaagatcatgtacgtaaagcgatagccggttatggcgtggcgcttgatttaaccctgcgcgatattcaagggaaaatgaaaaaggccggacagccctgggaaaaagccaaaggttttgataacgcatgtccgatttcaggcttcatccctgtcgcggccttctgcggcgatccgcaaaatacggttatcggacttaacgttaatggcgaggttcgccagcaagggtcgaccgcggatatgattcatcctattgtgccccttatcgcctatatgagccgctattttacgctcaaagccggggacgtggtgctaaccggcacgccggcaggcgtggggccattattaagcggcgatgagctggacattcgttttaatggcgaaacgttgtctacccgcgttctgtaa

SEQ ID NO: 388235 - DNA, 519 bp, Salmonella enterica
atgataaatacaaatgttattctaacaagagaacaaaaatccgcgattgcagaagcattagacgtatcattagacgatttagaagaacttagaattaaagccagtaataaaaggaaaacctcctttaaggatgatttttccataatttttaaaacaaatatcggcactctggcaaaaatgaagctaacaccaacttcttttcgaataattatttatcttttttcaatcattgattatggtaatattcttgttaacttctctcaatcaagggtagcaaaagatttaggactacaaaaatctaatgtttcgagagcattcaaagagttatttgaaaagagaatactcattcgcaatacagaagacgactatgtatatttgaactctaatttatgtgtaaaagggattcctcataaatttaatgaggagcaaatggataaattcaagagatccaaagcagaaactgaggactttgataactcgtttagtttttatagtgttaaaaaaaacaatcgtgaataa

SEQ ID NO: 388236 - DNA, 435 bp, Salmonella enterica
atgaaattatgttttttaactctgatttgcattgtgtttcccatgattgtttcatgttccggaaacacgataaagtatcaacctgacgaactctcacccgctaaatttggcacaacttacagcaaacaagttgagctaacgggtggacttgtcagtagattgtattatattattcatccaagttatgctggggtatttaggacagaagaattttcacctgcgttggagaaccctcgagatataaaagaaaattgggatggtatttatataaaatgtattggaggcgacgagcatagatgtaatactatcgaaattaaaggtaatattaatgttgaggaagatatcgttatcgagcttgatggttacacgatgggatcgggatggtcttctggaaaagaaagccacaagacattcacaatacatgttgaaaaataa

SEQ ID NO: 388237 - DNA, 357 bp, Salmonella enterica; identical to SEQ ID NO: 120046

SEQ ID NO: 388238 - DNA, 975 bp, Salmonella enterica
atgcaggcacccggtataccggagaatgaagaacagaggctgaagtccctgtatattaccggccttcttgatacccgtgacgatgagcgttttgaacgcctgacgcggctggcccgcaaagcctttcaggtcccggtggccctgataagcctgctggatcgcgagcgccagtggctcctcgcctgccagggcgtcggcgtgcgcgaaactccacgtgatatttcgttctgcgggcacgccattctgcaggaagggccttttatcattcacgatgcggctgccgatgcgcgatttcacgataatcccctggttaccggtgagccacacatccggttctacgccggccagccggtgagcctgccggacggcacggtggccggcacgctgtgcctgatccacaccgttccccgcgccttcacggatgaggacattgcgtccctccgggacctggcctgtatcgtggaggacgaattcgaggccatcagcatggccatgacggacagtctgacgggcattcccaaccggcgcggattttaccgcgccggcgaaaaactcttccgcgcaatgaaccggcaggatgcgtcgttcagcctcatctatttcgatctggacagattcaaaccggttaacgatctctggggacacgcggaaggtgacgaggtgctgaagatctttgccggctttttacatcagcaccttgaaccgggtgaaatagcaggccgcctcggcggggatgagtttgccgccctgatccggcgaaacggtaacactcagtcttatctgcacgcgctgagtgccagtctcgatcattacaatgacacctcgggcaagccctacaacatcaattattcctttggcgaactgatcaataacgcagaccattatacgacactggcggagatgatcggtaaatgtgacgaagtgatgtacctgaagaaaaaaagaaagaccctgtcgcggaaaacagaaccgtga

SEQ ID NO: 388239 - DNA, 363 bp, Salmonella enterica; identical to SEQ ID NO: 179544

SEQ ID NO: 388240 - DNA, 1752 bp, Salmonella enterica
atgaaattcttacagaatatcccgccttacctgttttttactggcaagggaggtgtaggaaaaacttccatttcctgcgcgacggctatccgccttgccgaacagggtaagcgggttttgctggtcagtaccgacccggcctccaatgttggtcaggtattcgatcaggctatcggtaacacgattcgccctgtgacagcagttcctgcactttccgcactggagattgacccgcaggaagccgcccggcaatatcgggccagaatcgttgatcctatcaaaggtcttttgcctgatgacgttgttaacagtatcagcgagcagctttcaggagcctgtacgactgagattgctgcgttcgatgaattcacgggcttactaacagacgcttccctgctgacccgctttgatcacatcatttttgatacagcgccgacgggccacacgattcgtctgctccagcttcccggtgcctggagtagcttcattgaaagtaatccagatggtgcttcctgtcttggcccaatggccgggctggaaaagcagcgtgagcagtatgctcatgcggtagaggctttgtccgatcctgaacgtacccgcctggttctggttgcacgactgcaaaattctacactgcaggaagtcgcccgcactcatgaggaactggctgagattggcctgaaaaatcaatatctggtgattaatggtgtgctgcctgaagccgaagctgaacatgacgccctggccgcggcgatatggcaacgtgagcaggaggcactggcaaatcttcctgccggtttatctgagctaccgacagataccctgttactccagccagtcaatatggttggtgtttcagcattgaagggactgctggatacccgttctgaggcattaccgctcccggtaacgaatatcctgtacacgcctgaaaacttatctctctctggcctggtcgatgatatcgctcgcagtgaacacggcctgattatgctgatgggcaaaggtggtgtagggaaaaccacgatggctgctgccatcgccgtcaggctggcagacatgggatttgacgtgcatctcacgacctctgatcctgctgcgcacctgagtacaacgctgaacggcagcctcaaaaacctgcaggtcagccgcatcaaccctcacgatgaaaccgaacgctatcgccagcatgttcttgagacgaagggaagagatctggacgaagcagggaaacggttactggaagaggatttacgctctccctgtacagaagaaattgccgtgtttcaggccttctcccgtgtaattcgtgaagcgagtaagcgctttgttgtcatggataccgcccctaccggacacacgctgctgttgctggatgcgaccggggcttaccaccgagagattgccaaaaaaatggggagtaaaggtcattttactacccccatgatgcagcttcaggacccggatagaaccaaagttctgctggttacgcttcctgaaaccacaccggtcctggaagcggcaaacctgcaggctgaccttgaaagagcggggattcatccgtggggctggattatcaataacagcctttccattgcggatacgcgttctccgttgctttgtcagcgtgctcatcaggaattgcctcagattgaggctgttaaggatcagcatgctgaccgtatagcgcttgttccggtgctggcgtcagagcccgccggtattgaaaagctcagagagttgatgagctaa

SEQ ID NO: 388241 - DNA, 1290 bp, Salmonella enterica
atgttactggccggcgctatttttgtcctgaccattgttttggttatctggcaaccaaagggattagggatcggctggagtgcaatgctgggcgcgggactggctctgatatctggcgttgtgcatgtgggcgatattccggtggtgtggaatatcgtctggaacgcgacggcgacctttattgccgtaattattatcagcctgctgcttgatgagtccggctttttcgaatgggcggcattgcatgtttcgcgctggggtaacggtcgtggccgtttgctctttacgtatatcgttctgcttggtgcagcggtggcggcactgtttgccaacgatggtgcggcacttattctgacgccgatagtcatcgccatgctgctggcattagggttcagcaaaggcacgacactggcattcgtcatggctgcagggtttattgccgatacatccagcctgccgcttatcgtgtccaacctggttaacatcgtttctgcagacttctttggactgggcttcaccgagtatgcgtcggtaatggtgccggtggatattgcagccattgttgccacgctggttatgctgcatctgttcttccgcaaggatatcccaccgacttacgacctgtctcttctgaaagcaccggcaaaagcgattaaagatctggcaaccttcagaaccggctggatagttttaatacttctgctggttgggttctttgtccttgagccgctcggtattcccgttagcgcgattgcggctgttggcgctgtgatcctgtttgcagtagctaaacgaggccatgccattaacactggcaaagtgctgcgcggcgcgccatggcagatcgtcatcttctcattggggatgtacctggtggtctacggtctgcgcaacgccgggctaaccgaatacctttcaggtgtgctgaatgtactggcggataaaggactctgggctgcgacgctgggtactggcttcctgacggccttcctgtcttccatcatgaacaacatgcctaccgtgctggttggcgctctttctatcgatggaagcaccgcaacaggcgttatcaaagaagcgatgatctacgccaacgtgattggctgcgatctgggacctaaaattacacctattggtagcctggcaacgctgctctggctgcatgtccttacacagaagaatatgaccatcacctggggatactatttccgcaccgggatcgttatgactctgcctgtgctgtttgtaacgctggcagcgctggcgctacgtctctctttcactttgtaa

SEQ ID NO: 388242 - DNA, 192 bp, Salmonella enterica; identical to SEQ ID NO: 98248

SEQ ID NO: 388243 - DNA, 141 bp, Salmonella enterica
atgcacattatcaatgctgaagagcagcacattcccgccatacgccgtatttacgcccatcatgtcctgcacggcacaggcagcttcgagacggcccccccgaacacgcaggaaatgcttgcccgggtgaaaaacgtttag

SEQ ID NO: 388244 - DNA, 1185 bp, Salmonella enterica
gtgaaagccctctctgatacggcactcacgcgactggttctggttgcccgcgcccaggcgtcgaccctgaaagaggtctcccatacccacgaggagctgtcggctatcggtctgcagcatcagcaccttgccatcaatggcgtgctgcctccctttgccggtgaacgggatccgctggcgcacagtattctggcgcgggaggaacgggccttacgggccatgcctgaaaacctcgcgcatcttccccggtcgatgctgtatctgaagccttttaatctggttggtctggacgccctgagggcgctgtttacagagagcacacctgttctgccggatccgggagccacgctcacgacggtcgatttaccggagcttgcctccctggtggaggacctcagccgggcgggaaaagggctggtcatgacaatgggaaaagggggcgtgggaaaaaccacggtggcggctgcggtcgcggtctcgctggccagacgcggtcataaagtccacctgatcacctccgatccggcagccaacctgtcttacaccctggatggctcgctgccaggccttcaggttagccgtatcgatccaaaggcagagactgagcgctatcgtcgctttgtgctggaaaatcagggaaaagggctggatgcggagggactggcggtactggaggaagatctccgttccccctgcaccgaagagattgccgtgtttcaggcattctcccggatcatcaaagaggccaacgaccattttgtcattatggacactgcgcccaccgggcatacgctgctgttgctggatgcaaccggggcctatcaccgggaaatggtgcgccagatggggcatgctcacgatcacgtgataacgccaatgatgcagctgcaggatccggagaagaccagagtcattatcgtgacgcttgccgaaaccacgccggtactggaagcggccgggctgcagcaggacttacgccgggccgggattgacccctgggcgtgggtcatcaataacagcctcgcggccgcgaagccgtcctccccgttcctggtcacccgtgcccgtcgcgaactgccgctgatcgacgacgttgccgggcattatgcacagcgcattgccctgacgccactgctgaaggacgacccggtaggcgtggacctgctggctgaaatggcgggctga

SEQ ID NO: 388245 - DNA, 483 bp, Salmonella enterica
atgacgatgccatttttacagaatatccccccgtttatcttcttcaccggcaaaggcggcgtggggaaaacctctctggcctgcgcgacggcggtatggctggctgaccagggccggagaacgcttctggtcagtaccgatccggcctccaatgtcggtcaggtcttcagccagactgtgggccaccggatcactggtatccgcaccgtggaaaaccttgcggcaatggaagttgacccgatggcggccgcgcaggcttaccgcgatcgcgtgctcgatcctgttcgtgaactgatgcctgccgatgtcatcagcagcattgaagaacagctttccggttcatgtaccacggagatcgcggcatttgatgaatttaccgcactgctgaccagtcatgaactgcgcgaaaaatatgatcatatcgtctttgatactgcaccaaccggacacaccatccgtatgcttgagctgccgggcgcctga

SEQ ID NO: 388246 - DNA, 363 bp, Salmonella enterica
atgtcaaaaattgagatctttgaagccgcaggctgctgtgcgaccagcagcgtcgtggtcagcgatgaagccgtcaaatggaactccagcgccgaatgggcgaaaaagcatggtgtgaatattcagctttacagcctggcaaagaacccgcagcagttcctgaatacgcccgtcatcagggccttcctgaacacgtcaggaatggagtcccttcccgctaccctgcttgacggccagctggtgatggcgggcaagctcccgtcccgggaagatatcgcccgctgggccggtatttccctcacgcaggactggaatgaagacagcacgcagccgcgctgctgcagcattccccgtatgccttaa

SEQ ID NO: 388247 - DNA, 546 bp, Salmonella enterica
atgagtgatgtaacggcattcaacaactgcatgagcgtgttctggcaacagcatgaagcagagctctcccgttttctggcatcaaggacaggcgatcgggagcaggcagccgatctgcttcaggaagtcttcctgcgcgcccgggcctgtgcagaccgcttctgtgaaatggagaacccgcgggcctggctgtaccggacggcgaggaatctgctgacggatgagtaccgtgccgccagagacgtcgtggtgctggaagacgagatcccgctgcctgacgccttccatgatgcggtttcaacgctggagatttgcctgcctgaaaccctgcaggccttacctgacgaggaaatatggctgatagaagaggccgatctgaaccggcgtccccagcagcgcctggccgacgagctggggatcacgctgacggcgtttaagtcgcgcctgcttcgcgcccggaaacatctgaaggagacgatgacggaactctgccaggtggaagcggatgatgcgtcttccgtctgctgccataaaaaaatggattaa

SEQ ID NO: 388248 - DNA, 714 bp, Salmonella enterica
atgattgctgaactgaaaaatgttgttcctgagctgtttgatacaggtctcaccggggtccgcctgggtgtaaagacagttgaccatcctccccggatcctgatgttgtacggttccgttcgagagcggtcctacagccgtctggccaccgaagaggctgcccggcttcttaccgccatgggtgcggatgtccgcatctttaatccttccggtctccctctgccggatgatgcagcggatacgcaccccagggttatggaacttcgcgaaatggtgcgctggtctgaagggatggtatggtgctctcctgaacgtcatggtgcgatgaccggcattatgaaagcccagattgactggataccactatcagagagcgcagtacgcccttctcagggaaaaaccctggccgtcatgcaggtctgcggaggctcccagtctttcaatgcggtaaaccagatgcgtattcttggccgctggatgcgaatgatcactatacctaatcaatcctcggtagcgaaagcctggcaggagtttgatgaagacggacggatgaaaccatccccgtactacgaccgtattgtggatgtaatggaagagctgatgaagtttaccctgctgacccgggagtatgcagcgtatctcgtcgatcgctacagtgaacgtaaagagtcggcagaagcactttcccggcgggtgaatcagagcaaaatctga

SEQ ID NO: 388249 - DNA, 327 bp, Salmonella enterica
atggagctgaaaatcgccgcgatggtgctgaaagaacttggccacaccactcgtctcgatatttacaaaacactcgttaaggccggacgtcagggactgcccgtgggggaactgcagcaacatctcgccattccggcctcgaccctgagtcatcatctttcatcactgatatccgtctcactggttcgccaggaaaggcaggggagaacactgttctgccacgcctgttatgacaaccttgctgcattgattgcctttctgacagaagagtgctgtgcagacgaatatgccccgcctggttttatgtcaccaccggagacaaaatga

SEQ ID NO: 388250 - DNA, 498 bp, Salmonella enterica; identical to SEQ ID NO: 182603

SEQ ID NO: 388251 - DNA, 804 bp, Salmonella enterica
atgactatccctgcattcggtttaggtacttttcgcctgaaagacgacgtggttatcgcttctgttaaaacggcgcttgaactgggctaccgtgctgtcgacactgcgcaaatctatgataatgaagcggctgttggacaggcgattgctgagagcggcgtaccgcgtaatgagctgtacatcaccaccaagatctggattgaaaaccttagcaaagacaagctaatcccaagcctgaaagagagcctgaaaaaactgcgtaccgattatgtcgatctgacgctgatccactggccatctccgggtgatgccgtgcctgtcgaagaatttatgcaggcattgctggaagctaaaaaacaagggctgactcgcgaaattggcatttcaaacttcaccattccgttgatgaaaaaggctattgccgcggtgggcgcagaccatatcgccaccaaccagattgagctatctccgtatctgcagaatcgtaaggtggttgactgggcgaaagcgcacggtatccatatcacctcttacatgacgctggcatacggtaaagcgctgaaagatgaagtgattgcgcgcattgcggctaaacataatgcgaccccggcgcaggttattctggcatgggctatgggtgaaggttactccgtgatcccttcatccaccaggcgtgaaaacctggcaagcaacctgctggcactggaactgcatctggatgccgaagatagagcagcgatcgcggcactggactgcaacgatcgtctggttagcccggaaggactggctcctgcctgggattaa

SEQ ID NO: 388252 - DNA, 852 bp, Salmonella enterica
atgcctctcgctttatttgcactgacaataagtgccttcgctatcggtacgactgagtttgtgattgtcggcctggtgccgaccattgcacaacaactggctgtctcgttaccttccgccggaatgctggtttcaatctatgcgctgggtgtggctattggcgcgccagtgctaaccgctctgaccggacgcctgccgcgtaaacagttactggtcgcgctgatggtcttgtttacggcggggaatttactggcatggcaggcaccgggctatatgacattaatcgtcgcccgtctgctgacgggcctggcgcacggcgtgttcttctcgattggatctaccatctcgacaagtctggtgccaaaagagaaagcggcttctgctatcgctattatgtttggtggtttaacggtagcgctggtcacgggcgtgccgctgggaacatttatcggtcagcattttggctggcgtgagaccttccttgcggtatcactgttaggggtgattgcgctgatgagcagtcaactgttgatcccggccaatattcccggtcgggcggccgccagcattcgtgaccaggtgaaagtgctgacccatcctcgtctgttgctgatttacgccgttacggcgctgggctatggcggggtattcacggcattcaccttcctggcgccaatgatgcaggatctggcgggattctccccgacagcagtaagctggatcttactggggtatggcgtattagtggctatcggcaatatctggggcggtaaactggcggataagcatggcgccgtgccggcgttgaaatttattttcgccgcgctgtttgttctgctgatggtcttctag

SEQ ID NO: 388253 - DNA, 246 bp, Salmonella enterica
atgaatgcctccggcgtcagcgtccgccacatcaacagcgaaacctgcatgaccacctgttactcacaaatccccagcggcgactgccaggaagaagcgggatttgagaccgggcgcagcgtgatggtgaagatttcggacgggtgtattgtgctaatggcggacggtaacgaggtgcagaagctgtgcgagcagctttatcaggctaaacaggtggttaagggaattaaggacgtgctggtttag

SEQ ID NO: 388254 - DNA, 276 bp, Salmonella enterica
gtgcctaaggccgtgaaagcgaaagccttctattttattttcgcccagccacatacccggctatgctttctggccttcggtgttgatacccagcgcgaggaagacggctttgtttatgatgctgtgactttggatatcaatgtgagcgacacatcggcgtcgtacatttctttgaaggtggcggagatttcgcgcgtgatcatgcctttgacatgcagcgataaaatctggctgtccatctgtgtgagccgcgtctggttcttcttaatcaactga

SEQ ID NO: 388255 - DNA, 486 bp, Salmonella enterica
gtgttttcacggtcacgcggcgtgttcagttcaatctcgccatcaccgcaatttacctgtcctcgttatcggaatgaatatatcaaaaacaggcagatacacaatttaaattacagtctctcaacaaaacgtagatgcaccttgttttatttttctttctcttatgagtttagtatggaattatatccaacttatgaggccaccgtaacatcgttaactatcgcgttacttgtgttcttccaaaaactattatctgtaaacacaatatgctcaccattgaggctggcatcgactttttggcgatgccttacccagtctaggttccccaatgtattaccagtgattgcaatactattgcaactacccaagaaaagacctttatttttattcccacttaatacgttaccggtaatgcgcccctgttgcatcgatagagcgccagaccatcatcagttccttcaactatctcattaccagttcttttaa

SEQ ID NO: 388256 - DNA, 1227 bp, Salmonella enterica
atgaaatttaaaaggttaaaaatatctgattggcgccaatttaatgaggtaagcatagacttccataacaaggtaacagtgattactgggtctaatggagcaggaaagtcaacagtattaagaatattagctaagcatttctcttggaattgtgattttttggcaatgccgttttacgatgaagataaagggattaatattttcactaataaacgtcaaagcaattcatattctaatgccaaccataaaataggagaaatagagtattcaaatgaaattatatcctctatatatatagaagaacatcccaggactataaactatgatatagctattgaaaatattgaccgcagcattaaagggctgtttatacattcgcatagagcatcaaataactatgaaataacatccaatataccaacgggtgtaataaatgcggaagactcctataaaaaccatttacaagcatataagaaacacttagaaaatagttcatttaatggcaacccaacggtagaaatgaagcaatcactgttatccatggctgccttgggagttgggaatagctacataaagaaaaataaaaaatcagaaaaaacatttacttcattcatagaaatattaaagataactctacctaaaaacattggattcaaaaatataaggtttgaagttcctgatgttatttttgaaacggattcaggcgactttgtattagattccgcgtctggtgggattatgtctataatagatatatcgtggcaaatattactttattcgcaagatgcggagcactttacagcattaattgatgaaccggaaaatcaccttcatccaacaatgcaacggtcattgataaatgatctgataaaagcgttcccaaacgttcagtttgttattgtcacccatagcccattcattatttcttcagtgaaagactcaaatgtttatgcattaaagcatgatgactccaataaagttaattctcataaattggatttagaagaaaaagcatcaactgcaaataaaatattaagagatgttcttggagtttcaataactatacctcagtgggcggaagatgaattagataaaatatgttcgatgttaactgcagaaaacataactgaaaataatctaaatgaacttagaacttctttagatcaagcagggttgggtgagttttacccggaggccctttaccacatagttggtggtaaaaaatga

SEQ ID NO: 388257 - DNA, 669 bp, Salmonella enterica
atgattaaactaataaaattaacagagccagatatattggctaagaattttaaaaaatggacagataaacatttatcaaatatagggtcaggcataaattcaagtgattatttaaaaaccaggtactcacatgaagatataaaagagcaactaataaaagaaactaacgggaaatgtgcatattgtgaaagcaaattattgcatatacatcatggtgatgttgagcatatatatccaaagtcattggatgaatcaaaaagattcttatggataaaccttacgttatcttgtgagatctgcaatcagaataaaacaagtcttgacccaaatttaaataatattcaagatccttattcaggaaatcctgagagtgtaattattttctgtggctcattggttcttggttctggaattaaagggttatcaacgcttgcaatattagatcttaataggaagcaattgatagaaaaaagacaagaaaagttagagaaaatacttttgattttcaatcaaatatgctcagaggcactaccccaagcagcaaggcaagcaatatataacgatatgattaaaaatgaaacatcagcagaccaagaatactcatcaatggtgaaaagtacaattcgtcatgttagttatattattcctggtgatataaagcaaaaataa

SEQ ID NO: 388258 - DNA, 162 bp, Salmonella enterica
atgttggattctttgccggatgtggcgttgccttttcgggcctacaaaagcagatgcctcaagatcgggcgtaagtggcgcaggcagattattcacggcctgcgcgcagcaaccggagcgtacatagagtacgtgaggattgcgagcacagcccggggttaa

SEQ ID NO: 388259 - DNA, 375 bp, Salmonella enterica
atggccgactttacatcggccatcagacttttacttcgccttcgctacagtcaccatcgccgcgcgaatggtacgaccgttcctggcggaagacgacgcgcgcaccgtcaatggggtgattgggtgattctggaggcgctggaggaaattccggttgctggcacgcgcgtgcgcattgagcagtacgatatcgatattctcgatgtacaggaaaatatgattaagcaggtaaaggttgtaccggtaaaaccgctgcgcgagagtattcttgaatacccctcctcctttcttaaaacggcagccaatggtttgccgttttccttattaattaagattttattcattcatctcctctccagcatagtgacacaataa

SEQ ID NO: 388260 - DNA, 1722 bp, Salmonella enterica; identical to SEQ ID NO: 383467

SEQ ID NO: 388261 - DNA, 1182 bp, Salmonella enterica
atgctgctatctgacatccaaataaaacgagcaaaaccgaaggacaaaccctatacacttaacgatggtatgggactatcactcctcatcgacaccacgggcagcaaaggctggcgtttccgctatcgctttgcaggtaaacctaagatgatctccttcggcgtttatggcgatgtgtcattggcacaagcacgtgctaaacgtgatgaggcgcgttcgatgttagctaaagggatcaacccaagtgaagccagaaaagcgaataaaatagctttacagttcgcgcatgagaacagctttgagtctgtggccagagaatggcactcatcgaaaaaaaccacctggtcagaggggtatgcaaaagaggttctcaactgcatggaaagggatattttccctttcatcggacaacgcccaattgagcagattgaaccactagagctgctcaccgtcctgcaaaaaattgagaaaagaggtgcgctagagcaaaccagcaagatccgccgccgctgcggtgaagtgcttcgttatgctgttgccacaggtagagcaaaatacaattttgcacccgatttagctatcgcactcaacaaacctaaaactcaacacttcccgttcctgactgaaagcgagttgcccgagttcgtcaatgctctggataactatcagggcagtttagtcaccaaatacgccacccagctattgatgctaacaggcgtgcgaacaattgaactacgcgcagcggaatgggctgagtttgatttagataatgccttatgggagatccccaaagaacggatgaagaaacgccgcccccatctggttccgttatctactcaggcgatcagcatcctgaaaaagctgcaagaaataactgggaactacagcctcgttttccctggacgaaatgacgtaaggaagccaatgagtgaagccagtataaacaaagtgataaaactactgggctatcatggtcggttaacgggccatggcttcaggcataccatgagtactattttgcatgagcttggttttgaaagcgcttggattgagatgcaacttgcgcatgttgataaaaactctattcgaggaacttacaatcatgcgcaatatttagaaaatcgaagaaaaatgatgcaaatttatagtgacatgttgctaaatgagttccctattaaatag

SEQ ID NO: 388262 - DNA, 885 bp, Salmonella enterica
atgaccactattaccagagaacagcaaaaacagattttaattgatacggcgaaccacgtaatcagtcgtgataacacgtcaccgtatagcgaaaacctgcgcgaactggcgcgtatagcgctggcatcgctcgaagcggagaaaggtgccgaccccgttgtgttcaccgacgaacgaaatcttcatcatattgccaggggtcgagaaacctctttgatttggggtaaacaaaaccaggaggtgggagatatcccgctctatcgtcacgcccagccagttccggtagtgccggaagatatcagtggcatcattgagcgtttccagtatcaggcagaccatctaagtgaatggcaccacatcgatgagcattcttgcaaggtcaacaggcgcgacctggtgactgcgctggaatttatgaattcctgccgcgccgccatgcttcaggtggccgaagctgtaagtaatcgtgatgagttaccgctggactatcttcaaggacacaaagacggactggagtgggctgctcaactggcagaggctaatcatccgcaaacaggtgactggttgtacgatgacccaatcgagcttgctagggcgattcgcaaaggtccggatatgcctaccgttcaggctggcaactctccggcaactacggatggttggataagctgtagtgagcgaatgcctgatcgtgagtatgtactagctggcgattttagtggaacacattatctggcaagcattcctaatgttcaggtgggaatttatgctgactggtttgatgatgagaagccttgttgggatgatggtgatggtaatgacctacacctcaaggaagtaacccactggatgccactgccagcaccacaacaggaggtgaagtga

SEQ ID NO: 388263 - DNA, 159 bp, Salmonella enterica
atgagttttacagataactggtcagacgaagaattcattcgtcagatgaaagatttaatcggtaacgaaggagatattcatgtcacttgcaaccacagtgaaggagagcaagttacagagacgcatgtacacgcagaaagctctctggtatcgccataa

SEQ ID NO: 388264 - DNA, 471 bp, Salmonella enterica
atgacaaaatcatggagcgtaccttttcctgaatcagaaactgaacatgatggaatgcctgttttctggagattccaagcgacagttgaagaagatggaatcaaaatattcgcacttcaatatatagcttttcatcagacagagcattatgcatggttggttcctgcgcattggattgttaattttaaaccagcaccaaataagtggttacaggaatggaaacaaaagagaaatagatatgcaattaagaaagtagcaaaaaatgcagaaagatcttttgcattcccaacgaagaaacttgccattgaaagtttattgcgccggaagaaataccatttaatgagaatcaaacaagatttggctgttgtatcaactcttgttgatgggatgaagaatattgatacatcaacaccagatattgaatataactttggacacaaccaagaaacagaaaattgggtgttttattag

SEQ ID NO: 388265 - DNA, 450 bp, Salmonella enterica
atggaagaacaagcaaacaagattctcgtagaactactgcaaaaagccagcaatggaatagacgcggctgtttcattcagccaagcgcagattcctgatgttgttcatcagttgctgctatggaatatggttgacagtctgattaaaacattaatagccattctaacaatcccactggttttctggtttatgaagaagcagtgccaaagagttgagacaggtaaaatcggtgatgaaggatactcatgggagaggggaaatcccaaatacaggccgacaatggtttgggatagcaaaggagatattaaccttcttatcatgccattggttggagttttgactctgtgggggatttttattattggtgtagtaaccaatatgacttggttaaaaatttggctggccccaaagctttaccttatcgaatatgcagcatcattggttaagtaa

SEQ ID NO: 388266 - DNA, 267 bp, Salmonella enterica
atgaaattcaaattgaacgatgaagttaaatggtcaagctcatcaaacggtgtaacgaaggtaaaaatcgggtttatcgtcgaggtgattcctcctggtgtcaacgtaaaaaaattcgaactaggccgtctgctagatgcacctggccttccgaggaaagaagagagctatatagtttgtgtaggtccaagacccggatctcgtgccaagccaaaatattactggccgcgagttaataacctgcgtcacttacacgatgacaaatag

SEQ ID NO: 388267 - DNA, 861 bp, Salmonella enterica
atgagtaatcttgcaaccgtaacacatttaaggccttcacaacggcctgtggagcgtcgtgtggcagaagttgaagatggttatacccgtcttgcaaatgccctgtatgaagagcttatcggcgcagatttaacgaaaaatcagagcaaggttgcccacgccatatgccgtaaaacatacggctacggtaaaaagatggatcgcatctctgatagtcagttagctcaaattaccaggctgccaagacagaaggtaaacaaggccaagaatgagcttatcgcgatgaaggttatccttcgcgaaggccagcaaatcgggccaaacaagaacatcgaggaatggcaaatcgaaggctgtcactactctggtgataatgtcactgcattggtgacaaaaagtgtcaccaaaacggtgacagcgctgtcaccaaaacagggacacacaaaagaaactattacaaaagaaaaaagaaataataaaaacactatgtccgaaagtgttcggacggagtgtgaaaaatcacctgaccgttacgaagaaaccgacaaggcattcgaggaaatattctggtgtgcaggcatgcggaaagccggtaagaaaaacgcagcttcggcattcagaacacagttcagggagtggcgtaaaactaccagggggacggcaagcgagtttgccacgatgctggcagaagacatcgcatgcaggaatggtaagcagttcggattcgacaggttgttaccatcgagctacctgaacggtcagcgctggaacgacgaaaagccagaaacaattcaaccacaatccaaaccatcatccgcaatcaccgtatcgaaaactggctacgtgtttttcgacaggtga

SEQ ID NO: 388268 - DNA, 588 bp, Salmonella enterica
atgaaaaaactaacctttgaaattcgatctccagcacatctgcaaaatgccattcacgcagtacagcaaatccttccagacccaaccaaaccaatcaatcaaataactcagcagagactaaaagaagtccttctctacgatgagttaacagggaaattcacatggaaagtaaagaaatgccagagaatgaatgctggggatatcgcagggcataagagtagcgaaggctactgggtaataaaagtcgatggaaaactttataaggcacacaggctggcatggctctatatgaatggcagtctaccaaaaagtgatatcgaccacataaatctcgttagggatgacaatcgtatggcaaaccttagattggcaactcgatctcaaaacatccagaacgtaaacaaaaaggcaaataacaaatcaggatataaaggcgtttcatgggataagaaatcaagaaaatggagggcgcaaatcgtaatcaacaagaggaaagttaatcttgggttttacgatgacccaaaggaagctcataaagtatatgcaaataaagcggatgaatgtttcggcgaatttgcgaggtattaa

SEQ ID NO: 388269 - DNA, 198 bp, Salmonella enterica
atgcttactctcaagacgattaactcagataaagacacctctattttccaagtgacaggtgatgtcagctacgtgaaagagtcaagaatgattttcttcactggatggcatggaggtgattccgaagtgctacttgacgatggagaagttgcttacgtctgcaatgaaaaaggcgtgacagtagctacattccagtag

SEQ ID NO: 388270 - DNA, 207 bp, Salmonella enterica
atgcaaaagctgaaaatgatgctcttcggcgcaagcttgataatggtggcagggtgctcgtcaaaggaaaatgccctgtgccatcctcagccgaaacctccggcgcctccggcatgggcaatgataccaccgtcgaactctctccagttgctggacgaaacgttctcggtgtccgggacggaattatccgcgaccaaacagcactga

SEQ ID NO: 388271 - DNA, 153 bp, Salmonella enterica; identical to SEQ ID NO: 8650

SEQ ID NO: 388272 - DNA, 462 bp, Salmonella enterica
atgattacattcactcccacccgaaacatcgacctgatagaaactgtcggcaaccatcccgacatcatcgcagggagcaacaacggtgacggatacgactacaaacctgacacgaaatatttcgaagtccacgtacatggtgagttcggaggcatcgtctattaccacgaaacgcagccgttaacattcgactgtcacgcgatgtatttgccgcatgccagaggattcagtaaagatatcggcctggcattctggcgacacatcattactacgaccaactttgcctgcgtgatttcctatgcggcgcgtaagttccgtcacggccagatttactgcgcgatgatcggacttaaccgcgtgggaaccattaagaagtatttcaaaggcgtagacgacgtcactttctattcagcaacccgcgaagaactaatcgacttcctccagaaacactccaggagctaa

SEQ ID NO: 388273 - DNA, 771 bp, Salmonella enterica
atgaaaaaaacactgattgcactggcagtggctgcatctgctgtggtatccggctccgctatggcgtggacctcgaacggcggcggtggtcaggttgagattggcgggtcactgacaccagtgacgaaagcgactccgtgggaaactgcaatcggcactgctgtcacagaccttaacgctcaaattcagaaaaatgacacaaaagttgaagttaatgttccaaaaaccctccctatcctggccattcgctctactgcgcagtttacaggccgggcaggcattgctccagccattaattatgggtggattggcaatgtctggaagaatagttcaacacaagcttcagcagaagtacggaacgaagcgggagtggttgtaggtggtgctcatttccctttaactgttcaaggagccatggctgcatccaaagttgatggtagcactcctcaccagaaattgatgtttgcaaataagaaggggcaggcgtacgttggtggtcttccaacatctgctaacgatgttttggatgttagaaatatcattcttcaggggtggcctgatattgcagataaatttgtcctcccaagcggggcggcatgggaacctaatttttacgagacatttactgactcaggctggaaatactcttcctattatggttctgtaattgccaaaaatagtaaaattaatataaccatgaatgctccagttaaggccgatgctccatttaaatggaaaattagtttgcctgctacggttacctatcaataa

SEQ ID NO: 388274 - DNA, 588 bp, Salmonella enterica
atgaaaaaatatcaggatattaaaaatttcagacttattgatgcgcccgtaaacaggggtaaaacgcagtccgaaataaatataggtgcatattttctggagtcagaagacggcttggactggtatgaatgtcagtcattattttcggatgataccgcaaaaatcatgtacgaccatgagggggttatctggggtgttgttaataagccagtcccgcaacgtggaaacacatatgctgtatcaatgctgtggccggttaatatgtctgttgcggaagtagacgctgctgactgtcctgacgactgccggggtgatggctcatggttgtacagagatggcaaggttttacccgttccggtggattatcaggccaaggccgaaaccacccgacaaaaattacttagcgatgccgacaatgccattaaggactggcgtacagaattaacactggggattatcagtgataaaaataaagtcactctaatcaattggatgggctacattaacaagttaaaagctattgatttttcacaagttagtagcgaggccacttttgaggaaataaagtggcctgaatcacctaaataa

SEQ ID NO: 388275 - DNA, 585 bp, Salmonella enterica
atggaatttaagatgagtgataaagcacagactattaaaatttataatcttcgctcagacacacatgaatttattggtgcaggtgatgcctatatcccacctcacaccggattgcctgcaaactgtacgacgaaaccagcacctgaaacagaagacggttttgtcgctatttttgatttagaaaatggcaagtggactgtttgtgaggatcatcgaggcgaggtcgtgtatgatattaaaaccggaaatgaaatttttattacatcattaggcgcttacccggcagaaactacgacaacacctccagcaaatagttggcaaaaatgggatggggaagcatggatagatgatgctgtagcgaagcattccgcaacagttagtgaggctgcatatatcaaaaagaaccaacaaaataaagccaatagtattatcgatactttacaggatgcaattgattataaaatggcaactgataacgaaaaagaattactggttgaatggaaaaaataccgagtattgctaaatcgcattaatccagaagatgccctaaacattgactggccagtagaaccagccagccagtaa

SEQ ID NO: 388276 - DNA, 888 bp, Salmonella enterica
atgtctaataaaatcaatgagtcattccttgaaataaaagaagttcagaagagtacgggcgaagagatcacactcgtatccacaagcgaatccagcgttcaggttgtgccgttaatgcgcttaggcgttttcgtcccaacgctaaaaagcaccgataaagccaaagagacgcggactgttgttaatgcctccaaagacttaaaccagctgtcgatttaccgcgccgaagggtttgataatgtagtgattaaaggcccacggcttgatatggacaccgattttaagacctggattggcataatttcagtgctgacggatcgcgccttccctatgggttccgacgggaaaatcactttacctttcagcgagtttgccaagcgttgtggattcccacgcgcacgcatgaaggccgagctgcggcagaagctgaaagactccatcgtcaatattatgtctactgtagttgagttttcccgtgacgccgggaagccaacagagaaaacccatttcgtacagttaatgggtgaatccacaattgatattgcaaaagatattgtggttttgacccccagcatgtccctgcgcgacctttacgccagcgagtaccgcgttctcctgaagctcaaagcactgaaggagctggcacgcaaagagtccgcacaggcattatacctctatctcgaagccctacccgctgaccccttccctgtgaaaatggagcgcctgcgcgagcgcctgaaccttacttctcgccccgctttgcagaaccaggtcatccgtaaggctatgaaacagctggaggatatcggctacctgaagtatcaggaactgaaaaacggccgggacatcgctttcaaaatcatcgagcgcaaccctaaactgaaataa

SEQ ID NO: 388277 - DNA, 387 bp, Salmonella enterica
atgtttgtagttaagcaggaagttaacaaagcaacgtctctcttcaaaattgagagtattaccgtcgggtatcctgggtcagagcagtttgcacaggcgtttaagatggctgatgagttgggtattaagtcacccgatgcaatcgagtatattcccgttgtatacgaagatgaagccatgacgaaacctattggggatgaacaggtatttagcaccgagcgtgaaaacgtgagtgctgaagattgtattgcagtactttgttccggactgacttctgagatgttccccgatatacctttggcgggtggagttggttatcagttcctctataaaggcgacaaagtacatatcttcaacggtgtgagttgtattgaagaagttgaataa

SEQ ID NO: 388278 - DNA, 144 bp, Salmonella enterica
atgtgccgtatgccggagtttaccgcagaatattttgatgatctgccagcatatatcctcgatacgaaaacgcttctgacgggtatcaaccgaaagaatcgtaatattaatacctataatttatcgttggctgggagccactaa

SEQ ID NO: 388279 - DNA, 423 bp, Salmonella enterica
atgtcgatattttccacgctgaaagaggcgctgtcgttgaaagaaaaactggtggtcggtgctggtgctgcgctggttatcggaattgtgattgctggcgtggtatgggagcaccgtcaactgatacaggccactgagaatttaggtcgtctggatcaggttatacgcgaacgagacgccactatccagattcagaatacggcgattaacgcgctggatgatgcccaaagagcttttcatgcccaagaagtgaaagatgacaaggaacagtctaaatatgccgaggagcaggagaaacttaaatctgaaatacgtaagcaaatggatgctgcggggactgttcggcagcgtttgcctgacagcactcgtagcatgctcaaacaggccatcagtgaatttaacaccgatgccactaaaggttaa

SEQ ID NO: 388280 - DNA, 753 bp, Salmonella enterica
atggaaaacaccacaaaaactgaagtgacgcataacgtgctatctgattacgccagcgtgctaggggttccacaggagcagttttacgaagagctaaagcgggttaaagccctggctgatgagatggaccgctttacgaagctcatggaacatgcaggccaccagctcaaagaagaagaacctcttaacctggaatgcttctttgctaacaacaccatttcaagcatggccgcagttatgtttgccgctgaaatgattcgcggcggaggcaagaacttttttacctttgactatgacatttctgaatttgggcggataaacgtcactatacagaagccagaccataaaactcctgcgcacctcatcaaagaacttgatgatgaaatactggcactaaaagatgagtgtatcgcccttctgactcttgctgccaatgacatcaatacctcatggttattttgtaaggcctgtttaagcatgcaggccgctcttgtttgcatcgaacagggcgatatttacgaggccaagaactggcttgcatatatcaccgataacgcagtcgctgaaatgccggatgatatgacgattgcaggtctggagaaatggttcgactccaatatggtgtcaaacaacggttcacacggattcctgacccatcgcgaagcggtcaatgcgttacggaaatccttcccggccaccagcaaagctatcgacgaagccaccaatgatccccttaaaggaaatgttaaatga

SEQ ID NO: 388281 - DNA, 300 bp, Salmonella enterica
atggtgttcggtaacggcgcgcgcagcgtctggagaggtaagatcgagagacaattcgttagaataattcttaacgtcgtctacggtgggagcgataaaagccatctgtttttccctactaaagtcgcactacacagagcaccaaaatggtacgccatgattttccaaggggtttactcagccttcccgtacaaccagtaccgtggactacgcggcgcgcgctacctcgtttgcccttctgaccccattaacaaaaaggcgcgtgtgacggcggcaaagttaacggaagacttcttctaa

SEQ ID NO: 388282 - DNA, 234 bp, Salmonella enterica
gtgacgttttcactcagctatgagttgttgacgcaaaaagctgaagaagaaatcaggaatatcaatcttgaccaggacggaataggttacatcgaggcgctggcgaaagcctccgccattctgaatttctggtatggtctggctttacagggttatccgggctcaacaatggatgaacatgttgatgccgatcggctgcgcctgcacgccctcgtctttaatagagaggactga

SEQ ID NO: 388283 - DNA, 267 bp, Salmonella enterica
atgggtggcaaagtacctaactaccaaatcgtttatagagacgagacactcaattatttcaagcctggaggatatgttttctttcaaaggcttaaagaatatggcggtggttattggttaggaaaaatttacgaggatgggttcgagtttgtacttgaaaggccaacctcattaagtgaaggaattaagcatttacttgttttaaaatacgttgaagatgggtatttggaatttgtagatgatatcgacaacttcaagctccaatga

SEQ ID NO: 388284 - DNA, 906 bp, Salmonella enterica
atgacactcatcatccaatccaaggcttatatcattggtattgagaaggcactagacgattcagagcgcaccgttgggagcatcatcgaaccgcagaaagacggatctacacgtgttgtggctacgttcaatgaggcagtagcttccgtcatagagcaactggacaacaaggtacgcgccgccgaacagcgcgtaaaagagatggaagcgaaacagcagaatatcagccaggaaccgcagccgctaacactggcgaacgagacgatggacgttgagcgcctgcgtgaaatcgctgaagaggacaatggtagcgacgttaagtttgaatgctcagtgatggcgcgcatgctgctttctgtggccctaaacagcgatccagtggcctataccgacgcggaggagttggagagcctggaaggagttgatgggcactcttacgcgcacctgtggccaaactcctacggtttcggcaaagacattgcgctctataccgttccgcagatgatgccgctgccggtgaacatcctggatgatgaaaccaatcgggacgtctttgaagcctgggtggcggactataccggccataccaaaggctttgtgcgccagttccgagtagacgacaaataccgtagcgactcgatgtggaataaatactggaacacctggaatgcctgccgcgccgccatgcttcagggggtcgagcaaccacaaaacgcacgacaaaatattccggaaaatattcctgatggcaactctccggcaattccggatgattgggttatggtgccaaaagagccaactcaggccatgattaacgcgtggctatcagatgttgctaactggcgcggtcatgtggccggttacaaggctgcgctggcagcagcaccacagcgggaggtgaagtga

SEQ ID NO: 388285 - DNA, 255 bp, Salmonella enterica
atggaacaataccctgttattacagacgccaaccagagtgttccaagtatcaaattaccgtcgatagatatcttgaacgccttagattaccgaatgaaatatttgcaaaatgaagttgtgaaaacaatgggaaaaatgccggaagaggcggaaaaactacaaaccttagtgtctgacctcattgaagctggccatgcgcgaaaagccattaagcgacaagcaacttacttagtgattgacgaggttcagccatga

SEQ ID NO: 388286 - DNA, 648 bp, Salmonella enterica
atgaaagagcgcggaatgatttttaatgccgagatggtgaacgcgattttatccggtcgcaagacgcagacgcggcgtcctatcaaatggaaacagacgcggttcactgaaattgccgaacgtgatgatggttcgctgtggccgtgggcggaggattgcgaacacggcggtgatatctggtttgcgtgtccatacggtgagatcggcgatcacatttgggtgcgggaaacatggcaagtaatccatgaccatattgatgaatccagtcacgtcgaataccgaacctatgcgccgtcgataccaaaagaaaaggatcgctactggcacaccgtatacgcggagcattttggcgatgaaagccgtgaagaccgtggtttcccgtggcgaccggccattcatatgccgcgctgggcgtcccgcatcacgctggaaatcaccgacgtgcgcgtcgagagacttcgagacctgagtgaggaagatgcaaaatcggaaggcatcataccatcggctggtggcgtcctcccgggctgggagtatcgcattaacttccgcgatctgtggatggatatctacggtacagataattgggaagctaacccgtgggtgtgggtgattgaatttaaacgcgttgaaggagccgcgctatga

SEQ ID NO: 388287 - DNA, 6765 bp, Salmonella enterica
atggcagacatatctggtggggttttctcttgtaaaagtattagcgagattgttcgatttattagagcaatttcaatgcgtcggcaacccgtatctttcggggtaaataaggttgagggaaagagtttcgacaggcttcgcaaagaggcgaatgcaaaagcggttgatttgcttaacagcctgacagatggggcagaattaacggacgaacagcggcagacactcgctggttataccggggaggggggaattggcggttctgtttccgaatactatacgccgcagccggtggcagagggtgtatgggaaataatgaaactctacggtgccgacgtgggaaatacactggaaccgtctgctggcactggcgtattcaatgaaacgaaaccggtcggtacggtaatgacagcaacggagattagcaccgtttccggcaggataaataagcttttgcacccggaagatagcgtccagatttctccctttgagcagttggcagtcagtaccccgaatgacaccttcgatcacgtcgttggcaatgtaccattcggcgggcgcgacaatacgcgcaacatcgataaaccgtacgctgaagaaaccgacatggggtcgtacttcatgttgcgcatgctggacaagattaaacccggtggctttatgtgcgtaattgtaccgccatctatcgtttccggcaccaacatgaagcggctccgcctgcgcctttcccgaaaagctgagtttttaggtgcgcaccgactcccgaccggcacctttgatgccaacggcaccagcaccgtcgttgatgtcgttctgatgcgcaaacacccgaaagagatggccgatagagttgcacaggcggaagaaagcacgctggaagccgctaatgtcctttggccaacgtttatcactggcaaatggtttgagcgcgacggtcgccggttcgtccacggtacgcaggaaaaaggctttcagggccgcattgaagtacgcgctgatgggcagatcgataatctggcgctcaaggcgaagctaattcatcgtttcgacagccgtatcgactggtcaatgttggatattgatgaaccatcaccaactgctgatgtgattgatgaaggtgagatgcgcctgattaatggcgtgtggcataaattcgcgggcggtcgctggattgaggccgacgcgggtaaagagttggtaatcgacaacgaacgctttggcgcggatagctgggaagcacttcagcgtaacctttctactgccgaaggccgcctggggatgacctttgaccagatggcaaatgtacggcagcagtacgccagctcgctaagcgatgaccaggttcagatggtggactggattggcagccagcctgagaaataccgcacccgcctctatcgtggggctatgctcggtcgcatgctgattgaatatcaggacatgaaggctgccgggcacaacgaagatgatattgaacagcgccggttgtcactggcggccaaagttcaggctgagattgaccgctttggtaatccggggcgcggcccgatcgcaaaactttccggtgctggcgcccgtgcctggttcgcgttccgtggggcaattaagcttgatggttctatttccgatgaactgaccggaaaactggtgacacatgatgccagtgcaagctacgactccaccagctatcaggacacattacgtcacctctacagtgatctcacgcgcgatcccgttcaactggaggatttccgccaggcattcacaggagatattcccgccagtgatgatgaattgcttgatctgctggctaacacgccgggcatcgccgtttcaccatatggcggcattgtgccgttcgcccgcgccaccagtggcgacataaatgagatcattgcacctaagcaggcctttctcgcccaactgccggatggcgcggtaagaaataacgttctcaaccaactggcggctattgaggagaaacgccttaaaaccccggcggaaaatattcgttttaaactcaacagtcgctggtttgaccgctcggtcatactggagtttttgcaggagaatggttatccggatctgcgctatgtccagtctgttcagatggaaggcgacgaaatggtgtccgaaacgtatcacggcggagacggcctctttgttggtcatcgttatggtgtggtgcagcgcaaggacaaagaaaccggcgagatccgctatgagtgggacaaaaaatctggcgataacgcaacgggattcccggcgcagttggagaaataccttaacggtgcgcgcataggcgggaaagatagcgcgactgcgaatggttatcgcgagcagatggcgctgctggaagaacaattcaacaagtggataaaaacccatgaccgctatgatgatctggtcgccaaatacaacgacatcttcaacagcaatattccgtatgagcattccggagattctttagggctaaccggggtcagcggcaagcgtctgccgtttgattaccagaacagcgaggtccgtcgtttatcagaagatgggcgtggtatcctgggatttgggaccggcttaggtaaaaccacaactggcctggcgctggaggcattcaactttgagaacggacgctctacgcgcaccgcgtacgttgtgccaaaatccgtgctggaaaactggtattacgaggcgaaggacttcctgagcgagcaggccttcagcaattacctttttgtcggtcttgacgtgctaatggatggtgatcagattcgccaggtccctgtactcgatgagaacggtaagccggtaatgaatgccgacggcacgccagtgatgcgcgacggactcaagctggcagatgaagcgaccataacggcccgcatgaacgcgatccctcactccaactatcgtgcagtggtgtttaccaaagaacagtacgcccgcatcccgctacgcaatgaaacagtggacgaacacgcgcaggatatgctcatagatttcgtggccgccggtcgcgtggccagcgcgatggagtccgactcccaccgtaaagaagcggcgcgccgacgcgtgctttccgagtattcagataccggcaccgagaaggccgagaaatacccgtatttcgaagatatgggctttgacagcgtgatcgccgacgagggtcataactaccgcaacagctacaaaaatggccgggaggcctcccaactggcttatcttccgaccagtgctgtagcgcagtcggctcgcgacatggcgatcaaaaatgcctatctgatgaagaagaatggcgggcgcgggccggtgatgttgacggccacaccgatagttaacactccgattgacgcctacaacatgctgtctcacgtcctgccaaaagagttttggcagaaaatgggcatcttcgggccagatgactttgtgaaattcttcggcaaaacgcgcctggagacggtccagaaaatcagcggcgaagtcgaagaaaaaatggcgctggtgggctttgaaaacctcgatgcgctgcgcggcattttccaccgttggacgacgctgaagacagcggaagacgtgaaggacacagtagagatccctgaactggatgaacgccagcaggatgcgccacttaccgatgagcaactggcggcttatgaggaactgcgcaaacaagccgaggcggcagcgaaagccaacaatggaatggccaccattgagcaggaggacgggaccactaccgaggagaaagcacgcccgatcttctccatcatccgtgacatggaccgtgtttgtacggatatggatctgtatcaccacagaattacgtatcgtttcctgccggaacacgccgatgcggtacaacaactggcggacagcctgccgaaacaggccaccagcgaggatgacgacagcgatgaggcagtgacacagcaggtgcaatattcgctgatcgacaaaggcgaatttatccaactccaggtgccggaggcgttcgaacctgaagtgaataaacgcctggcaaagttcggtattgacgagcgtaccgtcacgcatccggttacgccgaagtacgcgaagctaatcgccacactgaaggagttcttcccgcaaggtaagcagatcatctttaccgacgagaaaacgcagcaccagaagctgaagcgcattatctgtaacgcactgaatatcgacccgtcacaagttggtattctcaacgcccagaccgttgccgacgctggtaaatctggcaagaaactgaaggcagttaagccaccgaaagaccttccggatgaacctaccgaagcgcaactggcgaaatacaatgaacagatggccctgtatgatgcctatattgcgcagcaaaacgagatgtcgttaagcgggctggagaaaatcgccgccgatttccaggaaggccgtaccccgatcatcatctgcaacaaaaaagccgaggtaggtattaacctgcatcgcggcacaaccgacatccatcatcttactttgccgtggactccggcgagtatcgcgcagcgtaacggtcgcggcgcccgcgtcggctccaaccgcgccagcgtgcgtgttcactactactgcggtaaaggttctttcgacgagtaccgcctgaagacgctgaagcgcaaggctggctggatctccgatattctccgttccgataaatcagaaatggagaatgccgacgccaacgacatgatagaaatgcagatgtacaccgccaaagatgacggcgaacgtttggcgatgatgcaggtacagatggataaggctaaggcagcgcaactggcgcgccagaaagagcaggccggtgttgacctgcaaaactatgtcaaggcgcagcacgccgccggcgaggatgtggaggcgctggccgcgcagctggaaaccagcaaaaacgagctggaagaggtggtagcagaggtggcccggtatcgtcagttggtgctggccaaagcggcagaaaacgaagagtggaaagcgcgctggggcagtgtttacagcagcgaccgtctccaactctctcagtatcgtaactcgcttaaagcggcgattcgccgtaaagccgaccttaccagcgcgatcagccagcgcgagaaactgctgacgcgcaccaaaaaggcggcgacggatatcaagcgtctgcgtccgctggtggaagatgcgatgagcaaaggcctgctgagtgtcgatcctgatctcattaaccacgccaaagattttcttgtgattaacaaccagtcctggcgcgtgggacagtattacgagaacaacggcgatatcgttcgcatcaaggcgctggactttgacagccagcgtgctgacgtcgaggtgattttctccagcaaaggcacccgttcaagctcctggccggtgcggttgcttcaacagcaggttgacgtaaccccggatgaagcggcggttatgggtaaaatcagcggcggcgtgtccatcgcggggattaacgatctcatcagtcgcgacgacttctaccgtttccagcagcgcggtatgctgaaaatcaccgactcctatgcgatgcagaacaccgagcatggctactcgatggagtttgtcagcagctccgatactgtgcagaacgctgtttatccggaccgtactgatggcgcgctgaagtcggcgatcgcgaagtgggcgctgggctaccttgccgctggtcaggggtacaaaatcagcagtgccgagtcgtttttaaccgagctgtttggcagtaattaccgtgacgtgatctcttcctacggtgacgcactttcccctgaagatattcaggagcgtatcgtggccgagatcgccaaacttccggcgaaatccccggatggttcaacgcgtaacggtgattctgaggtggaggtggccaacgccatctttaacagctatccgttccgcgcgtccgcttatgagctgggtacgtcagagtttggcgcaatcagtgtctacagcaacaaagcggagattaaggccgcgatggatgcaactaacgcgcgcattgctgccgagcggcaggcgaatctggatcatgccgttgaggtgctggcgcaatcgtgggtgacggcaatcaagggagcggtagcaactggaaaaattacccctacaattgctgacgttgttaatgatggtgctaaattcatggatgcgtatcgcaatggctcaatgccgatgccaactgcatacggcatgactaccaatcatccgacgtataatctggtttccatgttcgccgatctggtgattctggatctggtggaactgagcgaggtaacgccgacgctgttgagcgcccgtaaaaactatctcgacgtgctgattcgcgtggcagacgggctgcgggcacgcacagacgagcagaaggcggcggacgctgaccgcatcaatctggcgctgggtaatatcacggaagaggagatcgccgcgcgtaacgcgcagcaggacgagatagccacggtgcagggcgacgccaccagtatcgcccaggcgctggggctcaactaccgcgtatcgaccgccgatctcaaaatgatgtacgcgccgaagttcgccgctggcgaggtgtttggactacaggaggcatctggtcagaaaggcgtattgttccgcgccaaagacgagttgaaagataagttcaaagcgcgctggctgccagcgaaagccaagaatagcgacttccccggcaactggtggatcatcgaaactaaacacaacgcagcggacgtgctggccgttatccaacaatacgcataa

SEQ ID NO: 388288 - DNA, 912 bp, Salmonella enterica
ttgaacgaaacggtaagtctggccactggcgccatgcaaaaatcgcagaacggtggtgatattcccgacaaggggttatttgcacagaatatcggggcggcgctggcatttagtggtggggttgctgtcggcggtgatgctaatccgtggacgacgacggagtttattgcctggctggagagttgcggcgcattcaatcacccttactggatgtgtaaagggtcatgggattatgcggttaacaaagttatcacagatacagggtgcggtaatatctgtctcgctggcgctgttgtggaggttatggggactggcggtgcaattaccattcgggtgacaacgcccaccacaacgtcaggtggaggagttgccagtgcccaatttacttatatcaatcacggcgatggatatgctcccggatggcgacgtgatttcaacaccataaataaacccactgccggtggtgtaggcgcattgcctattactggtgggcgactaaatggcccgttaggcattggtactgataattcgctgggtggttattcgattgtattaggcgataacgataccggcttaaaacaaaacggcgatggcctactggatatttatgccaatggtgttcaggtattccgctttcagaacgacacactggagagtaaaaaatacatcaatgttaccggacgattaacgccaacagactacggtaattttgacagccgatacgtgcaggatatcaggctgggtagcctgcaatatgcacaggcatggaacggtccggggttcagtgatacctctggttacgtaataaccggtgtcaccaatggcaatagtgatgaactgattgacggagtgcacagacgtccaatacagaaattaattggcaaccagtggtataacgtggtgagtatttaa

SEQ ID NO: 388289 - DNA, 540 bp, Salmonella enterica
atgatgcatctaaaaaatatcgtagccggtaatccaaaaacgcctgaccagtatcaactcactaaaaaatttggtgtggtgtggctgtttgatgaagatggtaaaaactggtatgaggaacagaagaaattttctgccgactcgttaaaaattgcctacgataaaaataatattattgtggatattaacaaagatgtttcggcaataaatcctgatgggtgcagcgttgttgagttacctgatatcacagctaatcgccgggcggatgtatcaggatgctggatgtttaatggtgagcaggtgagtaaacgtgtttattcgccggaggagctacgccagcaggcagaagcgaaaaaggtaaaactgctcgaagaggccgaggccgttattacgccgctggcacgtgcagtaaagcagggtatcgcaaccgatgaggaacggcagcgactggaggtatgggaggaatacagcgttatggtaaatcgtatcaatcctgatctggcaccagatattacctggccggaatcaccaaaaacataa

SEQ ID NO: 388290 - DNA, 1245 bp, Salmonella enterica
atgtcagaaattaatccacatgatgctgtacagactttgccccaggatcgggaaacattgtaccacttggtctggcgtgagcctgcggaacgtatagctgcgcgatatggcatcagcaccgagttgctggcaaaacggtgcagcgaaatgcggatacccaggccgcttgccggttactggaaagcgctggcgaagggagctgcgcctgcaattcccgccctgcctgctttgaaaaaagggaagatggtaagggttcgtgagaatggcaacccatcagtacaatctcctgttacggggaatggttatggactgatcaatgatctcaaaacgtatctgccagcttccccggttaccgaagatggctattacaagccagcaaaaaagaagctcctggatctcaatgtttcggatacagggtttaatagcgcaatagagtttctgagtcggttctttgatgctttgggaaaacagggctatcgggtaacgctggatgttccgggggaaaggatgcatcgtgcggatattgatattaaggaagagccaaaagggggagggtatcgctgggacaatttatggcggccttacacgccaagtattatctgcgtcggggatatgtactttgcgtttaacctggctgaaatgacggagtatgttccggcgaagaaagtcaaaaatcgctatgttcgggacgaacagatggcgcggtggatacggggaaaaaatagtgagccttttcttcacgtctcgaagcatacgctgcctaccgggcgatttttgttacagctttattcgccttattcttccgcaaaatggctggtgcagttccggcagacaaaacagtgtggattgattagccagatcccaaagatgatttcggcattacaggaagctgttccgctaatttcaaagcagttagaagaggccagaatcaaagccgaggagtggcgggttcagcgagagcgagaacacaccatctatctggaaaaggagcggatacgtcaggaagaggaggcgtacaacgccagccgcacagagctgaaatccattatggcgcagtgggcagaagataaacggatggagcagtttttccgggaagctgagctggatgtggctggtcttgatgaacagcagaagatacgggttatggaacgcctgcaattagcccggcagttcttatcagaggatacggctgttgagcggttgctgaagtggaaaacgccgaaagagaggttaaacaacgggtga

SEQ ID NO: 388291 - DNA, 555 bp, Salmonella enterica
atgaatgatagtaggatggtcaaaagtagctttatagtatctttggctggtgtatttgttgctatatgtgcattaggcttgtcaatatatcaagggcatttgcagaaaataaattatgaaatttctgtgcaaccttacataacaattgtaccaactgttgatggggcaaagaatgagtatggatattacatttataatgcaggggctggcagaggatatattgagaaaatacaatattatattaacggaaagttgattgattctgataacttatcttcacttgtaaaaatcgttcactattttggattaaatgaaaaatgttttgcttatggaaatcctcgggaaggtgatgctgtatccttagatgaaatgactacgcttctcacaattagtgctggtgcatataatttacctgaatgtgcccaaaccattcaagattttcatatgtatattaataaagcaccgtctgatatatctattaaaatatggtataagtcactttacaatattactttcgtctataactcggaagataattcacagaataaattatag

SEQ ID NO: 388292 - DNA, 1062 bp, Salmonella enterica
atgatccagaataaagatggctacccacaaggagccttaataagggcggtatgggattgctgtgatgagctttatcagaaactcggtcgagaaccttcccgaaaggagttcaatgatgaaatcggtagacgtgaaccacatcgcattggaataagcacccattcccgccagtggggggaatggatgcgtcaccataatttctctataagagtgactgatgaaccaggaatcattcctgaagaaatgcactatccacagtatctccgcgtatggtatgcagtgactcaactgaagtccgcttctgccgcaaatattgttaagtggatccgtaacagtaacgcacctcttaaagaaagtgagattcgtattcagcttgatgcattaaccgtcaacagcaattccagatatcgatattttggtagccgaaaaagcacgcgaacggactccggtcacccatacgacttattatttcgaagcgggacactacgtaatactcgatatgaagagtatgtaccggagctgcatggcgtatgggacgttggcgatgatggcaagcagcctattcagataatcgttccgcgaccagcagatagaatggtggttgaattgcgagatgagttgttcaatgaaccatctgatcatgaggccgatttccgcctcagagcattacgcaaggctgttgttcgcgaaggacaaccagcattcagacgaaagctcattgaggcttatgagggaaaatgcgctataacaggttgttcggtccaagtgttactcgaagctgcacatattactccctatgcaggagcatggcatactcgcgctcagcatgggttattactgaaaactgatatccataccctattcgaccgtggtttgctctggattgacaccgacttgaaaataaggatatctaagcagcttgccgaaacagaatatgcagaattagatggtcgacgtctgagtttaccgaaagatgaacgagactggccgcttaaaactcatctgtcaaatcatcggcgatactggactgagaatcgtaatgatgaaccaagtccaggctaa

SEQ ID NO: 388293 - DNA, 321 bp, Salmonella enterica
atgactacaaataagctgatatacacgatcttcaccacaatgattattgtcagaacagctctcgccgttcctctcacggagcgcgaagagctaatcctgtccctcaaccagcttacccaaatcgaagcctcacttaaccgcgctcagcaaagcgccggaatcggtatcagcgagcgctactacttcgactatctgcgcatccacggtgatatcgccaccctgcgcagcgggattgaacattacctcacccccacccgcgcccagccgagagatacggcagcacttgtcgggcaataccgtgaggagaaaaccacaccatga

SEQ ID NO: 388294 - DNA, 885 bp, Salmonella enterica
atggaattaaagactatcaccgaacaatttccaccgttaccagttgatgagctagtcactgggatcaataatttccctcaatacaatatagctatgaaaaaagaattcttagctaaattgatcaaaaatcatcctttgctctctgtgaattggggaaaaggctcttcatattatagagcaaggtatatgggaaatgatgcatcccctattgaccatgtcagtaaaattctttgccccccaaaggaaataagatcctacggtagaattgattcagatgaatatgagattctctacacagccagcagtaaaaatactgcacttaacgagttaaaaacatataataatagttttggttattatgctatagctacttttcgcatctatgatagcataaaagttcttcccatcggggagctttcacatactcaaattacaggaagaggaatgcttctgggtaatcaatcacaatcaattatcaaatttatcaatgcctgcaatcctgatgaagttacccgattacttataactgacaaattcctttctgactctctaatgagcgatgactacaacataacttcatatgtcgccaattgtatctttgaaaaaaaatctgacatttctgttatagcataccccagtaaacaattttccggcgggataaatttcgctataaaaaacaacgtgatatggaaccacttcggcataaatgccgttagatatgcgcaaattagacatttagcatgtggctactttgaagaaagaaatacacgccatgtgaaaggtattacacaaagagggaaacttatctgggatgaaaatcatgctgatgatcaatattatgcctgtcctttggaaccgctctggaccccaggacagagtatttaa

SEQ ID NO: 388295 - DNA, 684 bp, Salmonella enterica
atgtccgaacatgcgccaccgccgcctgcacgccgccccggactaattggctggctcgcattgttgcccggcgtgctggttggcttttgcctcggcgcatggatgctggcaatggcgctggagtggctgggcgacgcgtttttctggcggaacacctgcgccagccatagtgaacaggtattgcaggcgacatggcagtggtggcggggttccgctggcgcaacggtgtggttagtagaagatctggcgattgtcagaggtaagctgcaacaagggatcgcggcgctgattgcttcgctcaacgggcagagcggcttattctggacagagacggtcacgacggtgatccgctgcgcgttactatctgcgggtaacgtcaccctcacctttttactgcggctggcgattctgttgcaggcgctgccactgtttgcactgaccattaccatcggccttatcgacgggctggtaagacgcgacttacggcggttcggcgcaggccatgagtccgggtttgtttatcaccacgccaggcgtatgatcggctccagcctggcggcaacgggactggtgtggcaggtggtgccgcaatttcttacccctgaatattttggggtgctaagttcagtaatagttggattggcggtatcctttgcaattggggcatttaaaaaatatttctga

SEQ ID NO: 388296 - DNA, 531 bp, Salmonella enterica
atgcttaaacgtctggcttacctgcaacagcagacacaacgccagatggtgcaatggcataaccaacagcagccagacagcgattatcgcgaattggaaactgccgtaaaaaacattaccggacgcacagaaacccttgccagacagcttgacgatgccgccagcgtgcaggccgaacagcttccccccattaacgaacaaatcaaggagctggagagacaggtccagaccctgagcaccagttatcaacacctgcaacaacagtccgccacgcacagccgcgccacggcaaaaagccccgtcacaactccgctttgggccgcaaaggcccctttttctcttatcagcagcgagtttcgcgccgggcggcagttcgccgtcattgccccatctggctatcgctcgctctcacagtttcagcttgtggcccccggcgacaacgtacagggctggcaattgttgcaactggacggcagtcacgccactttccgtaaaggcgggcagcggctgacgctgaacgccggaggataa

SEQ ID NO: 388297 - DNA, 1089 bp, Salmonella enterica
atgaaaatagcggcgatttatacgcaatccgtcggacctctgcccgatggtgaaattcgttttgaaaacgactggacaggcgaaatcgaatccaatgtcctgattaccggaccaaacggctgcggtaaatcaacgctgctacgggccatttccttattatggcgcgcttttgggcactggcttggaacaaggaagcgcttctttattaatggtaactcgttccgctggtttcacccgtggaacgccaattttgccattatcctggataccttttctcatgaaggagaaaagcaaattggtcttttcattggctcagaagattttttcaacttattaggtgaaaaatatcccgatatttactggattggcgaaacactaagcctgggctatgaagaagatgacgaactaataataatgtcctcaggggagctttttcttccagacgaaagttggtggagtcactggagtagccagtatcaacgacttgtactgaagggccctggtgttgatatgcctaacctggtttacctggatgccgaagcgcgccgctgggttcgcccacaaaaagatattggcaacttgtccccggatgattcatcgcaagcctggctggcaacctatgaagtgaacgataactggaaaggccagcttgaatcttcgcttttcaacatgaaagcgacgatgcccgatgaatatcctgagatgatcgccacactaaaccagttcttcagcggtaaacatatcgaagctgaaattcacccagggcaacggcaacgtgtcttactggattccgggaatgaccattcgttagatgcccttagctcaggcgaacatcaggtgctgattatgctgtttacggtacaacgctggctacagcccggcggggttgtactcattgatgagccggatctgcatctgcacccgtccctgatatcgccgttgctggcatccattgagaacatcgttgccaggaaaaatggtcagcttgtgattacttcacacgcaacggatatctggcaacgttatgacaacatgggattgcggattgatttaaccgatggcaaggatgcggaaaatggccagcgttaa

SEQ ID NO: 388298 - DNA, 1725 bp, Salmonella enterica
gtggagatgttgtctggagccgagatggtcgtccgatcgcttatcgatcaaggcgtaaagcaggtgttcggctatcctggaggcgcagtgcttgatatttatgatgcgctacataccgttggagggatcgatcatgtgctggtgcgtcatgaacaggccgcggtgcatatggcggatggcctggcgcgagccactggcgacgttggcgtggtgctggtgacttccggaccgggagcgaccaatgcgattaccgggattgctacggcctatatggattccattccgctggtgattctttccggccaggtcgccacctcattgattggctatgatgcctttcaggagtgcgacatggtggggatttcccgaccggtggtcaaacatagcttcctggtcaaacagacggaagatattcccctggtgcttaaaaaggccttctggctggcggcaagcggacgtcctgggccggtggtcgtggatctgccgaaagatattttgaatccggcgaaaaaaatgccgtatgtctggccggaaacggtcagtatgcgctcttacaatcccacaacatcaggacataaaggacaaattaagcgtgccttgcaaacgctggcgtcggcaaaaaaaccggtggtctatgttgggggaggggcgataagcgcggcctgctatgcgccgctgcgccacatcattgaaacctttaacctgccggtggtctcttcattaatgggactgggcgcgtttcctgctactcatcgccagtcgttaggaatgctgggaatgcatggcacttatgaagccaatatgaccatgcataacgccgacgtgattttcgctgttggcgtacgatttgacgaccgcacgacgaataatctcgctaaatattgtccgaacgcgacggtattacacatcgacattgacccgacgtccatatccaaaacggttaacgctgatatcccggtggtgggcgatgcccgcctggtactggaacaaatgctggagctactggcgcaggatgcgccgtctcagtcgcaggatgatattcgcgactggtggcagcagatagagatctggcgcgcccgtcagtgcctgaaatatgacgcggaaagcgaaagcattaaaccccaggcggtgattgaaaccctctggagtctgacgaagggcgacgcttacgtgacgtccgatgtaggacaacaccagatgtttgccgctctctattacccgttcgataaaccacgtcgctggattaattccggcgggctcggcacgatgggttttggcctaccggctgcgctgggcgttaaaatggccctgccgaaagaaatggtggtctgcgtgaccggcgatggcagtatacagatgaacattcaggagctgtcgacagccttacagtatgaactgccggtactggttctgaacctgaacaaccgttatctggggatggtgaaacagtggcaggatatgatctattccggtcgccattctcagtcttatatgcagtcgttaccggattttgtgcgcctggcggaagcatatggccatgtcgggctgcagattaaccgtccggatgagctggaaagtaaactcagcgaagcccttgagcatgtgcgtaataaccgactggtgttcgtcgatgtcaccgttgatggcagcgagcatgtctatccgatgcagattcgcgggggcgggatggacgaaatgtggttaagcaaaacggagaggacctga

SEQ ID NO: 388299 - DNA, 273 bp, Salmonella enterica
atgccgttacttatgcgtacaaccaggcgggtggctgtcaccgaagccggtaaacaattattactgacgcttgaacccggtcttgcgcgcattgaagcgggcgtgacagctcttcagagactgcgccatacaccggctgggctggtcagacttacggtatcagatcacatgattcatgaatgtctctggccacgattgtcaccgttactaaaaaaaatattcggatatcaaggtggaaatgtcgcagcagaacggttttgtcgacattgttga

SEQ ID NO: 388300 - DNA, 948 bp, Salmonella enterica
gtgtcagattcactacgtattatttttgcgggtacacctgactttgcagcgcgtcatctcgacgcgctgttaacttctggacataacgttgtcggcgtatttacccaacccgatcgtccagcaggtcgcggcaaaaagttgatgcccagcccggtaaaagtgctggcggaagaaaaaggcattccggtctttcagccagcctcgctgcgtcctgaagaaaatcagaagctggtcgcggatctacaggctgacatcatggtcgtcgtcgcttatgggcttctcctgccgaaagccgtgctgactatgccgcgcctcggatgcatcaacgttcacggttctctgctgccgcgctggcgtggcgctgcgccaattcagcgttcgctgtgggccggtgacagcgaaaccggtgtgaccatcatgcagatggacgtgggcctggataccggcgatatgctgcataagctttcctgcccgattagccctgaagacaccagcgccagcctttacgataagctggctgagcttggcccgcagggcctgctgcacacgctgcatttgctggcaaccggcacggcgacaccggaagtgcaggatgaaactctggttacctatgctgagaagctgagcaaagaagaagcccgtgttgactggacgctcagcgccgctcagttggaacgctgcatccgcgcctttaatccgtggccaatgagctacatcgttatcgacgagcagccggtcaaaatctggcaggcttcggtgattgacaaacccgctggtgccgagccggggaccatcctcgaagccacccgccagggtattcaggtcgcgaccggcgacggcatcctcaatcttctctcgctgcaaccagcgggtaagaaggccatgagcgctcaggatctgcttaactcgcgccgggagtggttcgagcctggaaaccgtctactctga

SEQ ID NO: 388301 - DNA, 927 bp, Salmonella enterica
atgacctttgaacagctcctggaagagtatttttttgcccgtctgctgcgccctgatacccagagctgctactgcacggcggtaaatcagtttacccactggcgcaacgtactgcccgcagaagtcacgccgcatatggtgctggagtggcgtcattacctgttaaatgtgcgatgtatcaagccggtgagctggaaccactatatgcgccatatgcgggccttgtataacttcgcgattgaacaagggctgctggagcagtttatcaatccgttccagaaaacatcactgcgggaatctcgtaggaaaaagaaaaccctgacccgcgagcaaatcctcgcatcccgcaaggtactgaaccaatttatcgaacgggagaatatgcagcgcggctatcgttcgcctttatatccggcctggttttggctgaccgtggttgaaaccttcaactacaccgctatccggctgaatcagcttattcacctgcgggtcagggatatcgatctggtccatgacacgctatttattcagagcgaaggcagcaaaagccatgatgaacatatcgttcccattgcctcccggctgcggccctatctggagcatctgcttgaagaagcgaaaacaaagagaatacgagctgacgatcagttgttcaacatcaatcgtttcagtcggcggacgctgcgccagggtaaaccgatgacagaaaatcaggtcagttatttctttgccaagctcagcgatgcctgccacagccgtttttcatcgcaccgctaccgtcataccgtggccacagaattaatgcaaaaaccggagcaaaatctgtatgtcacgcggaaactgctcggccaccgcgatattaaggtgacgctcagctatattgaacacaatgtcgagatgctcagaagttgcgtggagagagattga

SEQ ID NO: 388302 - DNA, 315 bp, Salmonella enterica
atgccatggaaaccagtgtttcccgctaatattttccacttcgatatcggtgatgagtttgcccagatcgtgcagcaacgcagcgtaaatgatgaccgtcgtccagcgttcggactgagcagcctgatcttccggtgctgcatcagacggaaaaagataattctgccgcagccgtgcggcataacaggcagcttcgaggctgtggtcgagcaaaccgcctgcgtgggcgtggtgatggttttccgaggccgggaacaactgcgccagttctgcgaagcggtggattggtatcagccagaagcgttcaaacagtga

SEQ ID NO: 388303 - DNA, 303 bp, Salmonella enterica
atgaacagaagcaacgatctttaccagaaagtcaccgatgaaattatcgccgcgctggagaaaggcgtgatcccctgggttcgcccatggcgggaaggggaaccggtggtgccgatgaatgccctgtccgggcggttgtatcacggtatcaatattcctctgctctggaacagcgctgagcgacagggatatgagagcgatcgctggctgaccttcactcagattcgcaatgcgggcggtaacattcgtaaaggcaaaaaatccacactgccgtgttctatctgccccagcagcgcgaggtag

SEQ ID NO: 388304 - DNA, 1122 bp, Salmonella enterica
ttggctgctttggaattaggtattgatattttatcagcaattgaattggataaagatgcatgtgatacatatagagataacttgataaaaaaaagagagaataatatacagcttctgaatcaagatattatgtctatatctcctgtaagtatgatgggggacctatctttaattgaaggagagcttgatattattatcggaggtcctccctgccaaggattttcatcacataggataaaaaattctggggttgatgaccctagaaataatttgttgattaggtattttgattttgttaaggcctttaaacctaaattatttttagtggaaaatgttcctggtctattatgggaaaaacacaaggattatttaaataaatttaaagcattggctgggtgtaataattataaaataattgggccagtcaagttgaatgctaaggattatggtgttccacaaaataggaatagggtttttattttagggctcagaagtgatatcaacattggaagcgtgacatggccgccagttagctctcattttaaagataagaaaccactttggagaaattcatctgaagtctttgagagaccaactccagatattattgaaaaaataggaaataaaattggtgaagagtccgcggcaaatctgatcttctataagaagagaaatcatacttctcatgatgactcatcaaatattcacatgaaccatgctgaatatatgattgatagattttcacgcactcctatcaatggcagtcgtgaggatattgattttagattaccttgccatgctgctggttatggtggtcataaagatgtttatggcaggatacgtttggctcagccaggccccacaataacaacaggttgctttaatccatccaaaggtcgctttcttcatccctgggaaaatcatgggatatctattaggcatgctgcaagatttcaaacgtttcctgatgactatatgttttctggcgggataattagtcaggggaaacaagtggggaatgctgttcctgtattaatgggtaaggcgttacttaattcatgcgtcaatattataaggcaacagagtcaggaggatgatattgcatgcaaacaagaaatttga

SEQ ID NO: 388305 - DNA, 2967 bp, Salmonella enterica
atgcaaacaagaaatttgacatttaaagctagggctcgaacaatcgagcatttaggaaaagggcagattgccgactgtccaactgccattagtgaattatggaaaaattcctacgatgcatatgctcgagatgttgcattgtatacaattgacggtgaccatccttgtggtgcattgattgacaatggttgtggcatgtcggttgaacaattagtcgataattggttgattgttgggactgagtcgaaaaccaaaaaaaaagcattgagcaaagaggacagatttggtttacctattcggaaaacccaaggagagaaaggtattggtcgtctttctgctgcattcttatctccagttacgtatttagttactaaaagaataaatagtaattttactgctcttttaattgactggagattgttcgaaaatccatatttgtctttcgaagatattattataccgtctgcagaatttgagtctctagatgatgctaataatattttatttgaattaattaaacagctaaaagttaacatagctttcgaagaaaatgctgaagagagtgaggatcaaatcttcagaagagacgcttgggcgcgtttttctgaagatgagaaagagctatcaaaatttgatgactttattacaacgcaacaaaaaatattaaacttttgcgtgtctgttaatattccatctgaaatctactctccttgggatgatatattacgtaaaacagaggatctagatggtggaaaacatggtacagcattatttcttttagaacttggccgtgagttgtcattgttaacaaatacaggggatttagccaaagataatgctgagttaatagatattgaacaaagcctggtcgatacacttaggggatttgttaatccctatgtagaaataaaacattcattctcatatgaaatattttctgttagaaaaaatggttatcatcgaccaattctaagccagacagatgttttcggaaagaatgattttgatgctctcgaacatactgtggttggcaagattgataataaaggctggtttagagggaaagttaaatcttttggtgaagaaagaggcgaggtaataattccatctaatatcagcgtcagtgaaaaatatggtgtcggcccatttgatattcgtatcggaacatttgaaattatgccgaaaaatacgactcattctgagcgtgaacatacaaatctggaagcgaaagcgaaaaaatatgctggcttgatggttttccgagatgatcttcgagttttgccttatgggcgagtagataatgattttttccagattgaagaaagacgatcattaaatgcaggacgatattattggtcaaatagacgtatttttggttatattggtatttctcaagatgaaaatagagaattaaaagataaatcaggacgagaaggctttataaggaatcaagctgcaagggaattaaaaaatatagtttctgacttgctgaaggttttggcagataaatattttggtcgcgagtctgatgaaagaaaagaacaccttgaacaggttaaaaaagagcgtgaactacgaaaggctgctcaacagcaggcaagaaaatcaacgcaaaaaagtttctcagaagcattaaaaaagcaaactccagttttgaatgattcacttaataacattatcaatttgaagaaaaagatagattccgttaataatatggacatcaatctaataagagttattgatgatgaattaagtaatcttgattctattcgtgtagaaataaagactccaaccaaaccaccgaagcttggtccatatgaagataaatatcgtgattatcgagataaatataatgaattttcagcgtatgtattacaaatgaaattaattgtgaataagctcgattctgaattaaataaactagaaccgtcacaactagcaaaacgacatttagagaaaaaccaaggaatcattaattcacgtttaacgaaattcatatcgtctataacagataaaaataaccttcttttatccaagtggaattcggaagtaaaagaagaacgttcagtttactatagtaaatgtatatccttagttgatgatgttaaagatggttccgctgttgagcaaacattgaatctattggatagtatctttatagagttaacagattctttgacatttaaatatcaatctatcctgaaaggtatggatagattattggaaggtgttaatttagattctgctttttcaatgtcagaagaagaacgtgcttattttgaagaaaaaacaagaagtctaaatgcattagcacaattaggtattagcgtagagatactttctcatgaattagaagaaatggatgctcttgttagtcgcggactgaactcattacccactgtagcaaaagaacatcccggatacgagttagcactaaatgcacataagtctcttactcagcagattaggtttctctcgcctctaaaaatttccggttatcagtctcgtcaacagattaccgggaaaaacattcatgatcatatatttaaatttttcaatgatagatttgaacgccagagagttgatatcaaatttggtgatgacttccttaaaatttctattgtagatctaccctcaaggatttatcctgtttttataaatatcattaataatgctttgtattgggtatgtctatcggagagcagagtcattcatattgattgtattggtaatcttgtgattattgctaattcagggcctgctgttgacgaggatgatattccaaaattgttcgagcttttttatagtaaaagagccaacggacatggagtgggtttatatctttgtcgtgagaatctttctgttgctcatcataaaatatggtactcgaatgttaatgatggtgggccatatctaattcgcgatggcgctaattttgttctagagtttaatggattggagatgtga

SEQ ID NO: 388306 - DNA, 1752 bp, Salmonella enterica
atgactgcgaatacatataatcaattagtgagcagtactttttgtgataatgcgattcgttctgtaatgatgattgatgatgagtttatcacttatgctgactccattaaagcactgcagggtcagattaaactagatgataagaagcttgattcatctaagagagctgcattactagaaagtttttttcaatcaaagaaaatggtttgtgatatagacgatggcgttgccagccttgatgcagataggatcaggaaatcggatcttatcatcattgactatcatttagaaaaagattcacctgataagaccttatttgttctaaataaactaaaagactctgaacatttaaatatggtcgtcgtatatacccgagaaaatatggaaacagtatggttacagattgcttctatgttgaggggggcatatgatctaaattcacgtctaattaattatgataatgaagatgttattacatattggaatgatgtcattttacctgacttaaatagtggtggtggatattctctgtcgagatctgaaattgtatcatatattcaaacaggtaaaacaatagggcgtatcaaaggtattttaagccgaaatgatgacataacggaccccaaagatagagattttattgcaaatttaatatgcgaatattatattcaatcaagtaataatctcaacgatgctcaagctgcctataacgtcagtggtgatagaaacgggattaaatggttgcagataggaaatatctttgtaacgttatatcgtaaagaagttgattcttatgataatgatgctgaaaatatttggaacaccttaaatgaatcattatgtgaatggaaaccatcttactatcagttattgaaatcagaaatccaaaataaaatcgaagcagaagctttatcgtttaacattcacttagctaatgatatatatggtcaggcggcttggctaaatgaaattattagaactgataatgttaactttaaaaacgaaaagatagatgttatattcggcaacttatcagaagagttatatataaaattaagaaaaaatcctgagcttaaacgatttattaactctgtgtttgacgcttataagcaggatttcgatgcttgtgcagaaacagatactctaaaatattgtgctgctcagatgaaacttccaactaatcaaaatatagtattccaagatatgtatcatgctttgaatatgaatctttcttcacggaactatgaagaaaaacatatatcaacaggaactgttttttgggatacagataacaataattggtatttatgcgtatctgccgcttgtgatatggttccaacacagggaaatgatccccaccatgaacggctgagccctcatcgtctaattaaagtacttcaattatttccagtgaaacctgacaaggcattacctctcgctcatcactcaaagtatatctatgcttatgataaggatgaacgtaaatatttttcaattctcaaggaaggaaaagatttaccagttgttgactatatgatcattcttaatcatggacacaacggtactgatttaggtaaagggaaagcgaaggcagttgtttggaaaaacactaatggagatattgagaaagtgactttaaatataaagctaaaatctcaacttcgaactggttatgctgaaagatatcaagccattgcatcacagtatagtgcgagaataggagtcgattatattagtgtagcacttccttga

SEQ ID NO: 388307 - DNA, 744 bp, Salmonella enterica
atgcaacaattaaataattacgcagataataggttggtaagcggttgtgtatattgtggaggtattccagaaacaagggagcatgttccatctaaagtattcctagatgcaccacttccggaaaatcttccggtagtaggagcgtgtaggaaatgtaacaacggtttttcttcagatgaagaatatgttgcatgccttcttgaggccgtcatagcgggaagtgcatctccctcagatatacggagagagaaagtttctggggttctagaacgaaccccaaaacttcaaaaaaagttagaatcagcgaaatatataaaagatggagaaacatatttctcagttgagtcggaaagaataaaaagaatcataataaaattagctcaaggacatgctgcttacgaactgagtttaatttgcaaagatgaacctcgatcagtttggtggcatcctatagagttaatggacaaggaattgcgagatgattttgaatcagatcgttttgcttatatcctcagcgagcttggcagcagaaattctcaaagaatacttgttatagatactaaaatggtttctcaagaaaataaagagttacacattcctatttttcttaacccttggatagatgtacaagaaggacgatatcgatactttgtagatgactcatcagatgatatcgtagtaaaatttgttataggtgaatatctggcatgcgaggttatatggtcagatcctctcttagaatag

SEQ ID NO: 388308 - DNA, 426 bp, Salmonella enterica
atgtgcaataatattgctctttctcaggaagaaaaatttatcaagttgattgataaatatatcactcagcatcgtgataatactattaatgctgttttttaccgaaagctgtatgtgcttttcgtcggatatcatctcaaatattattacacaagtaagcaatactgcaactcgtgttttcatgtggataatattatgcagatgttcacaggtgtagtttcttcactcaaggctaatgtgctaacaaagctcaacaatagtcatacaatgcttcattccttgaacgggcttgtggattacatttccgctaacctcatggaggttgaacaactctatgcagatttactggcgcaatatgaaaggaaaagtatttctcattcgttggattttataccaccacctatggggggcagaaaaagactgtga

SEQ ID NO: 388309 - DNA, 273 bp, Salmonella enterica
atgagtaaccagacagttcggtgccccttctgctttaaggaaagtccccacggtgtaaaaatatgcattggataccatgcaaaagtggtctatggcgaaagcccggtcatagtggcatttctgtttcaattcgtggcgttcggtctcgcatggttagcattttcattgaccggaaacactccagtctcagtcattacgtttttcgtaagctgtattgttcttatatatatacttaaaaaaatctatgcagacagggttttgtttattcaataa

SEQ ID NO: 388310 - DNA, 189 bp, Salmonella enterica
atgaatatattaccaacctcagcctcggaatttcctctttcaggaaatgtgcgcatccgtcaggtcgcacagttcctggcaatgactgaatccactgtccatcgcagagtgaaagagaccgggttcccccgccccgtccacctctcttcccgactggtggtcttcgatgccgctgaaatccgccagtga

SEQ ID NO: 388311 - DNA, 657 bp, Salmonella enterica
atgataagtcctattcgccagagcctattcgaacgggctgctaacctacctgccgtcagtgcccgtgaactggcgctgatgttgtgtgctctggaaccacacctcacaaccgctgcaattcctgacgataaacacgagtactacgatatcttccttcaccaaattatccggcaaatcaaatctgccggatgcttcactccgggcagaaactcgcagactcactcggctgatgaaatattcgcgctggcatacctgatgattgatgaagagatcacaccaaaaccagtgcaagaacgttgccttcgagcagtagctgctattgccaaacgcaacaaagccagagatctactgatgcaacttggaggccagcaattgctggagtgcggtctggaactacgccgcaatcagcgcggccagtacaggaaagcggcagagcaggaaaacacctacaggttgctttttttattactctcactgttagtcaaaaatgccaatggtacatatggaacactcgactcacctcgtctgtctaacctctatcgggatttacaaacccttgcggaagacgaaggattttcgtctgaaggtctctcacgcgctaccatttacaacaagttaaaatcggctctgtctgtccaacatcgccacgcagattaa

SEQ ID NO: 388312 - DNA, 3324 bp, Salmonella enterica
atggcatttacacttgatgatttaataaatgataatcgattagggcgattgttttctgaggatgagcgtaattgtgcgttgcaactatgggtcttacagataacatccaattcaatgacgcaaaatcgtattctttatgggcgtttgctcccatataaccattctaataatagctggtcctttagtgataataataaatttcaatcgcttggtcaattcaaagtaaatgtcactcggctaaatttatatattaaaaataatagttgtgccgagttgttaaaaaaaataaatgatggtttgactatatctgtaataagtgaggcattaggttttaaatttcctgataaactaaataaacgatttggagaaacaaagctttctactgaggccttggcttatcgtcctgtttcatatttacttaatcgagatgcctatgactttcatactctttctagccctcatggcggagcaggggcactgagcgcctctataatccagacggataaggctgcgttgtttcgcttggggccagattatgacactgcgttaatggacatggtagtcaaggatcttaatgaagatactggactggacttcggaagaactgatattgcccgatttggcgaaatcgagttgttggtttttcctgctctggatgataaagaacgtaaactacttgatgttagttgggtaaatagacctagggctttagttgtaagatttaattctatgcaggttccacagtttacggcttttcagtttcgcctgaatatagtgaataatggacaggttattttctcaggtattgctgttggtattcgtgactctgaagggatatttgaatgttcgtttgaattaagtgaccaaatccgaactattaccgacagtacagaaattgaagtttttggtttcgttgatgaatgttatcgcctcggaatgctgtgttgccgctggcgtataggatatatccgggaaattaatattctaggtcatgcgattggacaaaaatctaatccagtaaaatttgattggttagaaaaaacgataaagccatcaatgtcagatcgtgcgaaatctgcacttacaattaatcgcggtaatttgggttttactagtcatgttggagggcgtgaaattgatgtgtgggttcctgctaacaaagagttgttatctatttttgaacagcttcacccgaaaaaatctgagggtatgtttttcttgcgatggggacaaagtgatggtgaaggacggttgcaatttgtagaatggtttaggaaagttctatctcaataccaagaacaccaaatagttatttttgacccatattttgaagatgcgggtttagggttagttttgctttgtgcagcatcaaactctgattatattatttttacgtctcttccaaaaataccgaagtttgatgaaacggttgtagaggtagagtcagataaattattcacaggacgagttaataatcttgttgcctgttgtgaaaataatatcaacctgttaagtaagcttaagttacgtatttatggaatgaaagaagggcgactgcatgatcgctatatcctaattatgagaagaaatggattaccagttactgggtttaacctatcaaattctttccagaaagccgcagaaaatcatcctttgttgataactccaatcccatcagatgtattacttcaggtggaggagtatatgtctagcctattgcaggaaattggaactaataagaatgatgatatagagggaagtactgctatacgacttctttttgactcaaagtcattagttatgagtccgaagcgctatgaaccattacgttttcttgagaaaaaggatgctggaagtgcattaagtttatggtttaatcaaataatattacgagatttaagtggtgataaattaaaagaacagctagtagcactcggtttacttaaaggagactcacatattctgggtgaagccggtagcattcggtattatttagataacttggcagtggatttatctggttttatttctagttgggatgtcattggtgatttgctggctcattcccataatgatgagatcaacatacaaaatgaacataattttattgaattgttgacgcaataccttgggttatcatttaatcgctcacatgatgatactaataaagagttggcagttgttgattcacaactatttcaacgaacacttaaatctctcttacaaagctcttatcgtgtagaacatctatttcattctacaaaatatacggttcttacttgggctgaatattacgcagtctgtttattgtggcgatatgctcctaaacaattgctgttacttgctgaagagcaaattactaaaatgccaaaagatacgcaaggcatagaaatagttagaatatctttattaagtcagatcgttagccaaatttccttatctatgaattttaatcttagtgaggttcaacaagaatgtcttctccgaagtggcaatggcttactacaatggatggggataagtgctattgaatcaaagttagagaaggttaaatgtgtttccactgttttaccgttattaaatattttttcccatactgagcgtgtaatggtattaggatggatggttaatcatgcagcaagaaacaagcatgaaacacagccctataaggatttaatcaaagcattacatacagtactgccagaaattatatcatcagatgagttgcagcatttggttgactctttacgaggccatatgcagcgattggcttgggcagaaccatggttatttacggatgtagttgctcctttgttgcaagcgggaagagtgtctaatgacgacgcttgtaaaatttggacagaggagcttgtttatatgcttgaggcccattcaccgaagttgtttgaggaatctagagaggggcaaacaactaacatcgccgctttccttcttgctaatagtaatcctgaagcacaatcgactagcgttaaattgatacacaatatattgaaacgtcagcaacggatagtacaacaaccacttgcgagtacttctaactggactcgatgggatggtgcgcttttgatttctatgtggatactgatctttgcaagatgggggaaatattacttgcgtcagcgttccatggttaatgctgagttggagcatttatcacaagaggcgtataggttggttgtatttagaccagaagatgaatggcgatcgaagaatacaggtaaagaaggtgcattaatggctgttcttgatcaagtagagctacttttgaccgaacaggacggcgctgaggtaagtcctcaatag

SEQ ID NO: 388313 - DNA, 315 bp, Salmonella enterica
atgagagatattgagaaagaaattatcgattttatcgatcaggaatataacactaaaaagtactttctctgtgggccaaagcgaaccatcacgcttgataccagtattagggatgaacttaaactcgtttttgaagatagtgaagaatttctacaagagtacttcaagcgttggaatgtagattcagaagaatttgacatactcaactatctgaatccagagtactttggaagtaaagagcctgatccgcgtaagccactaacagttggtatgctcgttgaaagtgctaaagctggacgttggttatatagttga

SEQ ID NO: 388314 - DNA, 1038 bp, Salmonella enterica
atgaaaaaaacatgctcttcattaaaccttggcatcactcattctctattgttctatatggcagtactcgtcatcatgcctcagagagcgcctctatatcccattgttatttggttgggtatgattattctcagtgggctaattgtacacaattattggaataaaaagtcatccaatcaactggtcgttcgcttacgaaagaattataaaaaaacgcaagatgcagcactattgtcggcattgctatttttattaacatgtatttcctttaaagtcattaattatatcaacaccatcattccaagcgtattagtttttatgacggcattgtgtatcatatacactatatcatctcacatacaatcgttcgataacaaagaaaaaaacatagctataaaagtaaagctagggattaaatactcatggctaatcgtatcattaatttcatattatcttgcgcgctcgctaatctccaatatatttgatattccttttgataccacactcaataaactcatgacggcagtctcagcattgctttttattttcatattctattataccatttactttatttgcatttcttatttaatactcatggccccaaaaataaaaaaaagaaaagcaacaccatctgatgacattagctattcaatgtcagttttcgctccattattttttattggttacatttcatatattgcattttgtatacagacgttttccatcatcaaattcggtttcggatttgccatggagtatgacacgcgcgatactttcttttgcaataataagtatatgtggctcagcgaatattctaaagctcgctttatgtttatcgctgaaggaaattatcgcgcattaatacctcaccgtgatgactttacaatatcacgcttgacctgtacaaatagtgaaccattctatttactagttactgtacaagataaaaaagattttatgttagaagctttggaaaaacaggcagagatgcttactagtgacctaaagacggcaatatcactgaatgttcgatga

SEQ ID NO: 388315 - DNA, 156 bp, Salmonella enterica
atgattgaagaaaaattatccacctgtttgaaatctgttgtgatttacagagtttggccatttgaaaatacgattgaaacttccgttcctggcaccaggccgactacgcctaaaaaatttcagagcttaatgggctctttacaaaacaaattctga

SEQ ID NO: 388316 - DNA, 1170 bp, Salmonella enterica
gtggcccttagtgataccaaacttcgcagcatcaatgctaagccctacagcggcgcacccgaagtcacagatggtgacggtctgagtgtacgcataaccccgacaggaacgattacgtttcaacatcgctaccgttggaacggtaagccagtgcgccttactatcggacgctatccggcaatgtctctgaaagatgctcgtgtcatcgtgggtgagatgcgcgaattgtacctcaagggactaaaccctaaaaattattttgctaaagaagatggtgagctaacgctcaaggagtgtctcgaccagtggtggagcaagtatgttgaaacgctgaaacccaatacacagacgctttataagtcggttgtgtacaacaccatgtacacagaatttccagatgcaccggtagtaaatatccctgtttcagcttgggtcaggttcttcgacaagcaggaaaagaaaaacgttaaaaaggcaagggtgctgcttctccagctcagatcagttatgaactggtgtataagccgacagttaatcgcttcatgcgaagtcttgaagctcagcgttaagaacataggcaagaaacctgatgtcggtagccgggttctcacctataccgagttggcaaaaatatggttagcgctggaaaacaacaagatcgttacctctaacaaggtgcttcatcagcttctgttgctttggggggcaaggttgtcggaacttcgccttgctaccgccagcgagttcaatatagatgatctgatttggacaacgccagcagaacattccaagatgggtaacgtcattcgtcggcctgtgtttgatcaggtgaagccttatgttgagcggctgctaaatgcaggaaataatgtactgttcccaggacaagagttggacaaacctatagatcgttcgtcagcgaatctctacatgaaaaaattaagggataaaattgatataccggaatggcgaacacatgacttcaggcgctcgctggtgacgaatttatcaggggaaggggttatgccccatgtcaccgaaaagatgctggggcatgaactgggaggcgtgatggcggtgtataacaaacacgactggctggtggagcagaaagatgcgtatgaactgtatgctgataagatattctggcatgttaaacagctcggttga

SEQ ID NO: 388317 - DNA, 258 bp, Salmonella enterica
atgcctgtactgaaggtgctcgcggtggatgtggagcgtgcatttttaacggtaatttttgatgaggtgctcatgactactaccgattttatggaagagcaggaagtttttgacctgctcaaaaagaaaaaaacggcaatctggcgtttacgaaaagaacacggattccctaatccggtacttacctacccttcccgatacagcagaaaagctgtaatgaaatggatagatgagggtggcgtcaaccgagctgtttaa

SEQ ID NO: 388318 - DNA, 558 bp, Salmonella enterica
atgacagcactcaacaaacatgcagaactgcgccaattagcaactgatgcgcacgagcgtggcctcatcaaacgctacacgaaaggcatcgaggccaataagagattcgctgctatcgccactcctttgacttttctggcgctgctggatgagctggaggccgcgcagcatgaaaaagatgaattacagcagggattcattgcaaatcaggaagaggcccacgaagcaataaaatatgcaaccgagctgaaggagcagcttgcccgcgcttgcgctggtcgagaagaggcgtttagtgaggtagacgagatgcagaagtctttagaccacacacatagacgacgcgccatctggaggggaagagcagaagaggctcaggctaagttggaagccgcagaacgccgcatagcagaactggaggcgcgtgaggtgactctgcctgatagaaaatcaatacagttttggcctggtgatgcctcagagtttgacagtctggggtatgagattgcagtagagaatgcacttaccgccgctggcattggcgtgaagggggaatga

SEQ ID NO: 388319 - DNA, 213 bp, Salmonella enterica
atgagcaaatatccaagaattggcggcgtcttatccaagaagaaaaacacttccgcgaaatgccgctgtggcgcagtggctaaatataaaaccacggtgcaggtagatatttttcgtggcgatgatgaggttttctggtcatgtgcagaacacaaaaacaactgcatgtttctacttgatggcacattcgatagccaaggagcagcccaatga

SEQ ID NO: 388320 - DNA, 225 bp, Salmonella enterica
gtgaagcagtctgatttaccaagatgcccaacgtgcggaaatatgcccgaatactcgctgaaacctaatcatcttggctgggtttggggtggtatcagatgcccgtatgaccattacagcgtgaagcttaacggaccggccagtagccgggcaaaggcagaagaaactctggctccgctgtggattgagcaagttgcaaaagccaatcgggagaaaacggaatga

SEQ ID NO: 388321 - DNA, 252 bp, Salmonella enterica
atgacggtttttgaatacatccaggctaatccaaacaccaccagcggtgacatcgccagagggctgaacaagaagacgcccgctgtggcaggcgcaatatcccagctttatacgactggtcgcgttgtgaaatcagggatatgtaacggtgtccctacttaccgcgttaacgatctcccttatgggtgtggtaacgcgctgctaattcaatttaatcaactactgatggagtgtcgccgtgaagcagtctga

SEQ ID NO: 388322 - DNA, 267 bp, Salmonella enterica
ttgcttcatcgccacggcacgactgatagcgagggttatttcatgaatatcgaataccaggacaagggcgcggcggcaaacatcatcatcaccagcacagtttttgagtttcgtcgtcatgttcgcgtcgttgatacggtgctgatgtgtacgcagggtgttattgccgagcgttgcggcttcttcctgatgaagactgtgatctcaggtcgctctaaagaaatgcttcgagccaataagacggcgaggcgggaggcggcgcgatga

SEQ ID NO: 388323 - DNA, 810 bp, Salmonella enterica
atgcccagtttaggccagctctataatgataaagacgccgggttaactacccgcaaaacctacaatgttccgctggataaaatttacgccgaagaaggctacaacgttcgtgaactcaatcgggcgcatgttgaagaatttcgcgatgcgtttattgccggtgaatacatcccgccgctggccgtggaagttactgagcgtggcgtgaaggttatcgacggtcatcaccgctatcatggtgcgctggctgctatcgaaatgggccacgacattgtgcgcctggaatgcaaagatttcgtcggtagtgaggccgacaagatcgccttcatggtaaccagctcgcaaggattggcgcttactcctcttgaacgtggcgctgcatatcatcgccttcagaatcagggctggagtccttcagaaatagcggcaaaagttaaacgttctgagtccgatattctgcaacaccttcaacttcacgaatgcaccccgtatatcaaaaagctcgtgcgtgatggttccatgaattatgccatcgcgatcggcatctcacgcgagcatggtgtgtacgcagaccgtgaagcctcccgactgatgaagaaagcagaagcggccggaaagaaaaaaataaccaagagcatcgccaatcctcagtttaatgccggaaaagcaagaaagtttcttgagcttatttcttcatgtgctgaggactctggtgaagtgctgaccattgaagtgccaccagcaatgcaggctgaaataatctcaattcttcgcgaatttcgtcacgaggctgatggggtgacctcatga

SEQ ID NO: 388324 - DNA, 813 bp, Salmonella enterica
atgtctcaaattgaaggctctgccgtgctcgacatccgtgatctggtctctgcaactctgaagaccgagacggacattccatcagtagttgtacctgatggatttgaagtcaaatctcttgaatctctgcaactggctccgtcgcgcattcgtcagagcgctaacctgatttctccgggttctctgatcgcttacatccagcgattccgtgatgaacgtactgtagtttttgcggataaaaccaaaacacgtattgtcgccgtgctggatttccaccagaacgcagacaatccgagctgggctgcacataaagctgtttatgactgcccgttctccgacgaatggaaatcatggactgccaacgatggcagcaaaatggaccagatcaacttcgctgaattcctggaaaacaatattcagaatgttgcgccggttagtgattcataccatggcccgtcaggtactgaactgctcgaaatggttctggcattccaggagactcgcaaatctgagtttaagtctgttaaacgcctttctgatggtacctgccagttccagttcagcgatgaaaaatcaggttctggtaataccaagatgccggaaaaaatcagcctggccatttcgccattccacaacggctctccttaccaggtcgatgcacgtatccgctaccgcctgcgtgatggtcagttggtcctctggtatgagctgatcgaaccgaagaaagttgttgagcacgcattccaggaaatcgtcaccgatatggaaagccaactcggcgaagacctccctatctacgaaggctctgtttaa

SEQ ID NO: 388325 - DNA, 360 bp, Salmonella enterica
atgtcagaaacaaagaacaccacaccattcagccagcaactggcttatatcaataaaggcactctggatgctgaactaaccgaagcgttagccgaagtgattaaagcagtccgcgagactggcaagaaaggtgcggttacgctgacgctcaattgcgccatgctgaatacccgtgatgaaaataccatgaaggtaacaccaaaggtctcccgtaccattcctgaactagaccgcgctgataccatcatgtttgcaaccgccgatggcgatctactgcgtgacgatcctgcgcagacacagcttgatttaaaggttatcgaacctgcaccacaaacagcacctatcaagctggcccagtaa

SEQ ID NO: 388326 - DNA, 447 bp, Salmonella enterica
atgaacggatacgaaaatctttatatggccattattcctggcctcgctaagcactatggaatttccgactacgattaccgaaacaatccgcatgttaccagcgcggctttgtgccgaagccatctacataaactgatgcttatcgagctttacttgcacgaacatcgcatcaaatttaagaattccgttcttaatcttgatggtggtgctgctttacatcatcttgtttttcagaagacaaactggacacctgagacgattcgaagcatgggatattttgaccttctttgggttcttcttgacgatctggttcctgacaaactgagcgaaacagcgcagagttatttacaagtgatctcaaagaatcagcgtcttttaaaaactgacctaatgagctacgcaggctggcagataggtacaggtgatcagtatttaaaagatgaataa

SEQ ID NO: 388327 - DNA, 237 bp, Salmonella enterica
atgacaagatcagatgtcatattgcgctgcttactgaactctggttgcagccttaccgaagaagacattaaggagcgcattaagcttgttttcgccgaggcatatccgagagaaaaatactcaaaatgggatatggaaattaacgacgaaaccggaaagcaaataatcaaaaccgttggtcgcgcctcacagatcagggttgatttgttcatccgggacttgtgggatattcactga

SEQ ID NO: 388328 - DNA, 255 bp, Salmonella enterica
atgagtgactcaggaaaaaggtttgagtttttggtgaatggcgctccgttggcgctgctcaacactgagactgccgtagcagcagactatctgttgttcctggaaggagttatcaaagccctcctgagtgatagggagagcctcgaacgagaagcaaataaaagtggccgcactatcaatgggcacgggtttagttttatcggctcagtgaatatcccacaagtcccggatgaacaaatcaaccctgatctgtga

SEQ ID NO: 388329 - DNA, 711 bp, Salmonella enterica
atggaaccgaaaaagaatctgacgacagaacagcttgatgacgcagccaagttaaaagctttgtatgagtcaaaaaagaaagagcttggtgtaacgcaatacactattgctgatgagttgggaattactcagggtgcagtaggccactatcttaatggaaggaatgcattaaacctttccgtggctgctgcctttgcaaaaattctacaggtgtctatttctgattttagcccatcgctcgatgccgaagcgaagaagatgttgccgcatgaaaaatcaaacgttcaatacattggccctcataaaagaggcaaagaatacccgctgattagttgggtgcaggctggagcgtgggccgaagcgatagagccctatactattaacgaaatagacgaatggtatgagtcagatgcaaaggtttgtggtaacgctttctggctcagggttgatggtgattcaatgacagcccctacaggcttgagcattcctgaaggtacattggtattaattgatacagggcgagaggctgtgaatggcagcctagttattgctaaaatggtcgatgccaatgaagcaacttttaagaaactcatcattgatggcggtcaaaagtacctcaagggtcttaaccctgcctggccaatgaaagagatcaatggcaactgtaaaattatcggtgttgccgttcagactatgatgcgcttagtgtga

SEQ ID NO: 388330 - DNA, 165 bp, Salmonella enterica
atggctaggaaaagggcgtacttcttcgcccttaacacttccatcctgctgaatgattacgaaaatatctcgaccactgcgtatagctttactgattgcacattggattacgccaaagtcattggcagtctttgcctgaccatgaatcttggcgtattccgctaa

SEQ ID NO: 388331 - DNA, 504 bp, Salmonella enterica
gtgggtaacgaacctgagtggaaagtagagcgtcaacccgcatggctggtggcagcaatcagaaaaactattgctgcattgcctggtggctacgctgaggcggctgaaatcattgatacatcacaagacgctctttttaaccgcttacgcgctggtggtgatcaaatcttccctatggggtgggcgatggtgctgcaaagggctgcaggtgtcagctatgtcgctgatgcgttctcacggcagacagataacgggattcatatccccggtgccgcgcctgactcagagaaccaggagatcggtttaaaacttgctgagctggtggggcatttgggggatttggtcaatgcgtaccgacactacatcgacgatggagtggttgataagaacgagtggaccagcctgaacgacatagcctacgagttcagagtgacgctgatgacatttctcaacctgatttctcgcgtctactgcattccagagccggatgacgatgcggagtga

SEQ ID NO: 388332 - DNA, 279 bp, Salmonella enterica
atgcaccaaaacgaatattttcacgtgaccatgcccacggttttttctcgtgaggacgccccgtggattaaacagcagttagcaacactcccggcaggtatgcgggaaaaaatcgcgatggcgtatgcgcaggcgtaccaggaggcgttcgacgcagaaccggtgtctttccggcagcagaacgcagcaagacggacggcaaatcgtcgattgcgagagttttgcacgagatataccccagcggtcaggggatatacctcgctcccacccagggtatga

SEQ ID NO: 388333 - DNA, 276 bp, Salmonella enterica
atgatttattcagacgctaacgaaaaatgggctccggttccagttgagctttattcaaaagcttatgaagtcagcaatcttggccgtgttcgcagcattccacgtctggctaactctgaatattttattcgtcacattcacggcggttttctcaaaggccgcatgcgtaaagacggcaccaaaacggttacgttgtccgttcagcgtcagcgcgaaaagtttgtcattgccgatctggttgctaaagcattcggggaggtatcaaccaatgcttaa

SEQ ID NO: 388334 - DNA, 1530 bp, Salmonella enterica
atgcttaacatccagcctcgcgagaaacagatcgtcgcactcaacatgttgcgcggcgcatggaagcagaataattcgttcatgctctatgctccggttggttttggcaaaacggctattgccgcgctgatcactgatggctttgtcagccgcgaaatgcgcgtaatgttcgtggccccgtatacggtactgcttgaccagaccgccacccgattcatggaatatggtcttcctggcgaagagatcagttatgtctggcgtgatcacccgtcatataacccgacagcgcttattcagattgccagcgccgatacactcattcgccgtgaattcccggacaacatcgacctgctgatcgttgacgaagcccacctgaagcgcaaaaagttgctggaggttatcgacaacctgacccgcaacacaaaaacgaaggtggtcggcctttccggtacgcctttcgccaagttcctgggcaattactatcagcgcctgattaagccaacaacgatgaaggaactgatcgcgattggcgcactgagcaaatacgaattttacgcgccgtcacatcccgatctctctgaggtggaaacgtcttacgttgctggttatggcagcgactacaaggaaggccagctcagtaaggttatgagtgaagccaaactggttggcgacatcgtgaaaaactggctggagaacgggcaggatcgcccaacaatctgtttctgcgttgatgtggcccatgcgaacttcgtcacgatggagttttcccgcgccggggtgaccgttgaagtcatgacggcaagcacaccacatgaagaacgtcagttgactattcgtcgcttcgagcagggtattaccaaaatcatcatcaacgttggtgtactggtggccgggttcgacagtgatgttcgctgcatcatctttgcccgaccgactaaaagtgaaattcgctggattcagacgcttgggcgtggattacgtgcggcccctggcaaagatcactgtctcatcttcgaccacagcggcacagtcaacaagctgggttatcccgatgatattgaatacgactatctcccttcgtcgtctgacggtatggaagaagccccgcagcgtgttaccaagaccgacgaaccggagaaactgccgaaagagtgcagccagtgccattacgtgaaacctgccggaatttatatctgcccgaaatgtggttttaaaccgctggccggagaagacgttgaaacagacaaatcccgtggactgaccaaggtcagcaaagcggaagttaaatacaccccagagcagaagcaatcctggtggtctcagattcttttctatcagcgcacccgcgcagcgcagggacgccctgtcagtgacggatggtgtgcgcatacctatcgccaaaaattcggtgtatggccgagagggttacatcacaccccgcagcaaatcacacctgaagtgacgaatttcatcaaatcaaaactaatcgccttcgcgaaacggaaagagaaacaaggggaagccgcatga

SEQ ID NO: 388335 - DNA, 972 bp, Salmonella enterica
atgaataccaaacaagccgcaattggtcgctgggctgagatatacaaacactacggtcttcctggaattaccgggaaaaaccaccttaaaggggaatgtcctctgtgtggtcgtaagggcaaattccggtgtgacaataaaaacggtaccgggtcatacatctgcgtgtgtggttcaggtgatggctgggcgctgctgacagcaaaaacagggaaagaatttaaggttcttgcatctgagatagacaggctgatcggcaatgaatacacctcagatcgcaccagtgtaaacccggtacgcacatcgctggcgcagcagcgtgagaaggtaagccgtaaatttgcaaagctcatcccgctgcgtgggaccagtgcagacagttacctgaaggggagagggcttaatacccttccggccgaaagcgtcagattctgcgacaaacagccggtagacggtaaaaacctccaggctatttacgcgctggcgacggacgataaaggcgaactttgttacctgcaccgcaccctgcttgacggggacaagaaagcgcaaacaggaggcgcagccaagaagatgatgaagctgcaggaagatagttacctggagtttgccaaatcagttgctatccgcatgtttcccacatcctccacgctgggtattgctgaaggtatcgaaaccgctctggcctgccatcagataaccaagtgtcatacctgggcaacgatgaacacagctttcatgaagaagttccgcgttcctgccggggtaaagaacctgattatttttgcagatgctgactcaaacgcagccggtcatgctgctgcatttgaatgtgctgctgccaacctccacggcaaaaacgatctggagactgtatccgtccgctggcctgcacagggtgactttaacgatctgctgctaaacggctctgaagtattcgaatgggtattccacagggggatgaagcagtga

SEQ ID NO: 388336 - DNA, 645 bp, Salmonella enterica
atgggtattccacagggggatgaagcagtgaagaagccagccagacaaaagttaaaggtgtacaagcccaaggtctgcgctcagtgcggaaagacattcaccccagatcgtaatctgcagaaagtgtgcggccctcgctgtgcgattgactacaaccgtgcgctgaaggctaaaaaggcagaagcagagagaaaggttagccttaagattcgtaagaaggcactccagcctcgtgggtactttgtcagtaaggcgcaaacggcatttaacgcttttatccgcgaacgtgacgaaggtaagccttgcccgtcctgcggcacatatcatcccccaatgattttcggcggtcagtgggattgtggtcacttcctcagcgttggatcacgtcctgaactgcgttttgaagagaagaacgcctatcgccagtgcaaagcctgtaacggtggcgctggtcgctttaccgctaaaaacaaaacagtacacgagcgctacagagcaacgctaatcgaatggtttggccttgagctggtggaatggctggaaggtccgcacaaggcgaagcattacaccagagaagaacttgaagatattgcggctacctaccgccgtaaaacccgcgaactgaaaaaacagagggcagcatga

SEQ ID NO: 388337 - DNA, 162 bp, Salmonella enterica
atgattacagtgctactgatcatctatgcgtttatggctggtatgaccgctgagtatacgcacaccaggctgaaaacaatgtcttcctcaggacatctaattctgacttctatcatcttaggagttatatggcctttcgaaattttctggaggtcaaaatga

SEQ ID NO: 388338 - DNA, 675 bp, Salmonella enterica
atggcctttcgaaattttctggaggtcaaaatgagttatgaccttatctactgtgatccaccgtgggaatacggcaacagaatcagtaacggtgcggcctgtaatcattacagcactatgagcatggaagaactcaagcgtcttccaatatggaaagtggctgctgaaaacgctgttctggcgatgtggtacaccgggacccataaccgtgaggctgtagaactggctgaatcatggggattccgtgtcagaacgatgaaaggctttacgtgggtgaagctgaaccagaacgctgctgatcgcttcaataaggcattgagcgctggagagctggtggactttaacgatctgcttgaaatgctggaccgtgaaacccgcatgaacggtggcaatcatacccgtagcaacaccgaggatgtgctgattgctaccagaggaacgggcttgcaacgcgctagcgcgtcagtaaaacaggtcgtgcatacctgccttggcgaacatagcgcaaagccgtgggaagtaaggaaccgacttgaacaattatatggtgatgtgaaaagaatcgaaatattcgctcgggaagagtggaacggatgggaccgctggggaaacgaatgcaacaacagcattgaaatgattacgggccagataaaagaggtgaaccatgcagcgtaa

SEQ ID NO: 388339 - DNA, 411 bp, Salmonella enterica
atgcagcgtaatatccaaatggtaatggagcgctggggcgcttgggcagcaaacaacagtgaagacgttacatgggctcatattgcggctggctttaaaggactcataccagcaaagaccaaatcccgcgttcagtgctgtgatgatgacgcgatggttatctgtggctgtatggcccgactgaacaaaggcaatagtgagcttcatgatttgctggtggactattacctgttcggaatgacattcatgtcgctggcaaaaaagcataattgctctgatggtcatataggaaaaaaactacaaaagggagaaggaataattgaaggaatgctgatgatgcttgaagtgaaacttgaaatggatgtcgaggtgtcatttattcctgaaggaaaaattgttgcggctgcataa

SEQ ID NO: 388340 - DNA, 534 bp, Salmonella enterica
atgcagattcctttcaaaagttgtctggagagtggcatggaattaacatttaaggatctgaaagaaaaacgcactaaactggtcgaggcgcaatggaagttacaggataaacttcaggagaaggcgagcgaactactacgagagtattcaggttctcttgatcttacatctcgtgagtggactggttctgacggaacaagatggccttatgtggacattggtatttgggaggaggaggggaagttctttcctgtattaatcccccaactcaatatggacagccgttaccacttgaatttcgtgattgcaaccactcttgatgattctccgctaacaggtggctacaggcagggcgtaagcatctcactctggtatgagaactcatcattttatgctgaagtaggctcaggagacgacgtctcccgtttttctgtctcatctcagctgggtggcttttatcaggtatgcaacgctattaaggcgttaattagctcttctatggatcgcgccatgccagatattccagcgaattaa

SEQ ID NO: 388341 - DNA, 336 bp, Salmonella enterica
atgaaaatgaatgacaagaaccctgaattctgggctgcggctttgaccggactcaaaaatgcgtggccccagattctgggggcgtcaatggccggactcattgcctatggtcgtctgatatatgacggtgcaacacgaaaaaataaatggcttgagggcgtcctttgtggcgccctttctttatgcatcaccagcgcgcttgatgtggttggccttcctgtatcgatatcaccgttcgtcggtggtgtgattggattcgtcggcgtagacaaactgcgcgaaatcgctatcagcgcactcaaaaaaagggcaggggtgaccgatgacaaccagtaa

SEQ ID NO: 388342 - DNA, 420 bp, Salmonella enterica
atgacaaccagtaatgtttcccgcggtatccgcaacaataatcccggcaatatccgctggggtgacgaatggcagggcctggcacccaaaacacagcgcaccgataaagcattttgccagttcaccacgcctgagtatggtatccgggcgatgatcatcatcctgcgcaactaccagcgcaagcatggtctgaacactgtaagcggcattatcaaacgctgggccccgccaaacgagaacaatacacaggcgtatatcaacagcgtggctcaggcggcgggcgttacccccgaccagcgcatcgataccagcgacagccgtttcatgatgaaattgctacaggcaatcattaagcacgagaacggtagccagccttacggattcgatacgtttgttcgcgcagtcgaactggcggggtaa

SEQ ID NO: 388343 - DNA, 531 bp, Salmonella enterica
atgaatatcgcgctggtggaacaatactggaaaccactggctctaatattgctggtggtaggcgcgtttatcaccggaaatgtctggagtgatcggggctgggaaaagaagtgggctgaccgtaatagcgcggaatcatcgcgaacagcgaacgcgcagaccgccgcccgcatgattgagcaagggcgcataattgcccgtgatgaggccgtaaaggatgcacaagcgaaagctgctaaatctgctgacactgctgctggtctgtctgccactgttagcaagctgcagcaacaagccaaaaaactcgctaccagcctggacgccgcaaagcacaccgcagatcttgccgctaccgtccgaagcaaaacaaccaacgccgacgccagaatgctcgccgacatgctcggagatattgcagcagaagctaaacgttatgctggaatcgctgacgaacgctatgccgccgggatgacttgtgagcgcatttacgagtcggtgagagagtccaataacagcagggttacacgatga

SEQ ID NO: 388344 - DNA, 231 bp, Salmonella enterica
atgaacgcagaaaacctaagtgaagcgtattacctcaataacgatataaaagaactacagcgtcagaaaagcatactggaaagtggtgctggacttggtgtgacaatccagtctacctatcaggataatgtctttcttgaggccatacgtccgcatgcagtggctgaacttgaccgccgtattgaggaaaagaaagctgtgctggtcaacttgggcctctccttcccttaa

SEQ ID NO: 388345 - DNA, 210 bp, Salmonella enterica
atgggacagtactattacgttaataaaaatgcgcagttaaatggtgatcacgaagtgcatgtgagctcatgcacccgattgccagaagagaaaaacaggctgtatctgggaatttttgaaacctgtgctccggcggtgcgggaagccaagaaaacctattcacaatctaacggctgttattactgctgttactcgtgccatacgtcgtga

SEQ ID NO: 388346 - DNA, 201 bp, Salmonella enterica
atgttaacagtaaaagtaatgtcgcctggtggcggcgaagagattcattgcggtctgagcgttggcttcaatcctaaccagcagagtatcgcggtgtcaggaatggaccagaatatcttcctgaagtcgggtgaagttgcctatgtgatgaacgctaacggtaagaccatttcccgttacgaacacacagtgcagcggtag

SEQ ID NO: 388347 - DNA, 339 bp, Salmonella enterica
atgaagtatcagcttgcaaaattgtatcgcggtgatcgtttcttcgggtatggaatagccgtaggtggtttgcttattgatggtcaggtttcaacggtggtagaaactgcgccaaacgaaatgccgaaagtaattgcgacatttaatctcagcaatgaacattccgaaaaacaaccacgaattgatttagacaaccaaagagcttctaacgaattccagattgtaatccatccagataagacattaaccgttgagcagttaaaagagttgcgagaaacggtgaaaggttttcttaccaagcataatttgtctggtggtggcgcatggacgtctttataa

SEQ ID NO: 388348 - DNA, 540 bp, Salmonella enterica
atggatattaaggataaaataaataccattctgttatgcgacattgccattcacttgggtatcgatactgatattgatccacatcttgttaaatatgctgtgtcatccggtaatgattgggttctcaaggcagaatattcatcattagatgttgacgaaccaagtaaagaagaccgtgattttgttactgccgtcttgaatatgtaccgcggactttccaatgctttcaggaaacttagtgatggcgagcaaaaagaattaatccgtgaccatcatctaaaagtgcatgatggggcaattcagctcccaggtttcgacggtaataatgaatgcgattacttcagcatcattgaggcatatcagaaatttgatcgcttccccgaacagcaacagcccatcgccaatactcattcacatacagaacatctctataacgcaatgcttgatgaatttaagaaaattgacgctgtgaatcggagctggaatttaacgaaggaagagctggcatccattctttctactgctccgcgcagcttctaa

SEQ ID NO: 388349 - DNA, 351 bp, Salmonella enterica
atgccagcactaattcctcgcgcctgtcgcaagagaggttgtcctggcacgactacggagcgctctggttactgtgagcggcaccgcaatgaaggctggcaacagcatcaacagggtaagagtcggcatgaacgtggttacggtagcaagtgggacatcaagcgcgctcgcattctgaagcgtgacaatcatctgtgtcagaactgcctgcgtactggtcgcgctgttgcggccacaaccgttgaccatatcaaggctaaggcacatgggggtaccgatgacgattcgaacctcgaaagtctgtgctggccctgccaccgctcgaaaacagggcacgaacgattcaaatga

SEQ ID NO: 388350 - DNA, 498 bp, Salmonella enterica
atgtcaggaccgccgaaaacccctacccatctgcgtttggtgaggggtaacccatccaaacggcctatcaacaaaaacgagccgcagccacctaaaggggtacccccagttcccaagcatttcgacaagcaggggaagtactggtttaagcggatggccgaagaacttgatgccattggcgtcatatctcagctggatgccagggctctggagttgctggtagaggcatatacggaataccgccatcattgtgaaacgctggatcgggaaggttatacctatgcggtatacagcgatgatgatgctgatgaagggaaagaacgtgaaattcgaatgatcaagccgcatccggcagccatgatgaaagctgatgcctggaagcgacttcgcgcgatgttagcggagtttggtatgactccttccagcaggtctaaggtcagtaaagaaaaaccagacgatgatgatctgttaagtcaatttctaaattcgagggactga

SEQ ID NO: 388351 - DNA, 1758 bp, Salmonella enterica
atggcaaaagttactgatggcatacgttacgccgaacgcgtcgttgccggggacgttattgcctgtgagtttgtccgtctttcctgccagcgatttcttgatgatctgaggcacggtgaagaacgtggcatctatttcagtgagccccgcgcacagcatatcctcaatttttataaattcgtgcctcatgttaaaggagcactggcaggccagccgattgagttgatggactggcatgttttcattctgatcaacatcttcggttttgttatccccctggtaaatgaagaaacaggcgaaattgttctgcgtaatgatggtagtggtcgtccggtgatggttcgcaggtttcgcacggcatataacgaggtagcccgtaaaaacgccaagtcgacattatcctctggcgttggtctctatatggctggcgccgatggtgagggcggggcagaggtttattccgcagcgacaacgcgggatcaggctcgcatcgtttttgaagatgcgaaaaacatggttaaaaaagcgaaactcacactggggcgactgtttgaattcaataaactggcgatctaccaggagcagacagcatccaagtttgaaccgctttcttctgatgccaacaatctggatggtctcaatatccattgtggcatcgtcgacgaacttcacgcgcataaaacccgtgatgtctgggacgttctggagactgcaaccggcgcacgattgcagtctcttctgtttggcataacgacagcgggttttaacaaagaagggatttgttacgagctgcgcgattatgccattaaggtgctgcgtggttataacagcgaagtggaaggcgcggtaaaagacgatacctttttcgccatcatcttcaccctggataaagatgatgatccgtttgatgaaacggtctggcaaaaggctaaccccggactgggtatctgtaagcgctgggatgatcttcgccgcctggcaaagaaggccaaagaacaggtttccgccagggttaactttttcaccaaacacatgaatatctgggtgaccgctgagtcagcctggatggacatgattaagtgggaaaaatgtgagtttatagccccccgtcatgagctgaaaacctacccgatgtgggctggtgtggatctggcccacaagattgatatttgcgcagcagtaaaactctggcgggcagacaacggccacgcgcatgcagactttaaattctggttacccgaagggaggctggaaaaatgttccgctcaaatggcgcagatgtatcgcaaatgggctgagcttgggaagctggagctgaccgatggtgatgttatcgatcatgcgcagattaaagctgattttctggaatggattagcggcgaaaacctgaaagaaacaggattcgacccgtggagcgcaacgcagtttagcctcgctctggcagaagagggcgtgccgctggtggaagttccgcaaacggtcagaaacttttctgagtcaatgaaggaggttgaatcgctggtttacggcgggcgcttccatcacagcaatcaccctgtaatgaactggatgatgtctaacgtcaccgtcaagcctgacaaaaacgacaatatctttccgaacaaatccacgccagaatcgaaaatagacgggcctgccgccttgtttaccgcaatgagccgcatgcttgtaaacggcggcgaacaacaggacagcctctctgaccatctggaaagttacggcgtccgttcattataa

SEQ ID NO: 388352 - DNA, 186 bp, Salmonella enterica
atgatcctgatgattctcgccccgctgatcggggtgatgggcgctattttgctttcgtttggtgtatggatgatttatccgcctggaggcttaatcagtgcgggtatgctttgccttatttggtcatggctggtttcccgcacgctttcgctggccgggaaaacattgcgaggagggactgactga

SEQ ID NO: 388353 - DNA, 1230 bp, Salmonella enterica
atgtttttccccggaatgttcaaaaaaagtgacgcccctgtcactactgcggcagaactcgctgaagcagtgggaatgacttacgacacctatacagggaaaagggtaagcagccagaaagccatgcggcttacagcggttttcggttgcatccgtgttcttgctgagtcgatgggcatgctgccctgtaacctttacaagataaccggaaacagtaaacaaaaagcgacttccgaaaggctgcataaattactgacgatgaagccaaatgattacatgaccccccaggagttctgggaactggtcattgtctgtctttgtcttcgcggtaatttttacgcctacaaagttaaagcgcttggcgaggtggtggagcttcttcccattgaccctgggtgtgttgaaccaaagcttaacagccagtggcagccggtttaccaggtaacattccccgatggctcaacagatgtgcttgggcaggatgatatctggcatgtcagaacgcttacctttgacgggctggtgggactgaaccctatagcctatgcaagagaagcaatatctctgggaatggcaacagaggaacatggggcgcggttgttctcaaatggcgcggttacctccggcgtactccgcactgagcaaacgctcactgacgctgcttacgcaaggctgaaaaaggattttgaggatcgtcacctcgggctgagcaacgcgcaccgaccaatgattctcgaaatgggactggactggaagtcgatggcgctcaatgcggaagacagtcagttccttgagaccaggaaattccagctggaggaaatatgccgcctgttccgggtgccgatgcacatggtgcagaacactgaccgctcgacgtttaacaatattgaaaacctcggcatggggtttatcaattattcactcgttccgtacatgacccgcattgagcagcgaatcaacatcgggctggtgaaggaatcaaagcagggtgtgtactacgcaaaattcaatgccggcgcattgctgcgcggggatatgaagtcgcgatttgaggcgtattcaacaggcattaactgggggatttactcaccaaatgactgccgggagcttgaagaacttaacccacgcgcaggaggggatatttaccttacgccaatgaacatgacgacgaagccgtcagacagcagcaagaacaaaacaaccgaggaacaacataatgccgatgactaa

SEQ ID NO: 388354 - DNA, 654 bp, Salmonella enterica
atgccgatgactaaacagcggctggatattccgctacagctaaagtctgtcagcgacagcggggagtttgaaggctatggctctgtttttggcgtaaaggacagcttcgatgatgttgttgtgccaggcgccttttcggcctcccttcaggcatggaaagaaaagaatgctctccctgcattactctggcagcaccgtatggatgaacccatcggtatttacactgagatgaaagaggatgaggttggcctttatgttaaaggccggttactcattgatgacgaccccctttcgaaacgcgcacacgcccacatgaaggccggttctttaaccggcctttctattggttacatgctgaaagactgggagtacgaccgtgttaagggcgtgttccttctcaaagagattgacctgtgggaagtcagtctcgtcacgtttccgtcgaacgatgaagcgcgtgtaagtgatgtcaaaagcgcattttcccgcggagaaatcccttctcaaaaaagtattgaacgagtcctgcgcgatgttgggctctcacgcacccaggctaaagcattcatggccgggggttatagctcactttcacagcgtgatgttgatgaagtgagtaccgcactggatgcactgaaaaacatcaaattttaa

SEQ ID NO: 388355 - DNA, 1209 bp, Salmonella enterica
atgtcagttgacgttaaagacgtagagcaggtcgcgcaggaactgcaggcgaagtttgatgcgttcaaagaaaagaacgataagcgcctggaagcagttgaacaggaaaagggcaagctggcgggggaggttgaaaccttaaacggcaagttgtctgaactggatgagcttaaatctgcgctggaagaggaactgaagcaggttaaacgtccagccggtggtcctcagagcaaagccgcaagcgaacataaaaccgctttcattggctttatgcgcaagggtaaagatgacgggctgcgcgaacttgaacgcaaagctctgcaggtcggtgtggatgaagatggtggctatgccgtgccggaagagctggatcgcacgatccttaatcttctgaaagatgaagtggtgatgcgccaggaggcgacaaccatcacagtcggtggcgctaactataaaaaactggttaatctcggcggtacggcttccggctgggttggtgaaacggatgcccgcccggaaaccgatgcgtctaaactcggtcagattgagccgttcatgggagaaatttacggtaacccgcaggcgactcaaaccatgctggatgatgcctttttcaacgtcgaagactggatcaacagcgaactggcaattgagtttgcagagcaggaagaaatcgcctttaccagcggtaacgggacgaagaagccgaaaggttttctggcatacgcttccacgcttgatccggacaagactcgtgcatttggtactctccagcacattctctctggcgctgcggcaggcgtaacggctgatgcgatcatcaaactggtctacacgctgcgtaaagtgcatcgtaatggcgctaagttcatgatgaacaataacagtctgtttgctatccgaatcctgaaagattcagaaggcaactacctgtggcgtcctggtctggaactgggtcagccttcctctctggccgggtacggtgtggcagagaacgaacagatgccggatatcgctgctgatgctaaagcaattgcatttggcaatttcaagcgtggttacaccattgttgaccgcatcggcacccgcattcttcgtgacccctacaccaaaaaaccattcgttggtttctacaccaccaaacgaacagggggaatgctggtggattctcaggccattaaactgctgcagatcggcactggcgcttaa

SEQ ID NO: 388356 - DNA, 243 bp, Salmonella enterica
atgcctgaattattgcgtgaacttaagtggtccccagatggttgtattgtcgaatccattcccgcaggggtgtattcggacggtgagctacctgcccgcgctgaggaaattgctgccgaacttggcattattaaatttggtggtggcggtgtttatgtcgctgcagagtcagatccagagccagagccagagccagagccagagccagagccaccgaaaacaaaacgtgggaagaccaaatga

SEQ ID NO: 388357 - DNA, 324 bp, Salmonella enterica
atgaaaccgtctattgccgaattacggcagcaatgccggatagacagcgatgatgtttctgaagatcagacactggcgatatatctcagtgcagcaaagtcccatgctgagaaaattgtaaacaggactctatacgatacgagcatcccggacagtgaccctgatggcatcatcatcagcgacgatatcaagctggcgttaatgcttcttgtcagccactggtacgagaacagagagccggtaaatactggcaatattacaagcacattgccgtttggtgttcaggctctcctggggccgcaccggaagcacccgggaacataa

SEQ ID NO: 388358 - DNA, 339 bp, Salmonella enterica
atgcaggcaggtcgattacgccatcgcgttactatcctgaactttacttcttttcgcgatacgacaggccagccggttgaagagtggcaggagggaaagatcatatgggcggaagtgctgggtatcagtggtcgtgagcagttgcaatcaggagcagaaacggcgcaggcaactattcgggtgtgggtccgtttccggcgtgatgtgactgctgcgtcaagattaaaggtgctcacagggccatttaaaggtgcggtactgaatatcatcagcccccccatacccgacagtaaagccaccaggctggaaatactctgtaaaaatggagcggaaaaatga

SEQ ID NO: 388359 - DNA, 450 bp, Salmonella enterica
atgattgatatcagtctggatttttctggccttgaagagatatcccgcgatctggagttactgagccgcgctgaaaacaacaaggttctgcgtgatgccactcgagctggcgctgaggttctgaaagacgaggtgatagcaagagcgcctgaacgaaccggcaaactgaagaaaaacgttgtggtgcttacgcagcgatctcgtaaacgcggtgatatttcatccggtgttcatattcgtggtcgaaacatgcgaacgggtaacagcgataattcaatgaaagcctccgatcgacgtaacgccttttactggcgatttgtcgaaatgggcacagtgaatatgcccccacatccttttgtccgtcctgcgtttgatacccgcgaagaactggcgacgcaggttgctatgaaacgcatgaaccaggccattgatgaggtgctgagtaaatga

SEQ ID NO: 388360 - DNA, 348 bp, Salmonella enterica
atgacggaagatgacctttatcttttgctgaaaccgctggccggagggcaggtttatccctacgttgccccgcttggcagtgatggtcagccctcgatatcgccgccttgggtgattttttcgcttatttctgatgtgaccgccgacgttctctgcggtcaggccgaatccgggatatcggtccaggtggatgtatactcactgactctcaaagaggcgcggaatcttcgtgatatggcgcttcaggtggttaagccgctcaatcccaccaatataagcaaaacccctggttatgaaccagagtgccggtattaccgggcgacgctggaatttcaggtcaccgtctga

SEQ ID NO: 388361 - DNA, 234 bp, Salmonella enterica
atgacggcaagcgagcttctgatgtggattgagtacgacaggcaaagtccggttagcgatattcgcggtgacattcaggccgcccagctcgtctctgccatctacggctcacagggggtgaaagtaccgctggacgatgcgatcctgcgctggggtggtgatgaacaatcagcaccgaaggacccgtttgcagggcttgaggctgctttgtcaaacgcagcggcaactaattaa

SEQ ID NO: 388362 - DNA, 3303 bp, Salmonella enterica
atggcaacattacgtgaattgattattaaaatttccgctaactcgcaatcattccagacggaaatttcccgcgcctcacgcatgggccaggattattatcgcaccatgcaaaatggtggacgccaggcagcagcggcgtccagagaaactcagagagctttggctgacttaacgggacaacttaattccgccaaggcgtctgctgttggtcttgctggggcatttgcaggagcatatgccaccggccaccttatttctttagctgacgagtggagttcagttaacgctaggttaaagcaggcttcaaaatctactgatgacttcaaagagtcacagcgcgcgctgatggaaatcagtcagcgcaccggcacggcattttcagataacgccagcctttttgcccgttcagctgcttctatgcgtgaatatggctacagttcagaagaggtactgaaagtaaccgaagctatatcgacgggtcttaagttgtcaggcgcaagcacgtcggaagcgggttcggtaatcacgcagttcagccaggctctggcgcagggtgttcttcgtggtgaggagtttaactctgtcaacgaaaacggtgatcgcgttattcgcgcactggcatctggaatgggtgtggccaggaaagacttaaaggcgatggccgatcaggggcagcttaccgctgataaagttgttccggctttaataagccagcttggagcgttacaggatgaatatggcgcgatgccgcaaactgttgcatcagcaacgaccaaaattgaaaacgcatttctggcgtgggtaggcggtgcgaatgaggccacgggtgcgacaagtgcgcttaccggagcattgaatgctatttcagacaatatcaataccgttgcctctgctgctggcgtgctggcggccatcggcggttcaagatttattggcggcatgattggcgatcttggaagccagacggcgcagttggtcgaagcgagaaaaaatgaaatagcgcttgcggccgctagggcgagcacggccacgcaatcacagcgcaaggccgccgccgatgctattgctgctgagcgggcttaccagcttgcccagtcagagcttgtgctggcaaagaatactaatgctgaggctactgccactcaaaatgccatagccaagcgccgggcaatgattacagcaaacgcggcactggtacaatcaaacagagccgtcgcggcctctcagcaggcacttaactctgcaacatcagtgctggggcttgtaaaaactggcgctacaggtttgctggggcttgttggtggtcttcctgggcttctgatgctgggggctggtgcctggtacacgatgtatcagaatcaggagcaggcacgtcgttccgcccaggaatacgcaggtcagattgatgaaattaggcaaaaaacatcaaaaatgtctctgactgagtcggatgaaaatcgtggccaaaccgttgatgctctcgctgaacaaaatcgacttgttgatgagcaagccaaaaaagtccgaaatttaaaagatgaaattgataagttgaactcagcccgtggacagccaggtataactagcgttaacgatgcggatattttaagagctattgccatcgtcacagatcagctcgctgttgaagaggggaagttaaatggtatgcgagataagtctcgcggcatccagcagactctcgaagaaattgagcggcggcgtaatgatttaatacgcgaacaagcatggcgacagaatgcggcttatcagtcgatgatcatgatgaatggtcagcatactgaatttaaccgtctgctggggcttggcaaccaacttctcatggcacgtcagggtctggctaacttaccgctcagacttcctcaggcagacctcgataaaaagcagatcgatgccctcgaaaagagtcgccgggatctggagttgtcacgcttgaagggtgaggccaaagagcgcctgcggctaagttatgccgccgatgacctggggttaaccagtgatccacaattccagacaggccgtcaggagttgattaataacggtcttgctgaatggcggaataatgaggccaacaaacctaaggcgaagggcggtaaaaccgaaggcgagaaaaccgaggatgtgtataagcgccttatcaagcagcaaaaagagcagatcgccctgcaaggccagaatactgaactggcgaaggttaaataccaggtcagccagggggaacttgcttctttgacggaagcccagaaaaagacggtattgcagaatgctgcgctgattgatcaggttaaattgcgtgagcaactgcgaaattacgaagccaaccttgctgacagcaacgccagcgctcgcgcagccaatgaagcgcaactgctgggctacgggcagggaaccaggttccgtgaaagacttcaggagcagttcaatctgcgtaaggagttcgagcagaagaataccgatcttctccgccagcgtcaggctggtgaaatcgacgagacgttctatcagcaggggctggcacttaataagcgctacctcgaagagcgcctgcgcgaccaggagggatattacgcagcttctgatgcgcagcgtgacgactggatgacgggactgtctgagggttatgcgaactgggtggacgaagctactgattattcttccatggccgctgacggcatgaagcaggccatgggtggcgcggtcaccacgatcaccgacatgctcaatggcaacgttgatagctggaaggactggggcgtcagcgtactgaagattatccagaacgtcctggtgaatatggctgttgctaatggcgttagctcaattggttcactgttaagttttggtgcctcgtcagccgctaccgccagcagcggtaccgctattcagaatgctggcgcgaactttacctttaatgcgaagggtaatgtttacgactctccgtccctgagcgcttacagcaatggcgtttttcagacgcctcagctgtttgcttttgccaaaggtgcaggggtttttgccgaagctggtccggaagccattatgccgcttacgcgcgccgctgatggttcgcttggcgttcgggctgttggcactcctcaggtctccggtggtatgccttcagttaacttcggcgatatcaatattcagggtggatcaccacaggcagccagtcagggaacaaccggcgctgctggtagacaactgaaagatgccatcactggcgtcattaacgaacaagccagcatgccgggctcgcctctgtggcgattaatcaagggggtttaa

SEQ ID NO: 388363 - DNA, 339 bp, Salmonella enterica
atggcagtcgaaacatttagatggtgcccaaagattgcctctcaggttgatacaaattttcgtacacgaaaggcacagtttggcgatggctatgcgcaggtgtccggggacggtatcaacccggtaacatctcaatggagcgtgagttttaccggcgatgaggcttacattcaggccattaaaaactttctcaacagacatgccgggtggaaatcatttatctggaagtcgccgcttgagccatcaggcttatggcgcgcggaatcctttcagatatctacacacggcaacaaaaaatacaccctcagcagcacattcacacaggcataccacccatga

SEQ ID NO: 388364 - DNA, 759 bp, Salmonella enterica
atgagtatttcatctgatgtccagaaactggagccgggtaagcgcgtccgcctgatcgaggtggacggctcagctttcggtgcaggtattcttcgctttcacaacgagacaatcccgcataccgaggcagaaatcatcgccgcaggcggcgacgagtcaaaacttgagccgaagtcggtgtggtggcaggggcaggagtatggcgcgtggccgtatgaactgaccggcatatctgtcagcagtgacggccagtgttcacgaccgtctctcaccgttgcaaacatcagcggcacgattggcgcgctgtgccgaagatttcaggggatggctaaagcaaaggtgatcatccatgacaccttcgcacactatctggacgccagaaacttccctgatgggaaccagactgcgaatcccaacgaggagcgcaaacaggtttattacatcgaccgtaaatcaggatcagacgatgaaaccgtagaatttgagctttccagtccagccgatctgcgcgggcaactcattccgacccggcaaattcagccaatgtgcacgtggtgcatgcgtggctggtacaaaaccgggaacggctgcacctacgccgggcaaaacggctggttcgataaagacggcaatcgggtggacgatccttcacaggatgtttgctccggattgctgtcaacgggctgtaaacctcgcttcggagagaatgaacagctggattatggcgggttccccggcgcttcacttctgagaggataa

SEQ ID NO: 388365 - DNA, 711 bp, Salmonella enterica
atgcgcgacaaaacagttagcgccattctggtgcatgccgccgcatccttccccgaggagtgctgtggcgtggttattcagaaggggcgggtggagaaatacatcccctgcaaaaataatgctgagtcgccgactgagcaatttgaacttaatcctgaggattatgcggccgccgaagagcagggcactgtggtggcgatcgtccacagccatcccggcgacggggcaacaactcagccgagcgagctcgacatgctgatgtgtgatgccacggaactgccctggattattgcatcgtggccggagggcgacattcgcaccgtcatgcctcgcggagaccgtcccctcacagggcgccagtttgtactcgggtatgcagactgctggtctctcatcatggactatttccgcatcgagcacggcattgaactgcccaactacagcgtagatcgccactggtgggagcagggtgaaaacctctatatggataactggcaggaatgcggtttccgtgagtacgacggtcccgctcagccaggtgacatggttatcatgcaggttcagtccaccgtcccgaaccatgccgggattttgcttgatggcaacatgctactgcatcatatgtatggccagctaagccagcgtattccctacggtggctattaccgtgaccgtaccatcaaaattctgcgttataaggatttgatgtaa

SEQ ID NO: 388366 - DNA, 585 bp, Salmonella enterica
atggaaagaaaaaccgttatcaaactcagcggctcaatggctcagcgatttggcaggacgcatcgccgcgcactaacgtctgccagcgaagtgttcagggcgctttctaacaccattgacggctttgatgcttatctgcgtgaagctcgggcaaagggactggattttgttattttccgggatcgtcgcaatatcgggcacgaagagtttgaactcctgggaccgggtgatgagttaagaataatccctgtgataaggggtagtaaaagagctggagttttccaggcgttgctcggaacggctctgggcgctgctgccatatggatgctgggagttagtatcgcagcaagtaacatcatgtttcccgttggtgccgcaatggccgttggtggtgtagtgcaaatgctctctcctcaggtttcaggcctgcgaatgcgtcaggaacctgataacaaaccctcctatgcgtttggtggtcccgttaacacgacagcatctggcaatcccgttcccctgctttatggtcagcgagaaataggcggcgccattatctccgccgggatatatgccgaagatcagcaataa

SEQ ID NO: 388367 - DNA, 633 bp, Salmonella enterica
atgattgtcgtgtcatcctttgaaataacggaatccggaagacgttcccaaccatggggtgcaaccgaaggacatcagtataaagcggggaaatactataattttagagagcaccccgaactcatcactacacatttagaagactttgtagagcacgcagaccaaatatcggtacaaaatttttacgattttattagatggataaacggtccaggaagtgccctggaaagcaccgactgtatgctctctggagaacctaaggatgatccatcagcagccttattcaggtgtacacatggaataacaggccgcttcgaatttttccttcgacagatagaaatgaatgcaaacaaagaagcaatcatatgggtttacgataaattatcgatataccttcagatagaaaggtccgattttagaaaaggctccttccgcatcagccccctcataacggactacatcacccccgatgggaacaagttgaccgggcacagattctgtatctatttccaggcttacgggaatggcatccaagatgcctggctctcgcttgaaacaatgtttgatagtctcgtgaaaaccacaaaacggctgaactctgaaatcatcagtggccaggctgtaccgctgtaa

SEQ ID NO: 388368 - DNA, 3657 bp, Salmonella enterica
atgacaacgacgatcatcaaaggccgcggtaaaggtggcagcaatcagacccgaacgcccgtggaagcaccggatagcattcagtccattgcaagggcaaaggtgctgattgctcttggggagggggagttcgccggcgggcttgatggtaaaaatattttccttggcgactcatcttcatacacccctctccagaacgccgacggaagttataacttcaataatgtaaaatatgagttccgttccggtactcaggaccaggactacattcagggcttccccggcattgaaaacgagattcaggtttcatacgagctgaaacaggccgtgccgtacgttcgcgcggtatccaacacgcaactctctgcgctgcgaattcgcctgggatggccaactcttttactccagaaaaacaacggcgataaagtcggcacccgcgttgagtatgctatcgatctgtcggtcgatggtgggccgtatgaaacggtgattaacggtgctgttgatgacaaaaccacgtcgctttatgagcgcagccaccgcgtcaatcttccaaaagcctcgactggatggcagttgcgggttcgcagaatcacgccggattccacgagcgtgaatgtcgtggacatcatgcgcgttgtggccgttactgaaattattgacgccaaacttcgctacgttaacacagctctgctgtatgtagagtttgacgcaaagcagttccccaatggcattcctcaggttgtgtgcaatccgaaagggcgaatcatccgtgtacctgacacgtatgatcctgaaacccgtacttactctggtacatgggagggcgtatttaaatgggcatggacggataatccagcctggatatattacgacatcatcctgaacgagcgcttcgggctgggtcaaagaatcgatgcgactcagatagacaaatgggaactttatcgcatcgcccagtattgcgatcaactggtaccagacggcaagggcggcagcgggacggagcctcgttttcgttgcaacgtttatatccaggaccgtaatgacgcctggaccgtacttcgtgatctggcgggtatatttcgcggcatgacgtactggggcgacaataagatgtatgtcctggccgatatgccccgggatgtgtggcacatctacaaccacgccagcgttgttgaaggaaaatttacctttgcggacccgagtgaaaccacccgaaacaccgccgcgctagtgaactggtcagatccagctaaccactttaaggacacgcctgagccagtttacgataacgatctggccatgcgcttcgattatcgtcagcttgaaatgaccgcaatcggctgcacaaggcagtcagaggcaaaccggcgcgggcgctgggcgctgcttactaacggtatcggcgaggtggtgaccttcagcacaggcatggacgtcccccctgtcggggaggtgatcggcgtggctgctaacgagctggccggaagaactatcggcggcagggtgagtgcggttaacggccgcaacataaccctcgatcgcgctgctgatgtgaaagccggtaacaggctgtttttgaatcttccgtcaggcacagctcaggccagaaccgtccaggccgttaacggaaacacagtcactgtaaccacatcctacagcgaaacgcctgaggctgaatgtaactggggtgtggattctgacgatctgtttattgcgctttttcgtgttacgggaacgcgggataacaatgatggcactttcgaagtcaccggaacgacatacaaccctgacatctatcctgccgttgacaccggagcaagactggacgagcgtcctatcagtgtcattcctccgggtgttcagactcctccaggaaatattgtcgtagacagttactctacggttaaccagaacattgcgattaccactatgcgcgtcgcttgggatgctgttcagggtgcagttgcgtacgaggcggaatggcggcgtgacagcggaaactgggtaaccgtgccccgaacgtcttctctcggctttgaagtgcagggtatctactcgggtcgctatctggtccgcgttagggcggtgaacaccagcgacgtttcatcagtctgggcgatatcatcagaagtaaatcttacaggcaaggtgggaaatccaccgaaacctgtcggctttgcgacaactccgatcaactgggggattcgcctgaactggggattcccggctaacaccggggacacactgaaaacggaaattcagtacaccgcgaacagtgatttctctaatcctctattgctgtcggatgtgccttatccgtcagccgaatacacccaactgggactgaaggcgggacaggagttctggtaccgcgcgcagctggttgacagaacgggtaatgaatcaggctggaccgactgggttcgtggtgtatccaacgcgaatgctgacgactacctgggcgatattgctgatgacttcctgacgtctgcagacggtgaccgcctgactggcgacattgataccaaccttgaaggcattctgcagaacgcgctggccaaccacggaaccgttgaacatcagtttgcgcagtacggcgaggtccgcgcagacattctggtggtgaaaaccacaatcgccgatgtgaatcaggcgatggcggaaatgtccacgcaggtgcaggcgcagggcacgatgctcacttcagttgatgggaaagtgtcaacagtggatggcagagtctctgcggttgacggaaaagtggatatactcgggcagactaccagccagcaatattcccaggtaacagctgtgctacaggacaaattgactgccatggtagacagcactggcgcatcggcgattcatacgctgaaggttggtttgcgtattaacgggcaggaatataacgccggaatgagcatcgcagcgctggctcagccaggccagccggtggtaactcgtatcggatttaacgccaatcagttcgtcctgatgagtggtagcggtgatacgcaatattcaccctttgctgttgttaatggtcaggtgattatcagggatacggtgataggcgatggcaccatcagtaacgccaaaatcggcaactacatccagtccaacaactatgttacaggttcggtaggctggcatatcaataaaaatggaaatagtgaattcaataacgtaacagtccgcggtacaatttacggcaatgacggatattttaatgggacggtccgagctaataaaatagagggtgacgtttgcgcaatttggactttcccgcaaatgtctatagtaggaggggacggaaggagccagacattatactggagaggtggcctgaattatcctgctcgtatttgcataccatattcagccatttcaatgggcgtttctagaccagataaccaatttagggtccagctaacgataaacggagtagttatgtttgatgaaacgttcaacaataccacctcaatcctccgaaacgttgtaggttatgtggatgtacctgcaggcgcggtcaacgtaccaatcacagtcaacgtctggaaggtgcaagggggacaatcaaatacgctttactttactgtaaaccgatttacagtaatcgtctcccctgcaacagataggttctttagttaa

SEQ ID NO: 388369 - DNA, 498 bp, Salmonella enterica
atggcggcggggcctgggctgatatcagcttcaaaaagtggcaatacgttcagtgttgatgcgtctaattacaggagatcggcttttgtccttgaggcctatttctttgccatatatccgcttacccttccggcctggggtgtggctatatgggatgccgaagggacactggtacttacgaatgagtcccgggtattaagcgaccttacaactattggttcaccaggtgctgtaagtggtgggcttaacattgataaatacatggcaggcaaatgggccgtaaatccgatggggctgggttctgtcatcctccatgctggttcggcacccggtgggcagccaatatttcagtctgttgatgtggggacgggttgccatgacgacactggtggtacaaggattagggggcaaagttcaaccactgcaagtggttcctctgttggaacaacgaatagcggaattgtgataacggcgataaacacagctgcatatgattaa

SEQ ID NO: 388370 - DNA, 1131 bp, Salmonella enterica
atgtcagcaggtgttattcagttaactcacaactcggcaacagttcttggctatcaggcctcttttagtacggtgcttcaacctggcgactttgtcgtttctgtggtgggcggcatagcctatacccttccggtaaaatcaattgagagcaatgattctctcacactggtcagtgctttcactggtccgacaaaagataacctggcctgggatgcagtttcacgtgtgacactgaatatggtcactgccgcaatggtggtacagaacactgaagcattgcgtgggctgaactacgacaaacagaactggcagcaatttttcactgcagatggtgatgtaaccattacgcttcctgataccagccagacaacggggccgtcagcgaaaaagttaatcaacagcgtcagtgacaaggctaaaaaaggggacaactcagatattacccgccttacaggactgacaacgccgttaagtgttactcaaggcgggacgggaggagcaacccctgcggatgcggcaaataatattggccttggtcaaaacagtagcccatttttttcgcaggtaaacatttctacagcagggtacgcaattcttggagtacagaatacttctcgtgctgcgacggatgttggtgcccgtgtctctcttgaagcttcagttgctgccaattcgagaggctcaataatacaaaaaaataaccggaatactccggaccaacagatacagtcagatttaccatccacatcaggagttctggccatacaggggacgtcagggcgagattataaaaaggaaatagagagtgccgacaccaacgaagcaatgctgcgcattatggggctgcgtatggttaattttgtgtataaggacgatgaactggcgcgtgttcgtttcgggattattgcagaagaagctgaagatgtggcaccacaatatgtcaagcacaaccaatttccggtacctggcagtcaggtttacaatgaagaaggccagcttgtcaaccagcagtatgcagaccgtccgtctatagacaacaacccaattgtaatggacttgttaggaggcattcagaacctgcaagcgcaaattacagaactgaaacttactatagctgctttacaaaaataa

SEQ ID NO: 388371 - DNA, 294 bp, Salmonella enterica
atgttacgcattgtggtgaagcgttttattatttatggcgggatattttccgccatcaatttttctgcctggagcgccgaatatacgccttcctggtcccagcgccagcaacaatctgcagcatgttttatgaccggcgatgaaacctgcatgatgtttattgatgatgcggtgaggctggcctcgcggcaatatggcaaacgctcaatacagcttgttcgtagcctgctattacaaagcgatatttatcaatggctgggtaaaccggagttaacgccgcaaatgctgctgtga

SEQ ID NO: 388372 - DNA, 1479 bp, Salmonella enterica
atgacgctatggataaacggcgactggataaccggtcagggcgaacgccgccgcaaaacgaacccggtgagcgcggagatactttggcaggggaatgacgctaatgcggcacaggtcgccgaggcctgtcaggcggcgcgcgcggcgtttcctcgctgggccagacagccttttgccgcacgacaggctatcgtagagaaatttgccgccctgctggaggcacataaagccgagctcacggaggtcatcgcacgtgaaaccggtaaaccgcgctgggaggcggcgacggaagtgacggcgatgatcaataagattgccatctcgattaaggcttaccacgccagaacaggcgcacaaaaaagcgaacttgtcgatggcgccgcgacgttgcgccatcgtcctcacggtgtgctggcggtattcggcccttataactttcccggccatttaccgaatggacatattgtgcccgcattgctggcaggcaatacgctgatcttcaaacctagcgagctaacgccatggaccggggaaacggtaataaaactctgggagcgggcggggctaccggcaggcgttcttaatctggtgcagggcggccgggagaccggacaagcgctgagttcgctcgacgatctcgacggattgctctttaccggcagcgccagtaccggatatcagcttcatcgccagctatccggccagccggaaaaaatcctggctcttgaaatgggcggaaacaacccgctcattattgaggatgtggcaaatatagatgcggcggtacatctgacgctgcaatcggcgtttattaccgccggacagcgctgtacctgcgcgcgacgccttctggtaaaacagggtgcgcagggagatgcatttctggcgcggctggttgacgttgccggacgtctgcagcccggcagatgggacgacgatccgcagccgtttatcggcggactgatttcagcgcaggcggcacagcatgtgatggaggcctggcgtcaacgagaggcattaggcgggcgcacgttactggcgccgcggaaggtcaaagagggaacctctctgctgacgcctggcatcattgagctgacgggcgtcgcggatgtgccggatgaagaggtgtttggtccgctgctgaacgtctggcgttatgcgcatttcgatgaggcgattcgtctggcgaataatacccgttttggtctgtcgtgtgggctggtgtcgacggatcgcgcgcagttcgaacagctcttgctggaggcgcgggctgggatcgttaactggaataaaccgctcaccggggcagcgagtactgcgccgtttggtggtgtcggcgcgtctggcaaccatcggcccagcgcctggtatgccgccgattattgcgcctggccgatggctagtctggagtctcccgaactgacgttgcctgcgacattaagccccggcctcgacttttctcgcagggaggcggtatga

SEQ ID NO: 388373 - DNA, 2550 bp, Salmonella enterica
gtgaacactttagctaatgaagtcatcaaccaaataaaaagtcgtttagaatttaaaaatgatcttggctttttatttgcacactcttttttgcagaagcatacacaaacttctttctctgcacttcaaggcaaaatagaaagtgacagtgtcgttatatacaaaaggttaattgagtctgcatacttattttcccaatccgagtcagacgaggataaaaacttagctcaaagcattgcatatcatctaaatataattacaagtgataactatttaaaacaattatctgagaatttattaagggcacttggtaacttccctggagcaagttatttacaagaaaaaaatggatttataccagaaaccttttatgcttatttgaaaagatctttcattgaaaatgaaaataaagtaaaaatagccaacaaagagataatattaacgaactttcaaaagaaagtatgggaatcattacattcaaatgtcccacaagctatatctgctccaacctcagctggtaaatcgtttttagtcgtagagatgcttgccaataggataattagcggggaattaaactctgctatttatatagcgccaactcgagccttagtaaatgaaataacacaaaaatttattaacaagactttaccatatcaaaatgaagttagagtaacatccatacctacaattaacgatgaatattataaacagatatttgttttaacacaggaaaggctgcaggtccttcttgataattttaaaaataaaatagacatagtagttattgatgaggcccaatcaatttctgacgaaattagggggatgatattacaggattgcctagacaaaataagcatacaaaacccagatgcaaaatatgtttttcttgcgcctggtgccgaaggcttcaatgatttagctgatattattgggattgatacaatccacgtagaaaaaaccaatttatctccagtggtccaaaacaaaataattattaaagttgatcctgcgaaagaaaataacttacaactatcattattagataactcaaatatattatctataggtgaattaacttcaacaagaggatttgctaatgaaaatactagattagctgctgtagctttagaattaggaaaagatgagggttctcttgtttacggaaccggagctgctaatgcagaagacgttgctaagcaaatagcatctgggttgcctcttctagaaaatgatagcgatttgaaagaactttcaaagtttataaaaaaacatgtccataaggattactctcttgcaaatctggtattaagaggggtggggtatcattatggtaaaatgcctagcttattaagagaaactttagaaaaaaactttacaaataacaagcttaagtttttagtgtgtactacaactctattccaaggggttaatcttccagcaaaaaatgtttttattgatacacctactcgagggaacagaggagaagcattagatccagcatcgctttggaatttcgcagggcgggcaggtagactaggttatgctttctcggggaatgtatatcttattgattatgatgattgggaaacaaaacctttagattctaaaatagatttcaaaattacatcatcttttaagaaagtaatcaatgaagattttgacacagtaatatcccgtttagataaaaacaatcatttaggagtaagccaatatagtaatgttgatgcagcggcgggtcttttaatttccagagcagcaaaaggcgatttacacaattttcttgagagatcttttcgaacgattcctgataaatctaagcttgaaattattgaagatgctacatatagctcactagaatctcttaatatcccccataatatattgactttaaactggactgtcgatccatttgggcaggaaagattatacaatagatttattcagaagataaaagatggtaagattgacgaacttataccacgacatccttcaggcaatgtttacactaattacgttggtgtttttagcagaataaataaatacattctcaatcataatacatctaagttttctaactacctcacagccatggcattaaattggatgagaggaaaatcccttccagagatcatatctctttcgatagcaaagaaaaaagaaaaaaattctacccgaccagtgaatgtagaccgagctgtacgagaggtttttgatttcgttgaggacaacctgcgattcaaatacgttcaacttggtaaggcatatattgatttattgcgacaagctttaattgtaaataatcaagctgaaaaagcggaagaaatatatgacttccctttatcacttgaattaggtgtttcctcaatcgctggacaagtttttattgaactggggctatcaagaatatcagcatcctatcttgaaaatataatcccaaactctaatcctacgataagcacggcaaaagagtggctaagaaacaatgattatgattcattaaatttgccactcaccatttattcagaattagaagataagggattgttataa

SEQ ID NO: 388374 - DNA, 1038 bp, Salmonella enterica; identical to SEQ ID NO: 32129

SEQ ID NO: 388375 - DNA, 555 bp, Salmonella enterica
atgaatgccggaagcattactcaggaagcactcaacgattaccgctcggcgataaaaagctggctgacactacgtaatacgcaaagtacctgccagcttcgtctggcggctctgctggatactgaagaaaaaccggcagcatatgccagccagcttgaggatcttcgtgagcgtcttgcagtcctcgaatggcagattaactgtgctgcacgggatggtctttatgctcaccagattgtgctggagagttgtgttacaagcgcaacggaaaacttcatgagcgagcatggtgatgcactcactgacgctctggctccttttctttgcgctccatacgggcttgaggcggcaatgaaaatattacgaaccgctgtagcccgacaaacggaagtgcgtactccggtaatttcagcagcatacaagagcattatcgacgaaaccggattaacggtggatgcatcaatgtgcgctgatgcttcagccagtttcaccccggcacaacataaagttttcctggcccgccttaaccgacttaatgaaaaaggagggtactga

SEQ ID NO: 388376 - DNA, 753 bp, Salmonella enterica
atgactactgttaaccagatccctgatgcaaacattacaccctccctcccaccgaaaattcgcgaagcggtggataaagttaaggtagcaaaagctgtctggcaggaagaacggcgaaaacaaactgaagctgctgcaatgattgaaactatccgtaaacgtcaggaagatacaaaaacggaaacgcaggcgcttaatgatgaatggcgaaacctgtttcgtgagaatcagggaaatatgacgccacgcatgaaaaaactgcgggcagaaatcgccctcggacgcgaaacactggatgagttcgaagatttgctggcagctcaggcggcagaaaatgaattcctgccctggaaaactgcggatgctgcaaaccactacatcagtgagcataatcgcctgattgaaactcatgcagtgtggctctggaatgagtttatgaaggaacacggccagaaacttattcagatccttggactgctgaaaatgactctgggccgaagcgcttctgctgttatcggtgtagttcataccgtaaacgaccccgaaagtgtgctgaagcaatttatcagcgagcaactcaccactccggcactgtcctgtaacgtatcttcaacggatgatattaccctgccggggatcagcatttatgcggacgataaagccatccaagatgccagacaatcccccagccctgcagcgcgttcacggatgcttaaacagcgtgacatggttaaagggggcgagaagaaatga

SEQ ID NO: 388377 - DNA, 261 bp, Salmonella enterica
atgcatgatatttctgtttctgcgccagctccggctgcgccattatttcctgtgctgaaccagcatgagcgatttttacgtcttcccgaggttatgcatttatgcggcttgtcccgctcaactatatacgacctgataagccgcgatgctttcccgaagcagatcccgcttggtggtaaaaatgttgcctgggcacagtcagaggtaagcgcatggatggcggatcgtataagtgcccgcggacggggatgtgatgcataa

SEQ ID NO: 388378 - DNA, 546 bp, Salmonella enterica
atgatgcctgaacgcattaatccccttttttctggcttgcatcctgctgtcatttccaggtatagttttcccgctgccgcaaaatcggctgccgggcgtaggaacccgagttacttattggcgacaccagacgcgccgtgcgtctttttttacgtcgttgctcaggcacacccatttttcgggctgcggtgcttataccttagtccctgtcagataatggtggtccgggcggggcagccttcgggctggccggtttccaataaggccggtattcctacccccgttcgggtcaccacccatgagcgtaggaactccggtggtggcatttaccgcgacttattggaggttgcccttatggctacgatcctcgccccttcacatcctcaatttatatttgtttttgccgccgttcgtcgtgcagaacgtaaaccacgtatcagtatgctgcgtatcgtcgccagcaatgagcatcatgcacgtctttcactggtccatgagtatgtgctttgccttgctgctcgcctgcctgtccgggaggtgatgtga

SEQ ID NO: 388379 - DNA, 222 bp, Salmonella enterica
atgaatcacgccgcaatctcttatgacgatattgtccgcctgaagcatcttcgtaacgtgggggagtttgtcaccggaatggctgttcttcaggattgctacgaaaaacctgccggtgctcaatgtgagcaactggcttccctgatttatctgatgacagagcaacttgatggcgtggtacagcgttgccaggatgacctgatgaacatggaggtggtgtaa

SEQ ID NO: 388380 - DNA, 324 bp, Salmonella enterica
atgaaatcacgcaccctttccctttcacttcgggtagcgttgtatcgccgcgcggtagcctgcgcctggttgagtgcctgctatcagcaaaaccgccatctgcagctcactctggatgaaattgaaaccgctattgcccgtgagcttgaaggattttatctgcgacagcacgggcaaacaaaaggcatggaaatcgcctgcgctctgctttcagacctgatggaatccggccctctaatgtcctgtcccgcactctcccagctcggaatagccgtaatggatgagttatgcgtccgtcacatcaaaaagccggttttacactga

SEQ ID NO: 388381 - DNA, 720 bp, Salmonella enterica
gtgctgacgggcgaacgctacaagaccattgccaaagaaacggccggcattctgaaaggcgaatacggccacaccccggtgccggtgaacgccgcgttacaggcccgcgtgctggaagggggcgccccggtgacctgccgcccggcggacctgctgaagccggaactggctgaactggaagcggacgtgaagcgccaggcgcaggagaaggacattcagcttgcgggaaacgccatcgacgacgtgctcaccgtggcgctgttcccgcagattgggctgaaattcctcgaaaaccgccataacccggcggcgtttgagccggtgccgcaggcggaaaccgcgcagccggtggcaaaagcagagaagcctgccgcctccggtatctacaccgtggaagtggaaggcaaagcctttgtggtgaaggtcagcgacggcggcgatatcagccagcttactgcggctgcacctgctgcctcttctgctcctgccaccgccccggcaggcgccggcaccccggtcaccgccccgctggcgggcaacatctggaaggtgattgccaccgagggccagacggtggccgaaggcgatgtgctgctgattctggaagccatgaagatggaaaccgaaatccgcgccgcgcaggccgggacggtacgcggtatcgcggtgaagtccggggacgcggtttccgtgggcgtcaccctgatgacgctggcgtaa

SEQ ID NO: 388382 - DNA, 264 bp, Salmonella enterica; identical to SEQ ID NO: 248004

SEQ ID NO: 388383 - DNA, 822 bp, Salmonella enterica; identical to SEQ ID NO: 248006

SEQ ID NO: 388384 - DNA, 867 bp, Salmonella enterica
atgcatttagatatgaattttattgtaaggaaaaatctggacggagaatacgtcataattcatgctaatcagcttaaagagggtgttgagtatgcggtaaaaatgggtgtgactcaagttcagataagaggcgtgcttgggagtgatgatataggtatgacaattgattttaggcaatttgagaaactctctaaaaaattaaaggtcatttcttttacagataaaatagatagtattattaattttgattttatttattctttgagccgacttgaaaagattttttttcaaaaaaaacaatctttcactatggatgtttcattgtttcctgcgctgaaatatttaggcttcgagtattggaagggggtgagtaatattaacttatctcgtagcctagaaagtttagttgtttataaatttaacgagcctaatcttaaagattttttgggcttgagtaaattaaatgcacttcatatttatgattcgaaaatatcagatttatctgatattgaatccctctctattaaagaattatatttggttaaaaataattgcctgaaggaagtgggggttattagtagaatgaattcactgaggaaattatatatagaaaaatgcaggggcgttactgatttttcttttttaataggaaacaaaactattgaagatttgtttttatctgatgtggattctttttgttttattccaagtatgagaaacttgaactctcttagattttggagtttagaggacggtgatttgagttttttattacagtcccctacattaaagatagttgactttcatcctcaaaggaaaaattacactcataaaaaagaagaaataaatattttaattaatacataa

SEQ ID NO: 388385 - DNA, 426 bp, Salmonella enterica
atggctgaatggtctggcgttatgtatggattttatactaataagtcgatagataatatattctcttcatggggtaaaaaaatagcatctattaattataaatacaaacgcgatagctttcgggatgaggaatttttatttttctataaaaatgatgaaatgcaaaattatcatcttgagaatggatataatttagatcttgatggtgaaggttgtttttgtattgaggcaaaaagtacaaaactgaatggaattgctactctattcgaaattgataatgactcaaattttgagccttatgatataaatttacatttcgataatgtattttattatgtacttatattacctgatctaattgagaactcagatttttgtcataatattcataacttatttattaatattcttgatgagaaaaaatag

SEQ ID NO: 388386 - DNA, 324 bp, Salmonella enterica
atgatcatggctttagttataatcccggagcggttagataatattatgcaattcaaaataaatgctactgacttggattttattataaatattattgacgatttgtcagtgttaaataaattaaagaaatcaaaagagcatggtgaacatcttgcaaaagagaaatatccaacagggaagtatataataaatttgtctactgatgatgttgattgtattgtagagcaattatctgattttatattaatctcaggaattgattctagtggtgaaataaattcaaccggaatgcgtatcgaatcaattatagatatatttatataa

SEQ ID NO: 388387 - DNA, 276 bp, Salmonella enterica
atgaatgcctccggcgtcagcgtccgccacatcaacagcgaaacctgcatgaccgcctgttactcacaaatccccagccagcaccttaagggcgactggctggcagaagcgggatttgataccggggcgagcgtgaccgtgaagagctccgaggggtgtttgactctgattgcggagcgcgacgaggtgcaggagctgcgggaggaactttatcaggttaaacaggtggttaaaggaatgaaggtcgggatatccggcgtattacgcgaggtataa

SEQ ID NO: 388388 - DNA, 495 bp, Salmonella enterica
atgaaaagcataaaaaaattgattatcgcaagtgcgttgagcatgatggctgctagttgttatgctgctggatttttgccggacacagagcaacagcgatcagtggatattagctttgccgctcccgaatctttaaccgtatcgcttgagcaagtgccgggcttaatggctgggagggggcatgatggtatggatattgcgaagcttacagttagttctacttctcttaaagaattcggggtcaggggggtttctaccccgatactgggcagcgttggccatgcatggaaaataactggtagaaatagtggcaagtcaatcattgtgggcttctcacctaatgtagccacagctaggggcccggaagtgtggaatggggaaacttggaacacctttgataccaataccccagttgatattattacaataggggatcaggatatcccacctgatacgtacccactgactgtagatgtagtgggatatcgggcgtaa

SEQ ID NO: 388389 - DNA, 246 bp, Salmonella enterica
gtgtttgcgtcacgcgccagctatcttgatgatgcggataccgttcggcctgacaacatgcaggcggcgcaactcctgacggagtaccttattcgtcagggccatcagcgcatcgcctggctgggaggacaaagcgcatctttaacccgcgcggagcgcgtgggcggctattgcgcgacgttgttaaaatacggtctaccgtttcacagcgagtggatcgtggaatgcgcttccagtcagaaatag

SEQ ID NO: 388390 - DNA, 276 bp, Salmonella enterica; identical to SEQ ID NO: 265137

SEQ ID NO: 388391 - DNA, 291 bp, Salmonella enterica
atgcgcacgattggcgtgttacccaaaagcgtactgatactggaatacctcggtatgattttgctggcgcttgctctgctatcgcttaatcattaccttacgctgcccgcgccgttcaatacgccgctggctggcgtattgatggttttcctcggcgtcgtgttgatcctccccgccgcggtggcgatgatgtggcgtattgcgcagttactggcgccgcagttgatgaaacgtccacccgacatttcttcccgttcagatagagaaaagcataatgagtccgaccattga

SEQ ID NO: 388392 - DNA, 219 bp, Salmonella enterica
atgatgatttgtccactgtgtggaagtgccgcccatactcgcagcagttttcaggtatcttcattgaccaaagagcgttacaaccagtgccagaatattaactgcagccatacttttgtaacccatgaaacttttgttcgttcgattgcaacgccaaaagagtcaaatccggttcagccgcatccaatgaaatcaggacaggtggcgctctctctttga

SEQ ID NO: 388393 - DNA, 1185 bp, Salmonella enterica
atggttcatgctcagagcgcttcacctcgccatcccatttttacggcgcttttcggtatgatggtattgacgctggggatgggagttggccgctttctgtatacgcccatgctgccggtaatgctggcggaaaagcagctaacgtttaatcagctctcctggattgccagcgccaattatgcagggtacctggcgggaagcttactgttttcctttggcctttttcatctcccctctcgtctacgccccatgctgctggcttcggcggtcgccaccggtattcttattctgtctatggcgatatttactcagcccgcggtcgtcatgttggtgcgcttcctggcaggcgtcgcgagtgcgggaatgatgatttttggatcaatgattgtgttgcatcatacccgccatccgtttgtgatcgccgcgctcttttccggcgtcggggccgggattgcactgggcaacgaatatgtcattggcggtttacattatgcgctttcggcccattcgctatggctgggggccggagcgctcgccggtatattgctattaatcgtggcaatgttgattcccccccgcgctcatgcgctgccgcctgcgcccttagcaagaatcgaaaatcagcctatgccctggtggcaactggcgctgttgtacggtttcgccggattcggctacatcattgtcgctacctatttgccgctgatggcgaaaagcgcgggctctccgctactcacggcgcacctttggtcgttggtcggcctggcgatcattcccggctgcttcggctggctgtgggcggcaaaacattggggcgtcctgccatgtctgaccgcgaacctgttgatccagagcgcctgcgtgctgctgtctctcgccagcgactcgttgttgctgttaatactgagcagtattggttttggcgccacgtttatgggcacaacctcgctggtgatgccgcttgcccgacaactcagcgcgccgggcaatattaatttgttaggcctggtgacgctaacgtatggtattgggcaaattctcggtccgctcgccgccagtctgtcaggcaatggcgcgtcggcaattatcaacgccacgctttgcggcgccgcggcgctcttttttgccgcgctgatcagcgccgcgcagcagataaaacaaaaacggtttgtgatacgtgaataa

SEQ ID NO: 388394 - DNA, 1272 bp, Salmonella enterica
atgaataaaatcgccgagctcaaacgcgccaaacgcctggcgctctcactgttgctgatagccgccgcgacgtttgtgaccacgcttttcctgccgcccagtttttgggtgctgggcgtaaaagctattgccgaagcggcgatggttggcgcgctggcggactggtttgccgtggtggcgctgtttcgccgcattcccattccgtttatttcacgacatacggcgattattccccgtaacaaagaccgaatcggcgaaaatcttgggcaatttgtgcaggagaagttccttgatacgcagtcgctgatcgcgctaatccgccgccatgaacccgcgctgcttatcggaaactggttcagccagccggacaacgccagccgggtcgggcagcatctgctgcaaattatgagcggctttctggaactgaccgatgacgcccgtattcagcggctgctcaagcgagcggtacataaggcgattgataaagtggatctttccggcaccagcgccctgatgctggaaagcatgaccaaaaacgatcgtcaccaggtgttactcgatacgctgatcgcccagcttatcgccctgttacaacgtgacagctcccgaacatttatcgccagacagatcatacgctggctggaaaccgagcatccgttaaaagcgaagattctgccgaccgaatggctgggagaacacagcgctgaactggtctccgacgcggtgaattctctgctggatgatatcagtcacgaccgcgcacatcagattcgtcatgccttcgatcgtgcgacgtataagctgatcgataaacttaaacatgatccggaaatggctgcccgggcagaaaatattaaaagttatctgaaggaagatgaggcgtttaaccgttatctcggcgagatctgggcggatctacgccagtggttaaaaacagatatcaacgccgaagactcgaaggtgaagcagcgcatcgctcatgccggacaatggtttggcgagacgctgatcgccgacgacgcattacgcgcctcgcttaacggtcatctggaacaggccgcgcaccgcgtcgcgccggaattcgccgccttcctgacgcgccacatcagcgataccgtaaaaggctgggatgcgcgcgatatgtcgcagcagattgagcttaatatcggtaaagatttgcagtttatccgcgtgaacggcacgctggtcggcggcgctattggtctggtgttatatttgctgtcgcaaataccggcactgctcagtatctaa

SEQ ID NO: 388395 - DNA, 1212 bp, Salmonella enterica
atgaccgtcctctcctcacgtaacgccttaaaacgccgtacctgggcgctgtttatgttcttctttttacccggactgctgatggcctcctgggcaacccgaacgcctgctattcgggatattctttccgtctctaccgcggaaatgggggcggtcttattcgggctttctatcggttcaatgagcggtattctttgttccgcctggctggtgaaacgatttggcacccggaaggttattcgcacgacgatgacctgcgcagtaaccgggatggttattcttagcgtcgcgctgtggtgcgcctcgccgctgatttttgcccttggattagccgttttcggcgccagttttggcgccgccgaagtggcgattaatgtcgaaggcgcggcggtcgaacgcgagctgaataaaaccgttctgccgatgatgcatggtttctacagtttcggcacgctggcgggcgctggtgtcggcatggcgttaaccgcattaagcgtcccggctaacatccatatcatcctcgcggctgccgtggcgatcgcgcccattttcatcgccattcgggcgatccctgacggtacgggtaaaaacgcatcggaagatgctcaccttcaggaaaaaggattacctttttatcgggacatccagcttttgcttattggcgtggtggtgctggcaatggcattcgccgaaggatctgcgaatgactggctaccgctactgatggtagacggacacggttttagcccaacctccggctctctgatctacgccggtttcacgcttggtatgaccgttggccgctttaccggcggctggtttattgaccgctatagccgggtgacggttgttcgcgccagcgcgttgatgggagcgttgggcattggcctgattatttttgtcgatagcgactgggttgccggcgtctcggtcattctttggggcttgggcgcttcgctcggcttcccgctgaccatttccgccgccagcgataccggtcccgacgcgccgacgcgtgtgagcgttgtcgccacgaccggctatctggcgtttttggtcgggccgccgctgttgggctatctgggagagcactatggattacgcagcgccatgatggttgtgctggcgctggttattctggcggcgctggtggcgaaggccgtcgccaaacctgtatcgactccgcaaccggtgatggagcataacgcatga

SEQ ID NO: 388396 - DNA, 1302 bp, Salmonella enterica
gtgaacattgttaaagaaaaaattgaagaactattggctggttcatttactcatgaattaattgaggtgactctcacacaacaaactaatgaaaatccaaaaatgtttacaggttctggatttttttattataaaaataataaaattcatctaaagttcttacataaagaaactgatgctcaatttagcacatgtccaacatataatcatcttgattatggagaaatcatcggtagtgaatatcttttttctatgaatgcgattgatttgaatgggtatttatggcaagcaaaagatgttgacccatatgtaaatatcaatgcttcacaacaaggggtaagcattgattgtgagctttatgaaataaaaagaaaaatagatggagattttaaaaaacataaagtaatatttttcatcccgcaaaaaatgaatatcccttgtaatgaatttcaagacttaggtgaggaagggaagcgtaggacgagatccgtattttcgttgaataatataaatgttagcattcttttagaggataaatacactaggatttgtcttgattctgatgatgatttttcttatttatatgctaaaagtattctagattcattgtccgttgcatctggggttctactcaatcctgctttagtgttgtggcaaggaaatgacagtaggttattgatatttaagcatattgataataaagaaaaacagaggctgatgccttttattcctcaaagagctccatattatctaaatgaatgggtgcaattttcgcaagcatacattaaaaaattcgagactgataaaaccttttactattattggagaaagatatttaatgctcatcaatctgatttagaaaatgaaactctcagtctaactgtttcaattgaaggtgtaataaataaattttactctacttttaaaatagaagatgttgagttttccagtttatgttgtgagtctaagcctgtgatagaaaaccttgaaataaacgagagagttaaatcttcgattattcaattgctagaaaaaggtggaagatcctcggtcaaaggaactctttttaatatggcaaaaaaaggattttttccagaagagttagctacaacttggtataaagcaagaaatagatctgcgcacgcaaaacattttaaagaacattcttggcaagaaaatgttaaaaattataactcatgcctaacattgttctatatgttactttgctatcatattgaatataaaggtaagtttgttcatcatcatcttccaggtgcgccattgaaaaatttaaccgaataa

SEQ ID NO: 388397 - DNA, 1758 bp, Salmonella enterica
atggcacccctatcaattttagaacgtttacaaaacgctgctaacaggcaagatttggctagtatcttgaatcttaaaactgcttttcttacggatgttatttatcgtttaaaagctgaaacgcagtatacacaatttactatccctaaaaaaaacggagcgccgagagtcatatcagcacctaccactaagctcaaagatattcaacgtagattagctgatgttttatatttatgtcgtgcagaaatttataaaaaatataatattaatccagttttatctcatgggtttgaaaaagaaaagtcaattattacgaatgctgaacggcatagaggtaaaacgctactactaaatatagaccttgaggattattttgatagttttaattttggacgtgttagaggttttttcttatcaaacagagattttagattaaataatactgttgctacaacgatcgcacaaattgcatgttttcagaatggacttcctcaaggaagcccatgctctccaattataagtaacttaatcagtggaattcttgatataagattatcaaagttagcaaagaaatacggatgcaattattcacggtatgctgatgatcttacattttcaactaataaaaaaacatttccaaaagagattgctgatgttggcggagagtctgtaaccctaagtccaactttaattaaagagattataaaggctggctttaaaataaatgataaaaagacaagggtttgttataaaacatcacgacaagatgtaactgggttgactgttaataaaaaagtgaatgttggcaaagaatatgcaaaagtaacgcgagccatggctcattctctttataaagatggttcttttgttattgttactgaatcaggaaagattgaaaaaggtacatgtgctaaattagaaggccgttttggattcattgactcaatagataaatataataatttaaaactaaagagcgcaagacagttggaaaagtaccaaagtataaatcatggattaaactacactgcaaaattgaattcgagagaaaaagcctacagttattttctatactataaaaattttcatggaatggaaatgccaacaatactcactgagggtaaaacagaccgtgtatatttaaagtgtgctttgaagtcattggcgaattcatatcctttattgtttaattcttctgatgatagctctaaaaatgagtatcgtgttaatttttttaaagcaactgaaaaaacaagctattttcttgacatttctggcggcgctacagacttcaaaagatttatattaagataccaagaacaaaaaaagaggttcgagaaatttaaaccaaagcaccctgttattatgcttcttgataatgactcaggccctaaagatttattaaatcacttaaaggataaagtaaaaaattgtccaaatgatgttgatactattcgtaaggcaaggtatacctacatatttgacaatctctatttgttattaacaccattgcttcctggagggaaagagtcttgtatggaggatttatttgatagcacggtactatcaacggtgcttgatggaaagacatttaataaatctaatgatacggatacaaaaacagaatatggtaagcatgtgttttcaacaaaggttataaaggcaaattgtaaaacaattagttttgaaaagtttaaagttatttttgatggtattgaggaaattattgcagattattcaaagaggtgcaaagtataa

SEQ ID NO: 388398 - DNA, 651 bp, Salmonella enterica
atgagcctgagtcccgcacggcagcatcgcctgcgcgttcaggctgaacaggccgcccgcgagggcggcagcgttcgccacgcgtcgggctatgacctgatgctgctgcaactggcggaagaccgccgccgtctcaagggcgttcagtccacggtcaaaaaagcggaaatcaaagtggagctgctgccgaagtacgccgcctgggcggagggtgtcctggctgccggaggcgctcaacaggatgacgtgctgatgtacgtgatgctgtggcgcattgatgccggagattatgcaggggcgctggagatcgggcgtcatgccctgcgtcatggctgggtgatgccgctgggtaaccgcaatgtgcagaccgtactggcagaggaaatggcagacgcggcacagagcgcaatgctagccactaccggctttgatgccgatctgttgctgcagacgctggagctgacagacggtctggatatgccggaccagtcgcgggcgcgtctgcataaagcgattggcgctgtcctgagtgaaagtaatccggcttccgcccttaatcatctcaaccatgcgttacagctcgatccccgctgtggcgtgaaaaaagacaaacagcagctggagcgcagactgcgcagtgacagccgctga

SEQ ID NO: 388399 - DNA, 258 bp, Salmonella enterica
atgattgaaagtcataaattatcctctcctgcatttttctggcctttttttattcattaccttgcagaaaatgatgactttgaatttggcaattataccgtaattaacaatgagttatttgatatagaatgcaaaattgcagaaaataaaatgatgagaagtattgatgactcatcattgctcaatgtgttactttcaaatattgctaacaatagtctttttcataaaatttcttatattgaaaataagattaaataa

SEQ ID NO: 388400 - DNA, 588 bp, Salmonella enterica
  misc_feature (568)..(577): n is a, c, g, or t
atgactttcaatacttctaaacttaataaagtttccgctaagcaaatctgtgataactttgtaaaagcacatcctgatttgttggaaggtgctgttataacaaaaatcgaaatcagtggttgtcagggctctcggcgtaccgataaaatcgaactgtcctatggcggcgatgatataacggaccagaagagcgtgtctaaaagtgaagttcgctggatagacataaaggcactgagtttcaaaagcactatcactagtcgaatttcaacactctgttcacggttgtgtatccgctatagcaatatgtggattttgcctgtcgaaagaatggaggagtttctggaagaggcacaagaaattgaacgtgagtttcaagccggtatccagaatgtggttgataactatgacactcatattcaggctgagaaagatcgcagtccgttgatgtcagatttaatcgaccagttgaaattaacgaaagatgattttattaaatcattccggtttaatctggcgcatttcattccgttttcaccgattagtgtggagggggatgaaacacaggacnnnnnnnnnnggaacaactga

SEQ ID NO: 388401 - DNA, 519 bp, Salmonella enterica
atgaaggtttatgcaaaaatcagtaaaaatgataatttgcgttccagcacgattgaccgattaaaacagatgcaagataaaatcattagctttatgttcattcataaagaggcggttgttcttgcagaagctatcaagcacgtcatgaataatttacccaaaggcgccatttcttctccccgtgatgttgcggtgttaaagcaatggttctatttcatgagtgatgcgtcaatgctgaaacgtattatttctggtgagcagaaagtaacagattggctggattccattacccggtcattcaatattgattcacaggataatacggctaactctcagaatgcttttgaggatgatgttttttcttcagcaaatgtgttcagagaagatccgcttgaagaagttgagaaaaacgcagtaactgcacctttgtctgctgttgtccctgaagaagatgtttcccttcaggccagtggtagtaatagtgcttttaacagcgaactcgaactgaacggctggtga

SEQ ID NO: 388402 - DNA, 993 bp, Salmonella enterica
atgagtcagaatacgctgaaagttcatgatttaaatgaagacgcggaatttgatgagaacggagtagaggcttttgacgaaaaagccttgagtgaagaggaacccagtgataacgacctggctgaagaagagctgttatcgcaaggggccacacagcgtgtgttggacgcgactcagctttaccttggtgagattgggtattcaccactgttaacagccgaagaagaagtctattttgcgcgtcgcgcactgcgtggagatgtcgcttctcgccgtcgcatgattgagagtaacctgcgtctggtggtaaaaattgcccgccgttatggcaatcgtggactggcgttgctggacctgattgaagagggcaacctggggcttatccgtgcagtcgagaagtttgacccggaacgcgggttccgtttctcaacatacgcaacctggtggattcgccagacaatcgaacgggcgattatgaaccaaacccgtacgattcgcttgccgattcacattgttaaagagctgaacgtatacctgcgcaccgcacgtgagttgtcgcataaactggaccacgaaccgagtgcggaagaaattgcagagcaactggataaaccggttgatgacgtcagccgtatgcttcgtctcaacgagcgcattacctcggtagacaccccgctgggcggtgattccgaaaaagcgttgctggacatcctggccgatgaaaaagagaacggtccggaagacaccacgcaagatgacgatatgaaacagagtatcgtcaaatggttgttcgaactgaacgccaaacagcgtgaagtgctggcgcgccgtttcggtctgctgggatatgaagctgcgacactggaagatgtaggccgtgaaatcggtcttacgcgtgaacgtgttcgtcagattcaggttgaaggcctgcgccgtctgcgcgaaattctgcagacgcaggggctgaatatcgaagcgctgttccgcgagtaa

SEQ ID NO: 388403 - DNA, 1041 bp, Salmonella enterica
atgcgcgcgcttatttcgttcttttttttgataatcatcgtctcgaatgtagaaacggcgtcagccgaaaccgggctgctacactggacgcgcgccgatcgggcgattccctggcggcaaacgtcagtcaatgcgagtaaaccctggaaactgtgcgcattataccccagcctgaaagattcttactggttgtccgtcaactacgggatgcaaaaagcggccaaattgtatggcgttgatttaaaagtgctggaagcgaatggctatcggcaactggcgacgcaacaacagcaaatgatgcaatgccgggagtggggcgccgacgctattctgcttggcagcagtaccgatcgtttcccggaactggaacggtatgccggtaatgtgccggttattgaactggtgaacatgattcacgatgccagcgtcgcaacccgcgttggtctgccgtggtttcagatggggtatctgccgggacgtttcctggtgcagtggaacaaaggaaaagcgcttaacgttttactcttcccggggccggaagaagctggcggcagtcgggagatggtggcgggttttcgtcaggcaattaaaggcagcgccatcaacattgtggatatcgcctggggcgataacgacattgaagtgcagcgaaacttactccaggaaatgctggagcgtcatccggacgccaatgtggtcgccgggtcggctatagcggcggaggcggcgatgggcgaagggcgaaatttgacgactccgctcacgatcgtctcattttatctgacgcatcaggtttatcgcggtttaaaacgcggccatatcctgatggcgctcagcgatcagatggcctggcagggagaattagcgataacgcagtcgattaaggtcttacaggggcaaccggtgcctgaaaatatcagcccgccggtgcttattttgacgcataacaacgccgacagcgcgcgcgttcgtcgttcgctatcgcctccgggatttcggcccgtctatttgtatcaatacacctccgaggctaaaaagtag

SEQ ID NO: 388404 - DNA, 516 bp, Salmonella enterica
gtgcgccgggctggtggtgtacgagagcgtgccctgggcgtgcgcgccgtggctgcgcaccgcctgcagtgcggctttcatattgcgcgggtcgttcatggcatcgaagacgcggaacacgtccatgccgtttttcaccgcccgctcaacgaagcgttccaccacgtcatcggcgtagtggcgataaccgagcaggttctgaccacgcagcagcatctgcaacggggttttgggcatggcttttttgagttcgcgcaggcgcagccacgggtcttcgccgaggaaacggatgcaggcgtcaaaggtggcgccgccccagcactccagcgacccgtagcccacgtcgtcgagcgcggcggcaatcggcagcatatcgtcaaggcgcagacgggtggcgaaaagggactggtgggcgtcacgcaggacgacgtcggtaatggaaatggtcatggatccctccgggaattaagcattaaggcggtgatggtgaatggcggcggcaatcaccggctttaa

SEQ ID NO: 388405 - DNA, 909 bp, Salmonella enterica
gtgacagggattatcagtctcaatccgggtggggaaacatctcttttgcgtgtaacagccgcagtggaaaaaggctcgcagcatccgctgggtatggcagtagttaaagcagcacaggaaaaggggatcgcaatacccgcagtcactcatttcgatgcaccgtcgggtaaaggtgtctcaggcgatgtcgaaggtcaacgggttgttattggtaatgaactggctatgcaggaaaacagtatcgttattgataatcaaaaggccgttgcggatacgttgcggatggaaggcgctaccgttatctatgtggccacagacggggaccttgcaggcctgatagctatctcggatcccgtgaaaacaaccacgccggatgcgcttaaagctttgcgtcaggcggggatccgcattgttatgctcaccggggataaccagcttactgctgaagcagtcgcacggaaactgggaatagatgaggttgaagccggaattctgccggatggcaaaaaagcagtgataacccgactgaaagcgtctggccatgtggttgcgatggccggagacggtgtgaatgatgccccggcgctggcagcggctgacgtgggtatagccatgggaacgggtacagatgtggcaattgaaagtgccggagtcacccttctcaaaggcgacttgatgatactgaacagggcccgtcatctgtcagaaatcaccatgaaaaatatccgacagaatctgttttttgcatttatctacaacgcacttggcgtgcctgtggctgcaggtctgctttatcctgtgtatggaatactgctgtcgccagttattgcggcggcggccatggctctttcctccgtcagcgtcattgtgaatgcgttgcgtctgaaaagtgtcaggctcgggaaataa

SEQ ID NO: 388406 - DNA, 690 bp, Salmonella enterica; identical to SEQ ID NO: 96029

SEQ ID NO: 388407 - DNA, 795 bp, Salmonella enterica
atgtattcatttatcgcacgccagcctatttttgacacaaaaatgcagaccgtcgcttatgagctgcttttcagggacggaatgaacaatgcctttcccgatgtttcaccagaatacgccacgtccagaatgatttctgaccagtttttatgcatccctgttccccgtatagccaacaatcacagttcttttattaatgtgccgcaccagatgatcattaacggactgggcgatacgctgccgaatgaaaaagtggtcatcgaaattctggaaaatgcagtcccggatgatgcgcttttctgtgccgtaaaggatatgcacgacaggggttaccagcttgcgctcgatgatttcacgatggatgatgaatgggaccgctttatgcagtatatttctgtcatcaaatttgatgtcagagacaatgactatgaagatatccggcaatatatccacagaaaaagtcagcttctgcagggcataaaattccttgctgaaaaagtggaaacaagggacgagtttgagctttacagccgggcgggtttcgcgcttttccagggatttttcttcagtcgcccggaaatcctcagaaataaatgcctttcccagaaccccctgccactctccaggctgatgatggaggtgaacagggaaaacccggactttgccgcggtcgaacgtctgcttaaaaccgatctgacgctgtcatataaaatcatgcgctacgtcagaaacatgctgtttaactcacatggcataattcaggcggacaatctggtaatgactccaacttattga

SEQ ID NO: 388408 - DNA, 633 bp, Salmonella enterica
atgatcctcttatcgaaacagactccgctgggcgccggtcgacatcgtaaatgctatacgcatccggataatgcccggcgttgcataaaagtcatttacaaccgtgaccacggcggtgataaagagattcggcgtgaactgagctactatgcgcatctgtcccgctacctgacggactggagcgctatcccccgttattacggtacggtagaaaccgattgcggcaccggctatgtctacgacatgattaccgatttcaacggcgcgccctctattaccctgaccgagttcgccgcgcaatgtcgttatgaagaggatgtcgctgtcctgcggcggctactgaaaaaactgaaacgttacctgctggataaccatattgtgacgatgtcgctgaagccgcaaaacatcctgtgccagcgtatcagcgagtcagaagtggttccggtggtttgcgacaatctgggggaaagtaccgttatcccgctggcaacctggtcaacatggtgctgtgaacgcaaactggagagagtgtggcagcggtttatcgcccagcctgcgctggccgttgccctggagaggggcgcgcagccaaaagacaagaaacggctggcgcttacttctcacgaagcttaa

SEQ ID NO: 388409 - DNA, 480 bp, Salmonella enterica
atgaaatgcgtggatggtacgaagtcattacagtacagggatgtaataataaagatcgacaatggattcattattctgttgcttttggacggatgccaaatggaagtattcaatatcttctccttctctcctgataagattcagttttggcaatatacacatatatattgtattggaaaattgttgatattgttccttatgaccaacgaaatggaattttgcatatttaccacattttattaccctcgacatgggtattttgcctccatcgacggaattatgttccataccaaaaaaactgcttacggcgatgacctggtctttggtattatccggcttaaaagacgagagacaatacacattttcgccccacgttctgagcgtctcatgaatgattttccattttataggcgacgcttttttaggaaggtcatttgttgcgatctgatgagacgtttgaaatccgaaaatttcttttga

SEQ ID NO: 388410 - DNA, 1278 bp, Salmonella enterica
gtggtgccggagacgtttatcgaccgggaatatgcgtacagcggccaggatgagctgctgaaaaagcggcacagccggcagggggtgacggattatttttacgacacgacggggcgtatcacggcgtgccggaatgaggcatacctggacagctggcagtacgacgcggcggcgaacctgctggacaggcggcagggagagaccgcgcaggcgggtgcaggcagcgtggtgccgttcaaccggataacgtcataccgtgggctgcattaccgttacgatgaatatggccgggtggtggaaaagcggggccgcaacggcacgcagcactaccgctgggacgcggagcaccggctgacggaagtggcggtcatccggggaagcaccgtacggcgttacgggtacgtgtacgacgcgccgggcaggcgggtggagaagcacgaactggacgcggaaggaaagccgtataaccggacgacgtttttatgggacggaatgcggctggcgcaggagtgcaggctggggagaagcagcagcctgtatatctacagcgaccaggggagccacgagccgctggcgcgggtggacagggcggcgccgggcgaagcggatgaggtgctgtattaccatacggacgtaaacggcgcgccggaggagatgacggacggcaggggcaatattgtctgggaagcgggctatcaggtatgggggaacctgacgcatgaaaaagaaacccggcccgtacagcagaacctgcgtttccaggggcaatatctggacagggaaacggggctgcattacaatttgtacagattttatgatccggatatcgggaagtttatatcgggcgacccgatagggctggatggaggaatcaacctctatagttacgctccaaatccgttaagctggatcgatcctcttggattatgtaaaacagattcagcgaaatcaatcgcagggaaaataactggatatacaaggcacggattaaatcaggctatcggacgtaatggtggtaaaggcgttaatattagagatatgcttgatgctgtcagaaatccgaagaaaattattgaaaatgcaaatggaactataaaatatcaaggaaaacgagcaactgttgttttgaatcaggatggtaaagttgttacagtttttggtaaatccagagggccagaaatttggcctcaaggtactacgcgaactggtggcagtggttcagcgcagagaaatgccaatgatcatggctttagttataatcccggagcggttagataa

SEQ ID NO: 388411 - DNA, 177 bp, Salmonella enterica
atgggtgtcgtgtcgaatttaatcttcctggtgagaataacgaagctggacaagttattgtacgagtcagtaaaggcgaccattctgagacaagagaaattccgcttgcctcttttgaaaaaatatgccgagctttactattcagatgcgaattttctctccctcaggattctgtaa

SEQ ID NO: 388412 - DNA, 654 bp, Salmonella enterica
  misc_feature (368)..(377): n is a, c, g, or t
atggtggatattttacaaaatgcccggctgacaataaattttaatgcagcaaaaattgactttgtctctctcttaaaaaataaagaatatctgaactcttatgcattaggttgcagaccgggagatttacctgcttataatgtcgggcgtgattcagttgaaactaaagcatttgaactggagaagcttgcagattcaccttatgccccatatggtcagacaggcggtttttccgtagcatatactcccaacagtagaacttttagccctacaagcagaccaatttatgctgcactggactttctgaacggtgaaaatggaggtgccagcgcctatgggaaatcattttttgaattaaatgataatgnnnnnnnnnngattgcatcctgtcaaaatgatttttttggttataattgctttaagagtttggttaaaatggctaagggcgaaaaatttttagctcattctaattatggtaaaggctatgaagggaattatatagaggctcatatccatggtgatgtgtgcttatttagagatataaaacacgtttatttgtctttgcaagaaaactcttactcggaaagtcaactatatgattatgcaaaacaaataaaccaggcgcttaatagagactgcataatattatattga

SEQ ID NO: 388413 - DNA, 276 bp, Salmonella enterica
atgctcaaacctatctgccatagtggaagtataaaggttccggaatatctggaaacagataaggaaaaaaatgccggacgtactccactgtcttcagacattcagcaagttagaaatgttgttgaagatgttccgccatttccagaaagcagaacggcgagaggttctgtaagcgcagcgtacaggctttcttttgacgaagtgttttgcggtctcagcaatgaagagcgtaaaaaggtgtatggtcgcctttttggaaaacaagtaatcatttaa

SEQ ID NO: 388414 - DNA, 1050 bp, Salmonella enterica
atgtttcgtgatttcaccatcaggacgataaaacttgaggccgttccgctcgaatggaatatgacttcccgtaaccattatcgcaggcatattgtcagacatagactgaaaggccaaagctggggttggtaccactccataaaaaataagcgtattggtatttacgaacattcaagcgctgggcgtgatctttataagcctttatttattgcattgggggctgaagtcgttagcttgggtagaagcgataattttgtacctatagatacagaggctgtaagcaaagaggatcgggaaaaagctcgctcatgggctaaagagttcgatttagatgccatattctcaacagatggagatggtgatcgccctcttattgctgatgaggccggtgagtggctaagaggcgatatactaggtctattatgttcacttgcattggatgcagaagccgtcgctattcctgttagttgtaacagcataatttcttctggccgcttttttaaacatgttaagcttacaaaaattggctcgccttatgttatcgaagcttttaatgaattatcgcggagttatagtcgtattgtcggttttgaagccaatggcggttttttattaggaagcgacatctgtattaacgagcagaatcttcatgccttaccaactcgtgatgctgtattaccagcaataatgctgctttacaaaagtaggaataccagcattagcgctttagtcaatgaactcccaactcgttacacccattctgacagattacaggggattacaactgataaaagtcaatccttaattagtatgggcagagaaaatctgagcaacctcttaagctatattggtttggagaatgaaggtgcaatttctacagatatgacagatggtatgcgaattactttacgtgatggatgtattgtgcatttgcgcgcttctggtaatgcacctgagttacgctgctatgcagaagctaatttattaaatagggctcaggatcttgtaaatacaacgcttgctaatattaaaaaacgatgcttgctgtaa

SEQ ID NO: 388415 - DNA, 180 bp, Salmonella enterica
atggtgaacattcagacgactgatctcatcgtactgatgcgcaacgtcggtagtttcaagggcattactagattcactgtgatgagagaatcgttgaaggccatcaataaggtaattaaacggaataagcccgtcatggcttacccggaaatctgcaacgaaactattttgagtcaataa

SEQ ID NO: 388416 - DNA, 981 bp, Salmonella enterica; identical to SEQ ID NO: 11425

SEQ ID NO: 388417 - DNA, 147 bp, Salmonella enterica
gtggccgaaggcgatgtgctgctgattctggaagccatgaagatggaaaccgaaatccgcgccgcgcaggccgggacggtacgcggtatcgcggtgaagtccggggacgcggtctccgtgggcgacaccctgatgacgctggcgtaa

SEQ ID NO: 388418 - DNA, 126 bp, Salmonella enterica; identical to SEQ ID NO: 384633

SEQ ID NO: 388419 - DNA, 309 bp, Salmonella enterica
gtggatataaacggcttcattgccgtaggtctctacggtctttttcaggctggcgctaatggtgtccagtgcttcctgccagctaatgcgttcaaatttgccttcgccgcggccgcggtacgcatcccaaacggtaaagatacgcctccggcagccagcgccagtgagccaagcgccgctgatttcactaacgtcctgcggctaacgcctgtttgttgcttttctccgggcatcactcactccattgtcgttattatttcgctatatattgataactataacaaaattattaacatgctaatgatgtaa

SEQ ID NO: 388420 - DNA, 399 bp, Salmonella enterica
atgctgtctattgtggtagataaaacgtatagccctggcgtaattatggcggcgctcatcgttattcataactttgccgtgctgggattatttgcgctggaaaacatcaccatggcggaaattttcggatcgcgtaatcgcttcacccggatggcgatttcaaaagaggcaggggggctggtggcggtcggttttggccccgtcctcgcagggatcttttgtaacatgaccgattcctggctgcccatcttaattatgctggtgctctactcgtgtattggtctgatttctgcgttgttgatgccggaggtcagagatcgcgatctgagcttgcctgaggatgcggcggaagcgacagcggcagagaagttacgccactccgcaacccagacgagttaa

SEQ ID NO: 388421 - DNA, 510 bp, Salmonella enterica
atgcaaaacaggcttttatcggcaaaggcgacgcttcctgattacgatcgtgcggcgctggtggcgcggatggtccatctcggttttggcgcgtttcatcgcgcgcatcagggggtttatacagatattctggctgcggagcagcatagcgactggggctattatgaggttaatcttattggcggcgaacagcagattgccgatctaaagcagcaggataacctctataccgtggcggagatgtcggcggaagcctggacggcgcgtgtggtgggcgtcgtcaaagcggcgttgcatgttcaggttgatggtctggaacgtgtgctggcggcgatgtgcgaaccgcaaatagcgattgtgtctctgaccattaccgagaaagggtattgtcattcgccagccacgggccaacttctgctggaacatcccatgattgccgccgacctgcaaaatccgcatcaaccgctaacggcaccgggtatttattgtcgaagcgttagcgcgtcgtaa

SEQ ID NO: 388422 - DNA, 180 bp, Salmonella enterica
gtgatcgatgcgaagacctataacgttgttaaaacgttcgatacgccgacgtacccgaatagcctggcgctatcggcagacggtaaaacgctctacgtcagcgtgaagcagaaatcgacacgtgaacaggaagcatgtgatgacgacgaagaatgggcaaacgatcgtaactcagggtaa

SEQ ID NO: 388423 - DNA, 819 bp, Salmonella enterica
atgcctgcggcgttggcgccttgcgaaaacgatctgctcaatggcacacgttttgcgctcgcctggcaggatgaagaagttgccgattttcttgaccagacatggattgacggctggctgcgcgagtcgtttcttcagtatgcctcacaggtggaaaaccgttcggaacaggccatacaacaagcgctgcgtagctttgagtatcaggcgcactggttgaatttactgacgctgttaggcgaacagcttacggtgccggaagtaaagtttgtgacacatacgttaagcacgcccgcaatcccggtcgatctgattctggatgtcggcaatacgcatacctgcggcgtcttgatcgaggatcatggcgatgcgaatgacgggttacgccagacggcagagcttcaggtgcgttctttaagcgagccgcagtatctgaacgatcctttatttaccagccgggtggaattctcggaagcacgctttggcaagcaacacttttctgtcgaaagcggacgagacgacgcctttgtctggccttccattgtgcgtgtgggcgacgaggctcgcgcccttgctatgcagcgtgtgggcaccgaaggcagcagcggcatctccagcccgcgtcgctacctgtgggatgaaccccccgccttgcaggactggcgttttagccagatccacggtaaaacgcagcgcgaagcgcttgccaccgcgtttccgatgatgaatctgatgaacgatgacggacagccgttattccgcctgccgcatgaagaaagcgtacctgaatgcgcgcccagttatccggcccgtcaataa

SEQ ID NO: 388424 - DNA, 1806 bp, Salmonella enterica
atgcgcgccttccgcctgccgcatgaagaaaggctaccggttttttcgccgcaatacagccgtagcaccttgatgacgcatatgttgtgcgaaattctggctcaggcgctggggcaaattaacagcgtcgccacccggctgcggctcggctttcccgcctcgccgcgccagctacgcaccctgattttaacgctgccttccgccatgccgaaacaggagcgagaaattttccgccagcgaatgtttgaagcgctggcgctggtctggaaagccatgggctggcatccgcaggatgaggatttcaccacgcctaagcagcgtgaaaaaagcgtggtgccggtaccagaaatacagatggaatgggacgaagcaagttgcggccaactggtatggctttataacgaagccatttcgcattacgccgggcgtaccgaatccttttttaatgcgctcgccagaccggatcgccagcctgaacccggcgtcgtccccggacgcgcgttgcgcgtggcatcgattgatatcggcggcggcacgacggatatggcgatcgttcactatcagttagatgacggcgtgggggccaatgtaaaaattacgcctcatctcctgtttcgcgaaggttttaaagtcgccggggacgatctgctattggatatcattcagcgctgtgtactcccttccctgcaaacggcgttgcaacgggcaggcgttacggatgccgccgccctgctggcgaccttatttggcgattcgggacgaattgatactcaggccattttgcgtcagcaaacggcgctgcaattatttatgccgctgggccatgcggtactttccgcctgggagcaaagcgacattaacgatccgtttgccggtttacacgcgacatttggcgatctgctgatccgccgcccaacgagcaacgtgatgaactatatccagcaggcgatcgatcatgccttaccgtctggttcgccgacatttgatatattcaatgtgccgttgcaaatccagtttagccagcttcaggaggctctgctggccggtcagtttacgctaacaacgccgcttcatgcggtctgcgaagcgatctcccactatcactgcgatatcttgctggtgacggggagaccgacctgcttacccggcgtacaggcgctcatccggcacttacaaccggtgccggttaatcgcattgtgtggatggataagtatcaggtacatgaatggtatcccttcagtcagcaagggcgtatcggtaacccaaaatccactgccgcggtgggcgcgatgttatgcagcctggcgctggacttacgtctgccgcgtttcaattttaaagcggctgatatcggcgcgtattcgactgtacgttatctcggcgtactggataataccgttaatacccttcgcgatgaaaacatctggtatcacgaaatcgatttggataaacccggcgcaacgctggacgctcgcttgcattttccgctacgcggtaacgtgacgttgggctttcgtcaactggcgaacagtcgctggccggcaacaccactttattgcctgagcattaattccgccgaactggcgaaaaccatcgctggcgacggcgtactgaatgtgcgactgaaattacgcggcagtagcaaagatagcgccccggaatcgttcatattaagtgatgcctggctccaggacgggacgccggtcgccgccgatgcgctgacattaaaattgaatacgctggctgaccgccgccacagcggcagccactactggatagatagcgggagtgtatacctgaaatga

SEQ ID NO: 388425 - DNA, 1425 bp, Salmonella enterica
atgcaatatcaattactgattaatggcgtgctggtggacggtgagggagaaaggcagtctgtttataacccggcgacaggcgaggtcatacttgagattgcggaagcgtcgcccgcgcaggttgacgccgcagtgctggccgccgatagcgcgtttgccgaatgggggcagaccacacccaaagcacgggcggaatgtctgttaaaactggcggacagcatcgagcaaaacgcccttgagttcgcccggcttgaatcgcaaaactgcggtaagcctttgcactgcgtaattaatgatgaaattccggcaatcgtggatgtctttcgcttttttgccggcgcggcccgttgtttgagtgggctggcggcgggcgaatatctggaaggacatacgtcgatgatccgccgggatccgattggcgtggttgcctctatcgcgccgtggaattatccgctcatgatggcggcctggaagctggcgccagcgctggcggcaggtaactgcgtggtgattaagccttctgaaatcacgccgctgacggcgcttaaacttgccgcgctggcgaaggatatctttccgccgggggggctcaatgtcctgttcggacgagggcagactgttggcgatgtattgaccggtcatgaaaaagtacgcatggtctctttaaccggttctatcgcgaccggggagcatattctgcgccatactgcgccagcgataaaacgtacgcatatggaactcggtggtaaagccccggtgattgtttttgatgacgccgatctggatgcggtggcgcagggcgtccggacttttggtttctataatgccggacaggattgtactgcggcgtgccgtatatacgcgcagcgcggtatctatgatgcgctggtcgaaaagctagggaacgcggtgagcagcctgaaaatgggcgcgccggaggatgagtcgacagagctggggccgttaagttcgctggcgcacctgaagcgcgtcacagcggctgtagaggaggcgaaggccctcagccatatccgtgtgattactggcggaagtcaaacggaaggtaaaggttactatttcgctccgacgttgctggcagacgcaaaacaggaagatgccatcgtgcaacgcgaggtcttcggcccggtggtcagtataaccgtctttgatgatgaagatcaggttctgaggtgggccaacgattctcgctatggtctggcatcctccgtctggactcaggacgttgggcgggcgcaccggcttagcgccagattgcagtatggctgtacctggattaatacccatttcatgttggttagcgagatgccgcatggagagcaaaaacagtcgggatacggcaaagatatgtcattgtatggtctggaagactacacacttgtccgtcacatcatggttaagcattaa

SEQ ID NO: 388426 - DNA, 1335 bp, Salmonella enterica
atgcgcggccagaaatatgtgctgcaggtcgcgccggaagactgtactggctgtaatttatgcgtagaggtctgcccggctaaagatcggcaaaatccacagatcaaggctattaacatgatgtcgcgcctggagcatgtggaagaagagaaagtgaattatgactttttcctcgacttaccggaaatcgatcgcagcaaactggaacgaattgatatccgcacatcgcagcttattacgccgctgtttgaatattccggcgcctgttccggctgcggtgaaacgccgtatattaaactgctgactcagttatatggcgacagaatgttaatcgctaacgccacggggtgttcctctatttacggcggtaacttaccctctacgccttataccaccgatgccaacggacgcggcccggcgtgggcgaattcgctatttgaagataacgcggaatttggcctcggtttccgtctgagtgtggatcagcaccgggcgcgcgtcatgcgtttactggcgcaattcgccgatcgcattccggcggaattaaacgatgcgctgcatgccgaagcaacgcctgacgttcggcgtgaacaggtcgccgcattacgccaacatctgaaatcggttgcgggcgcagaggaactgttaaaggatgctgatgcgctggtagaaaaatcaatctggctgattggcggcgatggttgggcatacgacatcggctttggcggtttagaccatgtgttaagcctgacggagaatgtcaatattctggttctggatacgcagtgttattccaatactggcggccaggcgtcgaaggcgacgccgcttggcgccgtcactaagtttggcgaacatggcaagcgtaaagcccgtaaagatcttggcgtcagcatgatgatgtatggtcatgtttatgtcgcgcaaatttcgctgggcgcgcagttaaaccagacggtgaaagccatccaggaggccgaagcctggccaggaccgtcgctgatcattgcctatagcccctgtgaggaacatggttacgatctggcgctaagccatgaccagatgcgccagttaacggcgaccggtttctggccgttataccgctttgatccccgccgtgcggatgaaggcaagccgccgctggctctggactctcggccaccgtctgatgccctggcggaaacgttgcttaatgaacagcgtttccgtcgcctgaatgcgcaacagcctgaagtagctgaacaattatggcgagatgccgcattggatttgcaaaaacgctatgactttcttgccttgctggcaggaaaagcggaaaaacccggcgcagattaa

SEQ ID NO: 388427 - DNA, 840 bp, Salmonella enterica
ttgggcagcggccttatccttccacaacttccgctgacggtgaccgacggtcaggagtatagcctttatttaacggtgactgacagccggggtactcgcgtgacctccgagcgtatcccggtaagggtgacacaggatgagaccagtttccgttcatggataaatgttatcaatgacgatgttcaggttgaggacggcaactttgttatcagtacgccgcttcctgccggcgaagaggggaaggttattgagtggcactacgtgcgcgagcgctctgaagaggagtgggcgtcgctcaaaccacgtcatattaagtatcaatcagatatgccgggtctggcatttaaagcgctcggtggcacagagcgtgacggccattgggttgaacgggttctggtgacccatatcggcgatgatacccgctcgctcaaattacatattgaagcaagcggaccagacgataaacatccggtgaaggggaccgtactgctgcaagcgcagccagacagcattgcgcagaaggtcacttctgtggaggtgctttttacgccgggtactgaagaagccaacggaagcgttactgcgccagtcgtcggaacagaaatgcgagccagaacgctttgtgtaaataacacggactgtactgatgcgtttaattatcagtgggaaatctcggatgaaatgaaatcctggcaatccgtaccgggggcgacaaaggccacctggcttatcccttatagccttaatggggaatcgctacagaataaatatatccgcgtcagaattatttctgataaagaaaatgccaagagttctaccgcagcatctgatgcgaattaa

SEQ ID NO: 388428 - DNA, 258 bp, Salmonella enterica
ttggatgaatattcaggcttcctacagaacctttatttgtctggtggaaagcgcatcgctatcgtacttgctatccgtcccggtgtctctggttggatgaggcgaaccttacaccagctggtatactgcaccctagggcctgtcccattagactctttgatttgccagtttggccctgggagtgctcaaaatcctcaggggcttcgttaccgtgtggttttagaacgtcacctgccggagatagcggcggaaaaatag

SEQ ID NO: 388429 - DNA, 1212 bp, Salmonella enterica; identical to SEQ ID NO: 368546

SEQ ID NO: 388430 - DNA, 465 bp, Salmonella enterica
atgatacgccatcctcagaggtctcgttttgctggcaggggggagagccgacgctatgcggtctttcctttttaccaaaaagtggtgcgcttgcagcaacgctatgccaacggcaaaactatctacaacagtctgcaaaccaatggcgtattaatcaatgaagagtgggcggctttctttgcgcagcaccagttcctgattggtatatcgattgatgggccgcaagtcgttcatgataattaccggaaaacgccgtcagggcgggcgtctttttcccgagtcgttaatgctatccgccttctgcaggcaaatgatgtcgagttcaacacgctcactgtcgtgaatgatgcgtcatgccgtcatggcaacgctatttatcattttttgacgcaggaactggaaagtaaacacctcaatttattcccattgttgagccgctcgcgcaaaaagcgcagcgttctttga

SEQ ID NO: 388431 - DNA, 1077 bp, Salmonella enterica
atgaaagcactggcgagatttggcaaggcctttggcggctacaaaatgattgatgtcccggagccggtatgcggtccggaagacgtgattatcgaaatcaaagcggcggcgatctgcggcgcggatatgaagcactataacgttgacagcgggtccgacgaatttaactccgttcgcggtcatgagttcgccggacgtatcgcgcgggtgggcgaaaaagtgaaagactggaaagtcggccagcgcgtggtttctgacaacagcggacacgtttgcggcgtttgccctgcctgtgaacaaggcgattttctgtgttgtacagaaaaagtgaatctgtgtctggataacaacacctggggcggtggattttccaaatactgcctggttccgggagaaatcctgaaaatccatcgccatgccctgtgggagatcccggaaggcgtggattacgaggaagccgcagtactggaccctatctgcaacgcctataaatctatcgcccagcaatccaaatttttacccggccaggacgtggtagtcatcggcaccggtccgttaggtctgttttcggtccaaatggcccgcattatgggggcggtaaatatcgtggtggttggcctggatgaggatgttcctgtccgtttccctgtggccaaagaactcggcgcgacggcgtttgttaacggctccacggaagatgtcgtcgcacgctgccgggagatttgcggcaaagacaacctcggtctggtgatcgaatgctccggtgccaacattgcgcttaaacaggccatcgacatgctgcggccaaatggtgaagtggttcgcgtcggtatggggtttaagccgctcgatttctccattaacgacattacttcctggaacaaaagcatcattgggcatatggcctatgactccacatcctggcgcaatgcgattcgcctgcttgccagcggcgctatcaaagtaaaaccgatgatcacccatcgtatcggtctttctcagtggcgcgaagggtttgacgcaatggtcgataaaacagccattaaagtgatcatgacctacgactttgatgaataa

SEQ ID NO: 388432 - DNA, 357 bp, Salmonella enterica
gtggagatctcgccggttcaccagcctttgttgctggacggcacattagatcaattacagcaactgcgtattcgtccgatggcctggtcatgtcttggcggcggtcggctgtttaatgatgaggcttatcagccgttgcgccaggaactttccgttatcgcgcaagaactcaacgccagttctattgaacaggtggtctatgcctggattttacgtttgccgtcgcagccgctgccgattattggctcgggtaaaatcgaacgcgtacgtgccgcactagaagcggaaacgctgtcattgtcgcgtcaacagtggttccgaatccgcaaggcggcactgggttatgacgtgccgtaa

SEQ ID NO: 388433 - DNA, 2040 bp, Salmonella enterica; identical to SEQ ID NO: 369518

SEQ ID NO: 388434 - DNA, 174 bp, Salmonella enterica
gtgaacaatgcgtccatcgacaagcgtcaaaacagcgcgaatggtatcaattctgtcttccggcatcgtcataaatggctgattgagtaccgccagatcggcctgttttccgacgcgaagctggccccggtgttgttcggcaaaggcgagctaggcggcatgacgtgtatataa

SEQ ID NO: 388435 - DNA, 168 bp, Salmonella enterica
atgattttgaatgcattttctcttgaaggtaaagtcgcggttgtgacggggtgcgataccggattggggcagggaatggcgttagggctggcggaagcgggctgtgacattgtcggtattaacattgttgaaccgacggaaactattgcgcgcgtcaccgctctgtga

SEQ ID NO: 388436 - DNA, 732 bp, Salmonella enterica
gtggttcgacaatggattgctggcgcagcgctgtttgccctgatttcaggctatagttgggcagaggttgctcaaccctccgataacatcttaaaagaacagtttagtaagcagtaccacggcatacttaaactggattccattaccttaaaaaatcttgattcgacgggcaatcaggccacctggtctgccgaaggggatatttcttcccgtgaagatatgtataccggcgttggtatggcggcggattattattttgttgaaaaaacctggaccaaagatcgtcccgttaaattttctgccatgttaaccagtaaagggacgccagcctctggctggacggtgaactattactcattacaaatggcagccagcgatcagggccgggctattgacgacattaaaacgaatgataaatacctgatcgtcaacagcgatgattttaactatcggtttggcaacattgaagcctcctggcgtgcgcagaaagcgtcgatccccggtcttgaagaacaactctctgccctggataagaaaatagcggtagctaaaaaagaagcggacgcgtattggggaaaaggcgctgatgggaaaccgttgacccgcgctgaggcgtttaaaaagacgttaaaagagcgcgatgattatgtaaaagccaacgatagcagcgtatatgccgagaaatacgaaaaagaggtctatcaaccggcattagacgcgtgccgtaagtag

SEQ ID NO: 388437 - DNA, 315 bp, Salmonella enterica
atggcgcaccaccgcgcagcgcccgccaggaatctcgctattcaccacgccaacgtcattttcggctatcggctggcggacgctgccgcagatatcaaagcggaattgagccggcggcgtcgtctgcgggtcgtgccaggcaataccaaaagtttgactgctggcaatcggcgactggcccgtttcgcgtcgctatgcaataaatttcgccgcgctggcgttgaccttatcctgatgccccagatgcgtcagcatcgcgacgcgggtaggtggaaattcaacgatttttacgtccatgacatgctgctcctgtaa

SEQ ID NO: 388438 - DNA, 453 bp, Salmonella enterica
atgaacagtgaacactttgtacgcctagccttagatatccttaaatgcagccaaaaagaacttgctggaaagctaggggtttcctccactcaaattagcaagtggaaaaaaggtgaacatatgtctgatgatatggaaaagaaattcagaaaaatcaccaacataggcgagtattctccactgcttgttgagtgggcaggctccgtcagtaatgcagaaaaatgggatcgtctgatgcattttattgctgatagagtacatgacagagcagaaaccggctacgtcacaacacctctactcgacgaagaagggttcttatgtgaagaaacgattgatacattggaaaaaatggggttatccgctccaaaatcgttccctgttgaattagatatcaactatgagaatacagatgatgaagaaactgaagatctatgggatctccatcagcaataa

SEQ ID NO: 388439 - DNA, 228 bp, Salmonella enterica
atgaaactgacccctaacttttaccgcgatcgcgtttgcctgaacgtactggccggttcgaaagataacgcccgggaaatctacgcggcggcggaaggtcatgtgctggttggcgtgctctccaaaaactatccggatgtggcaagcgcagtcgcggatatgcgtgaatatgcggcgcttatcgataatgcgctctccgtcggactgggggcaggcgatcctaactag

SEQ ID NO: 388440 - DNA, 1626 bp, Salmonella enterica
atggatatcagcgccgttatttttgcaacgcatcgcattcggctattacccgatgaaggcaaaatcccctgggacgagccagccttcagccaacgcatgctggaaaatcatctgtcacaggaccacgactgggccagccgccggctaaccgtgattgagcaacaggtaacatggattacccgtcagttacccgctggcgcccgcattctggatctcggctgtggacccggtttttatacccgcctgttagcggagcgtgggtttcactgcacaggcgtagatttctctccggcatccatcacatgggctcgccagcaggcgcaagccgcaaacctgaatattgactacattcagcaagatattcgtacataccaccccacggaacctttcgatttcattatgatgacgtttggggaactgaatgtctttagcgctgcggatgcgcaaagcctcatcagtcattgcgcgcagtggttgaaaccggacggcaaactgcttgttgaagtgcataccttcgatgaagttaaacgccagggcatggcgcagccatgctggcagcgttgtccgcacggcctgtttcttgccgagcctcatctgctgttaacggaaaatgcctgggatgaagaggcccaaaccagctcaacgcagttctgggcgatagcggaaaacggctgtaccacccgtttcggcagtcaaatgaaggcctggcgcgatgatgaatatatcagcctgcttggtgatgctggcttcactgtgttgcagcgcccggacagtcacacctggccggtcggcgagacttttgcaggcaagctgtttgcgctactggctgaaaaagcccctcccgctgagggaatcaccctcagtaaaaggaataacccaatggatatcccacgtatttttaccattagcgaaagcgaacaccgtatccataatccgtttacagcggaaaagtacgccacactgggccatgcgttacgcatgaagccaggcacgcggattcttgatctcggtagcggttcgggtgagatgctctgcacctgggctcgcgattacggtgttacaggtactggcattgacataagcccgctcttcaccacacaggcaaaacaacgtgcagaagagctcggcgtcagtgaatacgtacattttattcataacgacgcggccggttatatcgacgaggaaaaatatgacgtgacggcctgcgtaggcgcgacctggattgcgggcggtgtcgcggggacaatagatctgctggccaaaagcctcaaacctggcgggatcattctcatcggtgaaccgtactggcgtcagatccccgcaacggaagagatcgcccacgcctgtggcgtctcatccgtcgccgattttcgccccttgcccgagctggtcgcctttttcgaccaactcggctatgacgtagtggaaatggtgctggcggacccgcaaggctgggacagatatgaagccgcgaagtggatgaccatgcgtcgctggctggaggaaaaccctgacgatgagtttgcgcaggaggttcgaacagaactgacggtagcccccaaacgtcacgtcacctggacgcgagaatactttggctggggcgtatttgcgttaatcgcgcgataa

SEQ ID NO: 388441 - DNA, 231 bp, Salmonella enterica
atgcacacctttagaccatactcactaaggcatagcgatctgttatatgaagatattccgttagaaatacgcgagcaaataatcttattgattatcaatacgctaggaaactgctcctctttcataatagtcattctgacgaagtttatcgaagaatatgtaaaacgttgcgcaaagagtatggcttattcaccttatatgcgcattcaacgtcatatctggatgaaatga

SEQ ID NO: 388442 - DNA, 315 bp, Salmonella enterica
atgagcgcattaaccgatttgctcttacaggggccgagttccgccgctgaattaagatcatcgctggccgttagtcaggcgacgttctctcgtctggtttccgcgcatcaggacgtcatccagtttggtaaagctcgtgctacgcgcttgttcggcctgttcgcggcgtcgcggcctttcccctctggcaggtcaatgcacaaggacaggccgctaagtttggcgttctttatccgtgttggcctcaggggagttgcctggttgcgcttgatacaggtgaatggcaatggtttgacagcctgccatggtatctga

SEQ ID NO: 388443 - DNA, 639 bp, Salmonella enterica
atgtcccaaccgggccgtggttatgatttaaccaaagtttcaccgacggcttatgacaaactgatttttggctttgttggcatcaccggtttcagaaaaattgatacagaagaccgcgatgtcgtagcagaagcggcagcgctgtgcggcaaagtgaaatatgagccgaccttcctcgacccatggggcgacttccagtcttatatcaacctcggctttgatgtcagcggctgggatgtggatccgaagactgtaactcagtctaacgccaagggtctgctgggcgcgctgcgtgatatgcaggcaaaagcgaaagccgcaggtcacacgctggcgctctccatgagtatcggcggctggagcatgagtaacgggttccacgaaaccgccgcttctgactcttctcgtaaaatcttcgccaaaggcgtggtgaaactgttcaaacagttcccgatgttcagcgaagtggatattgactgggaatacccgaacaatgaaggggcgggcaacccgtttggtccggaagatggcgctaactacgcgctgctgattgccgaactgcgtaaacagctggattccgctggtctgagcaatgtgaagatctctattgccgcttctgctgtcacttactatttttga

SEQ ID NO: 388444 - DNA, 1794 bp, Salmonella enterica
atgatagcccgctggttctggcgcgaatggcgctcgccgtcgctgattattgtctggctggcgttgagtctggcggtggcctgcgtactggcgctcggcagtatcagcgaccggatggaaaaagggttaagtcagcaaagccgcgagtttatggcaggcgatcggacgctgcaaagttcgcgggaggtaccgaaagcctggcttgaagaggcgcgtaaacgcggccttaacgtgggcgagcagttaacctttgcgaccatgacgtttgccggcgatacgccgcaactggccagcgtgaaggcggtagatagcgtttatccgatgtacggcgaattgcaaacccgtccaggcggagtgaaaccgcagccgggtagcgtactgctggcgccgcgtctgatggcgctgcttaatttgaaaacgggcgataccattgatgtcggcgacgtgaccttgcgtattgccggtgaagtggtgcaggaaccggattccggatttaacccttttcagatggcgccgcgtctgatgatgaatatggccgatgtggcaaaaaccggtgcgatacagccggggagccgcgtgatgtggcggtataaattcggcggaacgccgcaacagcttgctggctatgaaagctggctgttaccgcagcttaaaccggaacatcgctggtacgggctggagcaggatgacggggcattggggaaatcgctcgaacgttcgcagcagtttttgctgctttcggcgttattaacgctactgctggcggtagctgccgtcgcggtggcgatgagccattactgccgtagccgctacgatctggtggcgattttaaaaacgctgggcgcgggccgggcccagttgcgtaaacttattatcggacagtggttgatggtgctggggctttccgccgtcacgggaggcgcgattgggttactgtttgaaaacatattgctggtgctgctaaaaccggtattgcccgccgatttgccgcccgccagcctgtggccctggctgtgggcgctgggcgcgatgacggtcatctctttgctggtcggtttacggccttatcgattgttgctggcgacccagccgctacgggtgctgcgccgcgatgttgtcgctcgcgtctggccgttaaaaatttatttgcctgtcgcctgcgccgtcgtggtggcgctgctcgccggattgatgggcggaagtatgctgttgtgggcggttctggcgggtgcagtgatactggcgctgctgtgcggtctggtgggctggatgctgcttaacgtgctgcgcggcatgacgttgacgtcgctaccgctgcgtctggccgtcagccgacttctgcgtcagccgtggtcaacgttgagtcagctttcggcgttttcgctttcgtttatgctgctggcgctcttgctggtgctgcgcggcgacctccttgatcgctggcaacagcaactcccgccggaaagtccgaactatttccttatcaatattgcttcagagcaggtcgcgccgctgaaagcctttttggcggaacatcaggtgattccgcagacgttttatccgattgtgcgggcgcggttaaccaggataaacggtaatccgacggaaggtcagcaggatgagtcactcaaccgtgaactgaatttgacctggcaggatacgcgcccggcgcataacccgctggtcgccggtcactggccgccaaaaccgggcgaagtctccatggaagaggggctggcgaagcggctgaacgtcaaactcggcgatagcgtaacctttatgggcgatacctag

SEQ ID NO: 388445 - DNA, 408 bp, Salmonella enterica
atgcgtggcaacggcaataaaacttacgatcaaaatattgtcggtaccgcattaagctggacgccggaaaactggactatcgccgcaggcggcggttggtatcagaactttatgacgaccaaaaaagtgtctgtgaatgattactttgccggcgatgcgtggggtctggaatattttgtcggttacgctttcccgattggtcagtatgccgtgaaagctattcaaccgtactttatgggcgaccgcattgaatatgtgaatggccgcgactatctgcgcaccgataacggcgtggggatcaccttccaactggattatggtttccgcgttgattatgaacatgttttcacctccagcactgacaatctgggcgatatgaacctggtgcgtctgcgttacgatttctaa

SEQ ID NO: 388446 - DNA, 1149 bp, Salmonella enterica
atgaagattgtaattacgccagattcatttaaagagagcttaagcgctgataaatgctgtcaggctattaaagcgggattttcaaccgtatttcctgatgcgcgctatgtttgtttaccgatcgccgatggcggagaaggaaccgtggacgcaatggtggctgcgaccggcgggaaacgggtttctgtggacgttagcgggccgatgggggaaaaagtaaacggattttatggcctgaccggcgacggcaaaacggcgattattgaaatggcggcggcgagcggattgatgctggtggcgccagaggcgcgtaatccgctgctggcatccagtttcggcaccggcgaattgattcgtcacgccctggacgcggggattcgccatattattctgggtatcggcggcagcgccacggtggatggcggaatgggagtagcgcaggcgctcggtgtgcgttttctggacgcgcaaggaatgctgcttggcgccggagggggcaatttatcgcgcctggcgagcattgacctgcaggggtgcgatccgcgtatttcagagtgtcgtattgaggtctcctgtgatgttgataacccgttggtggggccacgcggcgcggcggcggtattcggtccgcagaaaggggcgacgcctgaaatggtcgagacgctggaaaatggattacgtaattatgcccgtgttttacatgccctgaccggacgcgacatgtctcaaataccgggcggtggagaggccggaggaatggggattgctgctatcgtcttcctggaagcggaaatgaagcccggtattgagattgttatgcaggcggtgaagttggaggaggcggtaaaagaggcctcgctggtgattaccggagaagggcgaatcgactcgcaaacggcgggaggaaaagcgccgataggcgttgcgtcagtggcgaaacggcatcacgtcccggttatcggcattgccggcgtactgggcgacggcgtggaagtggtccatcgccacggtattgatgccgtattcagtattttgccgcggctggcgcctttgccggaggttctggcgaacggtgaacaaaatctctaccacagcgcctgtaatattgcccgcgtcatcaaacttggccaggatatcgggactcgttaa

SEQ ID NO: 388447 - DNA, 264 bp, Salmonella enterica
atgagtggaagagagagtgggtcgaatcagttccgcggccaacagagtggcttcgggaagagaatccactaccgtgatgccggcatcttcgagcgcggcgatttgttgcgagcggcactgaggatcgcgttccgttccggtgacggttgcgatggcgaacagcggctgatcgctggcgcgtgcggcgcattccttctgctaggcctgaatcagcgatgcggcgggatcggcggtcgcgccaaaaccaataacgacgtccactaa

SEQ ID NO: 388448 - DNA, 549 bp, Salmonella enterica
atgcaacagcaaaaaccgctggagggcgcgcagctcgtcatcatgacgatcgcgctgtcgctggcgacattcatgcaggtgctggactccaccattgccaacgtggcgattccgaccatcgccgggaacctgggttcttccctaagccaggggacatgggttatcacctctttcggggtggcgaacgctatctcgattcccttaaccggctggctggcgaaacgttttggcgaagtcaaactgttcatgtggtcgacggtcgcctttgccgcggcctcctgggcctgtggcgtatccagcagcctgaatatgcttatcttcttccgcgtggtgcagggcgtggtcgccgggccgctgattccgctctcgcaaagcctgttgctgaataactatccgcctgcaaagcgctccattgcgctggcgctctggtcaatgaccgtcattgtcgcgccgatttgcggcccgattctgggggctacatcagtgataattaccactggggatggattttcttcatcaacgtgccgattggcatcgccgtcgtcctga

SEQ ID NO: 388449 - DNA, 528 bp, Salmonella enterica
atgccagcgagttggcacgattgtggctcttttaccgtggatattacggtacaaagcgatgactatggttgcccctggctggcaacgagtcgtgtcactgctgctgatggtatctctggcgaaacgtattccccgccggatacgcgcagctcagtttgcccgaaagttcccgttgatacttttgatatctcctgggatgcgaacgtttcgaaacagaaaacaaccctcatgcttgatgccaccggtggcacggtgaatcgcacgttacatacctatttgatggagggcggaaaactttgctatggcagcaaatttgacgaccgtggcgcttattgccgttttgtctcatcgggtattacgctcaatgtgctgggctgcgaccagtcgagcgtcacgaccagcgccgttgatcatccgataaccgatgttgagcttcatgacattaatgtagcggtgaacacccgcaacattggctccgggcagttcacgtcgacctgtagctttcagtatattattgatgagctttag

SEQ ID NO: 388450 - DNA, 198 bp, Salmonella enterica
atggcagaaaataacgcacgatcgccacgattactcgtgacgctgacggccctctttgcagcactttgtgggctgtatcttcttatcggaggtgtctggctggttgctattggcggttcctggtactaccccatcgcgggcctcgtgatgctggttgtggccggattgctatggcgcagtaaacgtgccgcactgtag

SEQ ID NO: 388451 - DNA, 147 bp, Salmonella enterica
atggccaaccgcggcggctccggcgatctggaagtgctctccgcctgtaaccgtatgaacctcatttcatatgcacaaatttcctctcgtctgggcggcggtattgtgctggttatcgctagcatcgtgttcagcatgatggtgtaa

SEQ ID NO: 388452 - DNA, 1320 bp, Salmonella enterica
gtgaccccgcccgacgatagcggcgatgacgatgtgaccccgcctgatgatagcggcgatgacgatgtaaccccgcccgacgatagcggcgatgacgatgtgaccccgcccgatgatagcggcgatgacgacgacacgcccccagatgactctgttattaccttcagcaacggcgtcaccatcgataaaggcaaagacaccctgaccttcgacagcttcaaactggataacggcagcgttcttgagggtgccgtgtggaattattcagaacaggacaaccagtggcagctcaccaccgcggacggtaaaacgctgaacgtcaccggctgggacgtgaccgacgccaatgccgccgtgattgaaggcacccaggaaaacggtctctactggaagtacgacagccggggctatctgattattgccgacgataacaccaccgttatcagcggcgatgaccaggcgcataattccgatcgcggcatggatatcagcggccaggatcgcaccggcgtgattatttccggcgatagaaccgtcaacacgctcaccggggactccagtgtgaccgacggtgccaccggcatggttatctccggtgacggcaccaccaacaccatttcgggccactccacggtggacaacgccaccggcgcgctgatttccggcaacggcaccaccaccaatttcgccggtgacattgccgtgagcggcggcggtaccgccatcatcatcgacggcgacaacgccacgattaagaataccggtacctctaacatcagcggcgcaggctccaccggcaccgtcattgacggcaataacgcccgcgtcaacaatgacggtgatatgaccatcaccgacggcggcaccggcggccacattaccggcgacaacgtggttatcgataacgccgggagcactaccgtcagcggcgcagacgccacggcgctgtatatcgaaggcgacaacgcgctcgttatcaacgaaggtaatcagactatctccggcggcgccgtcggtacgcgcattgacggcgacgacgcccataccaccaataccggtgatatcgcggtggatggcgcgggctctgccgccgtgattatcaacggcgacaacggcagcctgaccctggcgggcgatctgctggtcaccgacggcgcgatgggcatcatcacctacggcaccggaaatgaagcaaaaaataccggcaacgccaccgtgcgtgatgcggactcggtgggttttgtggttgcaggcgaaaaaataccttcaaaaacaaaggggatattgacgtcagccttaacggcaccggcgcgctggtga

SEQ ID NO: 388453 - DNA, 582 bp, Salmonella enterica
atgcaggacgacacattaccactaaataacagtaacgctacgaccacaccgctttcaacgagattaccgtttacaaaatatgattttggctgggtgctcttgtgtatcggtatggcgatcggcgcaggtaccgtcttaatgccagtgcaaatcggtctcaaggggatctgggtatttattaccgcttttatcatcgcctatcccgctacctatattgtgcaggatatttatctaaaaacgttatctgaaagcgaaacctgtgacgattatacggatattatcagtcactatcttggcaaaaactggggcatttttctcggtgtaatctattttcttatgattatccacggggtgtttatttattccctgtcggtggtgtttgatagcgcctcctatatcaaaaccttcggccttactgaggtcgatctttcgcagtctattatctataaagtcgcgattttcgccgtgctggtggcgattgcctccggcggggaaaagttattatttaaaatttccggcccgatggtggtggtaaaagtcgggatcattctgatattcggtttcgctatgatcccacactga

SEQ ID NO: 388454 - DNA, 174 bp, Salmonella enterica
atgatggtatccgcgcgcgaatcgctgccgccgctgacggcagtgaatatgcatcttgatgaggtggcgcgacaggcaatcacgctcctgtttgccgttctgtcgggtgagaaggtcagctacagcgacgggatcatgcctgaactggtggtgcgagcgtcaacctgccggtga

SEQ ID NO: 388455 - DNA, 312 bp, Salmonella enterica
atgacatggacgcatcttcctctgggcaataagacctcgcgtttcacgcagtctgcgcttgcgctgatgatagcgggtacgctccccgcgtatgcgggaacatttaacccgcgctttctggaggatgtgccgggtattgatcagcacgttgacctttcaatgtatgaatccaataaagctgaacacctgccaggtaaataccgcgtctcggtggtggtcaacgaaaaaaaatggagtctcgcaccctggagtttaaggcagcgacagaggcgcagcgcgcaaaaatgggtgaatccctggtgccgtgcttaa

SEQ ID NO: 388456 - DNA, 954 bp, Salmonella enterica
atgccggataagtgtaacgtattaaaaaatataaaaatatttttactggccttctgcctgaccgttccggctattctgctatctcgtctcatttctccccgcgccacaattgattccagctatatctttctggcctggctaccgctctgcgtcatgttttccgtgctgtttttatttggccgccgtggcgtcgcgccgatggtaggcggaatgatgttgactaatgaatggaattttcatttacctctgccacaggcgatggtgctgctattttgccagacgtttcccgtgttgctggtttgcgctatcgtacgctggcagctgggcgcgcgctggcgctacggaatacccaaccaaggcatctggctacgcgttttctggttagggttaatgacgccgtttggcataaaaatcagtatgcatctggcggggcactacctggctttcccggtgacaatctctaccttctttggcaccggcaccgctattttctcgattgttgatttattgagtctgatttctgccgcgcttatttttaccctctttttctattatccgctgcggatgatagtcagcccgcactatattcgtattttctggcggagggatgtcgctccttatctcgccaaagaaaaacgcctgtttacgcttctctggtttgccactctggcgacgctattagcggtgctgtgtacgcctttcgagacaaagtatattgctggctatctggtgccagttctgttcattggatttaccatcggcgtggggaaaatcagctatccgctgttgaattttagttgggctccactgcgctattcctgcttagctataaccgcaattttctgcagggcgtgggctcagaatattcgctggcatttatcctttcagttctcatttcttttagtatttgtttgttgtacatggcgcggattaatcagcgtagcgaatggttga

SEQ ID NO: 388457 - DNA, 402 bp, Salmonella enterica
atggcatccaccaatcaggaactggcctcggcgctcaggatgttttcccgctttttcgatttgattcatcagccgttggccgtcattaatgagcgtggtgaatacgtttactacaatcaggaaagcgcggatctggacggctacagcattgaacgggcaatgggaaaacatatgctggatgtctatccgggcatgaaagagacgcaaagtacgatgctttcatcgttaaaaaaagcgtggaatacattggccattatcaaatttattacaatgcgcgaggccaggccgttgactatcagcacaccaccgcaccgctctatgcaagcgatggcggcatgggcggcgttatcgaaatcggcaggaatatgtccggcgtcaggcggctccaggagcaggtggtag

SEQ ID NO: 388458 - DNA, 711 bp, Salmonella enterica
atgcttacacgcgactcctcttccggtcggaaaatcctgcttacctgtatcattacggggatagcggcagcattacttattggtagcctgcaatttttcctgtcgtggcataaacgggatgttaaatacaatacgctcctttctgatgtacaacattacctggccagctatttcgctgacctgaaagccaccaccgatattcttcagccgttgacgatcaacacctgtcagcaggttggcgcagaactcacctcaagagccgcttttagccttaatgtccgcgccttcttattgattaaagataaaaaagtgttctgctcttccgccactggcgccatgaatatgccgcttcagcaactggtaccggatatagatatccgcaaagacgttgctatggcgattctgcccggcacgccaatgatgcccaacaaaccgacaatggtgatttggtatcgaaacccattattaaatgacagcggcgtattcacatcgctgaatattaacctgacgccctacttactctataccacgcgccaggatgattttaacggcatcgcgctgattgtcggcaataccgcgctgtcgaccttttcttcgcgtctgctgaccgtcgcggagctgccgggcacgccttcacgacaggcaactatcaacggcctgccgcttaaaatacagctttatgccgatagctggacctacaatgacttgtag

SEQ ID NO: 388459 - DNA, 237 bp, Salmonella enterica
ttggcctgcgtaatctcccttacgcaggcttattttttgcgtataatcaataaaaaagtggtacttcccgccatagccaacattgaccacactaaccaaagcgcaaatgggcgcttaggtttacagacctcccctattcatggccagccagcaagtcacaatcctccccgcatccggtcggactcaggacttagcattctgacttttacgtttaacatcagtgaattaaatcaataa

SEQ ID NO: 388460 - DNA, 501 bp, Salmonella enterica
gtgtttattgccagtcgtgacaaagaagcggggacggtgacgctttccagcaccctgccggggactttccgctggaaggcgaaagcagacgcctatggcgacagtaactacgttgatgtcacttttatcggcgacaacctgagcgcgctgaatgcggtgatttatcaggtcaaagccgccaaccctgtcaaccttatcggcaaagaagataagcaccctacggtcaataatgcttaccgttccctgctgtggcgcgacaaaaataaagacggcgtattccagatgtccgagcagctcacggaagaagagatggcgctgtacgactaccagtgggagtttaccgggcagagtacaaacggacataccggcgcgctggccaacatcatgaatgaagatcttgtcctgccagtaaccaataaagaggcggcgcagaagtttgccgccaatgtggaagatggcgttcagggttacggcatacgcgttacgtatagtcagaaatag

SEQ ID NO: 388461 - DNA, 213 bp, Salmonella enterica
atgtctgacgaagccgcaagtcaggaagcgattaacgctatccgtacgctgagcaaacgcgtcggcattccagaaggtttcagcaagctgggcgtcacaaaagaagatatcgaaggctggctggataaagccctcgccgacccgtgcgcgccgtgtaacccgcgcaccgccagccgcgatgaagttcgcgggctgtacctggaggcgttatga

SEQ ID NO: 388462 - DNA, 240 bp, Salmonella enterica
atgcagcgaacgggtgctgcggcgcagtttcgcgcccaaaccgggatgacgattaatcaatatttacgccaggtccgtatttgccacgcgcagtatctgcttcagcatagcccgctgatgattagcgagatttcgatgcagtgcggttttgaagatagtaattatttttcagtggtgttcacgcgggaaaccgggatgacgccgagccaatggcgccatctcagtaatcaaagagattaa

SEQ ID NO: 388463 - DNA, 2205 bp, Salmonella enterica
atgcccctgattgtggaatttacctgtgaactgccgaatggcgtacatgcgcgcccggcaagccacgtagaaacgctgtgtaataccttcacgtcgcaaattgagtggcacaacctgcgcaccgatcgcaaaggcagcgccaaaagcgcgctggcgctgattggcaccgacacgctggctggcgaccactgtcagctggtgatttccggtgccgatgaacaggttgcctgtcagcgtctgagtcaatggctgcgcgatgaattcccactctgcgacgcgccgctggcggagattaaaaacagcgaactggagccgcttccggcgtcgttgacccagctgaatccgcagatttaccgcgcccgtagcgtgtgtagcagcagcgcgggcggcgtactgacgccactctcttccctggatctcaatgcgctcggcgaactcccgaccgccaacgacacagagacggaacaagccgcgctggacaatggcttagcgatgttgataaagcatattgagtttcgtcagctcgacagtgacggtgccgccagcgcgattctggaagcccatcgttcgctggcaggcgacgcttcactgcgtcagcatttactggacggcgttctgcgcggtttaagctgcgcgcaggcaatcgtggaaagcgcgaaccatttctgcaatgagttcgctcgcgccagcagcagctatttacaggaacgcgcgctggatgttcgtgacgtttgcttccagttactgcaacacatttacggtgagcagcgctttccggcgccgggccagttgacccggccatctatctgtatggcggaagagttgacgccaagccagttcctcgaactggataaaacctttctcaaaggtctgctgttaaaaagcggcggcaacacttcgcacacggtgattctcgcccgctcattcaacattcccaccctggttggcgtggagattgaggccttaacaccgtggcgtcagcagacggtttatattgacggcaacgcaggcgcgattgtcgttgcgcctgacgagcctgtcactcgttactatcagcaggaagcccgcgtgcaagacgccctgcgcgaacagcagcgcatctggctgacccaggaagcgcgcaccgctgacggcatccgcatggaggtcgccgccaacatcgcgcactccgtcgaggcgcaagcggcctttagtaacggcgcggaagcggttggcctgttccgcacagaaatgctgtatatggaccgcgcctgcgcgccggacgaaaacgagctgtacaatattttttgccaggcgctggagtccgcaaagggacgcagcattattgtgcgcacaatggatataggcggcgataagcccgttgattatctgaatattcctgccgaagccaacccattcctcggctatcgcgccgtccgtatttatgaagagtacgcttctctgtttaccacccagctacgctcgatcctccgcgcgtccgcccacggcaacctgaaaatcatgatcccgatgatctcctctatggaagagattctgtgggtcaaagagaagctggcggaagccaaacagcagctgcgtaatgaacatatcccgttcgatgagaagatcccactcggcattatgctggaagtgccgtcggtgatgttcatcatcgatcaatgctgtgaagagattgatttctttagtattggtagtaacgatctaacacaatacctgctggcggtagaccgtgataacgccaaagtcactcgtcactacaacagcctgaatcccgccttcctgcgcgcgttggatttcgcggtgcaggcggtacatcgtcagggcaaatggattggtctgtgcggcgaactgggggccaaaggttcggttctgccattgctggtaggtctggggctggacgagatcagcatgggcgcgccgtcgattcccgccgccaaagcgcggatggcacaactcgacagccgagcctgccgccagttgttgaatcaggcgatggcctgccgcacctcgctggaggtggagcatctgctggcgcagttccgcatgtcgcagcaggatgccccgctggttaccgcccaatgcataacgcttgatagcgactggcgcagcaaagaggaggtgattaaaggcatgaccgacaatctgctgctggcgggccgctgccgctacccgcgcaaactggaagccgatctatgggcgcgctag

SEQ ID NO: 388464 - DNA, 279 bp, Salmonella enterica
atgtatacggtgccgttcctgctgtggacctcagagaaatggcaggcagcgcatccgcgcgacttctcacaggatgtcgatcgtaagtacagcagttccgagcttatccatacctggtctgacttagcgggcctgacctatgatggctacgacccgacgcgctccatcaccaacccgcagttcaaagagaccacgcgctggattggcaacccgtataagaaaaacgcgctgattgattatgatacgttaccgtatggcgatcaggtcggtaatcaatag

SEQ ID NO: 388465 - DNA, 462 bp, Salmonella enterica
gtgcgtaatctggccagccgcagcgcccaggcggcgaaagaaataaaagcgttgattgaagattccgtctcgcgtgtcgataccggttctgtgctggtggaaagcgccggggaaaccatgactgacatcgtcaatgccgttacgcgcgtcacggatatcatgggcgaaatcgcctccgcctcggatgagcaaagccggggtatcgatcaggtcgctttggccgtttccgaaatggatcgcgtaacgcaacagaacgcctcgctggttcaggaatccgcagcggccgccgccgcgctggaagagcaggccagccgtctgacccaggcggtatctgctttccgcctggcatcgcgaccgctggtggcaaataaacctgagatgcgtttgtcagtggacgctcagtccggcaatacgccgcggtcagtagccgccggggatgatgcgaactgggaaaccttctga

SEQ ID NO: 388466 - DNA, 1197 bp, Salmonella enterica
atgaacagaaaagttctggcactgcttgtcccagcgttattagtggcaggcgcagcaaatgcggctgaaatctataataaaaatggcaacaaactcgacctgtacggcaaagttgatggtctgcgttacttctctgacaatgcaggcgacgatggcgaccagtcctacgcccgtattggctttaaaggcgaaacgcagatcaacgatatgctgaccggctatggtcagtgggaatacaacattaaggtgaacaccaccgaaggcgaaggtgcaaactcctggactcgtctgggctttgccggtctgaaattcggcgagtacggctctttcgattatggccgtaactatggtgttatctacgacattgaagcctggaccgatgcgctgccggaattcggcggtgatacttatacccagaccgatgtctatatgctgggcagaaccaacggcgttgccacctaccgtaataccgacttcttcggtctggtggaaggcctgaacttcgcgttgcagtaccagggcaataacgaagatcctggcgcaggcgaaggaacaaccaacggcagcgatgcaggtagtggttctcgcaaactggcccgtgaaaacggcgacggtttcggtatgtctacctcctacgactttgacttcgggttaagcctgggtgcggcctactcttcctctgaccgtacggacaatcaggttactcgtgggtatggtgatggccatcattactatgccaatagctatgccggcggtgaaactgccgaagcctggaccgtaggtgccaaatatgacgcctacaatgtttacctggcggcgatgtacgctgaaacccgcaacatgacctattatggcggcggcgatggcggtaatggcggtatcgctaacaaaacccagaactttgaagtggttgcgcagtatcagttcgatttcggtctgcgtccgtccatcgcctacttgcagtctaagggcaaagatttaggcggccaggataaagatagccgtggtaactatcgttacaccgacaaagatctggttaaatatgttgacgttggtatgacttactacttcaacaaaaatatgtccacctacgttgattataaaatcaacctgctggacgaagatgatgacttctacgcaaacaacggtattgcaaccgatgatatcgtaggtgttggtctggtctaccagttctaa

SEQ ID NO: 388467 - DNA, 495 bp, Salmonella enterica
atgagtcaaagcacacgacgcaaggtgttgagatttctcggaacgatcattgtggtgttacttcctatattgctggcgatctggtttgctcatatccgggcagtctctgaaaccagaaatcagttacattcatttgcgcagttggtattagataaaacggagcgggttatcctgcaagcagatttagcccgcgatgccgctgaacaatatcaggggcaagcctgtacgccagcccatcaacagcgaatgctgaatattatccgcggtcgtttgtacattaatgagttgatttatgctaagggccagcgttttctatgctctacggttatgacgccaacaagtccttattttattccccgcgctgactataaacgaaagcctgacatcgctatttattactatcgtgatacgccttttttcaacggttataaaatgacatatatgcagcggggaactatgtcgcggttatcaatcccttatcttatagcgaggtga

SEQ ID NO: 388468 - DNA, 504 bp, Salmonella enterica
gtgatactcgtgccgggcaaccacggcgaacggtttgttcgcgaacaaatgggcgtcgacacacaggcagtcgtcaccatgagcaattttgtcggctacatgattgaagaggcggtacggctgggattttgccagatagtgctggtggggcatcctggaaaactgatcaaaatcgccgccgggatctttcatacccatagccatattgccgatgcgcgcatggaaacgctggtcgcgcatttagctttactgggcgcgccgctggagttactcaccctggtcggcgattgcgataccactgaagcggcaatggagcacattgaagcatatggcttcgggcatatctataaccatcttgccaggcgtatttgtttgcgagtcatgcagatgctgcgttttaccaaaacgccgcctgtctgcgacgccatcctgttttcttttgataaccatattctcggcagtaatcgtcccgtcgacgagattgctaaggagctgcaatgctaa

SEQ ID NO: 388469 - DNA, 150 bp, Salmonella enterica
atgaacataaaaaaattctatgtctttttcttatatgtggtgcagccaatgcgcataacatcgatcctgcgaaatgcaataatgagatacaacaggatgacgtctattggtgccttatggataaataccagcaaagtgttatcgctttaa

SEQ ID NO: 388470 - DNA, 216 bp, Salmonella enterica
atgttttttttgcatctccgtacagactatggaatgccgtgtaataaaaagcttggtaatcattttacgcgcagaaaattttttgagaagcactttttcaaaatggaatacaggagtattcttcttttgtggttatttcaggatgacgttgtttttataaggaatatcttaaaagatattttaatgaatggtgttttgttttttttagttgattga

SEQ ID NO: 388471 - DNA, 3369 bp, Salmonella enterica
gtgtctttcgcgtttttccggtacggcatgactctgagggatattaaggaagaaataaagatgatcggaaaaccagcggcgcgtcagggcgacatgacccaggtgggcggcccgatagttcagggttcagcgggggtactgataggcgcaccgacggggggggcgtgctcggtgtgcccaaccggagaggccagtccgaagtacggcaatccggtgaacccgctgctgggggcgaaggtcctgcccggcgagaccgatattgcgctgcccggcccgctgccgttcgtgctttcccgcgcctacagcagttaccggacgaagacgcccgcgccggtggggctgtgcgggccgggctggaagctgccgtcagacctgtggttacagctgcgcggcgacgggctgatactgaacgataacgggggcaggagcgtgcattttgagcctctggcgccgggggatatacagtacagccgcagagagtcattctggctggcgcggggcggggcggcatcgcagcacaacagccacccgctgtcggtcatgtggggcatgctgccggaggcggtgcggctgtgcccgcatatttacctggcgacgaacagcccgcaggggccgtggtgggtgctgggatgggctgaacgggtgccgggggcggatgaggcgctgcccgcgccgctgccgccgtaccgggtgctgacgggggtggtggacggttatggccgccgtctgacgtaccatcgcgacggtgcatacggcggcgcggtgacggcggtgacggacagcaccgggcggcgctaccggctggtgctgaccacgcaggcgcagcgcgcggcgcaggcggcgtcagcgtcttcttcgtcattatctcccgccccgtcgtcgttcccttcattttcttccccaccctctccccgctcaccgtcctcctggtcggagacgctgcctgtaaccgcctgcggtgaggacagcggcatcaggctgtcggcggtgtggctggtggaagacccggcctgtccggatgcgctgccgtcgcagccgctggtgcgttacgggtacacggcgcgcggtgagctggaggcggtgtatgaccgcagcggtgcggaggtaaggcgctttgagtatgacgccgggcagccggggaggatgacggcgcaccgttacgcgggaagaccggcgagccgctaccggtatgatgacgcggggcgggtgacggagcaggtcaacccggaagggctgggttatgcgttcgcgtatgagaagaacaaaataacggtaacggacagcctggggcggcgtgaagtgctgcacacggaaggcgagggtggcctgaaacgggtggtgatgaaggagcaggcggacgggagcgttatccgcagcgggtatgacggttcagggcggctggaatggaggacggacgcggcggggagaaagacgacatacaacccggacgtggcgacagggaagctgacggcggtgacggggccggacgggaggaagacgaagtacagttataacgaccggcagcagctgacagccaccgtccacccggacggacggcgcagcacgcgggagtatgaccgtcagggccgtctggtgaaaacggtgttgcgtgaggggaaggtcacagagtatgcgtatggcagcgcccatgacagccagccgtcggtggtgaaggacagctccggcagccgccggataaggcggggacgtaacggggaggtggtgtcgcggacggactgctcgggttatgagacgcggtatgagtataaccgctacgggcagcagacggcggtgcattatgaggaaggcctcagcgtttaccggggttacgaccgccggggcaggctgtcgtcagtgaaggacagccagggtcgtgagacgacatacgaatacagcgacgcgggcgacctgacggcggtgacccgcccggacggccagcggcgggaggcggagtatgacgcgcgcgggcggctcatcagcgtgacggaaggggggctgacgcggcgggtggagtacgatgcggcagggcgcgtggtgcggctggaaaacgagaacggcgcggagatgcgcttcacgtatgatgcgctgaaccgggtaacggaacagcggggctttgacggcaggacgcagcggtatggctatgaccggagcggacggctggcgcgcagtgaggacgaggaccttgtcacgcactggcactacgataacgccgaccggttaacgcagcgcaccgtcaacggtcaggaagcggaacggtggcagtatgacgaacgcgggtggctgacggcgctgagccatatcagcgaagggcagcgtgtgacggtgcattacggctacgataataaaggccgtctcaccagcgagcggcagacggtccataacccggagacggaagaaccgctgtgggcgcacagcgtgcggcacggttataacgaccgggggcaggcggtacgggaagcgtatgacggcctgccggtggcggagtggctgacgtacggcagcgggcacctggaggggctgaaactgggaagccagccgctggtggagtacacgcgcgacaggctgcaccgtgagacggagcggcagttcggtgcgtggcggatggagacgggctacacggcggggggtgaggtggcataccggcacctgccggaggcggcgctgagccgggaataccggcatgacgtaccggggttcctgacgggcatcgacggcgcgggtgaaagctggcgttacggttatgacggggcgggaaggctgtcggcggtgggcctgacgaccagagaaatgagcgtggacatcccgtatgagacggacggagcgggaaaccgggtggaagcgggggcggaacgccgggaggcgaacggactgccgggcgtcttcgcggacaaccgggtaacggaggacgggcggtacgtgtaccgttacgaccggtacggcaacctggtggagaagggagagcgcgtcccggcgggcgcgatacgcagcggcgatgagcggacgcaccattaccgttatgaccgtcatcaccggctggtgagctaccggtgtacggagggttacggaagccggagcatcacggagagccggtacgtatacgatgcgaccggccggcgggtgtgtaaaaaggtatggcggcgtgagcggtatgcgacaggacgctgtcatgactacacggcgctgccggagaccccggaagtgacgtggtacgggtggagcggggacaggctggtgacggcgcagacggaacggagccgcatccagacggtgtacgagggaggcgggttcacgccgctggtcagggtggagacggcgacagcggccctgacaacggtccgtagccggaggagcctggcggagaagctctag

SEQ ID NO: 388472 - DNA, 465 bp, Salmonella enterica
gtggtgttcccggcagggctggtgaggcggctggacagcctggaggcagagctgcgggcggggagagtgagcagtgagagccgtgcatggctggcgcagtgcggactgacggcggagcagatggcggggcaactggaagagcgcgctgaaccggaaaggaaaatccatctttaccactgcgaccaccgtggtctgccggtggcgctgataaacagcgagggggcgcgggaatggagcgcggagtatgatgtgtggggaaaccggcagaaggaggagaacccgcaacagcttgagcagttactgagactgccgggccagcagtatgatgaggaaacggggctgtattataaccgttaccgttactataatccggaacagggaaggtacatcacgcaggacccgattgggttgcggggggggatggaacctgtatgcgtatccgctgaacccggtgagcgggactga

SEQ ID NO: 388473 - DNA, 660 bp, Salmonella enterica
ttgggttgcggggggggatggaacctgtatgcgtatccgctgaacccggtgagcgggactgacccgctggggctggttgtggatgcgattccctggggagcggcgacacccacggcggtgctggatgcggcactggccggatttgaagcggatgtggccgttccggagccaacagatggcgcctggccgaagtgggctgggtgggcagtcgttattgctgctgcggctgcttttacatacctgacctgtgcgtccggtgatgattcaacagaggattcagaggacagtgatgctggctatggtgagaagggggactccacggattcagggcatggagtatctggtgcggaagacaatgagagtggcagcgattcggatgccacgactgttgacgatttaattgcaacgtcatctaaaggtgagcagactacagggaggtcccggctttatgaacggcctggggggattgatgaggctaacaaggattttgataacttatcccctagcgatgttaaggacatcgacaataattatgttacgggacgagtgggtactttgccggatggtcgcacagtgattgtgcgtgatggcagttctgatggtggacctacacttgaggtccaatccgggaaaaataaaattaaatttaggtatgattag

SEQ ID NO: 388474 - DNA, 387 bp, Salmonella enterica
atgattgaaaaattggttgatattaccccccaaaatatatctttaaaaggtagtcagataattgattttcattatagggcagggagtcttgagattatagttactcttgatggagtgaattcggattttcgatttttttttgattggactcattcatttcgtgtcactgatgaaggtgatctgttgaaaatgttgggtgagcaaaaaggaaaaatgcgagtaggtatttataaggttgaggactcatcttatctggaatggtttaatgaccagagttttaatatacatgaaaaagagaaaattattcattatttgattgtgacagtaaatgatatcattgatgttttgtcctcagagtctccagtgatatctaactgttctaaataa

SEQ ID NO: 388475 - DNA, 222 bp, Salmonella enterica
gtggcaaacatcgccaaacggtataacaagccggtaattggtattgcgggtagcctgacggaggacgttggcgtggttcatgaacatgggcttgatgccgttttcagcgtgatttataccatctgcacgctggaggacgcgctgaagaatgcgagtgaaaacgtacgaatgaccgcgcgcaacgtggctgcaacgctgaaagcggggcaacaattacgctga

SEQ ID NO: 388476 - DNA, 519 bp, Salmonella enterica
atggcggaattccgtcgcgcgaccggattaccgacggccaccaatatgatagcgaccgactggcgtcaaatggggcatacgctgtcgctgcaatccgtcgatatcccgctggcggacccgcacttctggactatgcaaggctctgtacgcgtggcgcaaatgtgtcatgagttcggtctgacctggggctcgcactctaacaaccactttgatatttcgttggcgatgtttacccatgttgccgcggcggcgccgggcaagatcaccgcgatcgatacctactggatctggcaggaaggcaaccaacgtctgactaaagaaccgtttgaaattaaaggcggcatggtgcaagtaccgaccaaaccgggtctgggcgttgagctcgatatggatcaggtgatgaaagcgcatgagctctatcaaaaacatggcttaggcgcgcgtgacgacgcgatgggaatgcagtacttaattcctggctggacgtttgataataagcgtccttgcatggtgcgttaa

SEQ ID NO: 388477 - DNA, 570 bp, Salmonella enterica; identical to SEQ ID NO: 372409

SEQ ID NO: 388478 - DNA, 498 bp, Salmonella enterica
atgttgttactggcaatatcgggggggcaggagaacaagcttttcgtcttatttgccggggtgagtattctggttcaggtggaatgccgggcaggactgtgcatagccgtcagcgccagaccgtgcgggccaggtaccatcagtaatgaacagccgacacaggctgagctcaccgggccggtaacagaggtgagaacaccaggcacagaggtcgtcgtcggatatggaacggcagcctggctggttcgccagggataccggatatattctggcctgacgggcatcagcaggaacatggcgcatcaactcagcgcctgctgcatctgttccgccatcacccacagggcacggtttagcctgatgtccccgtcaatgccgttaacggctcgggtatggctgcgtttgcccttcgcagtacgtcccggaagcccgcctttcagcaagttctcctggatacgctggtacgttgtccacaggtcatcactgcggtcttcataa

SEQ ID NO: 388479 - DNA, 402 bp, Salmonella enterica
atgactaaacctcacggccttcaggccctggaacaaccgctgtcggcgcttcccgatacgcttcgtcagcttattcttgaacgtattcagaacctcacccactacgagccggtgattggcatcatgggcaagagcggtgcgggtaagtcttcgctctgtaatgaactcttccggggtgaggtctcccccatcagtgatgtgaacgcctgtacccgtgacgtgctgcgcttccggttgcgcagcggtcgtcacagtctgatgattgttgatttaccgggtgtgggagaaaacgggctgcgggaccaggaataccgtgccctgtaccggcgtatgctgccggagctggacctggtgctgtgggtcattaaagccgacgaccgggcgctgtcagtagacgagtag

SEQ ID NO: 388480 - DNA, 1521 bp, Salmonella enterica
atgaagcttacccataaaaaaactcaaaatcatcatgttaatctgaacaccagagcaattttgacgttttttcaacaaatcatatctttcatatatggcaaaaccagcgcggcggttgagcttatctttgcaaccctccagggaagcatggctctggcctgccaggatatgtatgatgttgaaattgatgatgatattatcgttcctgtatcgcattttcacataatactggcaaggtccggaagcaaaaaaacgacagtatacaggctcattatggcgcaaattcatcagactgaacgtgagctggcagaggtgttttcagtcagactgaaggagtatgaacggcaacacgttctatgggatgaagaatgtaagagccttaagaaatcgtttcagaaagctgtacgccagaaagagggagtggagacagccagaaatgaactggatgaatgtctcagaaatgaaccggttaagcctgtaagggtgcatctgacggtaacggatcccacgccggaagcccttctgaaagagctggggcaatactccagtctgggtatcacctctgacgagggaagtgctctgtatgaaagcatcatgcgccgtaagatcgcaattcataatacgctatggtgtggtgatgattatcggatcagtcgtgcgtcaacgggtatcacagatattaaagatccccggcttggtatgctgttgatgacacagccacatgactgcacactgaaatcactgggtaacgcaatacgagctacgggaatttatgcgcgtacgttaaccatggatcttacgttactcaccagacagattgatattgatgagctggtttctggcgatgagtccgatctggaaaagttttatgccattcagaaaaaacatttacttgccgggattgaacgcagaaaaaaaaatcaaccccgaatctgtatgacttttgctcctgacgcaaagaagcggttgcgttatgttggcagggacgtaaagcgtctgatgcagcaggggggaaagctgtaccattataacgactgggctgcgcggtactgcgaacataccgctaggagtgctgctgtgatgcagttgtttatcacccctgactcaaccgttattacgctggaaacactggaagctgcgttgttaatatcggaatggcaccttaatcattttattgtaaaaatggatgtggtcaggggatcttcccattctgaaagagtactcagttggcttgaaaaccatcttgttaaaaatgggtcttatgattttttaaggcgtgaaatgatgcaagagatacatcgttcactcagaaaaaaagctgatcttgagcctgttctggaacagcttgctgaggagggtaaaatccagctgtgggaggacgaaagtgggacgcattacattaaatacctggcttccgaaatggcaccttcagaactggatacagaacacaaggctttgaaaggtataccagaatatcatgggggaggtagtgctatcagtagcgtcccgctgaaaggataa

SEQ ID NO: 388481 - DNA, 189 bp, Salmonella enterica
atgaaccgtcaggaatctgccactctcaacatggataaatttatccgcacccaaacgctgcttttgctagaaaaaatagaccaacttgatcttgatgacggagcgacagagtgcgaaaaattacacgaacaggcagaaaagctttatcagaaactcctggcaaaactcgagtcaggcatagcgccgtag

SEQ ID NO: 388482 - DNA, 183 bp, Salmonella enterica
gtgagttcaaatgctgaatggtatatcggtcatgctttggttgagttacttgagcaggagcgtatggtctcgttgttttctgttattgatatccttgagcgacgtctgcaggacggtaactcttcaagagacgaatttatggatattcttgaggcgatcgaaaagctacggcgctatgcctga

SEQ ID NO: 388483 - DNA, 546 bp, Salmonella enterica
atgttcaataaaaaaaacagaatggtcttagtacttgcaacattcataggtggctttatcagctctttggtgaaatcaggcactgagtctaatatgccaccccggatgcaaggcgaagtatcaccaccggcagcaaatattgatgcatggttaggatggctcggtataaactctcattctcttgattatgtttaccaagggttcaccatccctggcgcggtgatgctgtatcactggcttttcagctttgcctttgcattcgtctatgtttttatttcagcgataacaccaaagattaggctctggtacggtgccgcatacggcattgcaattaccttagtaatgcatggcctgcttattcctgctttaggttttagaaaccccgcatatcttgacggaaaaacaggatggctatggaacctaaatggctatgaattttggagcgaaatgctaggccacatatgctggtccgtatcaattgaggttagccttattgctaccctcgctctgctaggaaaaaaaatagaaggtgtttgggcaaaatag

SEQ ID NO: 388484 - DNA, 240 bp, Salmonella enterica
atgtctcaagagtgggtagatcgcttaggcactctgagaggtaactttgaagaatttcttgcgaagacccgatcacttgtatgtgggacttgtgtgggtctaggacgctcacaatttggtgtagcaaaaaatcgctatgattgggtgatagtcgacgaagctgctcgtgcgacacctggcgaattggctatagcaattcagtcgggtcgcagggtgttactggtcggcgatcatcgttaa

SEQ ID NO: 388485 - DNA, 654 bp, Salmonella enterica
atggtttcagcttgtttttatcccaaaccgttagaacctggacgtggaaatccagaaccttggtttaatcaattacctaaaagattaagttctattattacttgggttgatacttccgatgctgggggagaatcttatgaaagagcaaaacatcctggatttgacaatccttatgaagctagagaaattattgatacgctgcgttcaatatgtacagcagaatcattcatcaaatatttaattgatgaaacttcagatgaggaaaaaccaattggtgtaatttgcatgtatgcaaatcaagaacgcctattgcaacgtttacttagcgaacaagattgggctactggttatagacatcttattaaaattgatacagttgatagttatcaaggtaaggaaaatcggatcattatcgttgcaacgacgcgcaataataatcagtgtattcaagggttccttagcagctcggagcgaataaatgtggcgatttcgcgtgcaatggatagattagtaatcattggggctgctcgtatgtggcgtgagaggcatcaaacttcagcgttaggccgtgtattaaaccacattgaaacacatcgtgatgggaataacttcaatttggttcaggcattagccattgaggagggacagaaatga

SEQ ID NO: 388486 - DNA, 405 bp, Salmonella enterica
atgacttcaccgaaagacggtttgttgaagaaaaacatatcgggtgtgaagagttcgaagcacagttgcttcatttatggcgatacctcgttttctttcagtgaggttatggaagccatcttcattagcgggctgttcttctatgcaccaaaagacgccgccagcagtcttgatgagctgaaagcgagtctggctgaactggaagaagaacgcgctgaaaatccaaatgcggagtcgactggcaatgaaacagatgaagaacctacaatcgttgtagccgaaggtgcatttgattcgctcgctgctcacatggagtctgaaaaagcggagtggcaatccattaagaagttatgccagcaagaaggtgggctgcccatacgcattggcaaccggatacccaactga

SEQ ID NO: 388487 - DNA, 651 bp, Salmonella enterica
gtggccgtattcgcctttcagaatgcccgccgtttctttggcaatggtcttgtagcgttcgcccgtcaggacgttgagcaccgcctgggtgccgacaatctgcgaggtcggggtcaccagcgggataaagccgaggtcctcgcgcacgcgggggatttccgccagcacctggtccagcctgtccgccgcgttctgctgcttcagctggctttccaggttagtcagcattccgcccggcacctgcgccacaaggatgcggctgtcgtagcctttcagctggccttcaaaggcgtggtactttttgcgcacctcgcggaagtacgcggcgatgctctccagcttcaggatatccagtccggtgtcatgctcagtacctgccaacgtcgccaccagcgcttcggtggccgggtggccgtaggtggcgctcatggaggaaatcgccgtgtccacgccgtcgacgcccgcctcgatagccttcagcagggccatctccgccatcccggtggtggcgtgacagtgcaggtgcaggcgcacctcaaaacgttttttgatttcgctcaccagctcaaaggcggccatcggcgtgagaatgccggacatatccttgatggcaatcgagtcaacgccggtttccagcagttgctctgttaa

SEQ ID NO: 388488 - DNA, 714 bp, Salmonella enterica
atgaccactattaccaaagaacgactgcaagaagtcattgatggcgatattttattcaccgatgagcagagggagctggcgcatatcgcgctggcatctatggatgctgagcctgttggttacttctacgcagagaaaccaggcgattggtatcaaatttcagatggcgacagagtgccgagccacaggcgcataccgctctactccaatccgcagtcatctacggtagtgaagctaccaaatgaattcgtcagcagtgagggtatcgttgttcagatagaaaagttgatggctgtgctagctgtgcatggaattcagtatgagcgaaaaggtaacgcctgccgcgccgccatgcttcaggctgaacctgtaagccaagcttacgagttgccagaaataatcgaaggcatggaggtgtccattgatgtcagcacttgtgatgctgatgccgggaatcgctatttcggtactgtcaccgaggtatcagaactggacacagcaaagaatggctacatccttctggttcaggatgcaaagccaaatttcgatgtgaatggcaactctccggcaattccggatgattgggttatggtgccaaaagaaccaactcaggccatgattaacgcgtggctatcagaggttgcgaactggcgcggtcatgtggccggttacaaggctgcgctggcggcagcaccacaacatgaggtgaagtga

SEQ ID NO: 388489 - DNA, 231 bp, Salmonella enterica
atgagtaatttagataacggagggtatgcattcccaattccgaatgcagattttcaaacgttcgcaccaagtacgattgaagaatataagcgagttcagtcaggaatgaccttgcgtgattacttcgctgctaaggcaatgcagtcacttattgcacgcggaggtgtgtttgacggcacagaagttcaggcatacaaaatagcagatgcaatgctcaaagcgcgcgaataa

SEQ ID NO: 388490 - DNA, 549 bp, Salmonella enterica
  misc_feature (77)..(97): n is a, c, g, or t
gtgagagcggatcgagagccgacctgtgcggtgccgacctgcgcggtgccgacctgcgcggtgccgacctgcgcggnnnnnnnnnnnnnnnnnnnnngcggtgccgacctgcgcggtgccgacctgcgcggtgccgacctgcgcgatgccgacctgtgcggtgccgacctgtgcggtgccaacctgcttgatgccaacctgcgcggtgccgacctgtgcggtgccgacctgtgcggtgccgacctgtgcggtgccgacctgcgcggtgccgacctgcgcggtgccgacctgcgcgatgccgacctgcctgatctaactttcgtaatcctgggtgagaaatacttcataagtataacgaacggtgaatatgtacgagcaggatgccagaaccacacagttgaggaatggcgtaaatacagtaagcatgaaattgctgagatggatggtcgtaaagctcttaaattttatccacgcttgctttcgataattgacttttacctcggtgctggagaatggcctgattgggttaaaaacgatggggaggagtga

SEQ ID NO: 388491 - DNA, 1047 bp, Salmonella enterica
atgatggataagggattaagtgtgatgaatacaatcacgattgatagcgtggatgcattagagggtgtttttcatcgcatccagtcgggtgaagagattctgatagaacagttaaaaattgagctattcgaatctgttaaatttaagattttcggtgatgaaacacgctacaatggtacgcttccggcatctttggctcaaggcatctgtgagtttcagaatgagatgtataaggtttatactctaattaagtataaaaccgataacttgcaaagactgggcgcacaggatagagaagatgcggagattgtattctctataaagccaggctgcacagagatcatcacagccctgaaagatttagctgaagcttgtggtaatgcatttgataaggtgacacaagggatgagcccaacccaaaaaacaacatgcttcttgttcgctgttgccctattcggtggggcatgggttggcacgtcttatctaaaatctgaggctgaaattgcagtaaagcaggaagaaacaaagcagcaagaagctaagataaaatcggagaacgaaaggcttaccattcttaaggatgggatgcttcaggccatgagatcaaatgctggagtagatactatcgaaagagcggagggtatccaagagcacgtttccaaggcatataccggagtgctcaaatcagtaagcgatgccgatagaattgaaattgatggtgcgacaaagctcaacctttctcaaaaagatgtgcatgaaataatcaaaaaccccatcgagaaggccaaaaaagaagagcgtaatctggagttagtgattgatagtatcaagcgtaccgcagaaaaaataacgttaagctgtcgcgaaccatccagtgaagagagctttccggtttcagttgacacttcgtttatagatgacaaagatgaaatcgctttattgtttgacgccatgaaagaaaacagaacagtaaagatattaggaagctacacgatacgagctggcgtaatcgaaaatggaaacgcatcaactatagctcgcccataa

SEQ ID NO: 388492 - DNA, 1881 bp, Salmonella enterica
atgacgccaagtgaacttagcgacctactttgggcgcaggttgacagggtggccccgcacctgttgccaaacggcaagaaagaggggcatgagtgggttgctggcaacgtcaacggcgacaaggggaacagccttaaggtcaaccttagcggcaagaaaaaatgggctgatttcgctgagggcgacggcggtgacatgcttgatttgtggatggcctgtcggggaataaatctgcatcaggctatgcaggaggcaaaggcatttctcggtatcaaggatgatgatcaccatttcgacgccagacgtgagaagaaattttccagacctgaccgcaagaaaatcgtccgttacgttaccagaacagaatcccatcttgagtacctgcaatcgcgtggcatatctccagaagtcgtaaagcggtacgaggttgtcagcggcaaggtgtggaatggagagcgagaactggatgctttggtgcttccgtacaaacgcgatggtgagttgttgcaggtcaagagaatcagcaccgaacgtccggacgggaagaaagtcatcatggcagaaggtgactgtgaaccctgtctgttcggatggcaggctctcgatgctggcgtgagggcggttgtgctttgcgaaggcgaaattgattgcatgagctatgcgcaatacggaattccggcgctatctgtcccgttcggtggcgggaaaggcgctaagcaacagtggattgagtttgaataccataacctcgacaggtttgaagaaatattcatttcgatggacggtgatgatgttggtcgtgaagctgcaagggaaatcgcaagccgactcggtgaacatcgctgccgtctggttacactgccgcacaaagatatcaacgaatgcctgatgaacggcgtcgctgaggatgaaatctggcagtacatcggtacagcgtcatatttcgaccccgaagagctttacagcgcccgtgagttttatcaggacaccatcaatgctttctacggcaagcagcagtatctgtttaacccaccgtgggaaacgctggcttacaacttccagttccgcgaggcggagttaactcttgtcaatggcgtgaacggtcatgggaaaacggaggttgtcgggcatatggcacttgaggccatgagacagggggtaaaaacatgcgtcgcctcgcttgaactgaagcccgggattctgcttaaacgcctgacacggcagtctacatgttgcaaaatgccaccagttctggaaatagaatcagcatttaagttttacgatgaccggctatggttatttggccttacaggtacagccaaggctgaacgcctgattgaaatcttcacatacgccagaagacgctacggcatccagttattcatcatcgacagcctcatgaagtgcggtattggcgatgacgattacaacgggcaaaaggcgtttgttgacgcgctgtgcgacttcaagaataaaaccaactctcacattatcctcgtcactcactccagaaagggagacagcgaggagaaacctaccggaaagatggacgtaaaaggctcaggagcgattacagacctgacagataacctgtttatcatctggcgcaataaagctcgcgagagagcgttacagcgcgttcaggctggcgaacaaattaacgagaaagaccagcaacttcttgctgcacccgcatctgttttaatgcttgagaagcagcgaaacggggaagggtgggaaggtggtgtgccgttatttcttgacgagcagtctcaccaattcctgcaaatggaaggtgcgtcaccatacaactacatagctaacatgcctaagtcggagtatgacgaagtgtggaggcaggagaatgttacggagtactaa

SEQ ID NO: 388493 - DNA, 438 bp, Salmonella enterica
atggattattcacagttatcagaccaagaaattaacgacatggtaattttacagcagttaaaaaatggtttttacacagatgacccgcaggaggtaagtaatcgtgattttgtaagggatggatggtgttggggtagaggaacgaaaacgggcttgcacaacaaagatggctctatatttgtgacgcatcagaacggttacagattggattattgccacaacgcgtcgatagcttggggaattattccgaagcacttgatatctttgtccccagattatgactttgagaatgaagacgaaataactctaatccattcaggtctttgggtggcagaaaaagtctacagcgacgggaaagcctttatccataagcatgccaatcctctccgcgccgccatgattgtctttctcatgatgcaggacgccaataatgcttag

SEQ ID NO: 388494 - DNA, 174 bp, Salmonella enterica
atgcttagtccatcccaatcccttcaataccagaaagaaagcgtcgagcgggctttaacgtgcgctaattgcggtcagaagctgcatgtgctggaagttcacgtgtgctccgattgctgcgcagagttaatggcagaccctaacggacaaatgctggaggaagatgatgagtga

SEQ ID NO: 388495 - DNA, 303 bp, Salmonella enterica
atgagtgagttacgcgcaggtggcatcgcaatagtcattttttcagaaaacaaacccgaaattggcagatgcgttgagttaatcgaaaaagtaacaaacggatatgtatttaattttcctggtgcaggtaagcatgggtggcgtgatgatgcccctgggtggttagttaaaggcgatgtatcgatttatacaaacaagccttcaggtggtttctcttatttttacagtgatgaactcatgccaatcgacggagaagacttctctcacgaagatgagcaacagaaggagctggcaaatggctaa

SEQ ID NO: 388496 - DNA, 180 bp, Salmonella enterica
atgaccgcaaccagcattaaccaggcgaaacagcagcgtgaacgtgacgaggctgaattacgcagcgtcagagagatgacggagcaacaccagaaggcaatggaatatctgcatgagcgagagcgcgaactggtgaaccggcttggattgaacaagacatcgggaggcgatgctgcatga

SEQ ID NO: 388497 - DNA, 1266 bp, Salmonella enterica
atgccaattcagattcacgtcaacacaaaggtaaacagccagaccatccgccgtgagatttataacgggcgagagcatgtcgttattccaagttacacgcttcctgccaacgtgattatgaacagagagttctatccagaggcagagataaccgcgaactatcaaagcatggaagggacaatagcaccgctaggtcatccaacagttgatgggaggaatgtttctgcattctcaccagaagggttatgcaccaatttcatcggagcgtggaatcgcaatgtgagcctgaaagggaatcgcgtttattcagaaaagtgggtagacgttgagagagcgatgcaatctccaggcggtcagcgtctgatggagcgtatttcgtctttggaaagcggtgattcatcggagcctatctggtcaagcgttgcagtgtaccgagagcagattcctgcaccagaagaactgaaaaagcagggtgctgattgggtagtaaagattcattcaattgatcatgacgcaattcttctcgacgaaccaccggcagccggaccagaaaagggcgtcggcctaatggtgaacgcagaccaggcaatatcgctacagcctaatagtggggcgttgattggcgagtcctaccgggagcgtgaacaacgccttgaccgtgcagccaaagcaaagttcgcaccaggtgaaaacgaatacgcctgggtagctgatttcactgactcgcaggcggtaatcgtcagaaacggcggaggcgctgaggtatttggctacaaatccgatggcggcgtaatcacattcgacgataccggaacggcagtcgcacgacaggaatcatgggtggctatcgtcgccaacaaattcaaatctcttttcacaccgcaggagcagcctgcaacaaaccacaaaacggagggcgacatgcctttaaccaaagaagaactggaacaactcggcagcatggttagcgaggccgttgccaccaataccgaaaaagcgatcaagcctctcgcagaaaaggtagatgcgttgcaggccaaccagcagcaattggctgaaactctgactgccaactcccgcgcagaagagaaagccaagcgtgaagcggtggcgaaagttcacggcgagatcgtggctaacgctctttcaggcgaagcactggatgcgatgtttaaaacaatcggtgaatccgcgccgctgggtaccaactctgcgcaacagcagaaagaaaccggtgcacctgccgcatctgaatacttcaaataa

SEQ ID NO: 388498 - DNA, 294 bp, Salmonella enterica
atggctaaatacgaagtagtgcgtccgtggttcggcgtaaaggtcggcgatgtggtggagttaaaagagcttcacccggcacttaagtcgaacgttcgcctgatgcgtggcgaagctggcggcgagctaagaccggcgacaccagatgctggaacagatgccaaatcgcgcaaagagattatcgcggcacgactgacggaactgggcattgagtttaaaggcaatctgggagctgaaaagctcagtgagctgttgccagatggcgaactcgaaaagcttttccctgctgaataa

SEQ ID NO: 388499 - DNA, 402 bp, Salmonella enterica
atgattaccacagaacaggccagggaatatctgaagtcagtcggtatcacgctgcctgatttcatcttagaggcgctagtagagcaagctaacagtattcaggaatgccttgatgctcattactctccggctacagcgctgctaattcagtcttacctgttgggcttaatggcgctggggcagggagacaaatacatcagctctcagacagcgcctaacggcgcatcgcggtcattccgttatcagtcttttgctgaccgatggaaggcctctctggggcttctaaggggactggataagtatggttgcgctaccagtctgattcctccagacccgacaaacaccgcttttgcaggcatctggattggccggggcggttgcatgtgcaacgggagtagatga

SEQ ID NO: 388500 - DNA, 2256 bp, Salmonella enterica
atgcctgagaacgtcggtgatattgaatatgtaattaaggctgatactgctcaactgctgcgcgcagataagcaggttacatctgtaaccaataacatggatactgggtttaagaaggctgataattctgcgtcaaagctgtctacgacaataagcaagctgtctgccgccatttctgttgcgttaattgttgagtgggggaagaagttccttgagcttgcggacaacatgacacaactccaggcaaggatagcaaggctttcaacggatgcctccacagcaaaagaaacgtttcagtcgttgacgcaaatatcgtcaaaaacaggcgccagtctgtcggatacaaccaaactgtgggaaacattgacatcgtctcttaaagaagctggcgcatcgaatgctcaggtattaaatcttaccgatacgctgcaaaaaattggtcgcataggcggaaactcgacagaagaaatgtcgaatgctcttcgccagtttggacagtcaattgcgtcaggcactgtcagagcagaagaatttaactcaatcctcgaacagatgcctgagttagcaagacagattgctgctggcatgggtattagcatgggtgagttgcgtcagcgaatgctcaatggaaagttgacagcgcaagatgctcttaatgctatacaggacagaacgacagttgttaacgaggaatttaataagcttccacgttcattatcacaagctaccggctctctcgaaacatcatttgcaaaacttgtctcctcaataaatgacgcaactggagcatcaagtgcagcagttactgtcattgatggattggcaaaatacatcgagttactcggagactcgtcaacatcaactgcagataaactatggtctctcgctggtgctatttcaaaacttaatcctggatatattggaaaacttttagctgacgggcttataggagatgaacctccaaaacaagtcgatgtattaagcgagaaaattgccaatcttaccggggatttaaaagggctttatgggcaggctgaaaaaacagcgcatgtggagatacctcagaccgataacaataagggaggaaaaggaggtggtgggaagtccactaagaaacaggctgatgaagcaacagagtctctcgccagacagcaagccgcactcgatcgcctgaacactggttacgccgatggctcgctcgaattagcgaaatacgatgctgttgttgcgcttggtaacaaagcatcagcagagcagatcatcaaagcggaacagcaagccgaatccatatggaagatacagcaggctacaaaagcggcggcggaagaagagcgtaaacgcaaacagtcacagcaaaacttcacaaatctacagggacaagcttcaccagtcgctgcggttgataatgcttttgctcagcagaaggcacagcttgatgagtacgcgcgcctttacccacaaaggattgctgaggctgaagctgttcgggccggaattgaagaacaataccgtcagaaacgcatggcggcaatgtgggagcaatggcagcagcaaagcgagattaatagcatgcttggcgcggctgttgattcccttcaaggtggcgcgactaatgcccttaccggtctcattagtggcacccagagtcttcaggaagcattcgccaacatcggcacgacaatcctcaatagtgttgtcggtagtctggtgcagatggggatagagtgggtcaagagtcagttaatgggtcaggccgctgctgctgcatcactggcatcgacgatggctcaggctaccgctgctgcatctgcatgggctccggccgcaatgagcgcttcaatcgcaaccatgggtagcgctgctgctgttggccagactgcatatgccggttcattgctggctgcaaaaggaatggcggtggcaggtgctcgctacaacggagggcctgtagatgcaggttctatgtaccgggtaggcgagcacggaaagcctgaaatatttcaggccagcaatggtagtcagtacatgataccgggtgataacgggcgggtgattagcaaccgagatatgcatggaagtggtagtggtggcagcagcgtagttcagcacatcaatttcgaaatccacactactggcggcatagacgatgcaacaaaggcgtggattgttaaatctatgaagcaggtagcactttaccagattaatgaccaggccaatcggccaaatggtatgatacagccgaggacaaaacggtaa

SEQ ID NO: 388501 - DNA, 399 bp, Salmonella enterica
atgctcgacaaaataagtcatctttcacctctgtttggtttactgtccccggtggtggggattgtgactttctttattggcagaaagctcggtaaacgtgacgcctaccgaaacgagcgcaacaaagccgccgaaccagtacatatcagcgtcttgtcgcatattgagaaaatttcacagcggataaacgtcagaatacccgtcacccaaaagcagattgatatcctctgctggcattcatcaactgctgatgcagaaaaaatccgcaatgcatggcgagagtacaaagatgttgagtctcaggctggtgatgaatatcagtccaaccctgaatttactggttatgaccatttcgttgacgccgccaggaaggtcgccgatcttgccgggaaacggtga

SEQ ID NO: 388502 - DNA, 924 bp, Salmonella enterica
gtgagtggtgagatttgccgtaacgaactggccgctggcgttcagttgcaggctggcgtaattgtcgatatcgccgctgcccagcgcctcaacgttgctggcgaccagcgtaccgccgttgatggtggtaccgccggtgtaagtattggctccggagagcgtgagcgcgtcgtcgccggatttcaccacctggccgctgccgctgatgacattgtcgaacgtgccgcctgtgttcagttccagcacggcgttgtcggtgacgtcgccacttcccagcgcctcaacgctagtggcgaccagcgtgccgccgctgatggtggtgccgccggtataagtattgctgccggagagcgtgagcgtgccgtcgccggatttttccaccttgccgctgccgctgatggcgttgtcaaaatcaccgccggtgttcagttccagcacggcgttatcggtgacgtcaccggtgcccagcgcgtttacatcgttggcgaccagcgtgccgctgctgataagggtgccgccggtgtaagaattggcgccggagagtgtgagcgtctcgtcgccggatttcaccacctggccgctgccgctgatggcgttgtcgaacgtgccgccggtgttcagttccagcgtggcgttgtcggtgacgtcgccgctgcccaatacatcaacgcgcccggcaatcaacgtaccgtcgctgatgagagtcccgccgctgtagctgttagccccggagagcgtcagcgcgccgtcgccggatttttccacctggccgctgccgctgatggcgttgtcaaacgtgccgccggtgttcagctccagcgtggcgttgtcggtgacgtcgccagtgcccagcgcctcaacgttgctggcgaccagcgtgccgtcgctgatgagcgtgccgccgctgtagctgttggcgcctga

SEQ ID NO: 388503 - DNA, 828 bp, Salmonella enterica
atgatcttcacggtctttggtcagtgcgtggtcggcgcgttaatcgttagcggactgggctggctgacggcaaaagacgataccatcgcccgtcagcgcatcgtgcgcagcatgttttttctgtggctggtgatgggactgggattcctcgcgtcgattatgcatctcggctcgccgatgcgcgcgtttaactcgcttaaccgcgtaggcgcttccgcactgagtaatgaaatcgccgcaggatcggtgttctttgccgtaggcggcatctggtggctggtggcggtactcggtaaaatgcccccggcgctgggtaaagtgtggctgctggtcagtatggcgctcggcgttgcattcatctgggcaatgacgctcgtttatcagatagataccgtgccaacctggtataatggctacaccacgctggcctttttcctcacggcattcctgtgcggcccggtgtttgcggcgttactgctacgcatcgcgcgcgtcccattttgcagcgtgacgtttgccagtattagcggcctggcattggtggtgtgcgtgacggtcatcgtactacaaggactgtctctctcaaccattcacagttccgtgcaacaggccagccatctcgcaccggattacggtatgctacaggtctggcgcattgtcttgcttgctgccggattaggctgctggctatgtccgctaatccgtcgccgcgaaccgcataccgttggtttgctgctcggtgtcgtgctggtgctggcaggcgaaattattggccgcggacttttttatggcctgcatatgaccgtaggtatggccgtcgcaggttaa

SEQ ID NO: 388504 - DNA, 348 bp, Salmonella enterica; identical to SEQ ID NO: 39110

SEQ ID NO: 388505 - DNA, 234 bp, Salmonella enterica; identical to SEQ ID NO: 113275

SEQ ID NO: 388506 - DNA, 1782 bp, Salmonella enterica
atgactagtctaaaaactagtattaagactatcacttatttaagtgatattggttgtctggagattcagggggccagtctaggcgtgggtaaaacctctatttcctgcgccacggcgatccgtctggcagaacaggggaaacgggtgctgctggtcagtaccgatccggcctcaaacgtaggccaggtgtttagccagacgattggcaataccattcaggcaatagcctctgttcctggattgtcggctcttgagattgatcctcaggctgctgcacaacagtaccgggccagaatcgttgaccctattaaaggcgtcctgcctgatgacgttgtttccagcatcaacgaacaactgtcaggtgcatgcacaacagagattgcggcttttgatgaatttaccggattactgacagatgcctctctgctgacgcggtttgaccatatcatttttgataccgcgccgacgggtcacaccattcgccttctgcagttgccgggcgcctggagtagctttattgacagcaatcccgagggcgcgtcctgtctcggcccaatggcggggctggaaaagcagcgtgaacagtatgcctatgctgttgaagcgttgtctgatccaaagcgtacccgactggtattagttgctcgtctgcaaaaatccacgttgcaggaagtcgcccggactcatctggaacttgccgccatcggccttaaaaatcagtacctggttattaatggcgttctgcccaaaactgaagcggcaaacgatacactggctgctgcaatatgggagcgtgaacaggaggcgctggccaatcttcccgctgatcttgcaggtttgccaactgacacattatttctccagccggtcaatatggtcggtgtgtctgcgctcagcaggcttctctccactcagcctgtagcgtcgccatcctcggatgaatacctgcaacagcggcctgatattccgtcactttctgcgttggttgatgatattgcccgtaatgaacatggcctgattatgctgatgggtaaaggtggcgtggggaaaaccacgatggctgctgccattgctgtcaggctggccgacatgggatttgatgtccatctgacaacatctgatcctgcggcgcatctcagcatgaccctgaacggtagccttaacaacctgcaggtcagcaggatcgatcctcacgaggaaacggaacgctatcgtcagcatgttcttgaaacaaagggaaaagaactggacgaagcgggaaaacgcctgctggaagaggacttacgctcaccttgcactgaggaaattgctgttttccaggccttttcacgggtgattcgtgaagcgggtaaacgtttcgtggtgatggatacggctccgaccggacacacgctgttgctgctggatgctacaggcgcgtaccaccgcgaaattgcgaagaaaatgggagaaaaaggccatttcaccacaccgatgatgctgcttcaggatccggagcgcactaaagtgttactggtcacgctgccggaaaccacgcccgtgcttgaagcggcaaatttacaggccgaccttgagcgtgcaggcattcacccctggggctggattatcaataacagcctttccattgcggatacccgttcgccactgcttcgtatgcgggcacaacaggaacttccgcagatagagagcgttaaacgccagcacgccagccgtgtcgctcttgttcccgtactggcgtcagaaccaaccggcatcgacaaactcaaacaacttgctgggtaa

SEQ ID NO: 388507 - DNA, 537 bp, Salmonella enterica; identical to SEQ ID NO: 39108

SEQ ID NO: 388508 - DNA, 813 bp, Salmonella enterica; identical to SEQ ID NO: 39107

SEQ ID NO: 388509 - DNA, 369 bp, Salmonella enterica; identical to SEQ ID NO: 39106

SEQ ID NO: 388510 - DNA, 546 bp, Salmonella enterica
atgagtgacataccagcattcaaccgctgtatgagcgtgttctggcggcagcatgaaggcgaattttctcgctttctgatatcgaagacaggtgatagcgaaaaagcagcagaccttctgcaagaccttttcctgcgtgcccgagcccattcagacattttttgtgagatggaaaatccgcgagcctggttgtatcgggtggcgaggaatctgctgattgatgagtaccgaaccaccagggagtttgttgagctggaagaagatgccctattaacagacgcatcccctgatgcaatctcaacgctggatatttgcctgcctgaaacattacaggctttacccgaagatgagcggtggttgattgaagagtccgaccttaaccggcgtccccagcagtccctggccgatgaatggggtatcacgcttacagcttttaaatcccgtttgctaagggccagaaagcacctgaaagagacgatgaaagaactctgccagattcaggtggatgacacttcccacgtctgctgccacaaaaaaatgaattaa

SEQ ID NO: 388511 - DNA, 618 bp, Salmonella enterica; identical to SEQ ID NO: 113251

SEQ ID NO: 388512 - DNA, 1557 bp, Salmonella enterica; identical to SEQ ID NO: 113252

SEQ ID NO: 388513 - DNA, 447 bp, Salmonella enterica; identical to SEQ ID NO: 17047

SEQ ID NO: 388514 - DNA, 1176 bp, Salmonella enterica
atgttaagagcaacaaaaatacgcatctatcctactcctgaacaggctgcatttctcaacgcccagttcggtgcggtacgttttgcgtacaacaaagctcttcacatcaaaaaacacgcttaccagagacacggagtaaatttaagtccgcgtaacgatctgaaaccgttgttgtctgtggccaaaaagtcccgtaaatatgcctggctcaaagaatttgactcaatggcattgcaacaggcggtaatcaatattgatgtggcattttccaacttttttaatccgaagctgaaagcgcggttcccgacgtttaaacgcaaacacggaaaacaatcgagctatcactgtgtcgggattaaggtgctggataatgccatcaaaatccccaaactggccccgatagaagcacgccttcatcgtgaacttcatggaaagctgaaaagcatcactgtcacccgttctgcaacggggaaatactacgcttccattctttgtgacgatggcgcttccgcaccagagaaacccacgtacctgaaggaagaaaagattacaggtctggatatgggactggagcactatgccatcacttctgatgctgtaaaagttccgaatcctcgccatctcatcaatgtaagtcgtaatctgcgacgcaaacaaaaagcattatcccgtaagcaaaagggaagcgcgaatcgtaaaaaggccagaatccgtcttgcggccttacacgaacgggtggcgaatgcccgtgctgattttcaacacaagctctctcgcgcgattgtcgacgaaaaccaagcggtaattgtggagacgctgaaaacagccaacatgatgaaaaaccacaatctggcaagagcgataggtgatgctggctggcacagcttcatcacaaagctggagtacaaggcagcgacaaaaggcgttcacctggtaaaactcgaccagtggtttgccagttcgaaaacgtgccattgttgtggttacaaaatgccggaaatgccacttcatatacgcatctggcgatgccctgagtgtggagcagagcacgaccgcgatatcaatgcggcactcaacatccggcaaaaaggaatactggaactaaaggcggcgggactcgtcgtctctgcccatggaggccagcgtaaatccgtcgcacagacggttgcggcctga

SEQ ID NO: 388515 - DNA, 1014 bp, Salmonella enterica
gtggcgggggatagcctgctgaaaggctcaaccctttactggcagtataaagatctcaagacggggaaaaactacagcatgtcggaaaacccgggtaactactacttacaactctgcctgacaacatcgcgcagcgggctgaatatcgcgctctcttccgacgcatggaacgccgataaatcggcggccgtggcgaaaaaaggcgaaacgataccgatgacggtaacggtgactaacgacgccgggcagccgcaggccggggtggccgtactgttgacgcgtgattacgcttattcgcgcggtgcggtggataagcaatacattgaaccaggcgtgattggcgagccggttccgtttacaacttcgccggcgaatatgatgctggcgccggttgcacctgcgggtacggcagtggcgtttaataaccagaatggcctcagcacaaaatggtctggcttcaccggcgatgacggtaagttgcggtttacgttaactcaggataaatcgctggggttaaaaacgtctgtcacggcggcgtttgcgaatcaatttgatgaggcggcgagcgtagatgcaatctttacggtacaaaccagcccggatacgccgtatgcgtcatactggggtcatatgccggataccgtgcaggtgaacggcgttacgctgcgccgcccgtacctgaaagccgagctctctgccgcgccccgggatacctggccgtttaataatgaattctgggggacgaactattattatcagtccgaacacgtggaaacgtcgttgacgcatctttgcggatcgcaggaaaatatagcctcgctggacgatctgaaagcgttgcagagcgttatcggcacgttgcaatggccgacgacatcatcctgggactatgtgtcgcaagatgaaggtcaaagcaataagtactactgttcatttaacgaaacgaccggccagacaacctgtactcgtgaaaaagcgacgacctcgggcttaggctcgtgccgggtgccgtag

SEQ ID NO: 388516 - DNA, 141 bp, Salmonella enterica; identical to SEQ ID NO: 386143

SEQ ID NO: 388517 - DNA, 846 bp, Salmonella enterica
atgaccactatcctgaaatgggcgggaaataaaaccgctatcatgccggaattgattaagcaccttcctgctggctcgcgactggttgaacctttcgcgggttcctgtgctgtgctgatggcgacagactatcctcattatcttgtcgcggatattaatccagacctgattaatctctatcaggtgattaagaatgatgttgaatacttcatcaaagagggcagatatctttttgaagcccgtaatgatccagaggcatattataagacgagacaggagtttaacttgcgccatggtggcgcaattgaacgcgcattgtatttcttatatttaaatcgccatggctatcgtggtctttgccgttataaccagaagggtgaatataacaatccatacggacattataaaaagccgtacttccctgaaaatgaaatacgcacatttgccgagaaggctaaacgtgcaacgtttatttgtgccagctttgaggaaacgctgtcgctgctgcaggctggtgatgttatttattgtgatccgccatacgatggcacatttagcggttatcacactgccggttttacagaggacgaccagtatcatctggcgtctattcttgagcgccggtcatcagaaggtcatccggttatcgtgtccaacagcgacacatccctgacacgctccctttatcgtaatttcacccgccaccgtatcaccgcaaagcgcagcatgggtgtggctgcgggtgatggtaaatctgcagccgaaatcatcgccacgaagccagtgtgctggtttggtgttgattttgccagaggtccagaccgtgccgttgaggtgcgcgtatga

SEQ ID NO: 388518 - DNA, 714 bp, Salmonella enterica
gtgtgctggctattcgcaaacgtatccagtatcccgtcaccattctgtttaaagccggtatcgttatcaccaatagcgatggaactaccgcccagtgtgttattagtattcacgccgaaggaagatgtctgtggcagggttaacttcccgctcatctcatcgccagttttctggactgcgcccgcagcttgctttgctgtttcgcctaaaccgaggtatgtgagaaggccggcgatatcttttccgcttaaattcgtcagtgtattgtccagcggttgctttccagccagagcgtttatcatcgtcgtggcaaagttcgggtcattccccagagccgctgccagctcgttcagcgtatccagtgctgcaggcgcagaatccaccattgccgcaatagacgatgccacaaattccgtgttcgcaatctgtttagtgctgttacccgccgctggcgtcggtacctttggaatccctgtgagtgtcgggctgtccttctgcgcatactgtgaatgcgggtccggcgcagcaagatgctttgccatcaggtcgtctacatataccttcagctccagcgccttatcatctacatatttacgggttgccagcactactgcagggtcaattttcagggtgatgttatcggtgctactggtaatcagtaccatgcgcacggtctgcgtacgtccgctcccttctgtcagctgcggcttgtag

SEQ ID NO: 388519 - DNA, 156 bp, Salmonella enterica
atgaatgtcagtcattattttctgatgatactgcaaaaattatgtacgatcctgaaggggttatctggggtgttgttaatcatccagtcccgcaacgtggaaacacatatgctgtatcaatgttgtggccggttaatatgtctgttgcggaaatag

SEQ ID NO: 388520 - DNA, 522 bp, Salmonella enterica
atggaacgctattactggataccacaggggggcgctgatcctgattacgtcatctgggcaaaggaaatcgcgggaataacccgtgcgtggacattccgccattataaggggaccggcaccgttggtgtgatggtggctaccagtaacccggtgaatccggctcctgacgacgatctcgttaaggctgtacgtgaccatattttgccgctggcacctgttgctggcggcggactctttgttttcgctgccactgaaaaaagcattccggtaacagtcgcactggccaaagataccccggaaattcgtactgccattattgcggagctaaatgcgctgatgctgcgtgatggcgcgccgtccggaaaaatttatgtttcgcgaatcagcgaggcgataagtctggcgaccggggaagtggcacatcagctgcgtgtgccggcggcagatgtggtgctgggaaaaactgaacttcctgtcctggggaatataacctgggccacctataccggggagaacggataa

SEQ ID NO: 388521 - DNA, 1110 bp, Salmonella enterica
atggaaaacacaaatattgttaccactgagcagcaggcaccaaacaccatttctgccagtaacgcaatttttaacgttcaggcactgggtcagttaacagctttcgctaacctgatggcagactcacaggtgacggtaccggcacaccttgcagggaaaccagccgactgtatggctatcgtcatgcaggctatgcaatggggcatgaacccttacgctgtggctcagaaaacacacctggttaacggtgttcttggttacgaggcacaactggtcaacgcagtaatcgcaagctccagtgccattcatggccgttttcattaccgctatgggggtgactgggagcgctgcaccaggacacaggaaatcacacgcgataaaaacggtaaaaatgggaagtacaccgtcactgagcgcgttcgtggctggacggatgaggacgagatcggcctgttcgttcaggttggtgccattctgcgaggtgaatctgaaatcacctggggagaacctctttacctctccggcgttgttacccgcaattctccgctatgggtttcaaaccctaaacagcaaattgcctatctgggcgttaaatattgggctcgcctgtactgcccggaagtgatcctcggcgtgtacagccctgatgaggttgagcaacgagaagaacgcgagattaaccctgctccagtccagcgcatgagcgtacaggaaatcaccagcgaggttagcaccaggaccagcgcgcaggagtcggcagctaacgttgatgctgttgccgacgatcttcgcgaacgcattgatacagcaagttccgttgatcaggcaaaagcaatccgtgcggatatcgaatcacagaaagcgttgctgggtactgcgctgttcaccgaattaaaaaacaaagcagtgaagcgctattaccaggtcgatgcacagaacaaagtcgaggcagtgatcaactcaattccaaaccctggcgaaccggaagccgcagagatgtttgctaaagctgaaagcacgcttggcgctgctaaacgtcatcttggcgacgaactgcacgataagtaccgcgtccccctggacgatatgaaaccggaatacatcggctaa

SEQ ID NO: 388522 - DNA, 441 bp, Salmonella enterica
atgacagccacgtttaatttatggggcgacgcaaacaggccaacagttattgaactggacgacgatcagggatggcatctgtacagccagcgaaatcctgacggttcgattgtctttacggtcaatggagatatcaccgctaacacgcttcgtgcaggcggggccatctatcagaataacggcgacatctttggttcgctatggggagatggctggttaagtacctggattaataataatctcgtcttagatgttcagttaggggctggcacatcagtgactacctggaacaatgcaggttcctggcctaacactcccggatatgtagttacctccgtctggaaagattatcagggcgaaaatattgatggtattaattatgcgcctttgcaaaaacgagtcgggagtcagtggtataccgtacaagggggaacggtataa

SEQ ID NO: 388523 - DNA, 405 bp, Salmonella enterica
atggcgttcgaccatgccctgcaaatagcgcagggtggcgtcgggaaccagcggcgcgatagccgtgagatcgtgtttaaccagcagcttgcgtacccaggaggcggatatcggcgtctcctggaagcaaagccgctctatttccaccagcgtaatgggtggggcgggaagcgttggcgtctccagccagaaacgcatatcaaggttgtactgggcggtaacggtgcaaaacggctccgtaccgacaaagcggtgtgtgatgccaagcgcgggcgccagatactggcggaaaatcttcaggtcgatttcggtataacagtgattaataacgctctgctctttaatgaaatagcaggggaacgtcgcacgagaaataatgtattcggagccgcggtgaacggttaa

SEQ ID NO: 388524 - DNA, 342 bp, Salmonella enterica
atggtgatagcgcaactgagcgactggcagctcgcctgtttgattttctgcgggctaaatacgctggtaggatatggcgccctggcggaagcgatggcgcgttggcaggcggcgcaggtgagcgcgataatcacgcttacaccgctatttaccctgctgttttcagatcttttatctatggcctggcccgatttcttcgccagaccgatgttaaaccttttaggttatctcggtgcgtttgtcgtggttgcgggcgcgatgtattccgccattggtcatcgtatttggggcggtttacgcaagcatgaaacggtggtttcgcaaccccgctcaggcgaatga

SEQ ID NO: 388525 - DNA, 183 bp, Salmonella enterica
atgcagcgttccggcgatgtcagcctgcgcgcccgcatccgtaagcgtggccggaatctcaagccagccaaagacgctaatcggtttaccatcggcggtggaaatcaggtagccgctaatgattatcgcaaagagcaggagatacaggagaagatgacccgcggcggcgccagcgcgcgttaa

SEQ ID NO: 388526 - DNA, 180 bp, Salmonella enterica
atgcgcgaacttaaccgaaggttcaaagacaaccgcggagtgccagtccgtgttatccgctgggagccagaaacacagcgcgttatctatctgcgtgatggctacccgcacgaatgtttcagcccacttgagcaattcaggcagaagttcagggagataacggacgatcatgagcactaa

SEQ ID NO: 388527 - DNA, 552 bp, Salmonella enterica
gtgggtaacgaacctaattggaaagtcgaacgtcagccttcctggctggtggtagcgattaaaaaaacgattaccgatctgcctggtggatatgcggaggcggcggaatggttgggggtgacagagaacgcattgtttaaccgccttcgtgttgacggcgaccagatcttcccactgggctgggcaatggttttacaacgtgctggtggttcaactcatatcgctgatgccgttgcgcgccattctcagggcgtatttgtaccgctggcagatattaatgatctggataacgccgatatcaaccagcgcctgatggagtccatcgaatggataggccgtcattctacttttgtacgcaaagccacggctgatggggtgattgacgcagatgagcgcgctcagattgaggaaaacagctatcaggttatcgcgaagttccaagagcacgtagcgcttctttatcgagttttttgtgtcgctgaaaagagtgacgcccgcgagtgtgcagctccgggcgccttggcgaacaactcttcgagtatggagaaataa

SEQ ID NO: 388528 - DNA, 246 bp, Salmonella enterica
atgacaaccgatgacattgaaaactacttcggcagtactgagaaagttgccgaattttttggaatcacaagcgaggccgtttaccagtggcgtaatagaactggtcgcctaatcccgaaaggacgtgcagcagaagcagcctatcggactggggggaaattggttttccatcccgacctttacgaaaagcgtagcgaagcttcagtaaaactcaaaccacaggaaaaaggaataaaccgtgggtaa

SEQ ID NO: 388529 - DNA, 627 bp, Salmonella enterica
atggaaactgtcggtcagcgcatcaaagctctcaggcgcgtaaccaaaacttcgcagaaagaactgggtaagttctgtggtgttagcgatgtggcggttgggtattgggaaaaagacattaatgtgccaggcggtgagtcactttcgaaacttgcaaagtatttcaatacttcaattgattacatactctatggcactgaattagaaggaaatctgataaccaagatgcgaaggattccggtgatatcttgggttcaggctggacagtttacagaatgtaaagcagcagaagttttcagtgaagtagataagtgggtagaaacatcactcaggataggtgatagctcctttgcattggaggtcaaaggtgattcgatgacaaaccctaatggtcttccgacaatccctgaaggggcaacagtcatagtggaccctgatgcagagccacttaatggaaagatagtcgtagccagacttgatgggacaaacgaggctactgtaaaaaaactagtcatcgatgggcctcaaaagttcttagttcccttaaatccacgctatccaaacatttcaataaacggtaattgcctgatcatcggagttgtcaaaggcgttcagtacgagctttaa

SEQ ID NO: 388530 - DNA, 963 bp, Salmonella enterica
atggaatacatattgattgacactataaaatctattcttccttttgcgctaataatattatttgccataactccccttgggcgaaaaataacatcttcattcataaatacctttctagacaagggaataaaagaaccagaaaaaattacgattaatgacgatgtaactgcaccaccaaaaaacagcgagattattgaattaattagagaggaaatagttaagatcagcgaagatcaaaacgagaatataaaaatagcaaaagaaaaaataaatcacgaagtaaacaaccaaatatcatcttatcttgatgataaaaataaaaacattaattgtattgtatcagagagaatcgaaagagaagtatctgccattgcagataaatacctagaaaactcagaaacatttgctaaaatcaatgaccaatataggctaaatcaaaagagacgtaataatgaaaatttaatgcggcatcttgattctgaatactactcatctcaacgtactaaacaactgatgagtaacttatttatcatgataaatttcatttatttcacggggcttctgttcttttttatgaaaacaatgattctgacctctacggaaattactgatagtcagatcccaacgaaattagcaatatcaatttcattggcctatcttggatttggagcatttattatttacatgataaaattttgcaatgcaagaacattaacaattcttagtcttaaagaagacatatcaaagaaagatgatgtaattgatatagtaaaagacatgatttccaaagatatatctgagaatcatgtggcaattttaaaactaataaattcaaattattctatgagggaacaagctacaaaacatccatatgaattgttgcttaatggtataaaggattcaaatattgtactaaaaaatggtaaatttgaactatcaaaaaacagttcaaagaataattaa

SEQ ID NO: 388531 - DNA, 801 bp, Salmonella enterica
atggcagattcaagttgggttgatgttggaagcttcttagcaagtgcttgctctgctgtagcggcttacctagctattaggcaaacaataaaccagagaaaaatatcaataaagcctcagttaataataaatgatgttgaaataagagaaaataaactaagtaaaaacaattacacttccagaccattagagaatgttggaacatctctccttggacccactataattaatgctggattaggatccgcactcaatgtaagagttgaatgggattatcctttggaagaaaaattattttggctaaaaaaaaacatcaatagaatatcaaaaaattttaatattttttatactgtgacaaaaggcagcaattcagaaatctatgatataacaggagggaatacaacggtaatctttaaaacaatactccatgatagctttaattatattctacctctaagcatcgaaaaaaagactgagagaataaaaatacccgtactaattatgaacacaatacttaatgaagttaatttcattatgttaacagacggtagaattaataaaaaaatatcaggtccatctttaaaaatttcgtatcacgatgttgaaggtaatgagtattcaataaaatatgaaagtagctttatcgtaagtgaggttataccaaatttatacagtaataactacataggcaccttatgcttcgaggtcataaatcaaagcaggacacctcatgtactacaaaggatacgcaaaagctacgcggattttattagcgagcatgatttcaataaaaacaaatag

SEQ ID NO: 388532 - DNA, 411 bp, Salmonella enterica
atgagtgattacaaattttggggctgggataagaagccgagaacaatgctgcgttttgtgaagcccggagacatattttgttttaaattagatgaagatagatattgttttgggcgaattataacactaatgactgtcggacatctttctgaattatttgatataattaaaaaatcccctggaataacagagttagaaattagtaatgcaaggcgaattattgaacatcaggttaattacaatccaaaaaatttagatggtatctattttgcacttggaataggtgattcctgtaaaaagaaagactgttacggaaatgattttctcatttcagaaagtgagtggaaaacacttcctaaattatctcctaaagggggttttgatatcaaaaaacggcttgaaattgcctga

SEQ ID NO: 388533 - DNA, 489 bp, Salmonella enterica
atgaaatttttgaaacggggtgtggcgctggcgttactggcggcgttcgcgctgacgactcagcctgcacaggcttacgaaaaagataaaacctataaaattactatcctgcataccaacgatcaccacggtcacttctggcgcagcgaatatggcgaatatggtctggcggcgcaaaaaacgctggtggacagtatccgtaaagaggtggcgcaagaggggggaagcgtcctgttgttatccggcggcgacattaataccggggtgccggaatccgatctccaggatgcggagcccgatttccgcgggatgaatctgattggctacgacgctatggccgtcggtaatcatgaatttgataacccgctcaccgtattgcgccagcaggaaaagtgggcgaagtttccctttctttccgccaatatttatcaaaaaagtaccggcgagcgtctgtttaagccgtgggctatttttacacgccagatataa

SEQ ID NO: 388534 - DNA, 2658 bp, Salmonella enterica
atggctcactataaaaaatttcgtctgagcacgcttgcggccgtggtgggtattgttctggctgtcggtccggaaaatagctatgcggaagcgcccattcaatttaatacccgatttcttgatgttaaagatgatgccagcctggatctctcccgtttttcccgtaaaggctacattatgccggggagctatcatctccaggtgctggtcaatcagagtcaaattgcccaggataatgttattacgtattccgttgataataacgatcctgataacacctatccctgtttatcgcctgaactggtatcgctgctggggttaaaacctgaaatagcagataaaatgatctggataaatgccggtcagtgtctgcaaccagatcaactggaagggatggaaacccaaacggatttaagccagtcaacgctgacggtgattattccgcaggcctatctggaatacagcgatgaagagtgggatccaccttcccgctgggatgaagggattcccggcgtattatttgactacaacgttaacagccagtggcgacatgctgaacatgatgacggcgatgagtatgacatcagcggcaacggcacggtgggtgccaacctcggcgcgtggcgtttgcgcgcggactggcaggctaactatcgtcacgaaaatgacagcgaagataaagacaactttggctccagttccgaacagaactgggactggaaccgctattacgcctggcgggcgatcccgcagctccgggcgcagctaacgctgggcgaaggatcgctggaatccgatattttcgacggctttaactatgttggcggcagccttatcaccgacgatcagatgttaccgcctaatctgcgcggctacgccccggatatatcaggcgtggcgcgcaccaacgccaaagtcaccgtgacccagcgcgggcgggtgatttatgagtcgcaggtcccggctgggccgtttcgcattcaggatattaatgaaacggtatccggcgatctacacgtcaaaattgaagaacaaagcggtcaggtgcaggaatatgacgtcagcaccgcctccattccgtttctgacccgtcccggccaggtgcgctacaagttggcagccgggcgaccgcaggactgggatcacaatatggaaggcggctttttcacctcagccgaagcctcctgggggatcgctaacggctggtcgctgtacggcggtgccatcggtgagcaggattatcaggcgctggcgttaggactggggcgcgatctggcgctgctgggcgcgttttccgtcgatgtcacccattcccgtgcgacgctgccagagggtagcgcctacggcgacggcaccattcagggtaactcgttccgtgccagctacgctaaagattttgatgatatagacagccgtctgacgtttgctggttatcgcttttccgaagaaaactacatgacgatggacgagtttatcgatacgcataatgacgataacgatcgtcagcgcaccggccacgataaagagatgtataccctgacgtacagccagaacttttcggcaataaacgtcaacgcctatatcaactacacccatcgcacctactggaatcaacctaaccaggacagctataacctgacgctgtcgcactatttcgatgtcggcgaggtgcgcgggatcagtctgtcggtgaacggttttcgcaacgaatatgacaatgagcgtgatgacggcgtgtacgtctcgctcagtattccgtggggcaacaaccgcacgctgagctacaacggctcctttagcgatgacaacaacagcaatcaggtcggctattacgagcgcattgacgatcgcaataactaccagatcaacgctggccgcgcggataacggcgcgactctcgacggctattaccgtcatcaagcgagctatgccgacattgacgtcagtgcgaactatcaggaaggcgactatacctccggcgggctgaacatccagggcggcgcgacgctgactgctaaaggcggggcgctgcaccgcaccagcgtcaacggcggctcgcggctgctggtggatgtcggcgatgaagcgaacgtacccatctccggctacagcacgccggtatataccaacgcgtttggtaaagccgtcattgtcgacgtcaacgactactaccgcaacctggtgaaaatcgacattacccagttgccggaagacgcggaagcaactctctccatcgctcaggcgaccctgacggaaggggcgatcggttatcgccgcatggaggtgctcagcggtaaaaaagccatggccagtatccgcctgcgcgatggcggcacgccgcccttcggcgcagaggtttacaacagccgccagcaacagttagggatcgtaggtgaagacggcagcgtttatctgatcggcattaatcccggcgagcggttgcaggtgacatgggaaggtaaaacgcagtgtgaagcggcgttgcccgatccgctgccgggcgatctgtttagcggcctgctgctgccgtgcatcggcgacgcttcatcacctgaggcaacgcagcccgaagagaaaccattactccagcttcatacgcagcggcggacgtcttcaacgcaacccgaagcgctctcttctcgttatccaacacattga

SEQ ID NO: 388535 - DNA, 1125 bp, Salmonella enterica
atgagtaatcttgatagtgttcaaaagcttacatgtattgaggggttctgtggtgctggtggaatgtcccttgggcttaagcaggccggttttgatatcaaattagcatttgatatcaatgaggatgctgtaaaaacttataataataatcttggagatcattgccttcaattagatgcttctgcaattagcggtaagtctcttttagaaaaagcggggataacttctaggttagacctttttagtggtggacctccatgccaggggttttctaaacaaagaaaaggtgctcatctattaaatgatgaaagaaataagttggttcttgaatattcaagactggtaaatgaattaaacccaagagcttttttgtttgaaaatgtcgagatttttggacagaaaagaggtcgggatttaatcgatgaaataaaagaaaagttattcaaatataacatcttcacctttttcatttgttcttcagattttggtgttgcccagaaaagagggcgttttattatgatcggaatagataagtctgagaatagtgactatccaaagctcgaaagaacagacagtgagcttactattaaagatgttataggtaatcttcctccgcccccagaagattatactgagcatagtgagatacctaatcatattaagtgtaaaataacaaagcttaatgaagaaaggttttctcatgttcctccaggcggtggatggaaagacattccacatgatttgagattaaaatgccatcaaaatgtggatactaactctggtggatggccagatgtatacgggcgccttgaatgggataagcaatgtccgacaattaccgcgggatttgatagtttcactagaggcaggtatgggcatccatctcaaaatagagccatcactcttagggagggggctatgttgcaaggattccctatcgactaccggttttacggtaagagggatgccataaggttgcaaattgggaatgctgttccgcctccagtagctaaagccgcaggaacagcaattattaaatgtcttaataatcagagccctgaaaacagtagttatcaaagccctattgagaactctaatgaggagcaaattgagctgttctcgtaa

SEQ ID NO: 388536 - DNA, 828 bp, Salmonella enterica
atgaatcttttgaatgagaatgcaaaatatgattattttggtccatttaaaggtaaaaaagagataggctactatgccttctttggcaataatgagatctccagacctatcagaaatgacttatatattagagatataaatatttataaggaattaagcaataatgtactcaccgacttaaaaaagattaacactgactgggactcagatacatcaaatgtagcaaataaagtcatatatacttcaattatgtcgatagcttgtgcttttgatttgtggaagaaaggtagcagaaaaacaccaggtacagtttttgaaatttatatcgcagcgctcttgaaagtaatgctccctaatgaaattttttcaaaacatatcccattgattgatcagataaattctgatgaagagcttacagatccagcaagtgtttctaccgatgtagtaattaaaagtggcgaaaatgtgaaccgaggagttgttatcccattgaaaataacaacaagagaaagaatcgttcaaccatttgcccagcaacgaatcttagattcatatttcggcaatggtgtttttaactctttcttggcatgtattagtgaaacacagcaagataaaatcaatcgaaaagtaaaccatatatgtgtaccgggaactatacggctgtatcaaaaatacctttcaaatgttgcaggaatgtattattgcgatatacctgaaagatatttacaggctgatttgaccgatattataccggtcaaatcaatgggtgaatttttgttagatataaataatttttttacgagaacagctcaatttgctcctcattag

SEQ ID NO: 388537 - DNA, 540 bp, Salmonella enterica
atgaggacggtattagataaagatgatttaaatgactctctggattatagctggactataaggatggggacccggttacttgttttatcatgggccttagaagcccatgagtttagctttgatataaaagacaggtttagagaaagcagagatacaataggggtttcattcgatgttaaattcaatagaaaagattttttactaacaattaaacattcatggaattatttatgtgagcgcgaatccattagtgatgagtcaaacattaaatttactgatattcaagtagaatttaatccttctgatataatttcgaaatcaagcgctgaggaaaattttcttactctatattttaaattatcacacattcttattaaagatttccccatgctaagtataagcatgttagatgataatagctttgatcctaataacccaacaataacactacacaacgcatatgtttatgaggaagatgatggcttatctataaatcttaaattaatatttgattgcctaaataaattatatacttggtaa

SEQ ID NO: 388538 - DNA, 345 bp, Salmonella enterica
atggatcagtatttcgacaatattcaaatatcagataaaggaatggtaaagttgattcgtaataacggaaaagattatatctttccagccagtaagatcattactgtccatcgggtaaaacctaatgatgatccaaactcatggattcccattgcaagggacctatgtaatatattaaatgtcgatgcttttcaggaaaccagaccctataccgtatgtgtcgaaacagatgaaggatacctctacgttaatattccatatactgaacagttatataaccgtttggataatgctcatgcctattcaactaacatagccaaagagaaatatggaacattcaaataa

SEQ ID NO: 388539 - DNA, 801 bp, Salmonella enterica
atgaaaaaattgattagtgggatagtattaataacaaatataacatactctggtttttcgctcgcaaatgaaaagtacgatttaaaatgtaccctcgatgatggtgagcagatgacggttagtcatgtcagcgatacggtttacattgcatttttggctcccggagatgatcctgatgaaggcggttcagtcattaaactcgatgtttcatcaggtagtgttaagcaggaattaacagaaccgggtatgaaatatccatattttactctaacagggactgatgaagagattgatggtaaagttattatcgattatagcactgacgaaaatatgaatgcttcagcttccttttcacatattgatggtaaaggaaattcggtttctaaaagttactgtaaatctaaaacaattgaaattagtggcaatctaactgaaaaaggcataattaatacaaagcctacaaataactcagctaataatatcgatagcatcaataaagcacaaccaaaagaaccgccatatgggttaacggttaatgcggagactattaaacaaggtgtctctgtcccatatggacgttggaaatatgaaatacgaagtaatgttgacgggctaaccgttaaaaacgtaacagttaatagaggaaaatgtaaagtcatttggtatactaatccaaataaccttaaatgggatgacaccactaattttggtgtaacgactgatgctcgtttttcgacatgtaagccacgggaagttgttattgaaacaaattatggcgtggaaacatttaaatggaaataa

SEQ ID NO: 388540 - DNA, 1692 bp, Salmonella enterica
atgaatgatatatatgaaacaattaataaaatagccaatgctaataaaaaaagagaaaaccaaagtggctatccggtcgacaaatttccgccggttatgagcgagttaattgatacgttacatgatgactcgcagatcccgatggagatcattggtaatgctgtactggcagccgcttcaatggcctgtcagtcacttgtagatttagagctttctcacaacactacccctgagttatgctctctctatttattgacgcttgctgagtcaggtgaagggaaaaccacaataaacaagcaagttatggctccattctacgagtttatggatgaactctatgcggattatgagcaccgtttatctaaatataagggagaagttgagttatggcgtatcaagaagaaagttcttgagcgtgaggtcagttcggcctacaagcatcctgatgaagaagaaggtgagagtgtagaagagaaagaaaagaaagtcagattgcacatagataatgaaccacaaaagcctaagcgattaactcttatctatgaagatacaacgctaaaggcacttaccgatgggatggatgtatgctcacacggaggacttatttccgatgaggcaatcatttttttcaagggctatacaaatgataagtttggtattttaaacaagggctgggaaggcggtgtatatgcacataaaagagctgatggtacagatactttaataaagccctgccttaccgtctctttaatgactcagccaagagtggcaaaggattatttcagaaaaggagaggggatagctaaagacgtaggtttccttgcccgctttttgttctccgaggctaaaagcacgattggcaatcgaactgataatactgatttcagccgttcccgtaagtgtcttaatatttttcatgacagaatcagagcattactttcccaacaaaaagaatatataaccagtaataaattttcgaaaaaaacattgaccttatcagcaaaggcactggcagtaaaaaaacaatttggaaatgaaattaatgataaaattggtttagagtcatctcatattaaagagattctttcaaaatcgggaactaatgcggcaaggattgcagccatatttcattgtttcaatgataacagtaataatgaaatatcgccagaacacatgactgatgcatgtgatatcatgagatggtacaatgaacaggccaaaaaattattttattttacatctgaagattatcagtttgaaatggatgtcaaagaaatttatttttggctcgaaaaaagattcatgcataataaatttattcctatcgagttcaatactctcaggcaatatgcaccaaataagttcaggagtactggcagactaaaggttatctttgaccaacttgttgcacagaatttggttgtctatgcccagactcgaccaggaggatgcgtctatatcttacctgtattgagccgtaatattatttctcaaagcggtaatttttattatacaaatccatcagattcagtcgccgcccagcaggcagttttattaagttctggcgtgtttgttccagcacaaccacaaccgggtactgaaaatactttattgaataaaccattcttccagtttaaaacctctagagatatacatggcagattaagaaatgtaaacataaatagccggtaa

SEQ ID NO: 388541 - DNA, 216 bp, Salmonella enterica
atggacacccggaataacaacactagtctgcttaacgataaaatggttgatatgaaatttatcactgaatttaccggattaacggataaatggttttacaagctgattagtgaagggcaatttcccaaaccagtaaaattaggtcgtagttcccgctggttgcagagtgaagtagagcactgggttcagaaacgtattgaacagtcacgaggttaa

SEQ ID NO: 388542 - DNA, 267 bp, Salmonella enterica
atgaaattagccaatgattttgcgatgcatcaacctgacgcaacacaactgaatgccctgtggcaagtattgcaaaacgctgaggttatagaagcagaaggagaagcagtgacatgtaagccattccggcactttcctgcgggtactgctgtcctcgatatctggctgtggtttgaatccgtagacgacacgttctccgtagctgcgaagctttataacactgaaatcgttctggcctgccacaacccgtcttttcccaaaaattga

SEQ ID NO: 388543 - DNA, 480 bp, Salmonella enterica
atgaaaactacgttaccccctcccgtagctgaaatgtcaccttacgcgcaacgtaccatcaggcgcgccctgaatattatccgtgaacatctgaacgaacccggagaagcgtttacctccagttgctcactacgggactggctacgcctgcacctggccctgctggagcgtgaagagttctcccttctctggctggataaccagaaccgcctgattactcacgaaacgctttttaaaggaaccatcaacagcaccgaaattcattcccgcgaagtcgtgaagtccggccttaaatataacgctgccgcagcaatactggcccataaccatccctcgggccatgccgaacccagcaaagcagaccggcaaatcactgagcatctgaaaactgcactcaacctcgtcgatattcgtctgctggaccatcttgttatcggtgggatggatattgtttcatttgctgaacggggctggttataa

SEQ ID NO: 388544 - DNA, 336 bp, Salmonella enterica
atgaaaatggataaagaaaccgacacagtacagtggggactcaaccgacctgattctcctcaatttagcgcacgcctggtacaagaaggcaaacgcctacattatttagctgaccgcgccgggataacaggcgctttcaatgaagaagagtgtcaccaactgaatgccgcatttccgcacttcgtaaaacaaatggagctgatgctgctctctggtgagcttaacccccgccatgcatatcgcgtaacgctgtaccacaacgaactgacctgtgaagcagatacgctcggtagctgtggctacgtttatatagcgatttatcccactcaacgctaa

SEQ ID NO: 388545 - DNA, 339 bp, Salmonella enterica
atgaaaatcctttctgcaaatcagcgggtggcgaagccatgcccgccgcctgtacttgtctggcaaacgctactgacacgcctgctggagcaacactatggcctgtcgctgaacgatacgccgttcagtgatgaaacggttattcaggagcatatcaacgccggtatcacgctggcggatgcagttaactttctggtggaaaagtacgaactggttcgtatcgatcgcagagggtttaactgtcaggaacagtcgccttaccttcgggcggttgatattttacgggcgcgacaggctactggtctgttgcggcaaaaccagcttccttcgacacgctga

SEQ ID NO: 388546 - DNA, 834 bp, Salmonella enterica
atgcaaacagaagctgaggttttaaccgatcataatgagctaatttgctcgaccagcattgagcgtatcgtcaccggacgcgatgctgcgctgaaacagattgaggagctgatttgtcagcttgatgacgtttcccgactcacttccgggatcggcggtgacatagcgagtcattgggcgatgcggcagggtcattctttcgactgctggctggtgcaacctgtagataaagcgatgccagtcatcacccgcaatatcgaccgcagcatctggcgcgatctgatgttgaagtcagggatgttgacgttgatggatgctgaggcgcgtagccagtgggctaagaacctggaagagggcgatctcccgacaatcagcgaagcgaatatcctgagtacctttgagcagcttcatcacaacaaacaggacgtgttcgagcgtggcattatcaatgtgttcaggggattaagctgggattacaaaaccaataaccccttttacttcggcaagaagattatcgttaacaatctggtgaagtacgataagtggggctacagcctgaactggggctggcggcgtgaccagttagccgatctggagcgcatgttgttcctgctggatggtaaaaccattcccgataaccggcacgatgtggctatccgactgatggatttcattcgcgataatccgcatcagcaggtttttgaggatgagctatttactattcgctattttcagaaggggagcggacatatcacgtttaagcgtatggatctggtagagaagatgaacgatatcatcgcgaagcactatccgggaatgctagctgctaagtga

SEQ ID NO: 388547 - DNA, 798 bp, Salmonella enterica
atgatacagaacaatatcaaacagcttcgtactcaactgtcgatcacccaacgcgagctggcgtttatggttggcaccagccagcagcaaattcagcgtatcgaaaccgggaaggttgctgcaaagctgggtcttgcacaggcaatatgcaatgccctggataagcctctaaatgtcgtgttcccggaaagcgatcggttgataaacgacttccgcaagaagcgtcgtaaaaccgatgaagatcttgaagcgatagccacaagcggcattgaaatggacagtggtctctggaccgtaaagctttggcttcagggacagcaggagtatttgtcgttgcccttttcagctgcggataagcggaggttttattattattttcaggaaacagctagcccgaatatagagcggttctttgtctttgactcggaccagtatcgctatgcgttaaatatgcgcgaagtagtatttcaccagttcttgtctgatggtctaccgccaatcattgctgaagaagatgatgattacgaagacgattattttaatgtccatatcaccttggtgaacggtggcccagtgattccgctgagcgttgagcctgatgcgccgcaaaacgaagaggcggatgatatcggtcagttgaatgcgttctttgaaaaactggactgcgagcctgaaaccacagatcgttatatgttaaccgacgaagatggagaagatgcttttatccgtattggttctattgccatggtgcgagtcgtacttgacgcgctggagcctgtggaagaagatgaagaatag

SEQ ID NO: 388548 - DNA, 150 bp, Salmonella enterica
atgatgaggaatcgggggctgtattataatcggcaccgttactataatccggggcagggaagatatattacgcaggatccgatagggtttatggagggattaaacccgtatcaacgaccactggaacgcttcagaaagcaggagatataa

SEQ ID NO: 388549 - DNA, 900 bp, Salmonella enterica
atgaaaatgaagaaaagtctcgtcgccctctgtttaaccgcagggctgttcgccagcgtgccgggtatcagcctggcggaagtgaactatgtaccgcaaaataccagcgccgcgcccgctattcctgctgctgcgctacaacaattaacctggacgcctgtagatcagtcaaaaacgcagtctacccaactggcgacgggcggccagcgccttgacgtcgccggcattaccggcccggtcgccgcttatagcgttccggcgaatatcggcgagctgacattaactctgaccagcgaggtcaataagcaagccagcgtttttgcgccaaacgtgttgattcttgaccaaaatatgacgccttcggcgttcttccccagcagttactttacttatcagcagccgggcgtcatgagcgcagaccggctggaaggcgtgatgcgcctgacgcctgcgttggggcagcagaaactctatgttctggtgtttacgaccgaaaaagatcttcagcaaaccactacgctgctcgatccggcaaaagcctatgccaaaggcgtcggtaactctatcccggatattcccgatccagttgctcgccataccactgacggcgtggtgaaactgaaggtgaaaaccaacagcagctccagcgtattggtcgggccgttgtttggctcgtccggtaccgggccggtaacggtaggcaataccgccgcgccagtcgcgccgaagaaaagcgagccgatgttgaacgatacggaaagctactttaataaagcgattaaggatgccgtagcgaaaggcgacgtcgataaagcgctgaaactgcttgatgaggccgaacgtctgggatcgacatctgcccgttccacctttatcagcagtgtaaaaggcaaggggtaa

SEQ ID NO: 388550 - DNA, 480 bp, Salmonella enterica
atggagttagcatttaaatgtataagaagaagattagatcaagataatacggtcaaaacacttattaagttaacacaaaatcagttggattttatagataatcatatatctaaaaactcaagatctcttgctgtttctcagttgagtaaatgggcaatagaaaaacttgttagtgaaagtaaggttttaaatatctcattcttagaagatggttatcattttacagaaaacgatattgaagtaggtagcctacatattgtatcgcttgataaaagttttaaaccagaaagtaaatatgtatcaatagtagcgagtaaagaagtaatagatatattaaaagaaaaaacaggaaacattgctttaagtaaagctctaccagcattaaccatttatgctttgaatgagcttatagctaaaaaggaaatgtatgtttatgacagcgtaaataacatcaatcaaataattaaacaaaggagttaa

SEQ ID NO: 388551 - DNA, 504 bp, Salmonella enterica
atgaatagtattacaatagaagaaaaagatttaaattctggagtgtttgttattaatcaggctaagtttaaaaacaaaacagcatacacttgtattagaatgacagacgatattaagagcttactgaaacagaaatgttctggcgctttagatattgcaattattggattattaaatcatggtttaaacaaactaaaagagcaaaacaaagcaatagaaataaaaaacattaatggaaatatacattttattgaacatgataaaacaaatggtaattcttttataaatgtcaaagcaaagatacaaagggaaagcagcaaatcatttagtattagaatggataaagatttaaaagaaaggttaaaagaagcttcaggcaatatctcttatagtgttggtatattgggcgttattaaatattcattatttatgcttgagaaaaacaacaaagcgttaataattaaaaacactgatactaatattgacaattcttattttatataa

SEQ ID NO: 388552 - DNA, 2211 bp, Salmonella enterica
atgaataaaataaagatgcttgtttttagcattttatttactgtgctgtattcggcacaagcacaagcggcaaactattatagtttgactggagataaaaactttgtgctaaatgcttttgataaatattttaatccatcaattgtagggataatcggaacttttttagatttttatgggccaatatgtttaatggtagctgctattattgctgcctacattttgattgttggaaccgtgacaaccgctcatgaaggtgagatgttaggtaaaaaatggtcatcattatgggttccgatacgtgctccgttagctgttagcttgctattgccagttagtaatggatgggctgttattcagcttatagttatggcattagctgttcaaggtacagaatggggggatgcaggatggaagaaaatagccccttctttaataactgacagcacttatatatccgtgacaaataaaacagctattcgccaactcgtagttaataccttgtattctgctgcttgtgtgaaaatcaataatgatgtagcaactaaggctttacaaaaatctggtgtgaagttatacggatttatggatgccgctaattttaaatctgattcaggttccaataaaatgattggttataccttcggctatccagatggaaacgcattttcaggttataaagcagataaatgcggaagtacaaaaatgaagcttcttaatgaagataaaatgccagatccgggttcattattaataaacacgaacgggatagcgatgaatgtccaaaaagctcagatagctgctaatgctgctttagtatcaggtgctatggcatatgctgaagctaacttgaaagacaggtctaagactattgatgttgaaacattaaacaaacacattgatcttatgactaatgcttatgctcaaattgttcaaactgctgctgaagctgctatgaaagatgctgttaatcaatcacaggttgacaagttaacagaagctggatggacttatagttatgcgttttatatgagaataacaacggctgcgtcttctgctaatgctgctttaaataactttcccatttcctcagcaacattgaaagaagaagattttaaatacaatacatggggtgaggtttacagtagacttgataaagtaagaacgttattgaatgctactaataaactcaattctaacctttctgatgaaggtgataatgatggattatatcaaaaagccatagggattatcggaggcaatttaggcgtattcggaactcaaaaagctgatacagcaagcttgatgcctttaaccgtttcggcaaacatcggtgagcatgttatatatggcgtagatgctatgttagcggctttaactgtaggttctatgttaggtagccttcctgtcattggtggtggtatacaagcggttgttggtcttctatctggaacattgacatctttcttcgttccattattgatagtaggaaacatgttagcacatgttatgcctatgatgccttatatcattggtttcggttgtgttataggttatttcgttcttgttcttgaagctttatgcggtgctccacttctagtagtagcttcaataacacctgatcaggatggtgtagttggtaaacaaggacaaggttatatgttgcttttatccttattgcttagacctgccttaaacgtggctggctatgcggcttcatttgtagcgatgaatatcagttttgaatatataaatagtacgttctttgctgctgcgagtgatgtagaaggaggattcttaggtattcaaaaaggtataaccatgattgttatatattgtgtattaacgctttcagctacattagcatgttgtaagttaatgcatttattacctgacactatctttaaatggataggtggggcttcttcaactgttcttggtatgttatctactcatgctgaatcaggtatgttaaaagcacaggctgctgttggggcaagtatgcaaatggcaacggctggtcaaagtggaatgctcaatacggctaaaagctttggtcaaactttaggtgatagattaaaaccacagcctaataatactgctactaatggagataatggtgaaggttcaggtgaaagtgaagaaaaatcagaatcatcaaataataaacctaaagataccagcgtagatctacaggacttcaacaaataa

SEQ ID NO: 388553 - DNA, 567 bp, Salmonella enterica; identical to SEQ ID NO: 248139

SEQ ID NO: 388554 - DNA, 294 bp, Salmonella enterica
atgttaaacttatatattgattcattactgaacttatcaacagtgttctacggtattccgttgttagtcctttcggcgttaactacggtggttttaggtttcgcggtgttttatccgcttggtaaaatgatgaacactaacgcttataaaagctttccagtgtttcatatgatgcctgtaaacaactatgcctttaagttgattgtaggttttccagtgagtatggttgtattcttaacgttgggtatcactattctttctttcgtcaacgttctgattaaaatattcatgtaa

SEQ ID NO: 388555 - DNA, 1149 bp, Salmonella enterica
atgaatgaacaatttttagataagttcgatagagctttcattgctgatcctaccgaagcattaaaggccgttgacgacatggccacatctctaatgtcagagatagaacagaagaggaaagccggtgttaaagagttagatcccgttatggtaaggctacaggaagaccatgcttatctctccgggctacatgaagaaaagagcgaagagctggcattacatcagcgcctacataagcaagctggcatcgagatagacaatccctttaaacagctcacagaagaggctccagccgtctttaatgagtttgatatacaagaagacgttgccccggctccagctcctgtagctccctctcttatgacgaacgacgacatagcaaagttggctaaggccgtcagtgataagcagactcctgcagctccagtagaaccggaaggaatggacatatcccaattcaagccagaacctaagccactggatctttcaggacttgatacgttcaccatgcgtaaagcagaagaggcaaaacagaaagctaaaccaaaagtggatactgacgaactggataactttagtaatcgctatgcggggaatagttttattgaaaaagtgacaaaaaaactacaggagacattttcagcatcttctcatgctcctgttaactttgtaccagaacatgagataaaggctatgtttggtaattctctttctaaaatagttaataacaccaatagtagaagcattcattttgttgataaatctgttcttaaagaagatgcgcagggattatcaattgccacaaaggatagaaccttagccgcaagaagattaactctaatggctaaggctaaaggatggagcagcattagttttgatggtaatcagcttttccttgaagaagcatatgaagaagcaacaagagcgggtttggtagtaaagccatcatcagaagaacaagccagatttttcaaagaagttcatgaagcgaaaaagttagatagttttatgccttttggcggtatgaaggaaagcaaaaaaaaggatatagataaagatattgaaaatcccggacatagccatgaacaagcccctgttcctgttcaagcccctgtctacaacgcaagaataccaacaagaatgaaataa

SEQ ID NO: 388556 - DNA, 675 bp, Salmonella enterica
atgaatatgaataataaccttgatttatcatctcttagagaagaactggaaaagcagaaaaaagagcgtgaaagactgattactgaaaatgctctggcagaagtaaaacatcaagcagcattggaagaaggagaaggggagcaatccccttcctcagaagattcctcagaagaggctcaggccgtttctgttgacgctgttcctgatgatgtgttgatgggtagcggaagcctgaataaagctattctgtggcgttgtgcgcgtgatttcttccaacctaacattaagctgataaaacagtatcaattcccacatgtagttattgaagagtctaaagattgttatgttatctactcttctgatgtagagcttgctgtaagcacgctttacgctcattttgattatgagatagcagcttttggtgtctgtaaagttgaaagcgataatcaagagtatgtggaagaaataatatatcagggtgttttaagaggttttagtatttttccttccatgttagaacatgaaaaagttgaacaacaaaaatccacccttttagctttaaaaagaattaagcgtgaaagagatgaagaaaccgggatcatgaaagaaagtattaatactttcctgatggattggttaaataaatcggaaaaagggttgaggttgtcaacctaa

SEQ ID NO: 388557 - DNA, 2079 bp, Salmonella enterica
atgaatgaaaaagataatgttttacagttaacgccaaaagattttaaaagagctttacaggctcaggataatccgtggcgtgaaacagatgaatactcaataggtgcggaaggtatttttattcgcactgtaaagacttataaaaatggcgttgaagatgttaaatgggttcagattcatcctttccctttaatgccaattgaaagtgttgatatgctggattctgatattcaggaatcagtatttgatgaagaaaatcaggtttcatctaaagacacaaaaacttatactaaagttcgtttcttagatctaaatggtcaggaaagatttgtcaaaatccctcagtctgaactatctcaaatcagtaaacagtctttgttagctaaacgctggcctttacccccggctaacaaaatgtcaaaggttgctgacataatgttaaaggtgctggctgatgggcgtagaacggttgtttctcctgcgggtgttgaatacgaaccatgtataaaaatcacttctggatctgataactgcggatgggttaatggagaacacattaaaccgggccaccctcgttatgttggtgatgaagaatgtatgacattcaaggcaggtaaagcagagattcagattgatattttaggccagtggtacgcgcaagatgaacagttagctttaatcgccgctcatcaacttgttggttataccttcggtaatatattttctccttccgtaagtcttattattgagttaacaggtgatccgggcgatggtaagtcagtgcgattaatcgcccaatcgtcttatgaaggtataccgatcaaaggtcataatatcctttattttgacgctacagcctctatcgcaggtatggagcgtttattcccgcttttaaacagcggaagcgtacttttagatgagtttgataaaatcgtaaataacaaaggggcaaatgttgccaccgaaatgatttttatgatttgtaatggtactcagcgtgttttagcagaagctaacgacaataaaaaagcgagaaaaatcaagaagtggtcttttgcgcctgttgtagcttccaataaacctattgtagaacgtcttaatggtcatgaagatattatggctatcaaagatcgtatatggactattcacacttctgatgaagagatttcaggcttcaaaggtgatctttctatcgttaacgtctggagaagacttttagaagaaaattatggtcatatttatggtatagctattgattatatcaaaaataaccgtattgctcttatcaaacgattcgaagatttgagaaatgaactttatataaaagaatatggtgaacattacagtaaagatatgcgtgatgctgaaatgattgcctctcttcaattgggcgctgatttagtttctgaaattttcggtgaagaggctggtttatccgctcatagagctgtagacgttttaaaaagaagaatggcaaataccacgtttaacgcggataataactacaaaattgttattgaaagatttaaagaatggattgctgataacatcggttctattcgtattgatggttttgcttacacaggctcttatggtagaaacagtgaagaacaacagttagatcaggctgaacgccttactaacaacgctatcatgtctaacagaggtgctatagctggacttgagcaatcaagacctatgcagcatagaactgattttgaagggtgcatctggttaaaaccagaagcagaagcaagcttaaagaaatctggtatagcaattgatgaacttatgaaagcagcaaaagaacttgatttgttgcctaaagttcagaaaggcaaaaagaaaggtcagtacatagttaaacacaaagttagcgatcagaaacaagaatggttaaataataaaaaaacctacgctattaagatatttctttatccattccctgaagaagaggatgaagttaataatgaatttgaggatgaagtgttttattcaaacgttgatcgtgaggatatagattcacttgttgaacaaaacattaatgctcatatgttcgatttacctaaaattgattaa

SEQ ID NO: 388558 - DNA, 282 bp, Salmonella enterica
atgtcatatacatataaagtcataaataatagcctcttctttattgaagaggaaagtaataagcagtatgaagtaaacgttataccacaaggaattggaaataatctgtttcaggtttctattcctgatttaagcccgcgcactttagaagcaaacaatgctaaagagctttttaatcaggttgttgatatagataatgtaagacgtagttttagacgacagacaccagaagagtttaaatctaagttccaaaaaatgaaaaagaaagcttgtccagaataa

SEQ ID NO: 388559 - DNA, 489 bp, Salmonella enterica
atgaatagcattaatgaattattattaatttacggttcaaatataacaaaaatcaaagaacttgttttagcaggggctaatgttaactacgtttcgcccgaaggtttaacgcctttatcctgtgctgaatctgttgaagtagctcagtttcttcttagccgtggcgctgatgtgaacgctaccaatgaagacgggaaaacagccttgttcagcgttagcaacgttgatacttgccgcttcctgatagagaacggcgcaagggtaaatcatgttaacaacaaacatgaaacagccttgttctatacaacggatatgaaaaaaatcagattactggttgaagcaggatgtgatccattggtaagaagttatgatggtaagcgccattacgatttgttggcacataatcagaaagtgagttttattaacttcttggctaaccgaaaaaagaaaatggaaactgttaactcacctttagctcttgccttttaa

SEQ ID NO: 388560 - DNA, 465 bp, Salmonella enterica
atggaaagacaacaaacaaaactttattttgccatatggaaattgaaaggcaatgaaaaactacaggccattaaatattttattagttgtggtgaagatattcatgaaagagacaaaaacgagttaacaccattacatcaggccgtgggctgtggtgatgttgaggccgtgaagcttttgttagggttaggggcaaatcccaatgctatagacatatacggaagaacgccgctgttctataccgctttcagccctaagtacaatggtcgtcagttagatgaagctctcatagcggggaatgctgataccaccatttacgatgttaacgggcatacacgcgatcagttcgtgtatagcttcaaaagctcgatgttctaccgtcctgaaccagaagcagtagaagaacaaccggaagaggtagccccttcagctcctgtgaaaagggcaggaagacgtaaagcatga

SEQ ID NO: 388561 - DNA, 393 bp, Salmonella enterica
atgcaatatcatgaaatagtaagagatgagattatgagttttattattgaaaatgttgaaggttttaatgttttagaaaagatttatccgaaaatgatagatacaaaacatcctgaatatcctgagataacaaagatcccattctttgagatagagtttaggaaaggacttacattagccaatacttataataacattgatgaagaatacataaaccaaagaacgttaaactatgctatcaacttatgttttaacagtgaaatgagttttaagtatagtcatgacgatacattaagagagtctttttcgtgcgcttattattgcataatggaaaacatgtatagaacgttatcggaaaaagaaagaggcaacgtgttatggtggattgattga

SEQ ID NO: 388562 - DNA, 312 bp, Salmonella enterica
atgattaacaaaatcaaaaaaaccttaaatagaataactataggtaaggtatttatagcaggtctattaatgctacctatgacactgatattccctgaaagcattatatgtgaatacgtgtcggcattaggttcagcaattacattcgcaacaataacttttaaattagcattgttcttcatttggtttattcatctcacttttttaatgagcatgagaggaacaacagagagagcagaaatatatatatctgacttgaaatctgaacacttaaaaagtgggaaagaaatgtttttagggaggtcaaaatga

SEQ ID NO: 388563 - DNA, 456 bp, Salmonella enterica
atgataaataaactaaaagcatcctcaaaggacgcacaaaaaaaacatatggaagaagatagatttaatgtattgttagggctatttataatgtcagtttcatttttaacacttcaatttatacctgaaatatttatcatgttaactttcttagtgggtacaggtataacattattaggaataatgccgataataatgcgtgttatccataaggtgttaaaaacactgtgggattcaaaatggtatgtgagcattacgataccagcgttttttatgagcttaattttatctgtagtttcattaatagatgtgaatatcccattgttatatgtttttgctaagtttgtttttatgtttggtattatttggctttcattatatttgattattaaagttgctgtgattattcacattgaagaagaaaaaggggagagcataagtgaaaaaaagaactaa

SEQ ID NO: 388564 - DNA, 129 bp, Salmonella enterica
atgggagaacaaacaagagaaaaggaagctgaaacatgggctgaatttataagagagtttttaaaagaaggtggtgttatttatggaagtcaagaaaaacaaaaaagagaggtggtatatgacaaataa

SEQ ID NO: 388565 - DNA, 249 bp, Salmonella enterica
atggaagtcaagaaaaacaaaaaagagaggtggtatatgacaaataagaaaaaatcatattcttggacacgcagaattttaatatttttggcattaatttcaatagcaggtgtggcgggtatatcatttggggttgtaagtgaaaaaacacttccgttgttttgttcatttattattttatggcatatattcgatatttttgatttctataacattatatttggatctaaatacgataagcaagaataa

SEQ ID NO: 388566 - DNA, 357 bp, Salmonella enterica
atgatgagtaaagttataaacataataaaagaatattcagatgaagagagtaaaagaggaaaggcattacaaaaactttcatgggaagcatgtaaaattggtatttatgttttttcttatggttttttacaggttcttttatctgactggatagggattagggacgataaagaagtaatgctgaaattgtattatatcatgttctcaggtggttttttattttacgcagcggcaatgatgccgtgggtattccatcacaagaaaaacatatttaatctttgttctactacattcaaattatcgacaatagaaaaagaagtaaaagaagaaatcaatcaaaataacaaaggagaatga

SEQ ID NO: 388567 - DNA, 339 bp, Salmonella enterica
gtggcggtagccgagcaggttctggccgcgcagcagcatctgcagcggggttttgggcatggcttttttgagttcgcgcaggcgcagccacgggtcctcgccgaggaaacggatgcaggcgtcaaaggtggcgccgccccagcattcgagggagccgtagcccacgtcgtcgagctgggcggcaatcggcagcatatcgtcaagacgcaggcgggtggcgaacagggactggtgggcgtcacgcaggacgacgtcggtaatggcaatagtcatggatccctccgggaattaagcgttaaggcggtgatggtgaatggcggcggcaatcaccggctttaa

SEQ ID NO: 388568 - DNA, 2637 bp, Salmonella enterica
atggcgaagaaaccgaagtcagtcggcagtgagaagctactgtttaacaggctgaagcagttcgatgaaccaggactgttccacgataactatcagacgccggactatattcaggaaaacctgaaagatgccctgcgcccctatcagcacggtgcactgcgttacctgcattacacgcaacgtaaacgggatgatgcgctgctgcattatcgccacctgctgtttcacatggcaaccggtgcagggaaaacgatggtgatggcaggaacgatactttatctgtttaaagagttagggtatcagaacttcattttcttcgtgcatacagacgcgattatccagaaaacgcgagagaacttgcttaatccgcaatcgccgaagtacctgttcagtcaggagctggaaatcgacggggaaaaaatcaccatcgaaccgatagaaacattcccgtccataccggaacgtaacacgatttacctcaagctctctactatccataagatgcacgacgagctgaacagctatcgtgagaacagtatcacctacgaggatttaaaagaaatcccccttgtgctgcttggtgacgaggcacatcatttcaacgccggtactaaagctagaggcaagtcgaaaacctcaccggagaacgaggagcagacctgggaacgcacgattgagaacatcctcaacctgcgaccggataaccgcctgttcgagttcaccgccaccattgaccttgcgaacaaagatatcgggcagaaataccgtggtaaggtggtgtatcagtatgacctgaaacagttcatgtcagacggttactcgaagaaagtcatgctgctggaagccaaccagaatgacagcgacaagatgcttgatgcggtacttttaagccagtaccgtaaactgacggcagcagatcacggcatcaccggcttcaaaccggtcattctgttcaagtcgaataagattgcgatatcaaaggcgaagcaggaggagttttcgcaactgatagccgccatgacacctgagagcgtcagacgtcatctagctaacaaaaaactccagctcagctctgacaccagtatctggcataaagtgattcagcgttacgctaacagtgatttagtgacggtgactgggcaaattcaggaggactttaacgactttaacctgctgaacgtcaacaagtcagatctgctggaagagaatcccgtcctgctgaatacactagaagaagtcgataatccggtgagagccgtctttgccgtcgcgaaggtgaatgaaggctgggacgttctcaacctctacgatattgtccgcatcagcgagcaggcgagcagcagcaaaaccagcacggacagcgaagcgcagcttatcgggcgaggcgcgcgttactacccgttcatttatgacggtcaacgaagcttcacccgccgttttgataacagtacgaaggatttgagcgtactggagcaactgcactatcacaccatcaatgaaccggcgtacatcaaaacactgcatgcctctttggagcaggcggacattgatgtgcatcaggatggcggcggtacgattgaacacgccagactgaaagaagattttaaaaagtccgccgtgtatcaggcgggtaagctgtacttcaacgaagtggaggagattgagagcagcagcagaaactgggaaacctactcgctggaaacacgctttgagataccgtatcagaccgtctgcgaggagtcgctggacaacctgacaggcacaaagactggaatcacaaaaccggaactactggtactggacgagcgtttttaccgcaaggcgatgcaaaggatcagcttttacgcacttgataacctgcagcgtttcttcccgaaactgacaggcatccgtgagttcatccgcagtgacgcctatcttggtaagctgaaaattacagtcatcgtaccgcagtcactggatttcaccaccgtaccggcaaaagataagctgcacctactggaaaccgttctgctgcgtatctcagagaacgttcgccgcaatgatcagaaggtaaaaggcacgtaccgctttatcagccagccggtgaaagaggttattaaagattacagtttgcacattgacccgtcggtagttattaatcagaaaatcactgctgcacccaccattggtaaaaaatggtacgtgtacgataatgcgatactgaatcagcttgagcatcgcctaattaaaacgctggaagcattcatgccgaagctaaaagcgcgttatgacgatatttacgtactgcgtaacgacgagcagtcaacgcgctttaagctcacggagttcggcggcgtgcgcgggtttatgccagatttcatcatgatactgacgcgccattcggacaacacttactggcaggtgttccttgaaccgaagggggatgatcgtttgctggatgacgcatggaaagaacggatgctcgaaaccctgaatgatagggagcgcattgtaattgatgaaaatgagcacgtcagactggttgggattaaattctttgccaacagccagatggacgtttttgtcagcgacatgcagaacaagctgaatgatggagaatcgctcgaaacctcctcgctttccctaccactgtaa

SEQ ID NO: 388569 - DNA, 1983 bp, Salmonella enterica
atgcagaccgaattaataaaagaacttaacaaggttttaaaagcattcccgcaattctggaacggagaggaattacaacgttcaatggtgagtgacgctatcagtcaaaagcagccagaccttatcaaggcattggtcgataatgaaaaagtccgctctgtttatggtgcggatattgatggcatttttatctttgactttgacaaattatgtggtcttctaaaatacaaagaatattgggctaatagcttcactaaataccggaacaaagtgggattaactagcgaaggtaaataccttgattacagttctgatgtggtgctggattttcctttcaaggattgtgttcttgaaggtggtatgtcgaaagaagatcaaggaaaatcagaggtttactataatgaaatcatcgcgcgagatgaaatagatcatttgttctcaccgaaagttctcaaagaagtaaatcgttactctaaagaaggagtaaaaaaagaaagaatatttaaccgtaatgataatttaattatcagaggaaataacctaattgcgttgcactgtataaaaaatatatacgagaagtcagttaaattaatttatatagatccgccatataatactgatacagatagctttaaatataatgataaatttagtcactctacgtggctgactttcatgaagaacagacttgaagttgcaaaagatttgttgtgcgatgacgggttaattgcaattagtattgatgataatgaattaaattatttggcctcgttggctgatgatatttttggccgaaaaaataggattgctatattcccaagaataacaaagaaaggaggaaaatccgccagcattttcgcaaagaatcatgattacatactgctttatgttagaagtttagaaaacaagcgtatgtatgcagtttcgcacgacgacgataatttcaaatataaagatgagtactttgctgagagaggaagctacaaactcaaccaaaccttggattatgatagccttcaatacagcaaatcacttgattatataatagaaatcaatggtgagaaatattacccaggtggtgatgaaaatttatttaatgatagaatgaatggcaagcataacagggcggactgggcttggagatggagtaggaaattattcgattttgggtttgaaaatgggtttattgaaataagaaatggcggccaaaggccaaggatatatacaaaaacatatcaaaatgcaaagatatcaaaggacggaaatgattatgtcataacctactttgatagaacaaagccattgtcaacacttgagtttactgaaaacaagtattctaacgacaatgcgacaaaacacattagctccctcttagggaaaaatatatttgattatacaaaaccagaaaccctattggctaagctaatcgaaataacatctactaaaaatgacctaattctagactttaatcttggtagtggaactacagctgctgttgctcacaaaatggggcgtcgctatatcggtattgagcagatggagtacatcaacgacattacggtacctcgcctgaaaaaagtcatcgaaggtgaacagggggggatctcaaaagacgttaactggcaggggggaggcagctttgtctacgcagaattgatggagctgaacgcctatttcgtgcatgaaattcagaaagcgcagtccacggaagaactcgaaaaactctttaccatgatgaaaacagaggcccatctcaactatcaggtagagctggaaaatgtgctgtccgctgagtacgaagtggatggcatcttccgtaaggtagctttcagtgaactggaactgcatgagcagaagcagcttctgattgaaatcctcgataaaaataaactctacgtgaatgtctctgatatggaggacagcgaactgagcatttcggagagcgataaagcctttacccgcagcttctacggaatggagtga

SEQ ID NO: 388570 - DNA, 171 bp, Salmonella enterica
atggcatatcaactgataaataatccctgtgctgtacagccgctgttgcataaaatttcgctctgcgtcgaggttttttttatcaaaaattccgcagataccccggaaaaacgcgagtctgttctcatgcctgaaatgcccacaccccacgcaaaactaattttttgctga

SEQ ID NO: 388571 - DNA, 192 bp, Salmonella enterica
gtgaacaaacagcaacaaactgcgctgaatatggcgcgatttatcaaaagccagacgctaaccctgctggaaaaactcaacgagctggacgcggacgaacaggcggacatctgcgaatcacttcacgaccacgccgacgaactctaccgcagttgcctcgctcgcttcagtgatgatggtgaaaacctctga

SEQ ID NO: 388572 - DNA, 387 bp, Salmonella enterica
atgaaatacaataacccacttgaaatagcaaacataacaactgacgtattagccgattatctttataaagcaatatccgatcttgatagtgaagatttagttaagttcgataacgccgatcatataaaggattatttagataacacaatagacttgttaggaacagataatttctataccaatgttctaaactcctattatggtagaaatcatagctttggcactgacttttttgaaacacaacaacaattaagaaaatatgtttgtgatgcaaacttatatcttatcaatgattctttagcagttaatgacacttcaaatgattatgttgcttgtgattatgttttagaaatgcttgaagctgacagaaacgataacgatgaataa

SEQ ID NO: 388573 - DNA, 558 bp, Salmonella enterica
atgtttatggaaaaggatttaaatgaaggcgtaggagtttacactttaaatagtggagtggtaatagttatagagggtgttcacaatgatgaaccattcatagagtggattgaactttataaagacgaaaatcattactataagaaaaacactggttatgaaaggagttatcaaagtttagtttgcgaagatgatttcaaagttcttattgaacgcttctgtagctatctatggtcgaatatgtgtaaacacgattttagtaatgaggacataaacaaaatattaagttatgattacactgatgatagattaaaaatattttttgaattggataacacttctttgaaaatatctaaaataaatcatccagtctttgaaaagtttttcagcggattagatattaaatgtaatttagcaccagaatctaataatgagtttcatacagggaatttcaacgccatttatttttatggtagatgtttagcttttgaagatgttatagattgtattaaatataatggtggtgtcatgtgtaaaataaaacgaaggggtgagtaa

SEQ ID NO: 388574 - DNA, 264 bp, Salmonella enterica
atgaagaaaaacacaatatttaaacagttagctaaaggatgttattctatatttctttgtagtatagcgatgacattttatcttcataatctaataaattcaagagagttttactctaaaaaaataagtgaaatagaggtggagaaatttaatcaatggcttttaagtttgagcaacccttttatttatgtatctttgctatttggttttttagctttgatatttttatacttccattgtaagagagaaaaggaaaataaataa

SEQ ID NO: 388575 - DNA, 258 bp, Salmonella enterica
atgaaactgaacaactacctaagcaagttctttgatgttgtagaggatgaagtagagaacgatgaaggtgaaaaaatcccttctctgtggctctatgagaaaggagaagactctgaacctgtagttatcctgaaacaaacagaaaagcccggagaatggcgcgtaggagatatttactcaactctaacgaatgatgcccggctatcagaagaacagatcaagaaactggcaaaagctggaatgattaccaaaaactaa

SEQ ID NO: 388576 - DNA, 189 bp, Salmonella enterica
atgtcctacctgaccacggaagggagattatatttcctatccctgacacgtcctgtcactcacgtatgctacaacatatcctataatacaatatactattatattatagtacgctgttatggctgttatcagggggaatactggagctggcgatcaaaggaaagtaccaaattaccgagcaagaaataa

SEQ ID NO: 388577 - DNA, 1020 bp, Salmonella enterica
atgagcgccgcgcttcaatacttcgaagaaaatttaccccgccgtccctatcacacggatgatctcgcttttggtcttcgcatctccggcaaagggcgtgcgctgcttgcgcggtacatccagcagaaccagcctcatgcgcagttctggctggtttttgacgttgaccgcgagggggcagcgattgactggagcgaccggaacgcccccgcgccgaacatcaccgttaaaaatcctgtgaacggacacgctcacctgctctatgcactcaatatcgccgtgagaaccgcgcctgatgcgtcggttaaggcgctgaaatatgccgcagcggttgaacgttcgctgtgtgagaaactttgtgctgatgtgaactacagcggactgatttgcaaaaatccgttccacctggaatggcaggtgatggagtggcgcgaggaagcctataccctcgatgaactggctgattatctcgatttgagcgcctcagcgcgtcgtagcatcgataaacattacgggatggggcgaaactgccacctgttcgaaatgacgcgcaaatgggcttacagggcgattcgtcagggctggccagcattctcacagtggcttgatgccgtgattcagcgtgtcgaaatgtacaacgcatcgcttcccgttccgctttctccgcctgaatgtcgggctattggcaagagcattgcgaaatacacgcacaggaacttcacgccggaaactttcgcacagtatgtggctgatacgcacacgccagaaattcaggcagcacgcggtcgcaagggcgggaaggccaattcgtcagaaaatcagtcggacaaagggaaaaaaagcgccgctgttcggtggactgctaacgacgacaaacgtcgtagggcgcttgatatgtatatcttgggagcgtcaacggaagatattgcagtggcggttggtgttagcagccggactattcgacgctggatggataattctggagaatggttaaccaagaaacaaataattaaattttaa

SEQ ID NO: 388578 - DNA, 654 bp, Salmonella enterica
atgttatcgttaaatttagcgttagaacgtttggataaaataagtaaatactttgttcttaactcccaaaaagatttgatttttcgagatgcttatacatttataatggagactgtttatcactccgttaaaagcaaaataacaaatttagatgctgttagtaatggtggtcaactcattgaaatgaaagcaccttttaacttcattctatgtagaacagggcgttttattgttttggacaactattatacaatcttaccaaaacgagatcgggatgattgggaaaggcatatacacaatataagcttagaagagttcatttatagcttcgacaataatacaacaaggtatttattacttgattgtaaatattactttgaccagttcaatattacacgtctggattttaatattatttcaatggtatataacactttttatgaggttttccagttagacagattttatgatccagtagtaaacagaataacagccgatgagattgaaaagcatataaacggcctacagtttgataaatcatcttatgatgaagttatcaggaagaaaacatatacctactttctcaggcttctcaggttcattgaggggcatgaagaggcatggtatttaccaatgaagttagaatacaaataa

SEQ ID NO: 388579 - DNA, 327 bp, Salmonella enterica; identical to SEQ ID NO: 229043

SEQ ID NO: 388580 - DNA, 294 bp, Salmonella enterica
gtggtgaaggtcagcgacggcggcgatatcagccaggtctccgcgtctgcgccggtcgcggctccggcttcggccagcgcgggcactccggttaccgcgccgctggcgggcaatatctggaaagtgatagccaccgaagggcagagcgtagcggaaggcgacgtgctgctgattctggaagccatgaagatggaaaccgaaatccgcgccgcgcaggccgggacggtacgcggtatcgcggtgaagtccggggatgcggtttccgtcggcgacaccctgatgacgctggcgtaa

SEQ ID NO: 388581 - DNA, 633 bp, Salmonella enterica
atggaagacgaaagtaatccgtggcctagttttgttgatacattctctacggtattgtgtatttttatatttctgatgttggtgtttgcacttaataatatgattattatgtatgacaactcaattaaagtttataaagcaaatatagagaataagactaaatctactgctcaaaatagcggagccaatgacgattcaaatcctaatgaaatagttaataaggaagtgaatactcaagatgtgtcggacggaattactacaatgtcaggtaaggaggttggagtatacgatatcgccgatggtcagaaaactgatataacgtctacaaaaaatgagcttgttattacgtatcatggcaggctgagaagcttttcagaagaggatactcataaaatagaggcttggttagaagacaaaactaatagtaatttattgatagaaatggttattcctcaggcagacatctctttctctgactctttacgactgggatatgaacggggaattattttaatgaaagagattaagaagatatatcctgatgtagttattgacatgagtgttaactccgcagcatcaagtacaacgagtaaagctattatcacgactattaataaaaaggtgtcagagtga

SEQ ID NO: 388582 - DNA, 531 bp, Salmonella enterica
atggccagcagaggcgtaaacaaggtgattctcgttggtaatctgggccaggacccggaagtacgctatatgccgagtggcggcgctgtcgccaacttaacgctggctacttctgaatcctggcgcgataagcagaccggcgaaatgaaagagcagactgaatggcaccgggtggtgatgttcggcaaactggcggaagtggccggcgaatatctgcgtaaaggttctcaggtgtatatcgaaggtcaattgcgtacccgcaagtggaccgatcagagtggccaggaacgctatacgactgaaattaacgttccgcagatcggcggcgtgatgcagatgctgggtggtcgccagggcggcggcgcaccggcaggcggtcagcagcaggggggttggggtcagccgcaacaacctcagcagccgcagggcggtaaccagttcagcggcggcgcgcagtcgcgtccacagcaatccgcgccagcgccgtctaacgaaccgccaatggattttgacgacgacattccgttctga

SEQ ID NO: 388583 - DNA, 2826 bp, Salmonella enterica
atggataagatcgaagttcggggcgcccgcacccataatctcaaaaatattaacctcgtcatcccccgcgacaaactgattgtcgtgaccgggctttcgggttcaggcaaatcctcactggctttcgacactctgtatgccgaagggcagcgtcgttacgttgaatcgctctccgcttacgcgcggcagtttttgtcgctcatggaaaaaccggatgtcgaccatattgaggggctatcgcccgcgatctcaattgaacagaaatcgacatctcacaacccgcgctctacggtgggtactattaccgagatccacgactacctgcgcctgctgtttgcccgcgtgggcgagccgcgttgtccggatcatgacgtgccgctggcggcgcaaaccgttagccagatggtcgataacgtgctgtcacagccggaaggcaaacgcctgatgctgctggcgccgattattaaagagcgtaaaggcgaacacaccaaaacgctggaaaatctggcaagccagggttacattcgcgcccgtattgacggcgaagtctgcgatctctccgatccgccgaagctggagctacaaaagaaacataccattgaggtggtgatcgatcgcttcaaagttcgtaacgatctttcccaacgcctggcggagtcgttcgaaacggcgctggaattatccggcggcacggcggttgttgccgatatggacgatgagaaagcggaggagcttctgttctccgccaattttgcctgtccgatttgcggctacagtatgcgcgagctggaaccgcgtctgttctcgttcaacaacccggcaggcgcctgtccgacctgtgacgggctcggcgttcagcaatatttcgatccggaccgcgtgatccagaatcccgacctgtcgctggcaggcggcgcgattcgtggttgggatcgtcgcaatttttactactttcaaatgctcaagtcgctggcggaacactataagttcgacgtggatgcgccgtgggcaagcctcagcgccaacgtacacaaagtcgtgctgtacggttccggcaaagagaatattgaatttaaatatatgaacgatcgcggcgatacctccgtgcgccgccatccgttcgaaggcgtgctgcataatatggagcgccgttataaagagacggaatccagcgcggtgcgcgaagagctggcgaaattcatcagtaatcgcccctgcgccagctgtgaaggaacgcgactgaatcgcgaagcgcgccatgtatttgtggaaaatacgccgctgcctgctatttccgatatgagcattggccatgcgatggattttttcactaatctcaagctttccgggcaacgggcgaaaatcgccgaaaaagtgctaaaagagatcggcgatcgcctcaagtttctggtgaacgtcggcctgaactatctcacgctctcccgctcggcagagacgctttccggcggcgaagcccagcgtattcgtctggcgagccagataggcgccgggttagtcggcgtgatgtatgtgctggatgagccgtccatcggtctgcaccagcgcgataacgaacggctgctgggtacgctgattcatctgcgcaatcttggcaataccgtgattgtcgtggaacacgatgaagacgccatccgcgccgccgaccatgtgattgatattggccccggcgcgggcgttcacggcggcgaggtggtggcggaaggcccgctggaagccattatggcggtaccggaatcgctgaccggccagtacatgagcggtaaacgcaaaattgaagtgccgaaacaacgcgtgccggcaaatccagaaaaagtgctcaaactcaccggcgcacgcggcaacaacctgaaagatgtgacccttacgctaccggtagggctgtttacctgtatcaccggcgtctcgggttccggtaaatcgacgctgattaacgacacgctgttccccatcgcccagcgtcagttaaacggggcgactatcgccgaaccggcgccgtatcgggatattcaagggctggaacatttcgataaagtgatcgatatcgaccagagcccgatcgggcgcaccccgcgttccaacccggcgacctatacgggcgtctttaccccggttcgcgagctttttgctggcgtgccggagtctcgctcgcgcggctacacgccagggcgattcagcttcaacgtgcgcggcggtcgctgcgaagcgtgccagggcgatggcgtcattaaagtcgaaatgcactttctgccggatatttacgtgccgtgcgaccagtgcaaaggcaagcgctataaccgggaaacgctggagattaagtacaaaggcaagaccatccacgaagtgctggatatgaccattgaagaagcgcgtgagttctttgatgcggttccggcgctggcgcgtaagctgcagacgctgatggacgtggggctgacctatatccgtcttggtcagtcggcgacgacgctttccggcggcgaggcccagcgcgtgaagctggcgcgcgaactgtcgaagcgcggcaccgggcagacgctgtatattctcgacgagccgaccaccggcctgcactttgccgatattcagcagttgcttgacgttctgcatcagttgcgcgatcagggcaacaccatcgtggtgatcgaacacaacctggacgtcattaaaacggcggactggattgtcgacctcggcccggaaggcggcagcggcggcggcgaaattctcgtcgccggtacgccggaaaccgtggcggagtgcgaggcgtcgcataccgcccgcttccttaaacctatgctcaaataa

SEQ ID NO: 388584 - DNA, 444 bp, Salmonella enterica
atgaagttgccctacgcaatcacactactgctgtgcctgtttttatccgcctgtacgctgcctgaccgctttagcgccgtggcttttcaacaactgacgctattacaagcgcgctcaacccgcttcctgcaggacgcggcgcgaataccgtggcaaaaagagacactgctcaaggatgaccgcgatatccgccagatattttttcaggctgagcgggtcgcccgtcaaggtggggataaacaccgactcgataatctggcgctgctgaaaaatcactatttgcgtctttatgcgcgggttatgcaacgtaagcaaccacttactcacatccaggcagagagataccaacagcaaaataatcaggtctggaaattagccatacagggtgagtgtctgcattggggcgcccgctgcactcagggagaagaaaatggcgtctattaa

SEQ ID NO: 388585 - DNA, 339 bp, Salmonella enterica
atggcgtctattaacgaaatacataacctgatgaccaccgcccgagccgaacaccctgtagtctcttcggcgatggccgagtttatccagacgtataagcaggcaagagaagacagcgacgacggtatccgcgagtccgccgcgtttatcgcccgcgcgcttcaggaacatgctcgcggctggctggacgacgatgatatgattattctgctggaaggacagcgggacctcgccaggctacgcgccaataatgcgcaaatcgccctcggcagccgtatccggtctacggtcatccgcctcattgatatcgccctggcgttgttggtcggcacgctataa

SEQ ID NO: 388586 - DNA, 357 bp, Salmonella enterica
atgaccatttcggaattactgcaatactgcatggcaaaacctggcgcagagcagagcgtccacagcgactggaaagcgacgcaaattaaagtggaagatgtacttttcgcgatggtaaaagaagttgaaggacgcccggcagcctctctcaaaaccagcccggaactggcagagttgttacgccagcagcacagcgatgtacgaccgagtcggcaccttaataaagcgcactggagcacggtctatctggacggatcgctgccggattcacaactctattatctggtcgatgcctcttatcaacaggcggtaaatgcgctgccggaagataaacgcaagcagttgccgcagtcctga

SEQ ID NO: 388587 - DNA, 417 bp, Salmonella enterica
atgtggtatcagcgcaccattacactgagcgagaagccgcgcgggtttcatctgataacagatgaaattatcgataaattgtctggcttaccgcctgtcgaaacgggtttgctgcatctgttgttgctacatacctcggcctcgctgacgctaaacgaaaactgcgatcccaccgtgcgcgctgatatggagcgccatttcctgaaaaccgttcccgataatgcggcgtatgaacatgattacgaaggcgcggatgacatgccttcgcatattaagtcgtcagtattgggcgtctcgttgctgctgcctgtacgccaggggcgtttacagttaggaacatggcaaggtatctggttgggagagcaccgtattcacggcggtccacgtaaaattatcgcgacactacaaggggaatga

SEQ ID NO: 388588 - DNA, 714 bp, Salmonella enterica
atgaaaaaaataaccctggcgctgagtgccgtctgtttgttgtttacgctaaaccattccgcgaatgcgttagtatcttccccttcgacgctcaatccgggcactaacgttgcaaaactcgcggaacaagcgcctgtccattgggtctctgtcgcccagattgaaaacagcctcaccggacgcccgccgatggcggtcggctttgatattgacgacaccgtgttattttccagccccggattctggcgcggaaagaaaacctactccccggacagcgacgattatctgaaaaatccggccttttgggaaaaaatgaacaacggctgggatgagttcagtattccaaaagaagtggcccgacagctcattgatatgcatgttcgtcgtggcgacagtatttactttgtcactggtcgtagtcagacgaaaacggaaaccgtgtcgaaaacgctggcggataacttccatattccggcggcgaatatgaatccggtgattttcgccggcgataaaccggaacaaaatacgaaagtccagtggctgcaggagaagaacatgcgtatcttctacggcgattcggataacgatattaccgcggctcgtgattgtggtatccgcggtattcgcatcctgcgcgcggctaactccacctacaaaccgctgccgcaggcaggagcgtttggcgaggaagtcattgtcaactcggagtactaa

SEQ ID NO: 388589 - DNA, 1194 bp, Salmonella enterica
gtgtttcaaaaagttgacgcctatgccggcgatccgattctttcactgatggagcgttttaaagacgactcccgtcacgacaaagtaaatctgagcattggcctgtattacaacgaagacgggattatcccacagcttaaaacggtggccgaagccgaagcccggcttaacgcgcagccgcatggcgcttcgctgtacctgccgatggaaggactcaatacttatcgccatactatcgcgcctttgctctttggcgccgatcacccggttcttcagcaacagcgcgtggctactatccagacattaggcggttccggcgcgctgaaagtgggcgcggatttccttaagcgttatttccccgacgcaggcgtatgggtgagcgaccccacctgggaaaaccatattgcgatatttgccggggcaggattcgaagtgagtacttacccctggtatgacgacgcgactaacggcatccgttttaacgatctgctggccacgctgaatacgttacctgcgcgcagtatcgtgttgctgcacccctgttgtcacaacccgaccggggcggatttaacgccttcgcaatgggatgcggtgattgaaatagtgaaagcgcgcgatctgattccgttccttgatattgcctatcaggggtttggcgcaggcatggacgaggatgcttacgctattcgcgccattgccagcgctgggttacctgcgttagtcagtaattctttttcgaagattttctcgctgtacggcgagcgcgtcggcggcctgtccgtggtgtgtgaagatgccgaaatcgccgcgcgggttctgggacagctaaaagcgacggtgcgccgaatttactccagtccgccgtgtttcggcgctcaggtggtcgctacggtcctgggcgatgaggcgttaaaagcgggctggctggcggaagtcgacgcgatgcgtaaccgcattatatcgatgcgccagacgctggtgaaggagctgaaggcggagatgcctgaccgcaactttgattacttgttacagcagcgcggtatgttcagctataccgggttaagcgaggagcaggtcgagcggttgcgcgatgagtttggcgtttacctgattgccagtggccgcatgtgtgtcgccgggcttaatgcttcaaatgtacaccgcgtggcgaaggcatttgccgctgtcatgtaa

SEQ ID NO: 388590 - DNA, 1080 bp, Salmonella enterica
atgcaagcggcaacagtcgtcattaaccgccgcgctctgcgacacaacctgcaacgtctgcgtgaactggcgcctgccagtaagctggttgcggtggtgaaagcgaacgcttatggacacggtcttctggagaccgcgcgaacgctccctgatgctgacgcttttggcgtggcgcgtcttgaagaggctctacgtctgcgagcgggcgggatcacgcagcctatcctgctgctggagggttttttcgacgccgccgatttgccgaccatttccgcgcaatgtctgcataccgccgtacataatcaagagcagcttgccgccctggaggcggtggagctggcggagccggtaacggtctggatgaagctggataccggtatgcatcgtctcggcgtgcgtcccgaagaggcggaggcgttctaccagcgtctgacgcactgtaaaaatgtacgccagccggtgaatatcgtcagccattttgcccgtgcggatgagccggaatgcggcgctaccgaacatcagctcgacatttttaatgccttctgtcggggtaaacccgggcagcgctctattgccgcgtctggcggtattctgctgtggccgcagtctcactttgactgggcgcgtccgggcataattttgtatggcgtatcgccgctggaacacaaaccctgggggcctgattttggttttcagccggtgatgtccttaacctccagtttgatcgcggtgcgtgaccacaaagcgggcgaaccggtgggctacggcgggacatgggtgagtgagcgcgacacgcgcctgggcgtggtggcgatggggtatggcgatggctacccacgagcggcgccttccggtacgccagtactggtcaatggtcgtgaagtcccgattgtcgggcgggtggcgatggatatgatttgcgtggatttggggccaaacgcgcaggataacgcgggcgatccggtggtcttatggggtgaaggtctgccggttgaacgtatcgctgaaatgacaaaagtaagtgcttacgaacttatcacgcgcctgacctcaagggtggcgatgaagtatattgattaa

SEQ ID NO: 388591 - DNA, 1416 bp, Salmonella enterica
atggcaggaaataaacccttcaacaaaccacagactgatgcccgcgaccgcgatccgcaggttgccgggataaaagtgccgccgcactcgattgaagcggaacagtcggtgttgggcggtttaatgctggataacgagcgctgggacgatgtggccgagcgcgtggtggcggaagatttctatacccgcccgcatcgccatatctttacggagatggggcgcttgcaggaaagcggcagtcctatcgacctgattacgctcgcggaatcgctggagcggcagggccaactggacagcgtcggcggcttcgcctatctggcggagttgtctaaaaatacgccaagcgcggcgaacatcagtgcttatgcggacattgtgcgcgaacgcgccgtggtccgcgatatgatcgcggtggcgcatgaaattgcggatgccggttacgatccacaggggcgcaatagcgacgaactgctggatctggcggagtcgcgcgtcttccagatcgcggaaaaccgggccaacaaagacgaaggtccgaaaagcatcgaccagattctcgacgctaccgtggcgcgtattgagcagttgttccagcaaccgcacgatggcgttacaggcgtggataccggctatcaggatctcaataaaaagacggcagggttacagcgttcggatttgattatcgtcgcggcgcgtccctccatgggtaaaaccacttttgcgatgaacctctgcgaaaatgcggcgatgttgcaggataaaccggtactgatctttagtctggagatgcccggcgaacagatcatgatgcgtatgctggcctcgctgtcccgcgtcgatcagacacgtattcgtaccggtcaactcgatgatgaagactgggcgcgaatctccggcacgatgggcattctgctggagaaacgcaatatgtatattgacgattcctcaggtcttacgccgacagaagtccgttcgcgcgcgcggcgtattttccgcgaacatggcgggttaagtctgattatgatcgactacctgcaattgatgcgcgtgccgtcgctttctgataaccgtactctggaaatcgccgaaatttcccgctcgttgaaagcgctggcaaaggaactccaggtgccggtcgtggcgctatcgcagcttaaccgctccctggaacaacgcgcggataaacgtccggtgaactccgacctgcgtgaatccggctctattgaacaggatgccgacttaattatgtttatctaccgtgatgaggtttatcacgagaacagcgacttaaaaggcattgctgaaattattattggtaagcaacgtaacggtcctatcggtacggttcgtctgacgttcaatggtcagtggtcgcgcttcgataactatgcgggaccgcaatacgatgatgagtaa

SEQ ID NO: 388592 - DNA, 984 bp, Salmonella enterica
atggcaacgcgtattgaatttcacaagcatggtggtccggaagtgcttcagaccgtggagtttacgccaacggaaccggcggaacacgaaatccaggttgagaacaaagccattggtatcaacttcatcgacacctatatccgtagcggactctatccgcccccgtcgttgcctgcgggcctgggaaccgaagctgcgggtgtggtcagtaaagtcggcaacggcgtggagcacattcgcgtgggcgatcgcgtcgtctacgcgcagtcaacgctcggcgcttacagttccgtccataacgtccccgcagataaagccgcgattttacctgacgccatttccttcgaacaggcggcagcctcttttctcaaggggttgaccgttttttacctgttgcgcaaaacctatgaagtgaaacccgacgaacccttcctgtttcatgccgctgcgggcggcgtcggtctgatcgcctgccaatgggcaaaagcgctgggcgcgaagcttatcggtaccgtcggtagcgcgcaaaaagcgcagcgggcgctggacgccggtgcctggcaggtaattaattaccgtgaggagagcattgtcgaacgggtaaaagagatcaccggcggcaaaaaagtccgcgtggtctatgactccgtggggaaagatacctgggaagcctcactggactgcctgcaacgacggggactgatggtcagtttcggcaatgcgtccggccccgtcactggcgtgaatttaggtattctgaatcagaaaggttccctgtatgccacgcgaccttcactacaggggtatattacgacacgtgaagaactgaccgaagccagcaatgaattgttctcattgatcgccagcggcgtgattaaagttgatgtggctgaaaatcaacgctatgcgttaaaagatgcccgtcgcgcgcatgaggtactggaaagccgggccacacagggctcaagcctgctgattccgtaa

SEQ ID NO: 388593 - DNA, 243 bp, Salmonella enterica; identical to SEQ ID NO: 371505

SEQ ID NO: 388594 - DNA, 999 bp, Salmonella enterica
atgcagcctgaaacccagtcctccgctttacctgcttatcgcttctccatcgcgcctatgctcgactggacggacagacattgccgctatttcctgcgtttgctgtctcgccagacgctgctctacaccgaaatggtgaccacgggcgcgattattcacggtaagggtgactatctggcttacagcgaagaagagcatccggtcgctctacagcttggtggaagcgatccggctcagcttgcgcattgtgcaaagctggcggaagcgcgtggctacgatgaaattaacctcaacgtggggtgcccctccgatcgtgtgcaaaacggtatgtttggcgcctgtttgatgggcaatgcgcaactggtcgccgattgtgttaaagccatgcgtgatgtcgtctcgattccggtaacggtaaaaacccgcattggtattgacgatcaggacagttatgcgtttctgtgtgatttcatcgatacggtttccggtcggggcgaatgcgagatgtttattatccatgcgcgcaaagcctggctttctggcttaagccccaaagaaaatcgtgagatcccgccgctggattacccgcgcgtctatcagctaaagcgggattttccgcacctgaccatgtccattaacggcggcatcaaatcgctggaagaggcgaaggaacacctgcgccatatggatggcgtcatggttggccgcgaagcttatcagaatccgggtatactggcctcggtggatcgggagatctttggcgccgataccaccgataccgacccggttgcggtggttcgcgcgatgtatccctatattgagcgtgaattgagccagggagcgtatctggggcatatcactcgccatatgctggggttgttccagggcatccccggcgcgcggcagtggcgtcgctatctgagcgaaaacgcccataaagctggcgcggatgttgctgtactggagcaggcgctaaaactggtagcagacaagcgttaa

SEQ ID NO: 388595 - DNA, 1311 bp, Salmonella enterica
gtgaacaaaaacgtcaaactttcactgattgctatcgcggtctcgctttttatggcaaagcaggcgagcgccgccaatacctggacggaagcgcgtaatgacgcaatgggcgggacgggcgttgcgtccgcgaattatggcagcggagtactattaaatccggcgttactggcaaaagccaaaccggaagacaatatcactgttgtccttcctgcggtcggcgtccagattacggataaagacaatctccaggatgaaattgacgatatcagcgataaagtggattactacgatgagatcgtcgataaccttacgctggggcaaattctgctcaatccgcgaggcgtgctgaatcaatttcagggcgccgcgcgcgacctggccgatgagctggaatatctcaacggaaaaaccgcccgcgccaatgccggcgccgggttggcggtaagtattccagggcaaacgctttccgtggcgtttatcgccaaaggttatgcgcatgggcgcgtgagttcgtccattgatcagaacgatattcagtatctgcgcgatatccagcatgatgaacgtgtcgcgcttcgtgaagcaggacgcgctgctttgctggggtctgacgaaattacaaagcatttaaactctaccgcgtcggggcgggtagcgattgtatctgactacggtattgcgctggcgaagcagtttgtggtgggcgaggtgcctgtttccattggcgttacgccaaaactgcaaaaaacctggctctataactacaccacctcaatttataactacgacagtagcgactggaatagcagccgttatcgcaatgacgatacgggttttaacattgatgcggggcttgctgccgatatcggtgaaaactggacgttggggctgagcgggcaaaatctggtatctcgcgatatcgatacgaaagatatttacatcactaatggtatgacgggagaaaccaccaactacaaagatacataccaaatccgccccctggttaccgcgggcatcgcatggcataacgatttgctgaccgtaagcgccgatggcgatctgacggaaacgaaaggctttaagagcgaagacaattcacagtacgtgggtgtcggcgctgaagttcgaccgttgtcatggctggcggtgcgcgcagggtatcgtgcggatgtgaaaaataacgatagcaatgtggttaccggcggtcttggctttgcgccctttaaccgtgtgcatctcgatttaatgggactgtacggcgaagatgaaacctggggggcaggcgcgcagcttacaatgacattctga

SEQ ID NO: 388596 - DNA, 516 bp, Salmonella enterica
atggaaaagaccacaacgcaagagttactggcgcaagctgaaaaactctgcgcgcagcgcaacgtgcgcctgacgcctcagcgcctcgaagtgctgcgcctgatgagtctgcaacagggtgccatcagcgcatacgatttgctcgatttgctgcgcgaaacggaaccacaggccaaaccgcccaccatttaccgcgcgctggattttttgctcgaacagggttttgtccataaagtggaatccaccaatagttatgtggtttgccacctgttcgaccagccgacgcacagctcggccatgtttatctgcgatcgttgtggcgtggtgaaggaagagtgtgccgagggcgtggaagacatcatgcatactctggcggctaaaatgggctttgcgctacgacataacgttattgaggcgcacggtctgtgccctgcgtgcgtagaagtggaagcgtgtcgccatccgggcgactgtggtcacgatcactcggtgctggtgaagaaaaaaccgcgttag

SEQ ID NO: 388597 - DNA, 213 bp, Salmonella enterica; identical to SEQ ID NO: 371509

SEQ ID NO: 388598 - DNA, 129 bp, Salmonella enterica
atggtttgccagatcgtgacggttaaaaattctgaatataaaaccgaaggccgaattcctgcctacaattattatcacgtccagcagaaattgcagagcatttgggcgaataacacctgctatgcctaa

SEQ ID NO: 388599 - DNA, 1326 bp, Salmonella enterica
atgccgctttttacctcctctgataaagctctctggcgtcttgcgttgccgatgattttttctaacatcaccgtccccttactggggctggtcgatacggcggtgattggtcatctggacagccctgttttcctgggcggcgtggcggtgggcgcgactgccaccagctttcttttcatgctgctgctatttctacgtatgagcaccaccggcctaacggcgcaggcatttggcgccaaaaatccgcaggcgttagcccgggcgctcattcaaccgttattgctggcgctgggcgcaggcgtgatgattgtgctatttcgcacgccgcttatcgagctggctttacatattgtcggcgggaacgacgctgtcctggtgcaggcgagacgcttccttgaaattcgttggctaagcgctcccgcgtcactggcgaatctggtgctgctcggttggctgttaggcgttcagtatgcgcgggcgccggttatcttgttggtcgtgggcaatatcctcaatatcgcgctcgacctgtggctggtgatggggcttcatatgaacgtgcagggtgctgccctggcgacggtcatcgcagaatatgtcacgttactgatcggcctcatgatggtacgtaaagttctccatctccgcggtgtgtcgctggatatgctaaaacaggcctggcgcggcaacgtgcgccgccttttggcgctcaatcgcgatatcatgctgcgctcattgctccttcagctttgttttggtgcaatcacggtgtcaggcgcgcggctgggcagcgatattatcgcggtaaatgcagtcctgatgaccttactcacctttacggcctatgcgctggacggttttgcttatgcggtggaggcgcactccggtcaggcttacggcgcgcgtgacggtagcaagctactgaacgtctggcgagcggcgtgtcgtcagtcaggaattgtggccttgttgttttctacagtctatgccctggcaggcgaacatattgtcgcgttactgacctcattgccgcaaatacagctactggcggatcggtatcttatctggcaggtggtattaccgctggtgggcgtatggtgctatctgctcgatggtatgtttattggcgcgacgcgcgctgccgaaatgcgcaatagcatggcagtcgccgcgggaggattcgcgctgacgctcttcgccctgccggtattaggaaatcatggtttatggctggcattaaccgtgttcctggcgcttcgcggtctgtcgttgagccttatctggcgtcgtcactggcgcgagggtacatggtttgccagatcgtga

SEQ ID NO: 388600 - DNA, 609 bp, Salmonella enterica
atgaaagcgttaacggccaggcaacaagaggtgtttgatctcatccgggatcacatcagccagacaggtatgccaccgacgcgtgcggaaatcgcgcagcgtttggggttccgttccccaaacgcggcggaagaacatcttaaagcgctggcgcgcaaaggggtgcttgaaatcgtttccggtgcatcgcgaggtatccgtctgttacaggaagaagaggacggattaccgcttgtcgggcgtgtcgcggcgggtgaaccgcttctggcgcagcagcatattgaaggccattaccaggtcgatccttcactgttcaaacccagcgccgatttcctgctgcgcgtgagcggtatgtcgatgaaagacatcggtattatggatggggatttgctggcggtacataaaacgcaggacgtccgtaatggccaggtggttgtcgctcgcattgatgatgaagtgacagtaaaacggctgaaaaagcagggcaataaagtggaactgctgccggaaaacagcgagtttacaccgatagtggtggatctgcgcgaacaaagctttacgattgaagggctggcggtaggcgtcattcgcaacggggaatggttgtaa

SEQ ID NO: 388601 - DNA, 369 bp, Salmonella enterica
atggccaataataccactggattcaccagaattatcaaagcggcaggatattcctggaaaggatttcgcgccgcatggactcacgaagcggcgtttcgccaggaaagtatcgcggtattgctgggcgtcatcatcgcctgctggctggatgtggatgcgattacccgtgtgttattgataggttccgttttacttatcatgattgttgaaatcctcaacagcgctattgaagcggtcgtggaccgcatcggttctgaataccatgagctttccggccgtgcgaaagatatgggatcggctgcggtgctactgtctattttcgttgccctgatgacctggggcatcctgttatggtcacattttcgataa

SEQ ID NO: 388602 - DNA, 2421 bp, Salmonella enterica
atgtccggctggccacgaatttactacaaattactgaatttaccattaagcatactggtaaaaagcaagtctattccggcggaacccgcccaggaattggggctcgatacttctcgccccattatgtatgtcttgccatacaactcaaaagcggacttactgacgctgcgggcgcaatgtctggcgcacgatctcccggatccgctggagccgctggagatcgacggcgcgctgctgccacgctatgtatttattcacggcggaccgcgtgtctttacctattacacgccaaaagaagagtcggtgaaactttttcacgattatctcgatctgcatcggagtaatccggctttggacgtgcagatggtgcccgtttccgtgatgtttggccgcgcgccgggtcgtgaaaagggagaagataacccgcctttacgtatgctgaacggcgtacagaaattctttgccatctcctggctgggtcgcgatagctttgtccgattctcgccgtccgtctcattgcgtcgtatggctgatgaacacggcaccgataaaatcatcgcgcagaagctggctcgcgtggcgcgtatgcactttgctcgccagcgcctggcggcggttggcccacgcctgcccgcccgtcaggatctgtttaacaaactgctggcctcgaaagcgatcgcccgcgcggtagaagacgaagcgcgcagtaaaaaaatctctcatgaaaaagcgcagcaaaacgccattgcgctgatggaagagatcgcggcgaacttctcttacgagatgattcgtttgaccgacaggattttggggtttacctggaaccgtctttaccagggaattaacgtgcataacgccgagcgcgtacgccaactggcgcacgacgggcatgaaatcgtctatgtaccctgtcaccgcagccatatggactacttgctcctttcttatgtgctgtaccatcagggactggttccgccgcatattgccgccggtattaaccttaatttctggcccgctggcccgattttccgtcgtctgggcgcgttctttattcgtcgcacctttaaggggaataaactctattccaccgtctttcgcgaatacctgggcgagctgttcagccgcggttactcggttgagtattttgtcgaaggaggacgttcgcgtaccggacgtttgttagacccgaaaaccggcaccctgtcgatgactatccaggcgatgctgcgcggcggtacccgtccaattacgttagtgcctatttacatcggctatgagcacgtcatggaagtgggcacctatgcgaaagaactgcgcggcgcgacaaaagagaaagagagtctgccgcagatgctgaaaggcttgagcaagctgcgcaatctgggtcagggctacgttaactttggcgaaccgatgccgctcatgacgtacctgaaccagcatgtgccggagtggcgcgaatctatagaccctatagaggccatacgcccagcctggctgacgccgacggtaaatagtatcgccgccgatctgatggtgcgtattaacaacgctggcgcggcaaacgcgatgaacctgtgttgtaccgcgctgttagcgtcgcgtcagcgctcgctcacccgcgagcagctcaccgagcagcttgattgctatctcgatctgatgcgcaatgtcccttattccacagactcaaccgttcctgccgccagcgctggcgagctcatcgctcacgcgctgcagatgaataagtttgaggtcgagaaagacaccattggcgatatcatcattctgccgcgcgagcaggcggtgttgatgacctattatcgtaataatatcgcgcatatgttgattatgccttcgctgatggcggcgattatcacccagcatcgtcgcatttcgcgtgatgcgttgcagcagcatgttgaagcgctctatccgatgttaaaagcggagctgttcctgcgctgggagcgcgaggagttagcctcggtcattgacgcgctggccagtgaaatgcagcgtcaggggctaattaccctgcaggatgatgaactgcatatcaacccgacgcattcccgtacgctgcagctgctggcggcaggcgcgcgcgaaacgctacagcgttatgccattacgttctggctgttgagcgccaatccgtccatcaaccgcagtacgctggagaaagaaagccgtaccgtggcgcaacgtctgtctgtcctgcacggtattaacgcgccggagtttttcgacaaagcggtgttcagttcactcgtgttgacgctacgggatgagggttatatcagtgatacgggcgatgccgaaccggcagaaacgatgaagatatatcagatgcttgccgatctgattacctctgatgtccgtctgacgattgaaagcgcgacgcagggcgagtaa

SEQ ID NO: 388603 - DNA, 873 bp, Salmonella enterica
atggagtggagtctgacgcagagtaagctgctggcgtttcaccgtttgatgcgtacagataagcctattggcgcgttgctgctgctctggccgacgctttgggcactatgggtggcgacgccgggtatgcctcagctgtggattttggcggtttttgtcgctggcgtgtggttaatgcgcgcggcgggctgcgtggtaaatgattatgccgatcgtaaatttgacggacatgtaaaacgtacggtcaaccggcctttacccagcggcgccgtgacagagaaagaagcgcgcaacctgtttgtggtgctggtgctgctggcgtttctgttggtgctgacgctgaacgccatgacgattctgctttccgtggcggcgctggcgttggcctgggtttatccctttatgaaacgctacacccacctgccgcaggtcgtgctgggggccgctttcggctggtcaatccccatggcgttcgccgcggtgagcgaatccctgccgttgagctgctggctaatgttcctcgccaatattctctgggcagtggcttacgatacgcaatatgcgatggtcgacagagatgatgatatcaagataggcattaaatcgacggcgatcctgtttggtcgttatgacacattgattatcgggattctgcagcttggcgtcatggcgttaatggcgctgatcggctggttgaatggtctgggatggggatattactgggctgtgctggtggcgggcgcgctgtttgtctaccagcaaaaactgattgcgaaccgtgagcgtgaagcctgctttaaagcctttatgaacaataactacgttggcctggtgctatttttagggctggcgatgagttactggcacttctga

SEQ ID NO: 388604 - DNA, 498 bp, Salmonella enterica
atgtcacaccctgcgttaacgcgactgcgtgcgctgcgctattttgatgcgattcctgcgcttgaaccccatttgctggactggctgttgctggaagattctatgactaaacgttttgagcagcagggaaagcgggtaagcgtgacgctgattcgggaagcgtttgtcggccaaagtgaggtcgaggaagcatcaggtttactgccatccgaatcccgctactggttacgtgagatactgctttgcgctgacggcgagccctggcttgccggacgtaccgtggtaccggaatccacgctgtgcggacctgaacaggtcttacaacacctgggtaaaaccccgcttggacgttatctatttacatcatcgacactgacccgcgattttattgaaattggacgcgatgcaacgctgtgggggcgccgctctcgactgcggttgagcggaaaaccgctgttgcttaccgagctttttttacctgcatcgccgctgtactga

SEQ ID NO: 388605 - DNA, 918 bp, Salmonella enterica
atgaaaatgaagaaaagtctcgtcgccctctgtttaaccgcagggctgttcgccagcgtgccgggtatcagcctggcggaagtgaactatgtaccgcaaaataccagcgccgcgcccgctattcctgctgctgcgctacagcaattaacctggacgcctgtagatcagtcaaaaacgcagtctacccaactggcgacgggcggccagcgccttgacgtcgccggcattaccggcccggtcgccgcttatagtgttccggcgaatatcggcgagctgacattaactctgaccagcgaggtcaataagcaagccagcgtttttgcgccaaacgtgttgattcttgaccaaaatatgacgccttcggcgttcttccccagcagttactttacttatcagcagccgggcgtcatgagcgcagaccggctggaaggcgtgatgcgcctgacgcctgcgttggggcagcagaaactctatgttctggtgtttacgaccgaaaaagatcttcagcaaactactacgctgctcgatccggcaaaagcctatgccaaaggcgtcggtaactctatcccggatattcccgatccagttgctcgccataccactgatggcgtagtgaaactgaaggtgaaaaccaacagtagctccagcgtattggtcgggccgttgtttggctcgtccggtaccgggccggtaacggtaggcaataccgccgcgccggtcgctgcgccagcgccagtcgcgccgaagaaaagcgaaccgatgttgaacgatacggaaagctactttaataaagcgattaaggatgccgtagcgaaaggcgacgtcgataaagcgctgaaactgcttgatgaggccgaacgtctgggatcgacatctgcccgttccacctttatcagcagtgtaaaaggcaaggggtaa

SEQ ID NO: 388606 - DNA, 1359 bp, Salmonella enterica
atgatgattactctgcgcaaactcccactggcagttgctgtcgcagcgggcgtaatgtccgctcaggcaatggctgtcgatttccacggttacgcccgttccggtattggctggacgggaagcggcggcgaacaacagtgtttccaggcaacgggtgcccaaagtaaataccgtctcggtaacgaatgtgaaacctatgcggaactgaaactgggccaggaagtgtggaaagagggcgataagagcttctatttcgacaccaacgtcgcctattcggttaaccagcagaacgactgggaatcgaccgatcccgccttccgcgaagcgaacgtgcagggtaaaaacctgattgaatggctgccgggctctaccatctgggccggtaagcgcttctatcagcgtcatgacgtacacatgatcgacttctactactgggatatttcaggtcctggcgcgggtatcgaaaatatcgatctgggcttcggtaagctttcgctggcggcgacccggtctactgaagcgggcggctcttacaccttcagcagccagaatatttatgatgaagtaaaagataccgctaacgacgtctttgacgtacgtctggctggtctgcaaacgaacccggacggcgtactggagctgggcgttgactacggtcgcgccaatacgaccgatggttataagctggcggatggggcatcgaaagacggctggatgttcaccgccgaacacacgcaaagcatgttgaaaggctataacaagtttgtcgtgcaatatgccaccgatgccatgaccacgcagggtaaaggccaggcgcgcggttccgacggttcttcatctttcactgaagaattgcctgatggaaccaaaattaattatgccaataaggtcatcaataataatggcgatatgtggcgtattttggatcatggcgccatctcgcttggtgataaatgggatttgatgtacgtcggtatgtaccagaatatcgattgggataataacctgggtactgagtggtggaccgtgggcgtacgtccaatgtacaagtggacgccaatcatgagtaccctgctggaagtcggctacgacaacgtgaaatctcagcagaccggcgatcgtaacaatcaatataaaatcaccctggcgcaacagtggcaggcgggcgacagcatctggtcgcgtccggctatccgtattttcgccacctacgcgaaatgggatgagaagtggggctatatcaaagacggcgataacatttcccgttatgccgcagcgactaactccggcatttccaccaacagccgtggcgatagcgatgagtggaccttcggcgcccagatggaaatctggtggtaa

SEQ ID NO: 388607 - DNA, 1110 bp, Salmonella enterica
atggcgagcgtacagctacgaaatgtaacgaaagcctggggtgacgtggtggtatcgaaagatattaacctcgatatccatgacggggagttcgtggtgtttgtcggaccgtcaggctgtggtaaatcgaccttgctgcgtatgatcgccgggcttgaaaccatcaccagtggcgacctgtttatcggggaaacccgtatgaatgatatcccgcctgccgagcgcggcgtgggcatggtattccagtcttatgcgctctatccccatctctccgttgcagaaaacatgtctttcggcctcaagctggcgggcgccaaaaaagaggtaatgaatcaacgcgtcaaccaggtggcggaagtgctgcaactggcgcatctgctggaacgtaagccaaaagcgctttccggcgggcagcgtcagcgcgtagcgattggccgcacgctggtggcggagccgcgtgtgtttttgctggatgaaccgctctctaacctggacgccgcgctgcgcgtgcagatgcgtattgaaatttctcgcctgcataaacgtctgggccgcacgatgatttacgtcacccacgatcaggtcgaggcgatgacgctggccgacaaaatcgtggtgctggacgccggtcgcgtcgctcaggtcggtaagccgctggagctgtaccactatccggcggaccgctttgtcgcgggcttcatcggctcgccgaagatgaacttcctgccggtgaaagtgaccgccaccgcgattgaacaagtccaggtcgaactgccgaatcgccagcaaatctggctgccggtcgaaagtcgcggcgtgcaggtcggcgccaatatgtctttaggcattcggccggaacacctgctgccgagcgatatcgccgatgtcaccctggaaggcgaagtccaggtggtcgagcagttagggcacgaaacacaaattcatatccagatccccgccatccgtcaaaacctggtttatcgccagaatgacgtggtgttggtagaagagggcgccacattcgctatcggcctgccgccagagcgctgtcatctgttccgcgaggatggcagcgcatgtcgtcgtctgcatcaagagccgggtgtttaa

SEQ ID NO: 388608 - DNA, 1191 bp, Salmonella enterica
atgaagattaaaactggcgtaggcatcctcgcattatccgcacttacgacgatgatgatttccgccccggctctcgccaaaattgaagaaggtaaactggttatctggatcaacggcgacaagggctataacggtctggccgaggtcggtaaaaaatttgagcaagacaccggcattaaagtgaccgttgagcacccggataagctggaagagaaattcccgcaggtggcagccaccggcgacggtcctgacattatcttctgggcgcacgaccgttttggcggctacgcgcagtctggtctgctggcggaggtcactccggataaagcgtttcaggacaaactctatccgttcacctgggatgcggtacgttataacggcaagctgatcgcctaccccatcgccgttgaagccctctccctgatttataacaaagacctcgtcccgaacccgccgaaaacctgggaagagatcccggcgctggataaagaactaaaagcgaaagggaagtcggcgataatgttcaacctgcaagagccgtatttcacctggcctttgatcgccgctgacggcggttacgcgttcaaatttgaaaacggcaagtatgacgtgaaagacgttggtgtcgacaacgccggcgcgaaagcgggcctgactttcctgatcgatatgatcaagaacaaaaatatgagcgccgataccgattactccatcgccgaagcggccttcaataaaggcgaaacggcaatgaccatcaacggtccgtgggcatggtcgaacatcgacaagagcaaagtcaactacggtgtcaccctgctgccgaccttcaaaggtaaaccctcgaaaccgttcgtcggcgtgctgagcgcggggattaacgctgccagcccgaataaagagctggcgaaagagttcctcgaaaactacctgctgaccgatcagggtctggaagcggtgaacaaagataaaccgctgggcgccgtggcgctgaaatctttccaggagcagttagcgaaagacccccgtatcgccgccaccatggataacgcccagaaaggcgagatcatgccgaatattccgcagatgtccgccttctggtatgcggtacgtacggctgtgatcaacgccgccagcggccgtcaaaccgtggatgccgcgctgaaagatgcacaaagccgtatcactaagtaa

SEQ ID NO: 388609 - DNA, 1545 bp, Salmonella enterica
atggatgtcattaaaaagaaacactggtggcaaagcgaccagcttaaatggtcagtaattggtctgctgggcctgctggtgggttaccttgtagttttaatgtacgtacaaggggagtatctgttcgccatcatgacgctgattttaagctctgctggcctgtatattttcgcaaatcgtaaaacctatgcctggcgctacgtttaccctggcctcgccggcatggggctgtttgtgctattcccgctggtgtgcaccatcgctatcgcctttactaactacagcagcaccaaccagctcacctttgaacgcgcccagcaagtgctgatggaccgttcttatcaggcaggaaaaacctataacttcggtctttacccgagcggcgacgagtggcaactggccctcaccgacggagaaacgggcaaacattacctgtctgacgcattttccttcggcggcgaacaaaaattacagctgaaagagaccgatgccctgccgggcggcgaacgcgccaatctgcgaataatcacccagaaccgtctggcgctgaaccagataaccgccgtcctgccggatgaaagtaaagtgattatgagctcgctacgtcagttttccggtactcgtccgctgtacacactggctgatgacggcctgctgaccaataaccagagcggcgtaaaataccggccaaacaacgatagcggttattatcagtcgatcaacgccgacggaagctggggtgatgaaaaactcagtcctggttataccgttactatcggcgcgaaaaactttacgcgcgtctttaccgacgaagggatccagaagccctttttcgctatcttcgtctggaccgtggtcttttcggtcctcactgtggtgttaaccgtggcggttgggatggtattggcctgcctcgtacagtgggaagcgctgaaaggtaaagctatctaccgcgtcctgctgattctgccctacgccgtaccgtcgtttatttcaattttgattttcaaagggttattcaaccaaagctttggtgaaatcaatatgatgctgagcgcgctgttcggcattaaacctgcctggttcagcgaccccaacaccgcgcgggcaatggtgattatcgtgaatacctggctgggctatccctacatgatgatcctgtgcatgggactgctgaaagcgattccggatgacctgtacgaagcctccgcaatggacggcgccggtccatttcagaatttctttaagatcaccttaccgctgctgattaagccgctaacgccgctgatgatcgccagcttcgcctttaactttaataactttgtcctgattcagttattgaccaacggcgggccagaccgtctcggcaccaccacgcctgccggttataccgatctactcgtcagctacacctaccgtatcgcctttgaaggcggcggcggtcaggacttcggtctggcggcggccattgccacgctgatcttcctgctggtaggcgcgctggcaatagtgaacctgaaagccacgcgtatgaagtttgattaa

SEQ ID NO: 388610 - DNA, 891 bp, Salmonella enterica
atggctatggtccaacccaaatctcagaaactgcgtctcctcatcacgcacctggggctgctgattttcatcgcagcgattatgttcccgctgctgatggtcatcgctatctcgctacgtgaagggaacttcgccaccggaagcctgatcccggataaaatctcctgggaacactggcggctggcgctgggtttcagcgtggaacatgcggatggtcgggtaacgccgcctcccttcccggtcctgctgtggctgtggaactcggtgaaaatcgccggtattaccgccattggcatcgtggcgctctccaccacctgcgcctacgctttcgcacgaatgcgttttccaggtaaagcaacactgcttaaagggatgctgattttccagatgtttccggcggttttgtctctggtggcgctgtatgcgttatttgaccgcctgggacaatacattccatttatcggtctgaatacgcatggcggcgtgatcttcgcctatcttggcggcattgcgctgcatgtttggacgattaaaggctacttcgaaactatcgacagttcgctggaagaggccgccgcgctggatggcgcaaccccgtggcaggcatttcgcctggtgctgctgccgctttccgtaccgattctggcggtggtgtttattctgtcgttcatcgcggcgattaccgaagttccggtcgcctcgttgttactgcgtgatgtggacagctatacgctggccgtgggtatgcagcaatatctcaacccgcaaaactatttgtggggcgactttgccgccgccgccgtcctttccgctattcctatcaccctggtgttcctgttggcgcaacgttggctggtcaacggcctgacggctgggggtgtgaaaggttaa

SEQ ID NO: 388611 - DNA, 411 bp, Salmonella enterica
atgatgccattatcgcgctcacgtcttgagtttatcgccacgattttacaaaacgtactaaatttggggctgcttaccctcggtctgatcctggtcgtttttctcggtaaagagacggttcatctggcggatgcattattcgcgcctgagcaagccagcaaatatgaactggtggaagggctggtgatctactttctttatttcgaatttattgcgctgattgtgaagtactttaagtctggccttcactttccgctgcgctatttcgtgtacattgggatcacggcgattgtgcgtctgatcattgtcgatcataaaacgccaatggatgtattactctattcggcggcgatcctcctgttggttatcacgttgtggttatgtaattcgaaccgactacggcgagaatag

SEQ ID NO: 388612 - DNA, 2097 bp, Salmonella enterica
atgaaaaaaacacatctgttcagcgtgctggcgctgggtattagcgcggcctgccatgccgaaacatatccagcccctgttggaccttcacaatctgactttggcggcgtgggcctgctgcaaacgccgacagcgcgtatggcgcgtgaaggggagatgagcctgaactatcgcgataacgatcagtaccgctactactcggcttcggttcagcttttcccgtggctggaaaccacgttgcgctataccgatgtccgtacgaaaaagtacagcagcgtggaatcattctccggcgaccagacttacaaagataaagcgtttgatgtgaaactgcggttgtgggaagagagttactggatgccgcaggtggcggttggcgcgcgcgatatcggcgggacggggctgtttgatgcggaatatattgtagcgagtaaggcctgggggccatttgatttttcattaggtctcggctggggctatcttggcaccagcggcaatgtgtctaatcctttctgttcgtatagtgataaattctgttcgcgtgataacagttataaagaggcaggttccgtcgacggtagcgatatgtttcacggcccggcttcgctgtttggcggcgtggaataccagaccccgtggcaaccgctacgcctgaagctggagtatgaaggcaataactatcagcaggattttgcggggaaactggaacagaagagcaagtttaacgtcggcgccatttaccgcgtcaccgattgggccgacgttaacctcagctacgagcgcggcaacacctttatgtttggcgttacgctgcgcaccaatttcaacgatttacgtcccgcgtatcatgacaattcacgcccgcaataccgaccacagccgcaggatgccatcctgcaacattcggtagtggctaatcaattaacgttattgaaatataatgccggtctggcggacccgaaaatccaggtcaaaggcgatacgctgtacgttaccggcgaacaggtgaagtaccgcgactcccgtgaggggatcgtgcgcgctaaccggatcgtcatgaacgatctgccggaggggatccgcacgatccgcgtgacggaaaaccgccttaatctgccgcaggtcaccactgaaaccgatgtcgccagcctgaaacgccatctggaaggcgaaccgctgggacatgaaactccgctggcgcaaaaacgcgtggagccgatcgtgccagagagtactgaacagggctggtatatcgacaagtcgcgcgttgattttcatcttgatcccgtgctgaatcagtcggtaggcggcccggaaaacttctatatgtatcagctgggcgtaatgggaactgcggatctgtgggtcacggatcatctgctcaccacgggcagcgtgtttgccaatatcgccaacaactacgacaaatttaactacaccaatccgccgaaggactcgcatctgccgcgggtgcgtacgcatgtccgtgagtatgtgcagaacgatgtttatgtgaataacctacaggccaactacttccagtattttggcaatggtttctatgggcaggtctatggcggttatctggagaccatgtttggcggtgccggggcggaagtcctgtatcgcccggtagacagcaattgggcgtttggtctggatgccaactacgtgaaacagcgtgactggcgtagcgcgcaggatatgatgaagtttaccgattacagcgtgaagaccggacatttgaccgcatactggacgccgtcgttcgcccaggatgtgctggtgaaagccagcgttggtcagtatctggcgggcgataaaggcggtacgctggagatcgccaaacgcttcgatagcggtgttgttgtcggcggttacgcgacgattaccgatgcgtcgccggatgaatatggggaaggggattttaccaaaggcgtatatgtttccgtgccgctggatctcttctcgtccggcccaacccgaagtcgtgcggcaattggctggacgccgctgacgcgtgacggtggtcaacagcttggccgtaagtttggcctgtatgatatgaccagtgacaggagcgtaaatttccgttaa

SEQ ID NO: 388613 - DNA, 738 bp, Salmonella enterica
atgatgaaaaggacgataagcgcgctggcgctggcctttatcgcgtcatccgcctttgccagcggcactgttaccgtttttacccaaggtaatagcgagcctaaaacgctgacagacgctgagcgtctgctcgatttagtcggacagccgcgcctggcaacgagctggtggcctgcggcggtgataggcgaagaacaggcgaccgtgacggcgcgtcaacagcagcaggaacttctcgggcgactggcggcgctcagcgctgaggaaaatggcgatgcggcggcggcgataaatacactgcgccgacagattcaggcggtgaaggtgacgggcagacaattcgtgaatcttgatcctgacgtggtgcgggtgagcgaacgaggtaacccgccgctgcaaggtcactacacgctctgggtcgggccgcaacccacgcaggtgacgctctttggcttgattagccagccgggcagccagccgttcgtccctgggcgggacgtcgccagttatcttgagggtcagcgcttactcagcggcgcggatcgtagctatgcctgggtggtttaccctgatggacgcagccaaaaagcgccggtggcttactggaataagcgtcatatcgagccgatgcccggcagcattatttttgtcggttttgccgattccctttggcgcggcacgccggaggcgatgaatgccgacattcttcataccctgacgcagcggataccggaataa

SEQ ID NO: 388614 - DNA, 639 bp, Salmonella enterica
gtgaagcgactcgcacttatcctgatttgcctgctattacaggcgtgttcggccagcaccaaaggcctgggcgattcactgtgggacagtttgttcggtacgccaggcgtacagttaacggatgacgatattcaaaacatgccttatgccagccagtacatgcagcttaacggcggtcctcaactgtttgtggtgctcgctttctcggaaaacgggcagcagaaatgggtgacgcaggatggcgcgacgatcgtgacgcagcatggccgtctggtcaaaactctgctcagcggcgacaacctgatcgatgtgaataatctggcggccgacccgctggcgaaaccaggacagattatcgatggcgcgacctggactcgcaccctgggctggaccgaacatcgccaggtgcgttacgccaccgcccgctccgtttttacatggcgagggaccgatagcgtgaacgtcggcagtgaagagaccgccgtgcgggtgttagatgaagaagtgacgaccgatcaaacgcgctggcgtaatcgctactgggttgatagcgaaggccaaattcgccagacggaacagtatctgggcgcgaattactttccggtaaaaaccacgctgattaaggcggcaaaatcatga

SEQ ID NO: 388615 - DNA, 246 bp, Salmonella enterica
atgatgaaaaaagtactgtatggcatttttgccataaccgcgcttgcggcgacatctgtctcggcagcccccgttcaggtgggtgaagcggcagggtcggcagcgacgtcggtatcggcgggaagctcctccgctaccagcgttagcaccgtaagttcggcggtgggcgtcgcgttagcggcaaccggcggcggcgatggttctaataccggaaccacgaccaccacgaccaccagtacccagtag

SEQ ID NO: 388616 - DNA, 1650 bp, Salmonella enterica
atgaaaaacatcaatccaacgcagacttctgcctggcaggcgctccagaaacactacgatgaaatgaaagacgttacgatcgctgagcttttcgcgaacgatagcgaccgtttcgctaaattttccgcgacgtttgacgatctgatgctggtggatttctccaaaaaccgcatcaccgaagagacgctggcaaaattacaggatctggcgaaagagaccgatctggccggcgcgattaaatccatgttctccggcgagaagatcaaccgcaccgaagaccgcgccgtgctgcacgtggcgctgcgtaaccgtagcaatacgccgatcatcgtggacggcaaagatgtgatgccggaagtgaacgccgtgcttgagaagatgaaaactttctcgcaagcgattatctccggtcagtggaaaggctacaccggtaaggccatcaccgacgtggtgaacatcggtatcggcggttccgacctcggcccgttcatggtgaccgaagcgctgcgtccgtataaaaaccatctgaacatgcacttcgtctctaacgtcgatggcacccacatcgctgaagtgctgaagaaagtgaaccctgaaaccacactgttcctggtcgcttctaaaactttcaccacccaggaaaccatgaccaacgcccacagcgcgcgcgactggttcctgaaaagtgcaggcgatgaaaaacacgtggcgaaacactttgctgcgctctccaccaacgccaaagcggtcggcgaatttggtatcgacacggccaatatgttcgagttctgggactgggtcggtggtcgttactcgctgtggtctgccatcgggctgtccattattctgtccgtcggtttcgacaactttgtcgagctgctttccggcgcgcacgcgatggacaagcatttctccaccactccggcggagaaaaacctacccattctgctggcgttgattggcatctggtacaacaatttcttcggcgcggaaaccgaagccattctgccgtacgaccagtatatgcaccgtttcgccgcctacttccagcagggtaacatggaatccaacggtaaatacgttgaccgtagcggcaacgccgtggattaccagacaggcccaattatctggggcgaaccaggcaccaacggtcagcacgcgttttatcaattgattcaccagggtactaaaatggtgccgtgtgattttatcgccccggctatcacccataacccgctatccgatcatcatcagaagctgctgtctaacttcttcgcgcagaccgaagcgctggcgtttggtaaatcccgcgaggtggttgagcaggaatatcgcgatcaggggaaagatccggcgcagcttgaacacgttgtgccattcaaagtgtttgaaggcaaccgcccgaccaactctatcctgctgcgcgaaattacgccgttcagcctgggcgcactgattgcgttgtatgagcataaaatctttacgcagggcgtcatcctgaacatctttactttcgaccagtggggcgttgagttgggtaaacagttggctaaccgtattctgccggagttgggcgatgataaagctatttcgtcccatgatagctctactaacggtctgattaaccgttataaagcctggcgcgcctga

SEQ ID NO: 388617 - DNA, 1350 bp, Salmonella enterica
atgacagagatcgttgtttccaaatttggcggtaccagcgtcgctgattttgacgccatgaaccgtagcgcggatatcgtactttccgacgccaatgttcgtttagtcgtgctttccgcgtctgccggcatcactaatctgctggtggcgctggccgaagggatggagcctggcgaacgtttcgctacgctcgacgccatccgtaaaatccagttcgatatccttgatcgtctgcgtcatccgaatgtcattcgcgaagagattgaacgcctgctggaaaacatcactattctggcggaggcggcatcgctggcgacatcggcagccctgaccgatgaactggtcagccacggcgagctgatgtctaccctgctatttgttgagatcctgcgtgaacgcgacgtacaggcccactggttcgacgtgcgcaaagtgatgcgtaccagcgatcgctttggtcgtgcggaaccggatgtcgcagcgcttgcggaactggccgcgcagcagttgctcccgcgcctgagcgaaacgttggtcattactcagggctttatcggcagtgaaagcaaaggccgcaccacgacgttaggccgcggcggcagcgactatacggcagcgttgctggctgaagcgctccatgccgcgcgagttgatatctggacagatgtgcccggtatttacaccaccgacccgcgcgtagtgcccgtcgcgcagcgaattgatgagatcgactttgaagaagcggcggagatggcaactttcggcgcaaaagtactgcatccagccaccttactcccggccgtgcgtagcgatatcccggtcttcgttggctccagtaaagatccgcaagcgggcggtacgctggtgtgcaataaaacccaaaacccgccgctgttccgcgcgctggcgctgcgccgcaatcaaacgctattgacgctgcacagcctgaatatgctgcactcgcgaggtttcctggcagaggtgttcggcattctggcgcggcataatatttcggtagatctgattaccacttcggaggtgagcgtcgcgctgacgctggatactaccggctccacctccacgggcgatacgttactgacccaatccttattgatggagctttccgcgctgtgtcgggtagaagtcgaagaaggactggcgctggtcgcgctgattggcaacaacctgtcaaaagcctgcggtgttggtaaagaagtgtttggcgtcctggaaccgttcaacattcgcatgatttgttacggcgcctccagccacaatctgtgcttcctcgtgccgggagacgatgccgagaaagtggtgcaaaagctacatcagaacttatttgaataa

SEQ ID NO: 388618 - DNA, 348 bp, Salmonella enterica
atgattcagaaatcaaaagaaatggttcggcttccggagattattaacgatctggcgtttcatgcgtcgcaggtacttattgaaagcatgaatattgatagcgcgtcagccgaaaatgccggtcaggcaattgctgacagaatgatgcgcaactggggcgggcaaagcatttatttccccaaaggtatctctggccgggcctcggaacgggattatcagatttacagcgagtgcgatgggcgtaattatgcggagctggccaaaaagtacaatttaacactgcagtggatctataaaatcgttaagcgggtccacacggaaaaacagcaccagcggcgtatgctgtaa

SEQ ID NO: 388619 - DNA, 288 bp, Salmonella enterica
atgcgaaaaattattgttccccgactttccggctggctgattgcctctgtcgtactgtttgcgcttatcggctggacatcatcagcgcaaattccggtcgtcatctataaactcagcctggtttcgttatcagcggtgctgggttactggctcgaccgtagtcttttcccctgggcacgtcccgactccttttgcccctgggaagaatcgctgtgctgcgccgcggcgatgattcgtcgcgcgatcatcgttgcggcaatttgccttgccgtcgcgctggggctgtaa

SEQ ID NO: 388620 - DNA, 606 bp, Salmonella enterica
atgcgctatcaatacgcatgtttgctctgcgcgctctgttttctgcccgccgacgccgccgaaccgccgcgtgcttctctgccgtggcgcaacgagttaattcgcaccgcgcgcgaaatctgggggcttaacgcccccgttgctgattttgccgggcaactacatcaggaatccggctgggcgcctgacgcgctttctccggctggcgcgcagggtatggcgcaatttatgcccgcaacggcaaaatgggtaagccagttgtacccagcgcttcgcgagaacaagccgtttaatcccgcctgggcgatacgcgcgctggtacagtatgaccgccagttgtggaaaagcgtgtcagcaaaaaatagctgccagcgaatggcttttactctgagcgcctataacggcgggcaaggctgggttaacagagataaaaagctggccgccgcaaaggggttagatgcgtccatctggtttgaacatgtagaacgcgttaacgccgggcgcagcgccgcaaactggcgcgagaatcgtcactattccaaagcgattttatatcaacacgcttcccgttatttgcaatgggggcaggccagttgcattcattaa

SEQ ID NO: 388621 - DNA, 315 bp, Salmonella enterica
atgaaactcagtatcgatttttgggaagtcatctccctcttactttcgtttgttggattaatgtttgccgccggtaaattgctgctggcgcaaattgaaaaacggctgaatgaacgttttgaagcactggaagctgcccggcgcgaatcagaagcgggctggtccaggctggagagagaatttctggaatttcgcgccgatttaccgctgcattatgtccgccgcgaggattatcttcgcggccaggccgttctggaagcaaaactggatgcgctatatagcaaaatagaactgattcaacgaggtaaccattaa

SEQ ID NO: 388622 - DNA, 456 bp, Salmonella enterica
atggaaacattatctgttatacacaccgtggcgaatagactacgtgaattaaaccctgatatggatatacatatttcatcaaccgatgcgaaagtatatatcccaacaggacagcaggtaacggtattaattcactactgcggttcggtttttaccgccccagaaaatacgaatgccacggtacaaaaacaactaatccggatttccgccaccgttattgttccgcaaataagtgacgcgataaacgcgctggatcgtctacgtcgttcgttggggggcattgaacttccagactgcgatcgtccgctctggctggaaagcgaaaaatatatcggcgacgccgcaaacttctgccgttacgccctggatatgaccgccagcaccctgtttatcgcggaacaggaaagcaaggactcccccctgctgacaatcgttaattatgaggaaattcaatga

SEQ ID NO: 388623 - DNA, 198 bp, Salmonella enterica; identical to SEQ ID NO: 373854

SEQ ID NO: 388624 - DNA, 1428 bp, Salmonella enterica
atggcagctaattacctgcacggtgtagagaccattgagatcgaaaccggcccacgtccggttaaggcggttaaatctgcggttattggtctgatcggcaccgcgccatgcggcccggttaaccagccgacgctgtgcctttctgaaagcgacgcggcacagtttggcccaggtctggcaaatttcaccatcccgcaggcgctgaaggcgatctacgatcacggcgcagggacggtcgtggtgattaacgtgctgaatccggcggtacacaaaagtaccattcccagtgaaaccgtgaaggttgatgacaacggtcagattcaactcaagcacggggccgtgcaaacgatgaacattggccgcagcacgaacgccggaaacgcttatatcaaaggcaccgattacaccattgatatgctgaccggtaaaatcacctgcatggggaccaacctgaaacccggcgttcaggcctatgtaaattatacttacgcggaccccaccaaagtgactgccgccgatattgttggcgcggtaaacacggcgggtgaccgtaccggcatgaagctgttacaggacacctggaaccagtttggtttttacgcgaagatcctgattgcgccggtcttttgtacgcaaaactcggtcgccgttaagcttatcgctcaggcagaagcgctgggagccattacctacattgatgcgcccatcggcacgactttccagcaggttctggcagggcgcggtccgcagggggcgattaacttcaataccagttccgatcgcgcgcgtctgtgctatccgcacgttaaagtgtacgacagcgcgacgaacagcgaagtcctggagccgctctcctctcgcgccgctggcctgcgtgccaaagtggatctggaaaaaggcttctggtggagcaactccaatcaggaaattcagggcattaccggcgtagagcgctcgctgtcagcgatgatcgacgatccgcaaaccgaagtgaatcaactgaatgaaaacggcatcaccaccatcttcaacagctatggctccggtttgcgcctgtggggcaaccgtaccgccgcctggccgacggttactcatatgcgtaactttgagaacgtgcgccgtactggtgatgtgattaacgaatcgattcgctattttagccagcaatacatggatatgccgattaatcaggcgctgatcgacgcgctaaccgaatcggtgaacacctggggccgcaagctgattgccgacggcgcgttgttgggctttgaatgctggtacgacccggcgcgtaacgaacagactgaactggcagccgggcatctgttgctgagctacaaattcaccccgccgccgccgctggaacgtctgacgtttgaaaccgaaattacctctgaatatttagtttctctggagagcaatcgctaa

SEQ ID NO: 388625 - DNA, 525 bp, Salmonella enterica
atggctggaaaaattcaaattaaccgtattaccaacgccaatatttatcttgatggtaataatcttttaggtcgcgcgagtgaaattaaactgcctgatatcagcatgattatgcaggagcataaagcgctggggatggtcggtaaaattgaactgcctgccggttttgacaaactggaaggtgaaattaaatggaactcgttttaccacgacgtcatgcgtaaaacggcaaatccgtggcaggcggtggcattgcagtgccgctccagcatcgattgttataactcgcagggtaaagcggatcagttagcgctggtgacgcatatgaccgtaatgtttaaaaagaacccgctgggaacgtttaaacagaatgaaaacccggaatttagcagcgccttcggctgcacttatattaaacaggtggttgacggtgaaacgcttcttgaactggattatctggcgaatattttccgcgtaaatggcgcggatcaattaaatgcctaccgcaataatattggcggttaa

SEQ ID NO: 388626 - DNA, 318 bp, Salmonella enterica
atgaacgaaaaatataccctgcaatttccgtttacctccgccgccggggaacgtatcgacgttctgcaattacgtcgcctgaaggtaaaagatatgcgcgccgcgcgacgcgccagcgataaaccggaagagtgggatgagccgctgatggcggctatgaccgggctggtaaccgaagatctggcggaaatggatctgctggactatcaggcattgcagaaacgatttcaggccatgcttagcatggctacagaacccacagcaactgtggcaggcaatggcgctgctggcgaggtggtttcgttttccgcccagtga

SEQ ID NO: 388627 - DNA, 2355 bp, Salmonella enterica
ttggccaacgacattattactcagcttcaggcgcgtaatgagacgttgacgcaggcaatagcccgttacggctcactcaacgccagcacgctgcacacgctcagctttgagcaaacaaaaatcacccggcttacgcaacagctcgctaactctgcccttcgccgggaagagaacgataaacagcgcgccgggttgctggaaaaaacacaaacgttcgccggacagctcggcaagctcctgaacgttgagactcccgactggaagctgccttacgaatttcagggcaacatggtcgatatggcggcgaaaggcggcatggataacaccgcgcgggacgccctgagcctgaatatccgcgactggagccttgatttcaatcaggatcaaaaagatctgcaaagcgccgccgccacgatgattgaaggcggcgtcagcgcattgcaggatcttagccgctacatgcccgatatcgccaaagccgcaaccgcctcccgcgacagcgcgcaaagctgggcgcaggcggctctggccactcgcgacaaactgaacatcgcccctgacgacttccgttttgcgcaaaatatgctgtacagcgtggcaaaaagcggcggcggctccgttgcagagcaaacccagtggattaacgcctttgccggaaaaaccggcgctcaggggaaagaaggcattgcggaactgaccgcaacgatgcaaatcgccatgaaaaatgcccctgacgcaggcgcggcggcagcgaatttcgaccatttcctgaaatccgccttctcgaaagagacggacagttggtttgcccgccagggcgtggatcttcagggatcgctgctggagcatcagcaaaatgggatcggcgtgacggaagcgatgacccacatcgtgcagatgcaactggagaaaatgaacccgcagatcctcgacaccttcaggcaaaccatgaagattgaggatctttccgcgcgcggcgacgcgctacaggccatggtggagaaatttaacctcggcgcgatgttcggcgatgcgcaaacgcgggattttctcgccccgatgctggcgaatatggacgaatatcgccagctaaaagcctccgcaatgcaggcggcggggcaacatgttattgatgatgacttcgccgcgaaaatgacatcgcccggagaacagaccaaagcgttacaactttcacttaacgatctgtggctgaccgtcggcctggaactgatgcccgccattggcgaactggcgcaaagcatcacgccgctggtgcggcagttcagcgcctggctgcgggaaaatccggcgctggtgcaaggggtcgctaaagtcgttagcgttatctggctgttcaacggggcgctgaatattctcaggctgggagcaaacctcattgcgtcaccgtttattcgcctgatcgatatcttcctgaaggtcaaagccggtctggcgctgggcggcggcagtcgcgcgctgtcggttctgaaatcgtttggcaacggtgcgaaaagcctgacgatgctgctgggaaacggcctgataaaagggctacggctggtcggccagacgtttatctggctgggtcgggcgctgctgatgaaccctgtcggcctgactatcaccgctatcgcaggcgccgcctatttactttatcgctactgggaaccgatttccggtttctttgccggagtctgggagcgcatcaaaaccgcctttgacggaggcattgccggcgtcacgcgtctgattctcgactggtcgccgctggggttgttttaccgcgccttcgccggcgtactggactggtttggcattgaactccccgccagtttcagcgaatttggcggcaatattctcgatagcctgatcaacggcattctgaatgcgcttcctttcctgagcggggcgattgagaagataaaagcgctgatccccgactgggcgaaaagcgcgctgggcatcagcgctgaaatgccgtctgtcgccgccgccgtccccggtattgccggaacaatggtcgcgcaacaggccagcgcgccgctggcatcgggagcgaaagcggtgacaacctcggccaaaacgatgacctcgccgcagccaatgaagacgaaaagcgccgccacgccgccgacgccagccgcgcttcccggcaaatccggcgggaaaccttatatgctgccctcccgcgcgcaaagcaacgtgcaggtacacttttccccgcaggttaccgtgcagggaagcggcgcgaatgccgctaaagatatcaacaacgtgctgtcgctgagcaaacgcgagctggagagaatgattaacgatgtcatggcgcaacaacggcgccgggagtacgcataa

SEQ ID NO: 388628 - DNA, 954 bp, Salmonella enterica
atgtatgccgtattaggcgaaatagaatttgacgtcgtcgcttactgggacgaatttgaaagcacgatgggcgtggattataccagccatgcccgtattgaagggaaaccgggcgtgcaatttatcggcgataagctggacaaaattaccctgaaattcaactttcatagtcagtattgccagccgaccaccgagctgaaccgtctgcgggaagcgatgaccgcgcaccaggcgatggcgctggtgttcggcaacggcgattatcgcggctggttcgtgattaccgatctgaccgctacccaccagcacaccgatccttacggtaacgtcattgcccagggcggcagtctgtcgctacaggaatacaccggcgatccgaagagcccgttgctgcctccggccatcaccactcaggaaccgaacattgacgagatgttggatgagcttcccgacgttaacgattcctggttcgatgaactgctgagcgtcgttgaagagggtatgcgtgaagccaaagagatgatggatgaggtggccgacgccattgatgacatcaaaaaaacgatcgcccaggcgaaagagctggtgaaggaagccaaagcgctgaaagaaaaatgcggcgatattgtcgattcgctgaaaaaaaccatgagttcgatagacgcgctgttccagcagccgctggatttgcaaacgctggccgggctgccgaaagcgctggcggcaaaaatgcaggaactgatcgacagcctgccggggatccgcgaatgcgcgggcgatgccggcacgcttattgaacacgccgaatcgctgtttgacgctatcaccagcagcatcgcggaagcgacttacgacagcgccgcgacgctggtcaatcaggcgcgcggcacgctgcaaacaagcgctcctgacgtgagccagcttgccgccgccgatattacgaggagtctgtaa

SEQ ID NO: 388629 - DNA, 210 bp, Salmonella enterica
atgcgctaccttgaacatgtcaccaccgacggtgagcgctgggataatctcgcctggcgctattacggcgatgcgctggcctacgaacgcatcatcgcggccaatcctcacgtcgctattatgccggttttaccgtcaggcgtgcggctggtcatcccggttatcagcgtcacgcaaacgaccccggagctaccgccatggctgagataa

SEQ ID NO: 388630 - DNA, 1044 bp, Salmonella enterica
atggctgagataacggtatccggcggggtgttcgccaccctgacgcccatttttaccctttggtacggacataaagagatcacttacgacatcgcgccttacgtcaccagcatcagttacagcgacagtattaaaaacgagtcggatgtcattgccattgcgctggaagatagcgccgggcgctgggtaaacgaatggtatccgggaaaaggcgacacgctggcgctgcgcctgggctaccagggcgaagatctgctcgattgcggaatctatgtcattgataaaattgatatcagcgcgccgccttcgacggtcaatatcgacggtatcgccacctcggtcagcaaagcgctacgcaccaaaaacagccagggctttgaggagacgacgctttccgccatcgccagtcgcatcgcgcaaaaacacggtttaacactggcgggcaagattgcgccgctgacgattgatcgggtcacgcaatatgccgaaaccgatgtggcgtttctcaaacggctggcgagtgaatatggctataccgtgaaagtgacggcgacggagctgatcttttcgcatctgccgacgctgcgctgtctggcgccggtgaagacgctcaggcggacggatatttcgcactacacgttcaaagataccatcaaccggatctacaaaaacgccaccgtgcagcatcaaaatagcaagcaaaaagaactggttatctacacccatgacagccaggaaaaagccccggcgcgcggtgcggcgaccagcgccgataccctgaagatcaacagtcgcgccccagatgccggcgcggcgcaggctaaagccaatgccgcgctggacagccacaacgaataccagcaaaccggcacgctcagcttgatgggctgcccgcagttgacggcgggcaacaagatagaactgagcgattttggcgtactttccgggcagtggctgattgataaatccatgcacaaactcacgcgcagcggcggctacactaccgaaatcgacatttcacgcggaccggcaaccagccagtaa

SEQ ID NO: 388631 - DNA, 723 bp, Salmonella enterica
atgaaaggcgttacccgccagacgggcattatcagcgatattgatgaggcggtcgtgcgcgtcagagtcactctgccggagtgcgataacctgcgcagtaactggcttgcggtgctgcaacgcaacacgcaggacaacaaagattactggttgccggatattggcgaacaggtggaggttttgctcgacgacaacggcgaggatggggtggtgctgggcgcggtctactccagcgtggataccgcgccgctgacctcgcgcgacaaacgctacgtgcagttttccgacggcgcggcctttgaatatgaccgtgcgttacaccagctcaccgtcaacggcggcatagaaaaaatcgtcattgaagtgaaggaacgtacgcagcttacttcaccgcaagtagaggtcagggcgcagcacgtcacggtgatatcagaaaccgtagacgtggcggccacctccgtgggcgtcaaggcggtagatgtcaacgtggaagcgtcccatacgggcattaaagcgctgaatgtcaccgtcgatgcgccgctcagcatctttaccggcgacgttaccgtgatgaaaaaactcacctggcttggcggtatggcaggcagcggcggtattggaaacagcgcggtgattaccggcaacgtgaatgtcctcggcaacgttaacgccagcggcacgctgatggacaacggcggcaactctaaccaccactcccactaa

SEQ ID NO: 388632 - DNA, 930 bp, Salmonella enterica
atgaaaatttcattagtggttcccgtctttaatgaagaggacgcgatccctattttctataaaacggtcagagaatacagttcacttaaaccttatgacgttgagattatcttcgttaatgatgggagtcacgatgcgactgaatcaatcatcagcgcattagctgttgccgatcctcttgttgttccgatctcatttacccgcaattttggtaaagaacctgcactttttgccggattagatcacgcgaccggagatgtggtgatccctatcgatgttgatttacaagatcccatcgaagtaatcccacatttgatcaataaatggcaggctggtgcagaaatggtgctggctaagcgtatcgatcgttcaacggatggccacctgaagcgtaaaagcgctgagtggttctacaggctgcataacaaaatcagtacgccaaagattgaagagaatgtcggtgattttcgattgatgtcgcgcgagattgtagaaaatatcaagctattaccagaacgtaaccttttcatgaaaggtatactttcatgggttggaggtcaaacagatgttgtcgaatatgcccgtgctgaacgtgtcgcaggtaactcaaaatttaatggctggaaactctggaacctggcgctggaggggattacaagtttttctactttccctttgcgtatctggacgtatataggagtgagcgtttctgccctctccctgatatatgccatgtggatgatcattgataaattgatgtggggaaaccctgttcccggttatccttcgcttatgaccgcgattctcttcttaggcggcatccagcttatcggcataggcatcatgggtgaatatatcggacgcgtttacacggaggtgaagcaaagaccccgctatatcgtgaaaaacaaaaaaacaatgatggaataa

SEQ ID NO: 388633 - DNA, 360 bp, Salmonella enterica
atgaacacgaaaacacgaccctcgaccctgcactggcaacctgccttgcaacgtcctgaagaatacgtctgcgggctggatgatattcatcaggcaatacacatcattctgcgcacgccgcgcggcagcgatccccacaggccgctttttggcagcaatctgtggcgctatatcgattacccgatcgagcgggccattccgcacgttgttcgggagtcggtggaagcgattcgcatgtgggaaccccgctgccggttgctgaaggtgacgccgacgattgacggcgaacacctgacgttacgcgtgcaatggcgcgccgcagacggcgtaatcaactcaacggaggtgttatggcgatag

SEQ ID NO: 388634 - DNA, 1116 bp, Salmonella enterica
atggcgatagccgaacccgactttattgaccgcgatcccgcgcaaatcaccagcgagatgattgcgcaatatgaagaagccagcggtaaaaaactctatccggcgcaggctgagcggctgctcattgacctgtttgcttatcgtgaaaaccttgtccgcatcgccatccaggaggcggcgaagcaaaacctggtcgcgtattcccgcgcgcccatgctggattatttaggcgagctggttggcgttcaccgtctgcccgctcaggcggcgaaaaccacgctacagttttctgttactcaagcggctaaaagtaacctggtgattccacagggtacccgcgccagcgcgtcggatagcgtgatgttcgccaccgacgaagatgttctgttgcctgcgggcagcctgagcgttgcggtaactgcaacctgtgtagtgaccggcgaacccggcaacaactggcagcctgcgcaaattagcgcgctggtggatcgggtgggcaattacgatatcagcgtcaccaatctgacggcctcaagtggcggctgcggcgaagagaacgacgacgcgctacgtaaacgcatccagctagcgccggaaagtttcagcaacgcgggcagctatggcgcctatcgcttccatacgctctcggtcagccagtcgattatcgacgtggcggtgctggggccggatgaagggctggcggaaggctgcgtggaactctatccgctgaccctgaacggtctgccggggccggagcttcttgcccagatcgaacgggaggtgagcaaagagaaaaagcgcccgctaaccgataaggtgagcgctaaatgttctccgcgcgtggcttatcagatcagcgcccggctgacgctgtttaccaccgccgatcaggagacgacgcttgccgccgcgcgtgaagcgattaatacatggacgcgctcgcgccaaacccggctgggccaggacattgtgccaaaccagataattaaagtgctacaagtggatggcgtttacgacgtcgcgctggatatgcccgcgaaaaaggtattgcaggcgcacgaatgggcggaatgtacggctattgacgtgacgattgccggagtcagcgatggataa

SEQ ID NO: 388635 - DNA, 633 bp, Salmonella enterica
atggataaactgcttctgccgccgccgctggccagcgacgaacgtttctcaattctggcgaacattgccgccgaacgttttgcgcaaatcgacctgacggcgttgctggtctatctggtgaatatcgttgatgcctcggcattgccctcgttggccgaacagtttcatgtacaggggctcgaaggctggctatttgctgccaatgaacaggagaaacgagagttaattaagcaggcgattgaactgcataaatataaaggaaccccctgggccgttcgccgcgtactggaaatattatccttacccggcacgatctccgaatggtttgagtatggcggtaaggcttatttcttcaaggttgaaattaagctaatcaaccagggcatggatgaaaatctgtttaataatctggtcgatcttattcatgaatataagaacgtgcgttcaaaactggaagcgttaattgtctggataattaaccaaagcgctattcctgttattggcagcgcgctttacggtggagaaataacgaccgtcttacccttccaggttctggaagttcaacaaactaaaccgatctatttcggtacagggcaatggagccttgaaattacatctatttacccggagtaa

SEQ ID NO: 388636 - DNA, 1482 bp, Salmonella enterica
atggataatgagttttataccctcctgaccgacaggggaatggcgaaaatcgccagcgcccttgcggataaaaaacagctacatctgcaaaagatggcggttggcgacggcggcggacaatattatgaaccgaccgccagccagaccaatttacgccacgaagtctggcgcggcgagatgaatacgctgaccgttgcgccgaataatcctaactggctgattgccgagttggtgctgccggaagaggttggcggctggtacgtgcgtgaagtgggcgtgttcgacaacgagggcgagctaatcgccatcggcaaattcccggaatcctacaaaccgctgctgccgggcggctgcggcaagcaggtctgtatccgcctgattatggaagtctccaacaccacggcggtgacgctgacggtcgatccgagcattgtgctggcgacgcgcgactatgtggatgtccggctggacgagcatgaacattcgacaaatcacccggatgcgacattaacgcagaaaggctttacacggctcagtaacgccactgacagcgatgacgagaccaaagcggctacgccaaaggcggtcaaggcggcgatggcggaagcgcgtaatcacacgcatacctggaaccagattaccggcgttccggacggtacgctgacgcaaaaggggattgttaagcttaacagtgcgacggacagcaccagcacaacggaagcggcaacgccgagcgcggtaaaggcggcgatggataaggcgaatgcggcagctccggcgaaccatactcacgtctggaaccaggttaccggcgtcccggacggcacgctgacgcaaaaagggatcgtgaaacttaacagcgcgacggacagcaccagtacgacggaggcggcgacgccgagcgcggtaaaggcggcgtatgacaaggcgagcgcagcggccccggccggccatactcactcctgggggcagatcaccggcaccccggacggtacgctgacgcaaaaagggatcgtgaagcttaatagcgccaccgacagcaccagtacgacggaggcggcgacgccgagcgcggtgaaagcggcgtatgacctggcgaatgggaaggcggcggggagtcacaaacatgcgtggggggatattaccgacgtgccggatgggactacggcgcagaaagggatcgtaaagctcaacagtgcaacgaacagcaccagtacgacggaggcagcgacgccgagcgcggtaaaggcggcgtatgatttggcaaaaagcaaaacctctgcaacgaatatatataccaggacacaatctgatgcacgatacgtgcaaaatgttatgttaggtgcagaggtacaagcaccaacaatggcacctgctggatgtgtaataacatttgttgatggtggtgataaaatggaatgtgtgagatataaaccacttcagattaacatcaacggtttttggcgaactatttcaggataa

SEQ ID NO: 388637 - DNA, 516 bp, Salmonella enterica
atgcaattaagaaatgtcacacgttattacccagaacatatgccgtttggagaaaatatacaatactttattgatgaaaacggcttagatttttataattcaatagatacttttaaactaaaatacaagctatgtattcaccctgacacaaaagttattcactctgtgagtgaagatatttcaacgttatatccagcaggctttgatattgttgaatccgacagtttaccatatgatgatatcatttctggaaaatatcaatttgtagataacaaaataatacccaggacatataatgaagtagaacttactcaaatcaccaatgcagaaaaatcaaaaaaactgaaactagcaaatgaaaaaataagaccattacaagatgctgtagaccttggaatagccactgacgaagagatacaaaaattgggtgcatggaaaaggtatcgagttgaaatcaataggattgataccagtaacttactcgacattagctggcctttacctccagatgtataa

SEQ ID NO: 388638 - DNA, 1590 bp, Salmonella enterica
atgaaaaaaattgcgattattggaagcagtggaggcaacctctacaacctgggtggcgccgagccagagaagttactccaggaaatttatcagcagtgtgaggctgcgggcgtgaatgtggccgccgtacagtttatcgcggcagaagcctcgatggacgtcgccaaaccggataccccggcatcggtttatgcattaaccacagaaaaccaacaaaaaccacagcgcatatttcagggcaaactttcggaggtaaacacctcggtagtagaaagcgatcgccaaatcgctgagatgatccgccgcggtgagatcgatgggatcgtggtaatgagcgctgatccggtaaaggcgaaccaggccgtttttgccgccgccgttgagatgaaaacaccgattgtcggcaccgggggaacctccatggcgctggtggcggcaaagggggcgaatgtggtcgcgacctccggaacaactggcaccaccagccgtacccgcgccgtctccttcgtggcgtcgctgtgtaaacattggggtatcaagtacaaaccacagttgggtagcgcttcgccctcgcagagcggttccggaaaaagcctgctcaaacgttttaacattcgtagcatcatgatccctgctctaccaggctttatcgccatggcgattgtactcgccctgagccacataccaggactggaaaaacttaacgatatctttgaaatcttattaaaaggtctgccagtgttagtcgcggtactggcggcaaaacagatttccgaactggatgaagtttcaattgtggccggggtcgtcgctggcgtgctttccgtagagggcggactgatcggcggcattatcggcggtgtaatggcggggattttcgtccgttggctgttcgagctgtgcctgaactggcgcttcccaatgactaccgtcaacatcgtcgccggtgggatatcgggccttgccgctgggttagtcatgcactatctgctgagtccgctggcgctatctgcgggtaattacatcaaactggctatcgaaagcacgctggcattcagcccaattcttgccgggctgctggctggtctggttatctggcctgccattctcggcggcgtctatcacgcggtgatcctgccgttggtgctgctggagatggaaaaatccggcgtcagcttcctcggcgcggtcgatatggtcggtctggtgatggtggccgcaggtattaaccttgccaatgtgatcgccccgcgtgaaaaaagcgaagctgccgttgctacgccgggcctgctcattaacctgggttttggcacctttgttgaatccgcctatcccttcatgttcgccaacaaaattgtttttggctccgccattttttgggccggaatgggcggcatgatgctgggcttttttaacgtcaaaggcgtggcctatgttccggctttcgcctcaccgttcttatccagcaatgcgctccagatggccatcgtaatgattgccacaatggcgatgacctgccttaccaccattattgctaaccgtttcaaacctgtcgtacagagcgaatcaacaacgacagccgttaattaa

SEQ ID NO: 388639 - DNA, 840 bp, Salmonella enterica
atgtttaaaggcgatatgaataaaaaacgcgccaaagcgttacagaaagtgaaagaagccatcacgcttcacggtgggcaaactatcctcagcacaggaataactggcgacgatgcgcgcctggcgaaagccgtgtgtgaggctggcgttaagcttctggagccgaaccaccctgcgttggcgctggcgcgtggacacaaaggcgtgagcaacatgcacgcggcggagcagattcgtcacgaaatcaccaatagccagatggctgaggccgtacacggtgttcgtaatgtggtcccggacgatacttttatcaccgttggtatcgccggcggttttaccgaaaccttaccggtgccgctcagcgaaacggaaattctggagattgcccgcgctggagccgacggtttacatacgcataaatccgactgggacgatctgcaggacatcgttaatctcgcccatcaatatggtctgaccgtcgatgcctatattggccatcctgacgatctgcatactttcggtattcctgcacgcacgccggaagaggtcgccagcgtggcgaagcggatgcaggatatcggcgtggatatgattggtctgatgaccggcatgagctatgaaggcgtagcggcaggcgatatcccgcagatgattaaagatcgcctgcgggcgttggtcggcgcggtggatgttccgacgctggcggaaggcgggattaaccttgccaacgcgaaagcgtttaaagataccggagtcaatattctggtggtcggtacggctatcgacaacatggtgtgcaacgccgccaaagaagccgttacgccgtttattgttcattga

SEQ ID NO: 388640 - DNA, 864 bp, Salmonella enterica
atgttgttaatcaccgatctggatggaacattactcacctcgcagaaaacaatcagcccgcgcacgcgccaggcgctgattgcgttccgccagaacggtggtctactggcggcatgttccgccagaccggtctcctcaatggtacgcctgctacgccaacaacaggttgataggttgtttagctggtgcgccggttttaactgcggacaccttctggagatggcggagcagcgcattattcatgctgccccgctgaccgccacagacctgtggaatattgaccagcatatttctctttcccgctatcatcaccatttttttagtgccgaagcaattcaccatcgtgacgataggctgattgcgcactggacaacatatgaggctcgcttatttgggttaccgcttataactgaaactgtagaaaatatctttaatcgtcgcaacatatataaaattacccttgttgccgcatctccggagatagataatctgtgtacagaagtgaataatcacctgccttgtggatattatgcggttgtcacgggagaaaattatattgatattcaaagatccgatgtaaataaagggtgcataatagaacaattaattcatcatttaaatatatcttctgacaaggtggtcgcgattggcgaccagcagaatgatgtcagcatgtttgccgccgccggaatcagcatcgcaatgggcaacgcgccggatgcagtaaaacggcaggccggctatgtgactgccacgaatgatgaggagggtatcgtccgtgcgttggagtggttgcgttgccttacgcatccagttaccatgcgccaaaggttgacggcggcgaaagataatgaatccaattaa

SEQ ID NO: 388641 - DNA, 759 bp, Salmonella enterica
atgaatccaattaaaagacgaaaacatattcttgatgaattaaacaaattcggtgaagtcaccgttattaaattatcggaaatgctcaacgtcacctcagaaaccattcgtcgcgatctctccttactggaatctgaaggcaaaatcactaagattcatgggggcgcagtcaaaaagcaagttgtccaggaggatgcgtttagcgcaagaatagaggcgcatcgcgaagagaaaatagcgattggcaaacttgccgccgaaatggtcagtgaacgggatacattgtttattgattcctgtacaactaaccttattctggccgagcaattaccgcctctcgctttttccgtgattaccaattcagccctgattgccgataaaattaaagagcataacctgcaggcccgcgtgtatgtattaggcggcgaatacgattaccattttcgcgccaacctcggcgtctcggtgtgtcagcagattaacgcaattcacgcggatatctgttttattggcgctggcggcatttctccccagcatggcgtgttggtgaagagctttgaagaagcctacgttgccaaagccatgattgcgatgagcaaaaaatcagtgattctcgctgaccataccaaatttggtcaggacggtgtgatgtgcatcgcaagcgtaaaagaaatcgataacatcatcacggataaaggatttacgtcaacgggttatacgccacaggatttcgctggaaagctgcggattgctgactga

SEQ ID NO: 388642 - DNA, 273 bp, Salmonella enterica
atggcactcccccgcattacccaaaaagagatgaccgagcgcgaacagcgcgaactgaaaacgttgctggaccgcgcccgtattgcacacggtcgtccgctgaccaattctgagaccaacagcgtaaaaaaggagtacatcgataagctgatggcgctgcgtgaggctgaagcgaaaaaagcccgccagttgaagaaaaagcaggcgtataaacccgatacggaagcgtcattctcctggtcggcgaatacgccgacgcgcggcagacgttaa

SEQ ID NO: 388643 - DNA, 870 bp, Salmonella enterica
atgctgaccgacacatctacccggcttaataaatatatcagtgaaagcggcatctgttcgcgtcgcgaggcggaccgttttatcgaacagggcaatgtttttatcaacggcaaacgcgccgccattggcgatcaggtggtcgccggggatgttgttaaagtaaatggtcggttgattgagccgcgagaagcggatgatttagtgctgattgcgctgaataaaccggttggcattgtcagtaccactgaagacggcgaacgcgacaatattgtcgattttgtgaaccacagcaaacgtatcttcccgattggtcgtctggataaagactcgcaggggctgatatttctgactaaccacggcgatctggtcaataagattctgcgtgccggtaacgatcacgaaaaagagtatctggtgacggtggataaaccgattaccgacgagtttatacgcggtatgggcgctggcgtgccgattctgggtaccgtcaccaaaaaatgtaaggtgaaaaaagaggcgccgtttgtctttcgcattaccctggtgcagggattaaaccgtcagatccgtcgtatgtgtgaatactttggttatgaagtgacgaaactggagcgtacgcgcattatgaacgtcagtctgagcgggattccgctgggcgagtggcgcgatctgacggacgatgagctgatcgatctgtttaagttgattgagcgttcctcttccgaagccaaaccaaaggccaaagcgaagccgaagaccacgggtattaagcgaccggtcgtggcgatcgaaaaaagcaatgagaaagcacgcccgacatcaagcggtaagcgctttacctcgccgggacgaaagaagaaaggacgttaa

SEQ ID NO: 388644 - DNA, 540 bp, Salmonella enterica
atggcaaaactgaccttacaagagcaactgctacaagcgggattagtgaccagcaaaaaaatggccaaagtccaacgcacggctaaaaaatcacgcgttcaggctcgtgaggccagagaagcggtggaagaaaataaaaaggcgcaacttgagcgtgataaacaactcagtgaacagcaaaaacaagcggttttagcgaaagagtttaaagctcaggttaagcaacttattgaaatgaatagaatcaatgtatctaaaggcgatattggttttaacttcaccgataataacgtcatcaaaaaaatagacgtggataagctcacccagacgcaactgattaatgggcgtctcgcgattgcgcgcctggttatcaataacagcggtgaatgtgaatatgcgattattcccgcgagcgtcgccgataaaatcgcacaacgagatgcggacagtattgtcgtaaacagtgcgctgagtcaggaagagcaggacgaagatgatccgtatgccgattttaaagttcctgacgatttgatgtggtaa

SEQ ID NO: 388645 - DNA, 690 bp, Salmonella enterica
atggaactgcttttattaagtaactcgacgctgccgggtaaagcctggctggaacacgctctgccgctgatagcgaatcagttgaacggtcgacgctcagccgtgtttattccgtttgccggcgtcacgcaaacatgggacgagtacacggataaaaccgcagaggtacttgcgccattagggataaacgtcacagggattcatcgtgtcgccgatccgcttgcggcgattgagaaagcggaaatcattattgtcggcggcggaaataccttccagctactgaaagaatcgcgtgaacgcgggctgctggcgccggtggcggacagggtaaaacgcggcgcgctgtatatcggctggagcgcgggcgccaaccttgcctgcccgactatccgcacgaccaacgatatgccgatcgtcgatccaaacggtttcgacgcgctggatctgttcccgctgcaaattaatcctcacttcactaacgccttgccggaaggtcataagggcgagacccgcgagcagcgtattcgcgaactgctggtggtcgcgccggaactgacagtgattggtttgccggaaggtaactggattcaggtgagcaacggccaggcggttctcggcggcccgaataccacctgggtgtttaaagcgggcgaagaggccgtggcgctggaagcgggtcatcgcttttaa

SEQ ID NO: 388646 - DNA, 1632 bp, Salmonella enterica
gtgttaactttgctccatctactttctgccgttgcgctgttggtatggggaacacatatcgttcgtactggcgtaatgcgcgtgtttggcgcgcgtctacgcactgtcctcagccgcagcgtggaaaagaaaccgctcgccttttgtgcgggtatcggtgttaccgcgctggtacaaagcagtaacgccaccactttattggtaacgtcgtttgtcgcccaggatcttgtcgccctgacgccagctctggtgattgtgctgggcgctgatgtgggtactgcgctaatggcgcgtattctcacctttgatttgtcgtggctgtcgccgctgctgatttttattggcgtgattttctttttgggacgtaagcagtcccgtgccgggcagcttggtcgcgtcggtatcgggcttggcctgattctactggcgctggagctgattgtgcaggcggtgacgccgatcactcaggctaatggcgtgcaggtcattttcgcgtcgctgacgggcgacattatgctggatgcgctgattggcgcgatgttcgctattatcagttattccagcctggcggcggtgttgctgacggcgaccctgacggcggcggggattatatcgttcccggtagcgttgtgcctggtcatcggcgccaatctgggatcgggcttgttggcgatgctcaacaacagcgccgccaatgctgccgcgcgtcgcgtagcgctcggcagcctattgttcaaattgatcggcagcctggtcatcctgccgtttgtccatccgctggcgaatctgatggatgagctatcgctaccgaaatcagagctggtgatctatttccacgttttctataacctggtgcgctgcctggcgatggtgccatttgccgagctgatggcgcgtttttgtaaacgaattattcgtgatgagcctgaactggatacccatctgaagccgaaacatctggatgtcagcgcgctggatacgccaacgctggcgctggctaatgctgcccgcgaggtgttgcgcattggcgatgcgatggaacagatgatggaagggctaaaaaaggtcatgcacggcgagccgcgtgaagagaaagcgctgcgcaagctggcggatgacgttaacgtgctctacaccgcgattaagctttatctggcgcgaatgccgaaagacgagctggcggcggaggagtcccgccggtgggcggagattattgagatggccctgaacctcgaacaggcgtcggatattatcgagcgaatgggcagtgagattgccgacaagtcgctggcggcgcgtcgggcattttcagaagaaggattgaaagagctggatgcgctttacgatcaactgctcagtaatctgcaactggcgatgtcggtctttttctccggcgatgtcaccagcgcccgtcggttgcgccgcagtaaacatcgcttccgtatacttaatcgccgatactcacatgcgcatgtcgaccgcctgcaccagcagaacgtgcaaagcattgaaaccagctcgcttcatttagggctgctgggcgatatgaagcgtcttaactcactgttctgttcggtcgcctatagcgtactggaacaaccggatcaggacgaggaacggggcgagtattaa

SEQ ID NO: 388647 - DNA, 3684 bp, Salmonella enterica
gtgagcagcaaagttgaacaactgcgtgcgcagttaaatgaacgtattctggtgctggacggcggtatgggcactatgatccagagctatcgtctacatgaagaagatttccgcggggagcgctttgccgactggccctgcgacctgaaaggcaacaatgacctgctggtcctcagcaagccggaggtgatcgccgctatccacaacgcctactttgaggctggcgcggatatcatcgaaaccaacacctttaactcgacaaccattgcgatggcggattaccggatggaatccctgtcggcggaaattaactatgcggcggccaaactggcgcgtgcctgcgccgatgaatggacggcgcgaacaccagaaaaaccacgctttgttgcgggcgtgcttggtccaactaaccgcacggcctccatttcaccggacgtcaacgacccggcgtttcgtaatatcaccttcgatcagctggtggcggcctaccgtgaatccactaaagcgctggtggaaggtggcgtagatctgattctgattgagaccgtctttgacaccctgaatgcgaaagcggcggtgtttgcggtgaaagaagagtttgaagcgctgggcgttgatctgccgatcatgatttccggcaccatcaccgacgcctctggccgtacgctttccggccagacgaccgaagccttttataactcgctgcgccacgccgaggcgctcacttttggccttaactgcgcgctggggccagatgaactgcgccagtacgtccaggaactgtcgcggattgccgaatgctacgtcaccgcgcacccgaacgccggcctgccgaacgctttcggcgagtacgacctcgacgccgacaccatggcaacgcaaatccgcgaatgggccgaagcgggcttcctcaacgtggttggcggctgctgtggcaccacgccggagcatattgcggcgatgagtcgagcggtggatggcttaccgccgcgcaagttgccagaaatcccggtctcctgccgtctgtccggccttgaaccgctgaatatcggcgacgatagcctgtttgtgaacgtcggtgaacgtaccaacgtcaccggctcggcgaagtttaagcgcctgatcaaagaagaaaaatacagcgaagcgctggatgtcgcccgtcagcaggtcgaaagcggcgcgcagattatcgatatcaacatggatgaggggatgctcgacgctgaagcggcgatggtgcgcttcctcaacctgattgccggcgagccggatatcgcccgcgtgccgattatgatcgactcctcgaaatgggaagttatcgaaaaagggctgaagtgcattcagggtaaaggcatcgtcaactctatttcgatgaaagagggcgtggaagcctttattcatcatgcgaagttgctacgtcgctatggcgccgcagtggtggtgatggcttttgatgagcaggggcaggccgatacccgcgagcgtaaaatcgaaatttgccgccgagcctacaaaattctcaccgaagaggtgggcttcccgccggaagacatcatcttcgacccgaatatcttcgccgtcgccaccggtattgaagagcacaacaactatgcgcaggactttatcggcgcttgtgaagacatcaaacgcgagctgccgcacgcgctgatctccggcggcgtgtctaacgtgtccttctcgttccgcggcaacgacccggtacgtgaggctatccacgcggtattcctctactacgccatccgcaacggcatggacatgggcatcgtcaacgccgggcaactggcgatttatgacgatctgcccgccgagctgcgcgatgcggttgaagatgtcattcttaaccgtcgcgatgacggcaccgagcgtttgctggaactggcggagaaatatcgcggcagtaaaaccgacgaggctgccagtgcccagcaggcggaatggcgtagctgggacgtgaaaaagcgtctcgaatactcgctggtgaaaggcattaccgagtttatcgaacaggataccgaagaagcccgtcagcaggccgcccgcccgattgaggtgattgaagggccgctgatggacggcatgaacgtggtcggcgacctgttcggcgaagggaaaatgttcctgccgcaggtggtgaaatccgcccgcgtgatgaaacaagcggtggcctacctggagccgtttattgaagccagcaaagaaaaaggctccagcaacggcaagatggtgattgccaccgtgaagggcgatgtgcacgacattggcaagaacatcgttggcgtggtgctgcaatgcaacaactacgaaatcgtcgatcttggcgtgatggtgcctgcggagaaaatcctcagaacggcgcgtgaagtgaatgccgatctgattggtctttccgggcttatcaccccgtcgctggacgagatggtcaacgtggcgaaagagatggagcgacagggctttactatcccgctactgatcggcggcgcaaccacttcgaaagcgcatacggcggtgaaaatcgagcagaactacagcggcccgacggtttacgtgcagaacgcttcccgtaccgtcggcgtggtagcggcgctgctctccgacactcagcgcgacgattttgtcgcccgtacgcgcaaagagtacgaaaccgtacgtatccagcacgcccgcaaaaaaccgcgcacgccgccggtcacgctggaagcggcgcgcgataacgatctggcgttcgattgggaacgctacaccccgccggtagcccaccgtctgggcgtgcaggaggtggaagccagcatcgaaactttgcgcaactacatcgactggacgccgttctttatgacctggtcgctggccggcaaatacccgcgcattctggaagatgaggtggtgggcgttgaggcgcagcgtctgtttaaagacgccaatgatatgctggataaactgagcgccgagaaactgttgaatccgcgtggcgtggtgggcctgttcccggcgaaccgcatcggcgatgacatcgaaatctatcgcgacgaaacccgtactcatgttctgacggtcagccaccacctgcgccagcagaccgagaaagtcggttttgccaactactgtctggcggattttgtcgcgccgaaactgagcggaaaagcggactacatcggtgcgtttgcagtcaccggcggtcttgaagaagacgccttggctgatgcttacgaagcgcaacacgacgactataacaagatcatggtgaaagcgattgccgaccgtctggcggaagcgtttgccgagtacctgcatgagcgtgtacgtaaggtttactggggatatgcgccgaacgagagcctgagtaacgacgaattaatccgcgaaaactaccaggggattcgcccggcgccgggttatcctgcctgcccggaacataccgaaaaaggcactatctggcagctactggatgtcgaaaaacacaccgggatgaagctcaccgaatctttcgccatgtggcctggcgcgtcggtctccggctggtacttcagccatcctgagagcaaatacttcgcggtagcgcagatccaacgcgatcaggtgacagattatgcttttcgtaaaggaatgagcgttgaggacgttgagcgatggctggcgccgaacctgggttacgatgcggactga

SEQ ID NO: 388648 - DNA, 825 bp, Salmonella enterica
atggttgcccctgttcccgcgaaacgcgggagaaaacctgccgctaccactgcacccgtaaccgggcaggttcagtctttaactcgcggtctgaagctactggagtggattgccgagtccaacggcagcgtcgcgctgaccgaactggcgcaacaggcgggtttgcctaattccacgactcaccgtctactcaccaccatgcagcaacagggttttgtccgccaggttggtgagctgggccactgggccgtaggcgcacacgcgtttatcgtcggtagcagcttcttacagagccgtaatctgctggcgattgtccatccgattttgcgcaagctgatggaggactccggcgaaacggtaaaccttgccgtactcgaccagagcgaccatcaggctattattatcgaccaggtgcagtgcacacaattgatgcgcatgtccgcccctattggcggcaagctgcccatgcacgcctctggcgcgggcaaggcgtttttatcacagctcagtgaggaacaggttaccagtctgctgcaccgcaaggggttgcacgcttatacccatgcgacgctggtgtcgccgctgcatctgaaagatgacctcgcccaaacacgcaagcgcggctattcctttgacgacgaagaacatgcgctcggtctgcgctgcgtggcctcgtgtatttatgacgaacaccgcgaaccgtttgcggccctctctatttccggcccctgctcacgcattaccgacgatcgcgtcaccgaacttggcgccatggtgattaaagcggcgaaagaggtgacgctggcctatggtggaactcgctga

SEQ ID NO: 388649 - DNA, 435 bp, Salmonella enterica
atggtggaactcgctgaaatgagcagcctgaaattatactggcaggagaagtacccacaggccttctgttggtctttcggtgattcgccggcgctggccgacgagctggcggcgctagtggtcgccggtaaaaagcgtagcacctgtagctcgctggttagctatcagaaagagcaaccccctgtcacgcccgggtcatatcacattgtgctcaacggcacaggcgacgccgtgtgcgtcatacgcacgctggcgctcaggctgatccgttttaacgagatgagcgccgatctcgccgcactggaaggcgaaggcgatcttagcctggcgtactggcaagcggcacaccgggccttttttgagcgcgagggtaattggtcgccggagatggaactggtttacgaagagttcgccgtactcgagatcgcgccgtaa

SEQ ID NO: 388650 - DNA, 1752 bp, Salmonella enterica
atgccgcgtggcctggaattactgattgctcaaaccatcctgcaaggctttgacgcgcagtatggtcgatttctggaagtgacttccggcgcgcagcagcgttttgaacaggccgactggcacgccgtccagcaggcgatgaaaagccgtatccacctctatgatcatcatgtgggtctggtggtggagcaactgcgctgtattaccgatggcaaaagtaccgacgcggatttccttttacgcgttaaagagcattacacccggctgttgccggattacccgcgcttcgagattgcggagagctttttcaactccgtttattgccggttatttgaccaccgctcgttaacacccgagcggttgtttattttcagttcgcaaccggagcgtcgcttccgtactatcccgcgcccgctggccaaagacttctttcccgatcacggttgggagacgctgttgatgcgcatactcagtgatttaccgctgcgtctgccctggcagaataaaagccgggatatccgctatattatcgcgcacctgactgaaacactgggcgaggacgcgctacctcgctgccatgtccaggtggcgaatgagttgttttaccgtaataaagcggcctggctggtaggtaaattaaccacacctgacggtacgctgccgtttttattgccgattcatcgcactgatgagggggaactgtttgtcgatacctgcctgaccaccacggcagaagcgagcattgtgtttggttttgcccgctcttattttatggtgtatgcgccgctgcctgccgcgctggttgagtggttgcgtgaaatcctgccgggtaaaaccactgccgaactgtatatggcgattggctgccagaaacatgcgaaaaccgaaagctaccgcgaatatttatgttatctggctgaaagcgatgagaaattcattgaggcgcctggcatccgcggcatggtgatgctggtgtttaccctgccaggtttcgaccgggtatttaaaatcattaaagacaaattcgccccgcagaaagagatgtctgccgcccatgtgcgtgcctgttatcaactggtaaaagagcatgatcgcgtcggtcgtatggcggatacccaggagtttgagaatttcgtactggataaacggcaaatcgatccggcgctgatggcgctgttacggcaagaagtgccagagaagattaccgatcttggggaacatatcgtcattcgccatctctatattgaacgtcgcatggtgccactcaatatctggctggaacaggtagaaggccagcagttgcgcgatgcgatagaagaatatggtaatgcgattcgccagcttgccgccgctaatattttccccggcgatatgttgtttaaaaactttggcgttacccgtcatggtcgcgtggtgttctacgactacgatgaaatttgctacatgacggaagtgaatttccgcgatattccgccagcgcgttatccggaagacgaactggccagcgaaccctggtatagcgtctcgccaggtgatgttttcccggaggagtttcgccactggctgtgtgccgatccgcgtatcgggccattgtttgaagagatgcatgccgacctgtttcgcgccgattactggcgcgcgctacagacgcgtattaaagaagggcatgtagaagatgtgtatgcctatcgtcgccgccagcgctttagcgtgcgttacggcgcgatctcgagtacggcgaactcttcgtaa

SEQ ID NO: 388651 - DNA, 1305 bp, Salmonella enterica
atgaaaacccgtactcaacaaatcgaagaattacagaaagagtggacacaaccgcgctgggaaggcatcacccgcccgtacagcgcggaggaggtggtgaaattacgcggctcggttaacccggaatgcacgctggcgcagctcggcgccgcgaaaatgtggcggctgttgcacggtgaagcgaaaaaaggctatatcaacagccttggcgcgctgactggcggtcaggcgttgcagcaggcgaaagccggtattgaggcgatttatctttcaggctggcaggtagcggcagatgccaacctggcatccagcatgtatccggatcaatcgttgtacccggcaaactctgttccggcggtagtggatcggatcaacaacactttccgtcgtgcagatcagatccagtgggcatccggtattgaacccaacgatccgcgctatgtggattacttcctgccgatcgttgctgatgcggaagccggttttggcggcgttctgaatgccttcgaactgatgaaatcgatgattgaagccggtgcagcggccgttcacttcgaagatcagctggcgtcggtgaagaaatgcggccatatgggcggcaaggtgctggtccccacgcaggaggcgattcagaaactggttgctgcgcgtctggccgctgatgtgatgggcgtcccgacgctggtgattgcgcgtaccgatgcggatgcggcagatctgatcacctccgactgcgatccctatgacagcagttttattaccggcgaacgcaccagcgaaggtttctaccgcacccatgcgggcattgagcaggcgatcagccgcggtctggcgtatgccccgtatgccgatctggtgtggtgcgaaacctctacgccggatctcgaactggcgcgtcgttttgccgatgctatccacgcgaagtatccgggcaaactgctggcctataactgttcaccatccttcaactggcagaagaatctggacgacaagaccattgccagcttccagcagcagttgtcggacatgggttacaaataccagtttattaccctggcgggcatccacagcatgtggttcaacatgttcgacctggcgcatgcatacgcgcagggcgagggcatgaagcactatgttgagaaggttcaacaacccgagttcgccgcggcgaaagatggctacacctttgtttcccaccagcaggaagtgggtactggttacttcgacaaagtcaccaccattattcagggcggcgcgtcatccgttaccgcgttaacgggttccaccgaagaatcgcagttttga

SEQ ID NO: 388652 - DNA, 1602 bp, Salmonella enterica
atgaatccacaggcaaccacaactgatgaattaacctttaccaggccgcaaggcgagctggaaaagcaagtcctgaccgctgaagcagtcgagtttttgacggagttagtcacccgttttacgccaaaacgcaataaactcctggctgcacgtatccagcaacagcaggatattgataacggtaagttgcctgattttatttcggaaaccacttccattagagaaagtaattggcagattcgtggtattccggcggatttacaggatcgccgagtagaaattaccgggccggttgaacgtaaaatggtgattaatgccctgaacgcaaacgtgaaagtgtttatggcggattttgaagactcgctggcgccgggctggaataaagttattgatggtcaaatcaacctgcgtgatgcggtgaacggcaccattagctataccaacgaagccggaaaaatctatcagctcaagcccgatccggccgtattgatttgtcgtgtacgcggtctacatctgccagaaaaacatgttacctggcggggggaagctattcccggcagcctgtttgattttgctctgtactttttccacaactataaagcgctgctcgctaaaggtagcggcccgtatttttacctgccgaaaacgcaagcctggcaggaggcagcctggtggagcgaagtcttcagctacgccgaagaccgctttaacctgccgcgcggtacgatcaaagcgaccctgttgattgaaacgcttcctgctgttttccagatggatgagattcttcatgcgttgcgtgatcatattgtcggtctcaactgtggtcgctgggattatattttcagctatatcaaaacgttgaaaaatcacccggatcgcgtcctgccggacaggcaggtggtaacgatggacaaaccgtttctgagcgcctactcgcgcctgctgatcaaaacctgtcacaagcgcggcgcgttcgcgatgggcggtatggcggcgtttatcccgagcaaagacgttgaacgcaacaatcaggtccttgccaaagtgaaagcggataaagcgctggaagcgaacaacggccacgacggcacgtggattgcgcatcctgggttggcggataccgcaatggccgtctttaacgaggtactgggcgagcacaaaaatcagctgttcattacccgtgatgaagatgcgccgattaccgctgaacagttactggagccatgtgaaggcgaacgcacagaagcgggaatgcgcgccaatattcgcgtggcagtgcagtacattgaagcgtggatctccggcaatggctgtgtaccgatttacggtctgatggaggatgccgcgacggcggaaatctcacgaacctctatctggcagtggattcaccatgagaaaacactgagcaatggaaaacccgtaacgaaagcgcttttccgcgaaatgttggcggaagagatgcgggtaatccaggacgaactgggcgagcaccgctacagcagcgggcgcttcgacgatgccgcacgtctgatggagcaaatcaccacctcagatgacttaatcgacttcctcaccctgccgggctatcgcttactggcttaa

SEQ ID NO: 388653 - DNA, 930 bp, Salmonella enterica
atgccgattcgcgtgctggacgagctacccgccgtcaattttttacgtgaggagaatgtcttcgtcatgacgacttctcgcgcatcaggtcaggaaattcgcccgctaaaggtacttatccttaacctgatgccgaagaagattgaaacggaaaatcagtttctgcgtttgctatcgaactcgccattgcaggtcgatattcaactactgcggatagatgcgcgcgagtcgaggaacacgccagccgagcatctgaacaacttttactgtaacttcgacgatatctgcgatcagaactttgatgggcttatcgtgaccggagcgccgctgggtctggtggagtttaatgacgtggcttactggccgcagattaggcaggtgctggaatgggcgaaagatcacgttacttcgacgctatttgtctgttgggccgttcaggccgcactcaatattctttatggtatccctaagcagacccgtacagataaactttccggcgtctatgaacatcacatccttcatccacatgctctgttaacgcgtggttttgatgattcgtttcttgcgccacactcacgctatgccgatttcccggcggcgctaatacgggattatacggatcttgaaattctggccgaaacagaagaaggggatgcgtacctgtttgccagcaaagataaacgtattgcgtttgtcaccggtcatcctgaatatgacgctcatacgttagcgggtgaatattttcgtgacgttgaggccgggttaaatccggaggttccgtacaactatttcccaaaaaacgatccgcaaaacataccgcgcgcaacctggcgcagccacggtaatttactgtttactaactggctcaactattatgtctaccagattacgccatatgatctgcgtcacatgaatccaaccctggattaa

SEQ ID NO: 388654 - DNA, 438 bp, Salmonella enterica
atgatgattaacattcgccgttcaaggcatgaggaaggggaaaaactgattgcgatctggcgtcgctcagtcgatgccacgcacgattttctgtcaaacgcttatcgggccgaactggaagagctggtgagcgattttctgccagaagcgccactatgggttgccgtgaccgatcaggatgagccggtaggatttatgctgcttaccggtgaacatatggatgcgctgtttgtcgatccggacgtgcgtggtcagggtatcggtaaaagattagttgaacatgcgttaacactggcgccggggttgacaaccaatgttaacgagcaaaatacacaagctgttggattttataagaaaatgggatttaaggtgacaggacgttcggaggttgacgatcttgggaaaccgtatccattgttgaatttaatttatccgtga

SEQ ID NO: 388655 - DNA, 840 bp, Salmonella enterica
atgcatcttgaagaagaagatctgcgcgctttagaaagagccgtagaattattagaacaagatacaattacagaaacactaacccaattagttggaaccccaatagattacttaatgagtaaacttcccaaaggagcagaaaagaaaatttatagcctagtagaaaaatctctcaacaaagctgctaatgcagccttatggagcctagacaatgaacctaaccgaatagcatcaactaagacaaataagttctttgctgccttatctggagccattggtggtgcttttggcttttctgcattagcaattgagttaccagtttcaacgacaattatgcttcgttcaattgcggacatagcaagaagtgaaggttttgatctagataggattgatacaaaactagagtgtttagcggtgttttccttcggaggaccatctgaggacgatgatgcagttaatactgcatactatgcaacaaggaatttgactgctgagatcgtacaagatttatccaaagaaatttctaacattgctgtcaagaacgctgcttcaacacaaacaggaaaatggttagcttcgttaatagaaaaagttgcgacaagatttggtatagttattacagaaaaaatggcagctcaagctgctcctgttattggagcactggctggagccacattaaacacgatgtttaccgactattatcaagatatggctcgaggtcattttattgtcaaaagacttgagagaaaatatggtgatgaattgataaaggctgaatatataaaaatctcagataaactcaccaatcagaaccaacggaagcatttgaacagcaactaa

SEQ ID NO: 388656 - DNA, 195 bp, Salmonella enterica
gtgaacaaacaacaacaaactgcgctgaatatggcgcgatttatcaaaagccagagcctgacactgcttgaaaaactggatgctctggatgctgacgaacaggcggccatgtgcgaacgactgcacgaactcgcagaagaactccagaacagcatccagattcgctttgaggccgaaagtgaaacaggaacataa

SEQ ID NO: 388657 - DNA, 147 bp, Salmonella enterica
gtggccgaaggcgacgtgctgctgattctggaagccatgaagatggaaaccgaaatccgcgccgcgcaggccggcaccgtccgcggtatcgcggtgaagtccggcgatgcggtttccgtcggcgacaccctgatgacgctggcgtaa

SEQ ID NO: 388658 - DNA, 147 bp, Salmonella enterica
atggctatacatgacgccgggatgttcaccgtgaaaggaatcaaccgcctcaaaatccttcaggatgccatcgaccgcaatttacatcccggtcaggctgctgaaacgttatcgccaactcggaccacttggcatgaacaaccatag

SEQ ID NO: 388659 - DNA, 174 bp, Salmonella enterica
atgccaataatttttttgagttattattcaacacttcaaattagcgaaaacggtttgtcaataagtgcgataagttgtatgagaaaatatacttatactcaggatatcaattataaaaaaacgagccaattcgctccatacgaaattcattattccctggaagtatatttttaa

SEQ ID NO: 388660 - DNA, 234 bp, Salmonella enterica
atggctagcaaaggcattgaaaatctgatcaaagatgcattggatgctggttgtaatgttacgcgaaaggcccaccactttgaggtcagcaagaaaggtcgtaaagacataacgctgattatctgtgaagacggaacggcatatcgcggagatgttgacctgacgattacgaaatcaatccgcacacaaaaagagatgcggttcatcctcgatttgccgcagaaagcaatatga

SEQ ID NO: 388661 - DNA, 840 bp, Salmonella enterica
atggcggcagaaagttgggtaaccataggtggattcattgcaacgactgcttcagcagttgcagctttctttgctgtaaaacaaaccatgttacaaagaacaatttcgaccaaaccacagattatagttaataatgaagaagtaaaaacaatctattcaccaaacagcacatttgcattgataattgaagaccctgatttttattatgatatacctatattaataaaaaatgttggattagggactgccttaaacattaaatacaactggtcgtttgattatcagaaacacatcaagctatgtggatttaaagaaataaaagaagatcccgtattcacccctgcaaaaatacaatcgaaagaatgggataaatgctaccactttgaaaacaaaaataggtcaatatataaatactttaaatttatcaggcataataaatttaaccactacagcataaaaaaagaacatagcgagcttgagtatattatgccggttactcaagaaaactcaccttcaacaattgaattcccatcacttatactcttgctattagctgatattgcatattcttcaacaacctcagatggtgcaatgtttgatgtaatggatgctggtctgctacagattgaatatgaagatatttcaggaaacaaaataaaagttaaatttaattgttcggtgcagctaataagatttcagagtaaaacagagaacggacccagatcaacattcagaatcgaattcaatcgaattcattctgggtccaagttaggactacaaaggatacgcaaaagctacgcagattttataaatgaacacgattacaataaaaacagatag

SEQ ID NO: 388662 - DNA, 264 bp, Salmonella enterica
gtgcgccgggctggtggtgtaggagagcgtgccctgggcgtgcgcgccgtggctgcgcaccgcgctgagcgccgctttcatattacgcgggtcgttcatggcgtcgaagacgcggaacacgtccatgccgtttttcaccgcgcgttcgacgaagcgctccaccacgtcatcggcgtagtggcggtagccgagcaggttctgcccgcgcagcagcatctgcaatggcgttttcggcatggcttttttgagctcgcgcaggcgtag

SEQ ID NO: 388663 - DNA, 270 bp, Salmonella enterica
ttgacagacaaaaccgccaaagcaaaaatactgtatatacaaacagtcattagcgaaacacgtatgttcgtagaactagtttatgacaagcgtaatgttgaaggactcgaaggggccagcgagatcattctggccgaactgacgaagcaggtgcaccagattttccctgatgccgaagtgagggtgaagccgatgcaggcaaactgcttgaatagtgatgccaacaaaagcgatcacgaaaagttgaacagatgcctagtttcagattaa

SEQ ID NO: 388664 - DNA, 552 bp, Salmonella enterica
atgcctgatttatccgccgcggagtttactttgttacagggtgcgcacctgtttgcgccagaagaccggggcatctgcgatgttctactcgcgaatggcaaaattattgccgtcggcgctgacatccccggcgatatcgtaccggactgtgcggtgattaatcttagcggtcgtatgctgtgcccgggctttatcgaccaacacgttcatctgatcggcggcggcggcgaagcggggccgacgacgcggacgccggaagtctccctgagccgcctgacggaagccgggataacaacggtcgtcggtctgcttggcaccgactccgtcagccgtcatcccgcgtcgctgttagccaaaacgcgagcgctaaatgaggaggggatcacccgcctggatgctcacgggcgcttatcacgttccgtcgccgaccattactggctcggtagaaaaagacgtcgcgctgatcgaccgcgtcattggcgtgaaatgcgcagtctccgaccaccgttccgccgcgcccagcgggaatcaactcgccagcatggccgctga

SEQ ID NO: 388665 - DNA, 1425 bp, Salmonella enterica
atgtctgaattcgatttatttgcgcaggaactgctagaaaaagcagaagcagaagaaaaacaacaacaagagcgcgacaggaagctgattgatcgggtgcttgaaatttacgaccagaagtatgtcgcagaactactaagaaaaataggtaaaaatgagtggagccgcgaaacacttaaccgttgggtaaatggcaagtgtgagccaaaatcgctcaccatggctgaagaagcgctgttacggaaaatgttgccggagcaacccgttcatcatcctgactatgatttccgctttattgacctgtttgctggtattggtggtatccgtaaaggattcgaggccatcggcgggcaatgcgtttttaccagcgaatggaataaagaagcggtacgtacctacaaagcaaactggtacaacgatgaagatgcgcacacattcaatctggatatccgcgaagtcacgctaagcggagaagaaggcatctcagaagagaaagcctacgctcatatcgatcaacatatcccggatcatgacgtcctgctggccggttttccctgccagccattcagtctggctggagtaagtaagaaaaactcgctcggacgcgcacatggattcgaatgtgaagcgcagggcactctgtttttcgatgtcgcccgcataatcaaggcaaagcaaccagccatttttgtgctggaaaacgtgaaaaaccttaagagccatgacaaaggcaaaacgtttaaagtcattatggatacccttgatgaattaggctatgaagtcgctgatgccaatatcacagggaaagatgatcctaaaattattgatggtaaaaatttcctgccacaacatcgtgagcgtattgttctggtcggattccgccgtgaccttaatatccatcagggattcacattaaagaatattgataaattctaccctgagaaaagaccaacatttggtcagcttctggactctgtggttgacagtaaatatatactgagccctaagttatgggaatatctctataactatgctaaaaagcatgctgccaaaggtaatggattcggttttggtctggttgatccgaataatgaaaatagcgtcgcgagaacattatccgctcgttatcataaagatggatctgaaattctcatcgacagaggatgggataaagaactcggcgaaatcgatttctctaatccagagaatcaggaacaaaggccaagaagactgacgccccatgaatgcgcaagattaatgggatttgaacaacccggaggcaagccattccgaatccccgtttccgatactcaggcctatcgccagtttgggaactcagtggtcgttcccgtttttgaagccgtggcaaaactgcttcagccttatattatgaaagccgctgctagtaaggtgaccaaaaaataa

SEQ ID NO: 388666 - DNA, 465 bp, Salmonella enterica
atgctgaaaataaagaaactagaacatcgctttattcgtagcattcctcgtgaactcgatgttggcgtgatatatatatcaatggagtactcaacagcagtacattgctgctgttgtggttgtggggaacaggttgttacgccattttcaccaactgactggaagatgatttacgatggtgagtctgtatcgttgacgccatccattggtaactggcattccgcctgtcgctcgcactatattattaaacagggtattatcgttgaggctggtagctggaatgatgcccagattacggcagaaagaaaaagagataaattagctaaagcgcattactataacccatcagctaaacctcttaacctagaggaggagatgaaagatacctcaaggcagttatccagagatctcagagttatggggaatttattaggatggttgcgtaatctgatacgcaaaaactaa

SEQ ID NO: 388667 - DNA, 1185 bp, Salmonella enterica
atgtcacaaaaactgttcagtcttaatagtgatttacgccagcttcgcgaagctggctatcatgttcaggttattggtgctttcctggtgatgcgggaagtcccctatgtcaatgcacaaaaatgtgtacgcaaagggaccctcgtggcatctctggatctggcgggtgatcacacccgcaaacctgaaaatcacgtaatacactgggatggggaatatccgtgcaaagcaaatggagttcctttaaatgaaatccgccatgtatctcaacactttgattttggtcatggccttactgccgagcatggtttttcaagtaagccagggccgcaaggatatccagactattttgcaaagatgtcaacttatgcaaccatcctgtcaggcccggcggcagtattacaaccggggattagccctaaaatatttcggactcctgacgaaactgaaatggacagtgtttttaattatattgataccgcgtccgatcgtgcgggaattggaaagctatctgagaaattagaaggtgagattgtttctattattggtactggcggaacgggtagttacattattgatttagtatctaaaacgccggtgcgcgaaattcgcttatttgatgctgatgagtttcttcaacataatgcttttcgtgctcctggcgctccactattggatgagcttcgcaatgcaccgttgaaagtggactacttcaagagtatttacgaaagaatgcatcgcaatattattgtacatcctgtcagattgaacgattctaacctcagcctgataaacggtactacgtttgcatttatttgtatggatgccggtgaagaaaaaaaagcgataattcaaaagctggagtcgcttagtgtttccttcattgatgtcgggatgggccttgaattagtgaacggtagtcttggtggcattcttagagtaactaccagtactacggacaaacgcgaacatgtacattcaggacgtatctctttagcaggcggaggggagaaagatatttatgcctcaaatatacaggttgctgatttaaatgcgcttaatgcagctctggctgtcataaaatggaagaaattgaaagggttttaccgcgatttggaaaacgaacatcattgcacctataccactgatggtaatatgttgctgaatgaggatatgaaatgctga

SEQ ID NO: 388668 - DNA, 756 bp, Salmonella enterica
atgaattctgttcaaaatgattttgatgatgttggcgatgccgttcgtgagaaccgtccgttaagggctgcacgtgaatatcgcatcagcgtagccattgaaagcgtggattttcagccagctttcgtttctgatccggtacctaccggtcggcagattttatctgcggcaggtcttgacgaccgtgatgaaattactctttgtgcgatattgcagtccggtgattttgaagatatccgacttgatgaaacctttgatttacgtggacggggggctgaacggtttattgctttccgtaccgatcgggacttcaagttaacgcttgatgatcgccagcttgtatggggtatgtctgctattgaaggccatgttttgtatgtattgtccggcattgggcctgagcaggccgtctttctggaggttcggggagggacagaccgtattattgaacctgatgatttattggatcttactgcaccgggcattgagcattttatcactgctaaacggccgggtcagggttacaccatcatcgttaactctcgcgaggaatcggtgtccgataaatgggtaacgttcgagcaggttgtgcaactggcatttcccggtgctcccgtcgagtcaaacgttatctattccatgacttatcgccacgcagaatccagaccacatgctggtgagctggctgagggcggtgtcgtcgaagttaaacatcaggggacgattttcaatgtcacaaaaactgttcagtcttaa

SEQ ID NO: 388669 - DNA, 3384 bp, Salmonella enterica
gtggatgccatcgagattgcgcgccagcgtgctgagcaactacattatgctgctatcagcagaggtttagatccctggaagccttatgcttttgttgttggtgaagctaattctcgtagtatcgacgtagagaaatgtttacaaggttctgatgagctaaatggtagccgtgcatttttcgatagtgcttacaggttaattacacatgaagactctggttcattgttcgagcaagcatttctggttgcacacgaaatcgggcatgttgagttaggcgacgatacgcaggatgaatatgtcatcgatatcgaccctgcgcgtacagcagaacctgcgccatcgggaatagaccgtgttgtagattatagccatcgacaaaggcgcgaagttcagatggatcttttcgccagggagtttctgctaccgcgttcggttgttaaaaagttacatcttgaatgtggtatgagctgtagtgatatatccagcaaactcggtgcacctttcgatgttgtcgcccaacagatgcttgatgcaatgctacttccaatggttgagcataaaccacgccagcccgaaccagatatgtcgcttaatgacaaacaaattgaagcggttaggcacagagggaaagctttcttgctccaggcggggccgggtacaggcaaaacgcgaaccctcgtagcgagagtggaaagtctgtttaatgatggaattgatccacgacgcatacttctgttgacgttctctaataaagcagcagcagagatgtctgagcgtatcgcccggaaacaaccacatgcggcagcggcactctgggtgggaacttttcatggctttggtcttgatttgctccggcgtttccatgatctatgtgatttacctgcggagccccgcttaatggatcggtcagaagccgtagaacttctggaagaagaatttttacgtcttaatctcgtacattatcgtaatttatacgacccttctcaaaatattgttgatattctgaacgctatctctcgagcaaaagatgaagttacagacgcattgcaataccgcgcccttgcccaggaaatgctcaatagtgccagtagtgctgaagagcgtgaaactgccgagcgagcgctggaagttgctgttgtttatgacacctacgagaagataaagaaacagaggggatgtcttgattttggtgatttggttatgcgtccggtacaattgcttgaaacaaatgaggaattgcgccagcaattgcagcataattatcaacatgtaatggttgatgaatatcaagacgttaacagaagtagcattcggctattaaaagctctcaaacctgatggtgaaaatctttgggtagttggtgatgccaagcaatcaatttaccgttttcgtggagcatcatcatttaatatatcgcgtttttgtgtggatgactttcctggtggagaatcgcaatcacttgagattaattaccgttctgtttcagagattgttacagcattttctgagtttgcgtcagaaatgaaaacggggggaatcaagagccaccttgcggcaaatcgcctagcgtcgggattactgcctgaaatacaaacagtagaaagcggagatttggtaagttccgctttagctgagtctattttgcgaatgcgagaaattggatttagttatcgtgatcaggcggtgttttgtcgtggaaatgaaaaactctctgcgttagggcaggatctggaacgattaggtatcccggtattatttctgggcagcctttttgaacgtcaggaagttaaggatcttgtggcgctagtttctcttctgactgataaacgagcaatggggttaattcgtattgcatgttggccggaatttcagatgccgatggaagatgttactcaggtgctggaacacttccgtataacagataatgagcccgtaaactgggacatatcgtcgctgtccttatcgccggagggattgtcctcgtttgagaaaataaagaatgtactacatggctttagtagtgcttctcatccatggttcgtgcttgctacggtcttgttagatcgtacgagcgtagtggctcaaattgcaacgtcggaagcggttaatggacaggctcgcggtattgctatctggcagtttatgaattttgcccggcagcagttcaggggcagtggttttccgataatgaaaatgatgacgcggatacgtcgtttactcaagctcaacgacgatcgcgacctcagacagcttccagcagcaactcaaaatattgatgcagtcaaattaatgacaattcatggtgcaaaaggtcttgagttccccgtggttcatctaagtggtgtgaataaggatacgatcccgggttcatatagaggagtaaaatgccctccgcctgagggtatggttgctggtgggaacggttcgtccgaagatatagccaaagaagcccatgagaatgaacaagaatgtcttttttatgtggcaatgtcccgtgcaaaggatcgactgtttttttacggtgcaacgactaaaggtcagaacaaatccttgcgtcgactttccgatttcttggacagaatagggcctgtttcgcgcaatgctacaactcccatattaaagctgccgatagcaccagaaaataagcctctacctgttgaatttcagggggacgtgaatttcagtgctaatgctttggatttatataataactgccccagacgttttctttatacatatcttctgtcaatcggtggtcgtcgacaagaaacggcatttatgcaaatgcatgaagcggtacgcgatgtgcttcagaccataaccagactgggtaacgggcacgtgcttgactggcaacctattctggaaactgcttttgtaaagcaggggttgcatgaacatggttacgtagacgactatcgcaatattgccgaaaagatgctcaccttctttacccagtccagaaagggtgcatctgtcgaaatgttggatgagttcgtgttgagccttaccgatgcgaaggtaacggttcgtgctgatgaaatgttgatacgagatgatttgcgtacgttacgttgcatatttacagggcatgcccccggagcaggcccgaaaggtatcagacatgaagcgttttcacttgccacaaagaacttttttccaggttcatcagtagagttggtctacttagccgataatacggttcatcctctcaaccttaagccgcaaacactgaacaaatgcgaaaataaattgcgagagatcctcactcgcatacgtagtggcgattttaaaatatctgactctacgtttagctgccccgggtgtcctgcgttttttatctgcggtggcgtccccgcaggtcccctcaagaaaaaattctaa

SEQ ID NO: 388670 - DNA, 567 bp, Salmonella enterica
atgaaaaatcagactatttctcgtgcagatgtactgagagatttctcagttgaactcgacactggtaaagatactttactacggtatctgactgaattccctgaatatgcggaagaattggtcgacctttcgcgcgaactggctcgtgaagttgacgacgatatgccgcttactgcgactgatgtactgagtgttgaatcggcgatggagcgttttcggactggtcttacccaacagattgtacaagtgaatatatctccacagcggttctcagccgcagcaaagctacttaaccttccaaaacaggttttaattgcttttggcggaagaagagttgatttagcctctattcccttacactttcttaatagccttgcggaatcgctacaggtgacaaccgtgcaactaaggaattttttaacacaaccgccacaagcgcctgctagccgaagttataaagcagaagttaagcccacagcaccaaccagaacatctttcgaaaaaattctacgtgatgcacaagtttctgaagagcgtattcaagaaataataaagggagatgaatga

SEQ ID NO: 388671 - DNA, 777 bp, Salmonella enterica
atggctcgaccactaagaaaattaaccagagaaggtgtggtttatgctcggcgagaaatcgttgaggccgagatcaatgaacttgaaaagctcagtgatgatgatgttgcaagcagaggcgttgtttggcctaaaaacacccccggttttatctcgagtgaagctttactttattttgtacgaaactcgggtaacccttcgctccgtgaaacgttgcttaaagctttgctggaaagaattcatcggaacctccctaagcccaatagtctggatggaaaaacagcatcgatgagcagcatggcgatccgggacaaagtccgtgatgatttcatagacctgctattgatagatcaagctgattacgatgatcgacttgactattttgaagtcaattttaatggcgcgttggctagagatcgagttgatgcgaaaagacaagttcagtctaaagaaaaccgaactcaagagcttggttgtgaagacgaagagatttcgccagagattgaaagagcgatagaatcctacgatcccttcgaagcaaatgaacttgacaaagaaaattaccgacgaaggttggacgccgcgattaatgctctaccaccacttcaacggtgcatcgttgagatgtggcgtcaagaaatacccattatctcaaaagatccaaatgaaatgacaatcagtaaggcattaaagaagtcggacaaaaccattcgtactcaccgcgattatgcatttgcaacattgcgtaaacgccttgaagaaaaggagaaggtatga

SEQ ID NO: 388672 - DNA, 975 bp, Salmonella enterica
atgcataaagaactgtttcagttaggtttcccggtcagtgaacttggcgatattctgcagcaattgaaagaacggcaaatgatgtttgaaaatgataaggaaaagttgctacgaaattatctggctgaactgggtattatcatccctttcacgcgcaatcgctggcggctggtggaaagtgaacgcctggatattctgctcgctcaggtgcagcaacagatacaacaacagatcattggcagaaaagagcatcgtccggctatccctcggcgaatgcagaggatccatcataaatcagcgtcggcatggcgaggtaacagtaaagcaggtctgagccaacccttagtcaaagggcagaccgttacatatgatgatatcttacgacttcgtagccaggggacggagctgcggctaacgtttacctgtaataacggagaaaacgttttgtttgccgatgatgagagtcgatggcgttcggagtgttgtttgccagaacgaatgttacttgatttactctctgtggacatgacatcggcgcaactgatcataaccgtcgagaatttaggcgcgtatgttgatatgccgcttgttgatggtttgatactgatctttgcccctggcctgaattatcttcccgcctgccggtggatttctcaatacggacaggatataccttgggtacattttcccgatctcgatccgaatggtctgacgattgcccgacaactatcccactcattgacccgaccctgccggatctggttaccggacttttggccgtcagcacatcaggttaatgacatgattggggccggaaaacatgcctgggataccgcgccggattgtcctcaacttacgcaattaaggcaggaacagcgctggattgaacaggaagtactggttgtggactatcgttgtattgcagcgatacagaagttgatggggaatccgatggaagaaacggtaacaatataa

SEQ ID NO: 388673 - DNA, 4584 bp, Salmonella enterica
gtgaaccactaccctctgatacgtagccttagtattgtcaacattaatggcattatggcccgaacgttaaatctggtaaatcctcacgcactgcgtacatcgcgacagtatggcggcacggtttcattgttgggcaataatggtgcgggaaaaacgtctttgttgggcgcgtttatgttcagccagatccctgatattcgctatattagcttagggactaaggatgatttcaaagtttcaacatcaataaaagatagcgaaatgtttccacgcttagggcagcccagtattgttgctctggagattgaggcccgggggacgggccaccggcatctgtacgtcgttagggctgaaaaaaagacaggaacaacattagaaacccagctattttgtttgaaacttcccgatagcgttaacccactggattgtttacttgatcgtaaaggacaagtggctcacccggtaacgacagaccagttacgggataaagcagcacttttaggatgcgctattcagacatttaaagacccaaatgcctacatgttggcactgtttcagcatggcattttaccccgagcctgtcagtcacccgatgataaatatcgtctggcccagatccttcattcagcaatggccgggcgtctggataaatcgatagaaaaacatctcagcgcttatttaatggcccatactcgcgggaatatacattccgtagtgaatatggtgcatgagtccatgatcaaagtcagacttacgcagcaagacctgcaaaattatcaaaaggattatcaattttttaattcattacttacgttgagcttatcattttcagccaatacgtggtcagtcattgagaaagctctggcgatgaatgatgaagagcgcacgactattcagaaagaaaaatatcggattgaacgtgagctggaaaaaattgaggaaactctgggttcactaaggcgcaaggaagacgccataaaatcggaactgtcaataacgcaacaacagataagcgatattgatccccgacagcaatgcgctaatgccggtaggatttactttaatcaagagcaaaaagcaattggtgaactgaataaacttgaaccacagttagagagtgcggaagaagcaagcaaactccagcaaggtattgttgatgagctggaaagaaaaaaaagtgaaaatgaagagagccagctacgcacagccaaacagctgtctaatgtcgttacgcgttatgacatcgctcagaaaatggcatcgcaatataaccacgcaaaacagctctatgatgagattaaccaatggaatatggcttttactctgtcaggattaagcgcattcattgaacaactcgtgaaccaggaaaaagaggcgggaaatgccctcaaccatgcggagcgccaattacgatctcatcaggaaatcctggatgcttatactgttgccgcaaacagtgcgcgaaaattgggggatgatatctctcctccagacgctcagcgctggtttagggaaaaatgtggtcaactggaaaaatggcgtatcgaagacgctcaactgggggggcgacaacagcatcataagacgttacagggagatcatcaaaaacagcgacgtcttcagcaacggcttcgtgatgcaggcatgctatcgttgccattgaacgatgaggactttgcgcagcaactggcgatacaacaagagcaagaattgcacttaaatgaacaaaaggaacaattagcgcaacgtcagaccgaagtacaagatcaaattaagcagcttgatatcgatattgcacgctatgagcaacagagtcagcagtggcaccaatatcagccatcggttagctatttacgtactatttttcctgatgatgatttgacaccgcaacgctgcgaacaactaattcttgaccatgcgttacacgttaaatcacttcggcaggtagtcattggctacgaaacggaaatcaaacaatgccaggggcgccgtgacaaactgagtggaagagaagcaggaagtcttgagtatttgcggactcttgccgctgacgtatcgggaatatcggttgctgaactgtacgcagatatcgaagtacaggacgccggatattttgaggcggcattagggccgttaatgttcgccatacttgtcaatggtgatgtcgatgatgccgccagacaattgcttacacaatacgatgagcaatggccgcttcccgatattttgttgatcagtgtaacccaacctatagacgttttacgcaacgggtcgttcgagtcggaattactttttaaagatatcaccgaccaatataacacggtggagagtatcctcccgccctggtgtgttatagatgaaccgcgataccgccgcatcagccagatacgttcagagcccgtattaggtgataaagcccgcgaggcgcttatccttcaattggaccaacagattcaactggtagaagaaaagagcgagacgctggaacgtgagattgaagacgttgaacgtaacaacgaacatcttaaggccgttagcgcggctccctcatttatttgggatgatgaaccgccgctggaagatactcgccgacagcgaagccatcgttataccgctctgacagatattgaagaaaaacacagaagcgtgtccagtcagtggaaaaaaagccggaatctcttactggcgctacaggaatgtgaaccagacagtaaaatcctgtttcgggattttcctcaggagctggccgagattgctgatcagataaaacgggctgaagttgcagggcgtgatattaaacgctatcagccgttaattaatcagatagaaaaagagtatccattactacgggaagaatacccggaaaatatagcacaagtacgccagcaggttgagcagaacgagaaaacctggcaaacctctgcaatgcgagttcgactggtgaaagagttagacagtgtgcgtgctcaccttaaacaggaatatgctaatgctcagaaaatactggaagatgaagcacaagcacaaatcctcttatctggcgatcaaaaacggctggaacaggacggtgaccgaattaaacaagaactcacaactgcaaaaaatgagttagctgaaaaagataagttttactcagatctgatatccgcgattactcgctaccgccagaatcgtgatgaggctaaaaatgatctggataatttgccatttccctacacattcggtttggaaattaaacttgcctcacagctcgcgcatttacagagccaacttgaaaaactgaataacaatttaagagagtgctatacaaaaacggctgcgttgcatcagcaacgctcaaaagaagaattaaacctgacaaatcaaaataacaaacttactgccctgacagaaaaaattgaacagataactcagcagcgcaacggaattataagcgcattgaaagccgatggctcttatggtgatctggaacctgtaatgcgcgaaatgctgatcaatggcaaagcgccatcaccgggagcgattttgctggttgatcaatcattgctggctcaactgacccggttaactattgaatattctatttcttcagccgacccctttatgcagcaattagcgtcctgcggtcaggatacatctgacatcgctgaagtctgtgccacgctttacagtcgcgcagtggcgctgtttcgccgccgtgcccggcaggatatccagcgcactacacagccaagagaaatgttgcaggcgttatctaaggcggcgaaagacgcacagatcatgttggctgaaaccgaggctgcgttccagatgcgccgggatgaactggccgacgcgctatcgcgccggattaacgatgaaaaaagggcgataagccggttaagtgctgaacttaccggaattggctttgggcaggttgccagtgtgcgtctggaagccaggacggttaagcattttcaggataccctgaatgccctgaaatcaggcggatatggtatggacgatctcttttccacggcaggaaccgttactgaagtgctggctggcctgtataaaaaaatcaatcaacatgaaattgatggttcacatttgctggatcaccgtaattatctggatgtaaaaacgctaatacagcgtcgtggtgcagagcagtttgaaccactgaacgcttccagcctgtcaaccggggaacgaatcggctccgggctggcagtgctgattgccgtcctcaggcactggggacgcagctctcatggcaataaagagcctttcgctttgccgctggtgatggacgaggtttcccgtctggatgccgcctctcaggcgacagtccacgaactggcggtaagaaccgggtgccagatgttggttgcggccccggaaacgttagggaaaattaccggaaccggctaccagttggtgcgcatagtcaggacagagaacacgggagccaacgggcaaagtgttacgcgccatcaggtgaaaattaccggggttcgcgacgcccagcagttgccatttgacgttgatagctatctggctacagcagagaatgctaaaagtgacgaggtgaaaacaatttaa

SEQ ID NO: 388674 - DNA, 774 bp, Salmonella enterica
atgactgagcttgaatctacacagggtgatcaatttaatacatttctggatgtgatgaaatcacctctattccctgttgtagattataaattacgtagagggattaatatattacccgcggattatatgctgtattcatttattaatcaggcatttaatccgctttgtgaatattacgactgcttgtctttatctttatgtttttccaatgaatctgtttattacttactgcctcagcgccgtgggaaaataccattagagcgatttaatgagttgcagatggtcactggtttgattattgtcgcaatggaactcgaaaaacagcttagccaaaaagagtggtttaccacgaatcaactactggagcgaatgagtaatcaattatctgaaaccagaatgctggagttatttcgccgtcgtcctggtcaacagacccaatacgatttatctaaaatccaagatgaaataagaaagtcgctcatagtattcgatcgctatgcttttattcaactctctaaggatcggcaatccttccagacaacacccgctatctatcgttttattgaaccgctgcgaggattacagcaagagtcagaaattccacaacgcctggctgaactgatccaagacggttatctggtcaatattgatgaagcagcgcgggatagtgtagatgaagatttggcagagagcgagcgtttctctgccgaagaagaaatggatgcaacgggtgatttatttgcttccgggactcatgaaggggaacaattgtga

SEQ ID NO: 388675 - DNA, 1401 bp, Salmonella enterica
atggacaatgtcgcgcctgcttcgcagcagtttactagcccactaagctgcatattgttaaaaatcagtaaataccagccgaatttgcatcttacccctaatgagtttagttatctggcggcgatggcgatgtggggtatggaggagtcaggtgtcgaatcaaatagtgagcattactttgtacaatccggctacgatgagaccacatgtcacagcatcatccgttacgttgatgaaagaataaatgaagatcctaatacttccgatgttcgtgttaataactttctgaaacgagcgctggaacagggattgttgtcactggccggaatgtctgtcgctgatgtggggggaacatatcgtctgactcagttggcacatgatttgttaaaacctttccaacaatctgatgaattagaggataaagaaacattaagccaacgttatctgagaattgatcaggaactgtccagtttaaatgctgacagaaatggagaaaaaattactgatagtgaatggttggtgaaggtagaactttttttaccgagcctgaaggatctgctgacaggtgtttttaaaaatcaggaattccttatctctaaatttcattcaatgcgctccgagatacaaaccgaaattggtatttctctggaaatggaaattcagcaacttctggaaataatacgcactctggctggtcagatcaacgatttgagaatgttagtaatgaatcgtgccgatgcggtattaatgcaactggaaattttgcaaaatacagtcgtacaaaaaggtggggctcagcgattaaaaaatacgttatcctctttgtttggttcattaatggatgttcgagaattcgctaatcattccttaagggatttatccggattctttagcagcgtgctggaccgtatacgcatccgtattgcgttagatcccaatgctaatctggggtatttaatcgatcgaactatcgagttgtttggtcggtcatcatggtcgttagcattaccttcgaccgttaagctaatgcaattacgtgaatgggacacaccgccgcctccggcggataatgcgttgttcctcgatgataatgatgatgaagaattggtgcgggagatgcctgcgtttcagttagagagtttcgcaagggagtttgttgaaaaggcattaagtgataataaaccggtgagtaacgtttctgttatcagaaatattttaagtaaattcccattcaatgaaacggatcgctttcgcttggcacagtgtacaataaaagaacttatgaaacagagtgacaatattcaggatgatatctccccggaatgggttttaatggatgagtcagcaaattacgaaatcgaagagcaatggttaatttcacagggtgatctcaatgactga

SEQ ID NO: 388676 - DNA, 534 bp, Salmonella enterica
atgatggaaggtcaattaattttctgctcggactcaatactacgctttcgctctaactacgatgaaacaacagcacttccgttgctatcaatccagaaaactatttcagatacagaccccttttttcttctcagcttctttcgtcataccgtgatgattgaagaaggaacaacgctggcggaaatggaagcgattttcattagtggtttgtttttccagacgccacgtgctgctgcaagttgctttgacgagttaaaaaatagtctcgatggactgggaaacgaggtgtcgaaggaggctgaatctaatctcgctgacagtggagatggaaaaccactaaaaatagaagttgccgatggagcctttgattccctgattactcacatggagtctgaaactgagaattggcagtttatcaagaaacaatgccaaaaagagggttctttgcctgtcaggattggggttattacaccggcaaagccaccggagttgcgcttgtgcggagtgatttgccgggatagcagtggcgtttaa

SEQ ID NO: 388677 - DNA, 132 bp, Salmonella enterica
atgggcaagttaggtggtgaaatgaaggcactggcaaagcgctgtggcggtagccataaaacggtgcacgatcgcattcatatcgtgcagcgtttcgatcaccacttacgggctttgaacgtccatatctag

SEQ ID NO: 388678 - DNA, 1041 bp, Salmonella enterica
atgaagttcaaacatcctgccttgctactgtttatcgcgggagtagttcactgcgcaaatgcgcacgcttacacattcgatgcatcgatgttgggcgatgcagcgaaaggggttgatatgtcgctctttaaccagggggtacaacagccagggacttatcgcgtggacgtgatggtgaatggtaaacgtgtcgacacccgtgatgtggtgttcaaattggaaaaggatgggcaaggaacgctttttctggctccttgtttgacggtcagtcagctttcacgctacggcgtaaaaacggaagattaccctcagttgtggaaagcagcaaagcctccagatgagtgtgcggatctgaccgccattccacaggctaaagcggtactggatatcaataatcagcaactgcaactgagtattcctcaggtggcgttgcgtccggaatttaaggggatcgctcctgaagatctctgggatgatggtattccggcgtttctgatgaactacagtgcgaggacaacgcagacggattacaaaatggatatggagaggcgtgacaactcttcctgggtacaactgcaaccgggaatcaatataggtgcgtggcgtgtccgcaatgcgaccagctggcagcggagtggtcaactgtcggggaagtggcaggcagcatatacctatgctgagcgtggactgtactcactaaaaagtcgtctgactctggggcaaaagacttcgcagggggagatatttgatagtgtgccatttaccggtgtgatgttggcatcggatgacaacatggtgccctacagtgagcggcagtttgctccggtagtgcgtgggattgcccgcacgcaggctcgggtggaggtcaaacagaatggttacaccatttacaacaccactgtggcgcccggaccgtttgcactgcgggatctgtcggtaacagacagtagtggtgatctgcatgtcaccgtgtgggaggccgatggcagtacacaaatgtttgtggtgccgtatcagaccccggcgatagcactgcactag

SEQ ID NO: 388679 - DNA, 948 bp, Salmonella enterica
atgatggaactgatcaataatcgtggtatgcgagactggatgatatttattaaagtggcggaagtagggaatctttcccgggctgcacgggaattagatattagcatttctgctgtcagtaaatcgcttagccgccttgagaattctattgaggttactttacttcggcgcgattcacatcacttagaactgactggagctggtcagacagcctatgcaagcatgaaaaggataacatcttcctttcagtccttgctggatgaattgcgaaatccggataaaattatcagagggagtataaaattttcggctccggctattgtctgtgagtttcttgccaataagtggatatgggaatttacagctagctatccggatacaaaaatctacctggattcacgagagcgtagcgatttttttagtaaatccctggagtttgatgagctggtttttaaaagtggcataatcgaaagtgaggatctcgtgtatcgaaagataagccctttaaagttggttctttgtgcgagtccgaaatatatcagaaaatatggcaggatctcacatcctggcgatttggaaaatcacattattgtgggtcttcacaaccatggtctttccggacctcttactcttttccgtcaagatgaatcatacactattagtggcgctgttaatgttcatttatcttccaataatcttttgagtgttcttaatttggttttagaaggaaagggtatcaacctcatgactccggcctggcttgccaccaaatacttaaaaaataatgaacttgaaattatacttcctgaatggagggttccagatctccccatttatcttgtatggcgtcatcgtcagtattattctcctttatttcaacgctttctgtcttttattgaagataaatggaataatcgcccacaaattgattttctgaatgatgattaa

SEQ ID NO: 388680 - DNA, 255 bp, Salmonella enterica
atgcctgcctcatgcgaaactgcgctccagcagcgttgccagcaaattgtgaccagcccggtgctcacgcctgaacaaaaacgccattttctggcgctggaagctgaaaacgccctgccttatccccccctgccggaagatgcccgccaggcgctggatgaaggtgtcatttgcgatatgtttgaggggcacgcccccttcaaaccgcgctacgtgttgcccgattacgcccgattacgcccgatttctggctaa

SEQ ID NO: 388681 - DNA, 1215 bp, Salmonella enterica
atgtcccccattgaaaaatccagcaaactcgaaaatgtctgttatgacattcgtggccccgttctgaaagaagcgaaacgccttgaggaagaaggtaataaagttcttaaactgaatatcggcaaccccgcccccttcggattcgaagcgccggacgaaattctggtcgatgtcattcgtaatttgccgacggcgcaaggatattgcgactcgaaagggctttattctgcccgtaaagcgattatgcagcattatcaggcccgtggaatgcgcgatgtaaccgtggaagatatctatatcggtaacggcgtttccgagctgatcgttcaggcgatgcaggcgttgcttaacagtggcgatgaaatgctagttcccgcgcccgattatccgttatggacagcggcggtatcgctctccagcggcaaggcggtacattatctttgcgatgaatcttccgactggttcccggaccttgacgatatccgcgccaaaatcaccccacgtacgcgtggtattgtcattattaatccaaacaaccctactggcgccgtctattctaaagaattgttgatggaaattgtcaacattgcgcgcgagcataatctcatcatcttcgccgatgaaatttatgacaagattctctatgacgatgccgagcatcactctatcgccgcactggcgcctgatctgctgaccatcacctttaatgggttgtctaaaacctatcgcgtcgccggcttccgccagggctggatggtgctgaacgggccgaaaaaacatgcgaaaggctatattgaagggctggagatgttagcctcaatgcgcctgtgcgccaacgtcccggcgcaacatgctattcagaccgcgctcggcggctatcaaagcattagcgaatttattctgccgggcggtcgactgtatgaacagcgtaaccgcgcctgggagttgattaacgatattcccggcgtttcctgcgtaaaaccgcgcggcgcgttgtacatgttccctaggatcgacgctaaacgttttaatattcacgacgaccagaagatggtgctggacttcctgctacaggaaaaggtgctgctggtgcaaggtaccgcctttaactggccgtggccggatcacttccgcattgtgacgctaccgcgtgaagatgacctggagatggccatcaaccgctttgggcgtttcctctcaggttaccatcaataa

SEQ ID NO: 388682 - DNA, 510 bp, Salmonella enterica
atgagcgcagacgaactgattaaactcgaagccactatgcaacaaaacatggtactggtgggttttaaaatccacgaacgccagcggcagatgaaggacgaagtgaacagtctcatcaacgcacaggctgtactgggttacgtgttggctggccggaaaaccgttaaggaatgtattatgagctgcttcacaaccccggccattcttgaaatgcctggccactacctttggcgtatacatgaatcttttgaattttacctcagcgacgacaacagcgacgtaatcagcgtaccagccggatttgtaactgatctcgccaccgtgccatgcatcttctggtcagtcatgccgccagacggcaaatacgctaaagcggcaataatccacgactacctttacgataatgcgctgcgcacgaaaaaagaagccaatttgatattcctggacggaatgaccgtgcttggcgcgccgaagtggaaacggattgagatgtatctggcggtcaggtga

SEQ ID NO: 388683 - DNA, 285 bp, Salmonella enterica
atgcagggccaggtggacggaaaatatattgagcacaggaaaggaggcccggtactggttgagcatcgcgaatatacacctgaagagctggttgcacaggctgaagccagaaaagcggaacttcttgctgaagctgaatcagccattgcaccactggcgcgggcagtaaaactaaaaattgccacagatgaagagattaaacggcttgaagcatgggaactctacagcgtaatggttaaccgtgtggatacagcttcccctgactggccggaacagccagcctga

SEQ ID NO: 388684 - DNA, 249 bp, Salmonella enterica
atggcgctgaatgattttcacgtttctgaaccttatacgcttggtattgagctggagatgcaggtgatcaatccacctggctacgatttaagtcaggactcttctacgctgatcgacgccgttaagccccaacttactgcgggagaaattaagcacgatatcaccgaaagtatgctggagatggccacgggcgtctgccgcgatattgaccaggcggcggcccaactttctgccatgcagttcgggtga

SEQ ID NO: 388685 - DNA, 342 bp, Salmonella enterica
atgaagctcttaaaggtttttgggctggccaccatcttgacagttattccgttaacaggctggacagcagttcagtgtgggccgttttaccttaaggccaatgccgaaggattgaccatggtaaatggccgggaacctgaaacgcagaagctcaccttcctgaaagcgaaagatgattatgacaatttcatgatccagctgatggttcccggtgatggacgctggttaggcatggactacattattcgtaataaaaaacccatgctcaatgttgaagttatccgcaaaaatatggacgagccgcgagagttctggacgtatgactgccggaaggtgaagtga

SEQ ID NO: 388686 - DNA, 1146 bp, Salmonella enterica
atgccgcagggattacctgtatcaaacgtcgttaacgtcgacgtgattattgggccgcgcgcggctactggtcgaaactttggttcgctgctcattctcgggagctcaacggttatccctgtttctgagcgcattcgtctctactcagcgcctgaggctatcggtgatgatttcggcgtggatagcccggaatatgaagccgctacggtgtatttctcgcagtcaccgaagcctcagcaggtgtatgtgggccgctgggtgaaaacactggaagccgctgaaagtggttcaaccgaaacgttgctgcaggccgttaacgccgtactgaattacacgaactggtatggtctggctgtggcagacgatgaagacatcgatgatgccgactggctgagcgtggccgccgcgatcgaagcttcaagcctcagtcgtattctggcaattaccactcaagacccggaagcgattaacacgacatcaactaccgatctcgcctataagctgaaggcggcaaaatacgggcgcacgttcgtacagtattcttccagcagcaagtacgctgcgctgtccgcgtttggccgcgcgtttacggtgaatttcaacggcagcaataccaccattaccctgaaatttaaacaggagccggggatcacttacgaaaccctgacgactgatcaggcggcggcgctggatgccaggaactgcaacgtgtttgtgtactaccagaacgatacggcaatcctgcagcagggcgtcatgtccagcggtgatttctttgatgagcgccacgggctcgactggctgcagaactacgttcagaccaacctgtataacctgctctacaccagtacaaccaaagtgcctcagaccgatgcgggtgttacacgtcttctgtccaatgttgagcagtctatggatcagtccgtgacgaacgggctggtggctgctggcgtatggaaaggtggcccgattgggcaactggattccggcgacatgctgaccaaaggttattacgtctacgcgcaacccctgtccgaacaggcgcaggctgaccgcgaagcccgtaaggcaccggttattcaggtggcctgcaagctggcgggtgcggtgcatttcgctgacgtacagatcaacgtcgttcgctaa

SEQ ID NO: 388687 - DNA, 372 bp, Salmonella enterica
atgccttttctcgatgtgacggacgtccttctcgatccggatttttgcgacccgtcactggtgtgcctgcggcaggtacaaagcctggatgaggataactttgcaacgaacactacgcaggaaatacctttcgctggcgtcgtaacggtggatcgttcgctggaggcacagaggatgattgccgggcaaaacatcgctggcgcaattctcatcgtgacacaattccggttaacccggggtaaccgcgaaggcctggacgccgacatcgtgccttatgaaggttataactatcgcgtaacaaaagttgacccgtacacacgttatggcgccgggtttgttcaggctcactgcgaactgcttgacgaggtgtaa

SEQ ID NO: 388688 - DNA, 417 bp, Salmonella enterica
gtggcaaaaaacaaaagcctgccgacgcctgagaaattccgcgctgatttcccacagtttgctgatgaaacaaaataccccacaacgatgattcaggcccgtctggtccttgctgatgtgcttatgaacgagtcgcgattcggcgaggacgttttcccctatgtcgtagggttgttcgtggcgcactacatggcgctttacgccgctgatatgcgcggcgtggcggttggtggcgctggaggagctaatagcggggtacagacatcaaaatcggttgataaggtgtctgtaagctacgacgcgagtaccactctgaatcctgacgctggtttctggaataacacccgttacggttccgagttctgggaatacctgatgattttcggcgccggggctatccagttggggactccctga

SEQ ID NO: 388689 - DNA, 282 bp, Salmonella enterica
atgaaaaaaatctatgtgctgtcggcgtttaactttaacgacggtgccagcatcaagacatttactcccggctttcatgacgtcgaaagcgatgtggctgatcactggtttgtgaaggcgcactgttcaccggacggcgaggccccgtccccggaaaatgatccgcgtattgcagagctggaagcgcaggtggcggaacaatccacccgtattgcagagctggaagcgcaacttgcggaggctaaagccagtggcaaaaaacaaaagcctgccgacgcctga

SEQ ID NO: 388690 - DNA, 942 bp, Salmonella enterica
atgccaatgacttttgatcaggcaacagtcgacagtactggcgccttccttgttcatgagctggagcgacttgaccagacgctgaaccttccgttgacatcacagacgtggagccgggatatcgaactacgcgaagatgtttcaattgctgatgaggtgagttctttcaccaacacaacctttgcggcgcccggttcaccgaatgcgaatggaaagaactggattaaccagcttgcgacagcaatcgccggcctgaatgtggatatcacgaaaaaaggatttccactggagttgtgggggatggagcttggctggacggtagtcgagctggctgctgctcagcaggtgggccgtcctatcgacacccagaaatacgatggcatgcagttgaagtggaatatggatactgacgagcaggtgtatatcggtgatgaggtaaaaggtgctaaaggcctgcttaatctgtcacaggtcaccccgacgaatgctgctaaaacttgggcgacctccagcccggatgaaatccgtgccagcattaaccaggtactgagcaatgcctgggttcgttccgcttattcgaaagtaccggaagatttgctgatcccgccggaacagtattccttcctggcgagtacgatcgtttcttccgcgggtaaccagtcactgcttacctaccttgaaaccaacacgattgctttccaccagaacggtaaaccgctgggtattcgtcctgttaaatgggctattgggcgcggtgtggcgggtaaagaccgcatggtcgcctacacgaacgataaaaagtttgtgcgcttcccgatggttcccctccagagtgtgccgatccagtatcgcggcatctaccagcttgtaacctactacggcaagctgggtgctgttgaaccagtctatccggaaacccttaactacatggacggtatttaa

SEQ ID NO: 388691 - DNA, 495 bp, Salmonella enterica
atggctaataccattcttttccggatgccttctggcatcgccggggcaatttcacgcccgcagaatttaaccgttgagccacatgtgctcgattccacgaaaccgttcgcagcgtatggtctgggcgggaaaatctctgggggtaaatttgtcccggttgaagctggcgacacggcggacgtaatagcggggatttttgttcggccttacccgacagcatcacaacccgacaagattcgtcagatcagctctggtttcaactttaccggcgataacctcaaacgcggttatgtcacggtcaatattggtggtaacgcgtcagcggttgctctcaatgctccggtctacatgcgcgtcgataacccaacggattccagccccctcggcgcattccttgctgctgctgacggtgataacaccgttcagataaccaatgcatatttcaatggtcccggcgatgccgacgggaatattgagctggcgtacaacatttaa

SEQ ID NO: 388692 - DNA, 1200 bp, Salmonella enterica
atgaaatatttctttaaaacccgcctagggaatactcgtttccagttggccgatggctcgatcctgttcaaggacgtccctatcggacgaaccggtgaacagatttacggtgcggaagagctaccggagcttacccctgacagtgacgggttgatagttgtccgccggacgcctgaggaagtcttcagcgaacgcacgatcgcgtcattcgaggggatggctgtaaccattggtcatcctaaggactttggcggcaacatcatttttgtcacgccagagaactggcgtcggctggcaaatggccacatccagaacgtcaggcgcggagagggtgccagttccgatctgctgctggctgatgtcattgtcaaaacaccggaagccattcaggcggttgaagacggagacgatgaggtcagttgtggttatgacgctgactaccgacaaatctcgccgggtgtcgcagagcaatatgcgatcaccggtaatcatctggccctggtccctaacgggcgggccggttcacgttgtgcactgggagacgctatgccgagcactactaaaaactggtttacccggcttttaaaggcccgtaaaaccaacgacgccgccgaaatggcgaatcttatcgacaatccaccggagaatatgaccggtgataacgatgatgttacaaccgccttaaccccgggaggcgtggtcataaacctttcaccgcagaatccgatgccagcgccgacgttgcctgtgacgactgactcggaggaagaaatccccgcatggggcaaagcgctgattgaggccgtggcgaaactcacaccgactgaaccggtcacgggtgatgaggatgaagacgagaagggcgaagaagaaggaggcgtgactggtgatgccgcgtatcgcgctgatctgattcagccaggtattcagctgcctgagaaggtgaagccgacggcgtttaaacgccagatccttgccgctgccgatcagacgctggttcggtccatcatcggtgatgcagacctggcgaagctgaaaaaagccacagttgacatggcgtttaacgctgtttctgaactggcaaaaaaccgcaacaccgcagcgaaaactaccgacggttttcgctccatgaccaccaacaccaccaaatccatcgcggacattaacaaagccgctaaagaactctggaaacgaggctaa

SEQ ID NO: 388693 - DNA, 642 bp, Salmonella enterica
gtggcgggctcttacgatggttcacaggccagcaccgataaaaccgtcagtacccttgttgactattcagcgctgttagataactgggccgagatggtaggccgcaagatgttcgctcaggttgagcaggaagaatggaatcagtggaaatctgtatctgaggaaatcggcgcaggtctgcgtgatgtggtgggtaatactcccgtcgggctggtggcacaggatattgtgtcccgtcaaatccagttgatgaaatccctgcctctggaagctgcgcaacgggttacggaaatccagcagcgcgcaatgcaggcggtgatcaacggagagcggccagaccagctttacggcatgatcatgcaatccggagatgtggccgctggccgtgctcgtactattgcacgaactgagatcggccgcgccactaccgctttgacacaggcccgcgcgctggctgttggctcggagggctactggtggcgtattaagggcgctggcacccgtgactcacattacaaaatgcgtaataagtttgtacgctgggatagcccaccaacgctcgatggcatgacagggcatgccggatgcctgcctaactgccagtgctggcctgaggttgatattcccgcaccaagaaaataa

SEQ ID NO: 388694 - DNA, 1452 bp, Salmonella enterica
atgtcacgtaaacaaaaggtcgctacggctgactcttacgataactttgtcgcgcgggttggcctgcagcaaccaaaccaacacgcggcgtcgacatatcgggccaattacaccagccgaaaccgcctgcttatagagtgggcgtatcgttcgtcctggatcatcggcgcagctgttgatgcaaagcccgacgatatgacaaaaaaaggggccagaatcaccagtgaaattgacccgaagcgtcggggaattctggaagccagatttgaagaactgaagctctgggagcggctgaacctgatactgaaatggtccaggctttatggcggcgctgttgggctaatcctcattgaagggcaagctccgctaacgccactcgtactggataaagtgggtaaaggcagctttaaaggtctcgccgtgcttgaccgctggatgattaatccgaacctcggacggcgtatcaggactctggggcctgaactggggcggcctgagacttacgatattgtcaccacggcgcagggtattccaccgtggacggtgaactacagccggttgatacgcatggatggcattattctcccgtatcagcaggccctcacagaaaacgaatgggggatgtcgatcgttgagcggatctttgaccgcctgacttcctacgacagtacgagcgttggcgcggcacagctggcttataaagcacatttgcgtacagtaaaaattaagaagctgcgcgaaatcatcgctatgggtggaaagccttacgaagcactaattaaacaaatggatatggtacgtcagttccagaccaacgaggggatgtctctctttgatgctgaagataccttcgagacgcactcttactcgttcgccggtttgtcagacctgctgagcgagttcaaagaagacattgccggcgccgtcggtattccgctggttcgcctgtttcgacagtcgccaaagggtttttcaacgggagattccgatcttgctaactactacgacgatattggcgcgctacaggaaaacaccctgagggcaccggtgcgcctgctttatgaggtgcttcatcgctcggagttcggcgagccgttacctgatgattttacttttgagtttaatcctctttggcagatgtcagacgttgatcgctcgactgtggcaaccaatacgacaaccgcactggcgaccgctgtgcgtgagctgggtatgcctgcgcccgctgcactaactgacctcagggaatcggcgcgtgtgacagggatcggcgcatccatcactgatgaggatattgaacatgcgaaggcccagtggtcggaggatgaatctgaaaccagccctccgccgccgttcggaaatacagtaccgcaaaagcctgctggcgatagcaaaccagatcggggaaatcgtggcgggctcttacgatggttcacaggccagcaccgataa

SEQ ID NO: 388695 - DNA, 1401 bp, Salmonella enterica
atgacttctactctgacatccaggccgacacttaatccagtgcttcggaacttctggaccacgcaggcgcgaaataaggtgctctatggcgggcggtcatcttctaaatcatgggacgctgccgggttcgctattttcctggctaacaagtacaccctgcgtttctgttgcgctcgccagatccagaacaagattgaggagtcggtttatacgctgctcaaaatccagatcgacagatttggtttgcggcatcgcttccgcattctgaacaacaaaatcattaaccgggtgaccggttctgaattcgttttttacggcctctggcgaaatatcgaagagataaaatcgctggagggtgtaagcgttctctggctggaggaggctcatgcgctaacggaataccagtggaagatactggagccgacgatccgtaaagagggttcagagtgttggtttatttttaaccccggactggtcactgatttcgtgtggcgtaactttgtggtcgatccgccggaagatacgctgattcgcaaaatcaactacgacgagaatccatttctttcagacaccatgctgaaggtaatcgacgccgcgcgccgccgtgacccggacggatttaagcacgtctatgaaggtgtgccagagtcagatgacgacgccgccattattaagctgtcatggatagaggctgcggttgatgcgcacaaggctttgagttttgagcccagcgggcgtaagcgtattggctttgacgttgctgacagtggcaccgataaatgcgcgaacatctaccggcacggctctgttgtctactgggctgatgaatggaaggccaaagaggacgaattgctgaagagttgccagcgcacttaccaggccgcaatggagcgcgatgcggatatcgtttacgactcgattggggtcggcgcatcggcgggcgcaaagttctcggaaattaacgatgacagggaacgggaaaacgtttactcccgaagagtaaattatcaacgttttaatgccggcgcaggcgtctatgaaccggacgaagaatataacggcattccgaataaagatttttttgccaacctgaaagcgcaggcatggtggctggtggccgatcgcttccgcaacacgttcaatgcagttaataacggtgagcagtatccggttgatgaactgataagcatcgactcctcctgtccattgctggagaagctcaaactggagttgaccacgccgcaccgcgactttgaccgtaatggccgcgtgatggtggaaagcaaaaaggagctggcgaaacgcgacgttccatcaccgaacgtggctgatgccttcatcatggcattcgcgccaacagacacatcgctggacatctggaacaagcttgggagtcagtaa

SEQ ID NO: 388696 - DNA, 756 bp, Salmonella enterica
atggcaaaaccggactggggggccatcgaagcggcatacctggccggggttatgagcctccgcgaaataggcgcccaacacggcgtaactgaaggggctatcagaaagaaagccaaaaagctgggatgggtacgcaaaggcggtacgcaggtacgcaaaagtggtacgcaaaagaaaagtacgcgtacctcagcaaagccaacgtactcaggagcagcgcaacaatgtacgcagccaggtgatgaacagcccaccgatacgaaaccgattcgtggctcgcgtaccgcaccaccagtaaacccattcccgtccggtaatcagcatgcacttaagcacggtggctatgcccgccgccttctgctgaaagatgacgtaatcgaagatgccagggcgctgacactggaggatgaactgtttcgcctccgggcaagcaacctggtagcggcggagaatatcggccgctggataaccatgctcgaagatattggcatggaggaagagcgggcccgaaaggtgctgatggaaaacatcagggctgctgagaacgccatgatgcgaaacaccgtacgaattgaatcgatcaccggaacgctggcgacagttaataaaattttcgccgataccgattactgtgtggcggcgaccgataaagtatctctggaggctgatcgcttacgccgtgatgctggtattgatgatggcaacggagaacgtgacctcaatgacttctactctgacatccaggccgacacttaa

SEQ ID NO: 388697 - DNA, 219 bp, Salmonella enterica
atgttagatggatattttaatcatgacggcgatagtggtgacgagttcataaacaagcgcaagcgtttgttggcggtacaggctgcactcgaaatcgcaaaacaaagtgttggaaattatcatcaatctacggtctctcgagtaaacgaagatttagcaaaaaccgctgatggaatcgaaaggttagcagatgcgatccaggcagcattagataaataa

SEQ ID NO: 388698 - DNA, 318 bp, Salmonella enterica
atgctaaaagccagaacgcactggagtcacagagagcccaggcagatatcaaagtggctgttgcggatgatgattgcgctcgtcggcctgtgcctgctgcagctgctgacaggctgcgggaatacgcggacagtttacgtgccggttccgccggtgccgctgccgaccagcctgaccgctgagacgccacagccgacaattcctgacccgctgacctacggtgccagtctggacctgaacgtgaacctgctatcggcgctggggcagtgcaatatcgacaaggccagtatcagggcaattgagcaagaacggaaatga

SEQ ID NO: 388699 - DNA, 261 bp, Salmonella enterica
atgagctgtctaatcgtaagcggcatcaagttttacacgctggctgaggggacatcatatcctgacccacacgctgataatcagtacgtgggtgcgtattgcgttttcccgttcgagggcaagtgggtagctcagaggtaccatcggggcgggcgaagatactggactgatatcacagccaggcgatttgataccgaaaacgaggcgctcagttttacctacgaatacgcgtttgccccggaaaactgctacaaatactaa

SEQ ID NO: 388700 - DNA, 258 bp, Salmonella enterica
atgtctgactggaatattgcagcaaaatcaaaagacgagcaggacaaggttaacgtagaccttgccgccagtggtgtagcgtacaaagagcgcttaaacatgcctgttatcgctgagcaggtagcacgcgagcaaccggagaaccgacgtgagtacttcatggagcgggttcgctactatcgtgagcagagcgtgacgctgccaaaagcatccgatccgcgctatcttgatatggctacgcagaacgagaaaaagtaa

SEQ ID NO: 388701 - DNA, 135 bp, Salmonella enterica
atggcgttctgctcccctattccactgtcggaggtggaccccgtcgcaattgttgataataaaagactgggtcatgtgcttggagttgcgcgccaggcccagagaaaactggacaataatcgctcacttaaataa

SEQ ID NO: 388702 - DNA, 885 bp, Salmonella enterica
atgaagctcgtaagcttttggcaaacagtatcgatccgggagataaaaaagaaaaaagataaggttgagctggaagaagcgcgtacttttgagcagcttgctattgagtggcatgccacaaataaaaagtggtcggaagaacatagtcgacgagtgctcaaaagcctaatggacaacctctttccagccataggtaagcggaatattgccgaactaaaaacgcgcgaccttttagcgcccatcaaagctgttgagttgtctgggcgtcttgaagtggcttcccgtctacagcagcgcaccacggcaattatgcgctacgccgtacaaagtggtttgctggactacaaccctgcgcaggagatggctggcgctgttgcttcaagtaacaggcagcatcggcctgctctacagttgaagcgaatccctgaactactacggcgcatagatagttatacaggtagacctctcacgagacttgccgtcgagctcacgctcctggtattcattcgttcaagtgaactacgctttgctcgttggtctgagatcgatttcgaaacatcaatgtggacaatacctgcagagcgcgaagctattgaaggagtaaagcattcacaacgtggttcaaaaatgcgtactcctcatctggtgccgctttctcatcaagcgctagcaatccttaaagacgtttacaaacttagtggtgatcgcgactttgttttcattggcgatcacgaccatcgcaaaccgatgagtgaaaacacggtgaacaaggcgctgcgcgttatgggttatgacacgaaggtagaggtttgcggacatggtttcaggacaatggcctgtagttcattgattgagtctggattgtgctcgagggattgtaaatag

SEQ ID NO: 388703 - DNA, 234 bp, Salmonella enterica; identical to SEQ ID NO: 265769

SEQ ID NO: 388704 - DNA, 513 bp, Salmonella enterica
atgaaaaaaagaaaaagagactattatattatctgtggctctccagattatgttaatgcaattgaactggatgtcattaatggtcttgagtatctggttgatgcaaaaaaacaactgcttattataacttccaaaaaaatcaatggtaggttaactgcataccttttcaaaaccaaccaaaatatggctcagtggttgagatgcaatatgctcatgcttaatatcagtgtggcaaaatacattgtgaaggaatttacgtcaaaacaactcaatgatttaaatgagttatctcaaaagttaatagaagaactcaaagagttacctgagcgtgaagtgaaaaaaggaattcgtcgtagcccggaggaagttaagtctttcattttaaagattatggaaaaaaatcctggtatcagtgcaacacatgcattgcgtgaatttcgtgactcgggaaattcatttgaggaaaaacgttttcgggctgagtttatggccctgagagaggctaaaccttaa

SEQ ID NO: 388705 - DNA, 2166 bp, Salmonella enterica
atgactgatacttctcaatggctgtgtgacttctttggcgacggaaatttactgaagctggacaggctgctggaaaatgttgaaaacgcctaccctgcggacttaaaagccgtcttactgccgctctacgagagcgcaactgacgctcagtggccgattattctgccctggtgcgatgctcatcgctgggtattttttgccgcagcagaaacggatcgcaccacactggaactcagcaatgtgctgaatgctaggctgggatctgccgatgttattgccgacagaaaggtgactttagtcccggcgcaaggagcgacgtcgctatctgaaacggctctgctgagacactgtccggccggatttatacgaatcgaattacttcccacaaaacagaaagataaaccggcaaaagagcgggtcttcgctgcgctcaaagacgttataaccctgtttcgtgacaggccatcaatggtacgtacggtcaagcgcccctttgggcggatcttgagtgattttattctggcaaatagccaaaaagacgaaaccacaagtgacgctttactacaggaactgaagaacaatggcgcgctttcgcggcgcaaccttatgctgctcgaactccagcaggcaggtaagttggaaaggtgggacacgctgctgaatcacgattcgcttgtggatttggtgcggggacgcattcctacaactctaatgaggatgctgctgaaagcataccagcaagtctattttacgcccgacatccacgggtatccgcaggcctccccggcggatcttcgcccgcaatgtctggcactacatcctctgtttacgcagatgcctttcttatcccaggatgacgctgacatagctgcgtggaaaagttgggccaccggtgtgatgcttattggagaggtcgatctgctcaacgcgttgccagaacgtctgaaaaccgactggctgagtggattacacacttgggccagtcgaccgttcaacgttgtgagcccgccagatacgacagcgacgacgtcggtcccggatacattgcaacagcttgccacatatctgcaagcctctctgacagctacgcaagaagagattaccagctacgcgcaaacactccacacgctggatcagcagttgatggagcaggcgatggcggtgccgctgctgaaaacactcattgaggaaatccgccatctgagcaatccgcaaatcgtgggctgggatatctgtttctcccgactgtgtcagtcagaagtcgatagtaacaacctagtgcaactggtcgcgctagaaagtgaaaactggcccgctgattcgtttcatgaagcgacgatgctccagttactatcaagtcaggttccaccagacgcgttcccaatcctgcgtaacgtgatgcctgcctttattgaatggcttgaacgtcatcaactcagtctgagtagcacgacgtggctgaagtggctggatgttcttgcgatggagcaaagcgtcagtcaggcggacattaagctggccgcgatggcgacggaccggttcctacaaggctccgttagccaggaagcttatcaacagtccggtgccatgctggaattgatcgtagaacgagctagttctttccgcaacctgtctgcattgtgcgagttaatcgaactcttccttgatgctccggtgcaggatctggcgacactcacctcgctttggctcagagttcagtcttttgtaggcggaatatgggcacgactggatccgactactcgtaccgtcatgcgcaacttggcgacaggagtgctaggggaaggtgcagagagcgtatttccggctgaaaaggatagcggtacggcagatgcagaagatgagttgccagacttatccggagccagagtagcgatttatagcctgacagaaggtgcggcgagacgcgcgaaacagatgctagaaacgctgttcgccgggatcagagtagagatctgccatgcgcacacggcaaccgataagctagttaatcaagcgaaacaggctgattacttcatcttttcagcaggcagcgcaactcatcaggccttctacgcggtctcagcgcagcgcagagatttaatctatccgacaggtaaaggtgcggggtcaatgctgaacgcatttattgcgcatgttcagaagtag

SEQ ID NO: 388706 - DNA, 531 bp, Salmonella enterica
atggaagaacaacgacaaattttcctgcatggcccactgggccagcgacatttgcgggaaattctgagcgcacagtttagtagcctaatcctctatccggaactgatctggctgatctcgccgtggatgagcgacttcgacgtaattgataatcgaggcggtcagtggagttttcttgatccttcttggggcgcccgaatgattagctttcaggaattactcgctaccgccatcaacaatggctgtccgctacgcatcgtgacacgtgaagacacgcgcagcgtggtctttatcgagcgactactggcgcgcttatcacccgctcacgacatgcaatatatatatcacgagaacctgcacgccaaagggatgctgaccaaacacttctttctgaaaggctccatgaattacacctggagcggcacaaatctgaacgatgagcatctgctgttttcaatcaataatacggttatttcagatgcgttgattgaatttagcggccagtacacctttggagacacccatgactga

SEQ ID NO: 388707 - DNA, 4437 bp, Salmonella enterica
atgtctacggctgatttgtcccacctgcaccaggcgctggacctgctcgaagagcgggaagcggaactgctggtctggggtgatacggatggcgcgtttacccatgccgatatcatctcactctttacccggaacctgccgtacgaagatgccgagtcgttactggcagagttgcagaatgctgccatgctcttcagcgtcccgaccagcaaaggggaggcgcgctaccgcacgcgtatggcggaatcggtccacttgttccgacaccagcgtcaatggttccgtgatcaaccgcttcagcgagcccggacgttggtcgccgactaccgtttcgtccgccgcccacgcaactatccgaagcaggaacttccggcgcaaacagtactgaacaaatgggttgatgttccgtggatgaacgaaattaaacgccaagcgctttcccgactgatcggtgacttttctattgccggttttcaggaacgctcaaccgaacgtattttgcgtgcttggcactttcatagcaatcatgctcacgcgaaagaagccaccgggactattgtctgtgcaggtacggggagtggtaaaacgctggcgttctatctcccagcactcacttcgctccttaatgatattcagcgcgacaacgcacagcgagtcaggacactggcactgtatccacgtaaggaactgcttaaagatcagttcatggaaacctggggcaaatgtcgtgagctcgacagtcaggccctgacactggcaggacgcaagattcgtattggctcttttttcggtgacaccccgttcagccatcaatacgcaacaaaagataaagacaaggatatgccctttgatttactccgttgcaccacgccaaaatgtccgggacaaatgcactggaaagcagaagatatcaaattgaaaagagagattcttcgttgtagccactgcgatcatagcgtagacagtgacgaagtgatcctgacccgcgtctcgttaatgaaaaacccgcctgacatcctgtttaccaccaccgaaatgctcaatcagcacctcgggaacaaccaagcgaatcaactatttggcattggcatcggtgtaacgccgccgccggtagtcctgctggatgaagtacacacctatgtggggaatactggtgctcagacggcctatctgctgcgacgctggatgcaacttgcacgcagtcgcccccattttgtcggactgtcggcaacgctaagtgacgccgaacgattcttcgctgacctggtaggtgcgcataaaaaacatgtagctcttatcgaaccgaagatccacgaaatggaagatgaaggggctgagtatctactggcattacgcggcgatccggtttcacaaacagcccttctctcaacgactatccagaccagcatgctcgcccggcgtattctggatacgaaaaggaaaaaatcgcgcggtacatgggggcaaaaaaccttcgttttcaccgacgatttggatgtcaataaccgactttatcatcaattatgtgacgccgaaggttggcggtcgcgcggtcaacacttattcgttgcgaaaccgccgctggccgctcagcgtctggaaacactgcaaaacagccatgcgctgactcaggcaggacagaactggcgtatcgcgcaggatattggtcacccacttgacgaaaatgaccgggccatcgtcgcccgaacgtccagtcaggacgtcggggtcgatcctagagcggaaatagtgattgcaaccgcgtctctggaggtgggctttaacgatccctccgttggcatggttattcagcataaagcgccacgtaacgttgcctcctatttgcagcgtaaagggcgtgccggtcgttcaagaaccatgcgtccgtggatggtcgcagtcctgtccgaatttggccgagaccgcgtcgtttatcaacgctatgaagaactcattaatccagagataaaagggcagtcgttgccgatgggcaacattcatatccagaaaatgcaggcagcaatggcgacacttgactggttgagcatgaagatccctggaagtaatatctggtcattgctaaataaaccgcagacaaagccagagtctctcgaccatcttgatcgtatgctccacctgattaccgccgtgagcgaacaacatgcatggcagcaggagttggagaagtatctgttctatgcgctgcgcatcaccgacgagcaacttcagcgcgtactgtggtcgcctccccgttcgatcatgatggagttgctgccgacattaaaacgacaactcaccacccaatggtcgcggatgggccaacctgaggcagaccgttcgacgggacgttccccacttccggcctttattccttcagcgctattcagcgaactcaatctgccagaactggagatccatctcgagcggaagttcaagaagcgtgaacatttgccctttattcagggtctgaaagagtttgcgccaggacgcatttctaaacgctatgccgtttattccgacaatgaagttgactggctgattccggacagctttgttccggtaatgaactgcgtttcaaatgttgattttgaaattgaacaggctttcggcaatacctggcagccagagtgtgtcatcgagtgtgaaggtcagcctcctattagggtcattcgaccgatgcaggtgcttacgcgcgcgctacaattcgagcaaaatctcaccgagaaaagcaactcgcaactgtgctggcataccctgtttaaccctgacgatcaggccgatacgctccccattcctgctggcccgtggatggacatcctccgctccatgacattttttacccaccagaatatgacacctctcgacgtcacgcgttacgccacccacgcaacagcctcgttacgcaataaaacaaagcaacaggcgcatgtgaacttcaggtgggtcgaccatggcgagcctgtcggggttggcgtacggcagtgggtggatggcgtccggctcagatttacgcttccgcccactctgctgcaacgcctccggcatgacccggccattcagcgcgcactacgaactctctatttccagcatcgaatcaaacatgaaccacgtttcgaatatgacacgttcaccgctgactggatctacgagtgctacctggctgcggttacgcgggaattggtcacgcagtcgtctctggcagatgctatcgaggaattaaaaaccccggacggccaacgtagactggctgatatcgcggactctctcttccaggcagagaatatctttgaaaatagcgaggatggtgaagacgacgccgaaagccaggaactgcagcaacatttgcgcagcctgtttaaagagaccgacattcttaacatggtggacaagcacagcgcgatcctgactcaggatctcagtgatgatctcgatttccagaactggttacagtgtctgctgacaacgacctttgccggagcggtcaaacaaaccagccacctgttactgccggatgtcgatgagcgcggtctgctagtggataccgaactcaacgacgaggtactggacgtctggctgaccgagtcagaacccggaggttgtggcatcattacccgtctggaagacgtttttcataaggatcctgtctccgtacttaatctgtttatgcgtagttttgccgccagcgactacgagcagatcgactacgacctgttcgagatgctttcgcgacttccctcttccaacgaactccaagaggccttgaactcgatacgtaaggccagcaaccattcgcagcgccgtgaggctaacgcccacctcagaactctgctgaaggcgcaaggatttgcactcagtcacagttttatgtcagtgctgcacacgcggatcctacgcccgggcagccaggcgtcacatgatgcgcagatgctgacatatctcatcgcatggcgggacctggaaaacaaagccggatacgaaattgctctgaatatttttgctcatacccaggcgacgcaagaactgcctggcgccagtgtggctaaagtttttgagcgtttttgcaaaattcagggaatgctctggcaacgaggtaatgccatccgtcagtcggttctcagctattacaacccctttaagtccggtaacaacctgactgaacgactgctgctaagctcactgtttcaacaaacggcgtgtatcatcagcatcagtgagagcgactggttagaacagttacatcacgccattacccaacacggctttgcagaattgcatgtcccgcgagaggctcgccatcgtattgtcgaagtgatctctctgatacaggtgaccccgattgagtactttggtttgcatctctatccccgcgagtccgccgtggactatcaggatggcaatctggtgttacgtattgaactggccgaagcgctgctgtaa

SEQ ID NO: 388708 - DNA, 849 bp, Salmonella enterica
atgaccaccttgcgccaacaactggctgaaatgcaaaaagaactcgatcttagcgttcaggctggtaaggcatcacaaatcatcgataaatgtaatctggtatacagcaaaactaacaccattgccgataagtttgcattgcttaaacagcaatatcccgcccagcagcaactcccgcagggcattgcagttacctggaatgacgagcatcagagcgagttgatcgccgccgcgaacagcgtcaaaagtctcaagttacagtggggacgctggctgaaaaaccagtcggtaaacaatcccggcgaggaagaaaaccttgcagatcagaaagagtcgccacagaactctctagatgagacgccagtcgcgtcagaggaacctaccgcttatgacattatccaaaatgattccttgacccattgtgtcagccaactcggtaccctacacaaggccctgagcaaagaactaaaagatgcctgggatgtatggctggaagagttacatcagcaggttcatgtcgatgacaagacactgaatttccaaaaaaatgcgaacaaatttgacgacatcgcctccgactatgagcgtcgacgtcaggatttcgaaaacttaacgcagtgccaaccagtaagcggtgaaaagattgaccaaatcaaagcgctagccgaaaaactaaattccttgcgcggcatgatgaaaacagactggcctgacgtggtacaagtatttttcaatagcattaatggcccgcagagtctccgcccgacgttaagtgccctgacgcccgaggtgcttgagtggttaagggatgaagagatgctggatgagttcgtgatcacaaggaaatag

SEQ ID NO: 388709 - DNA, 3198 bp, Salmonella enterica
atgagcatgatggaatactggccgtccagggaaaacatcgttcaatgcattcgcaatgaagcggaagaattagaggatcatgtgcttctggccgtgcatgagccgatgctactgacccgacgcgacgtcaatgaaaatcatgaaatattgcgtgacgaagatctgttccagcagttactcattacagagcgggccatccctttaattggccgttcgggaatgggaaaatcgcatctggtgcgatggttagactgcaggttcaacatgtacctgacggaaaacggtcagcgtgcacaatgggaaattgttcgtattcccaaaaactccagtctgcgacaggtacttttacgcatcctgaaaaatctgacgggagaatttttcgacaacgcacgcacgcgtgttaatgaagtgacggaacaatatcctgcgaaagatctggcagacctgctgttgaccatgatggcccatcagttgcaggacatgcaaaaagcagtgatggaggaaggtaaaacactgcaggcacaaggtaaagacattccatcagaccgactcgcctatatggaaaccatcattgaagaggtagagaacggtatctgcgatctgatcacagaccctaacttcaaacagaatctactgaagcctgagcactgcattttcaaactggccagtcggatgagtaatggtctggaggaaggagaagaaaatcatgataaatatgaacttctaccggaagacctctattttgtttttgagcctgacgatttatccgcgcgtgcacgtcgctacctgaatcattctcaattgcacgagtcagaccaggtagaagcgcgtgctcgtgcggcgcgcgtgctcaatgaagccatgcatgcctcgctgaagtcactcttcaaacgcctgttcaccttcaatgggggttcttttcaggaacttttccaggaaatccgcaaggagtttctgcgactgaatcgtcgcttggtgattctggtggaagatatggcggcgatctccgccatcgaagatgtcctgatcgacagcctgatcgaagaagcggcgcctggcggcgtgcaaaccctttgtccgatccactcagtgattgcagtcaccgacaattatcccggctataaacgtcgccaggaaacgttaatcacgcgtgctggctacgagtggatcatcgagaacgtcgataaagacaataataaagatcgtatagtctcgctctgcggtcgctatctgaacgccgcacgctttggctctgaggagttaaaaaaccgtccagagcaaggtaaaccccagtggccacctgtatggcacagtgatgatatacccaatgcactggaagattttggttattctgccaataagaaattcccgctcttcccgtataaccgcagtgccattatggcacttgcgaataagcattgccgcgacagcagcggcgagttgatttttaatccgcgcacaatcattaaccgcatcctgttagatattctgcgtgattgcagaacagaagcggaaaaaacgcagttcccgccaactcatctcgctggaattaatgccgttcccgagatcgaagacaagatttcacagatggttgtcaatcgggttggcagttcggtgacgcttgccgccatctggggatatggcattgattcctttgatgagctatgcggaaaactgccgggcagcgtagcgagtgcctttggcctcgatgaacttgccgcgcaactaactggcaaagcccctacgaccgaaccggtaacaaagaccgcacgcgaaatagcgggcaaaactggcagcacggcggcgggtaaaaagcttgacgatccggagttaaaaccaaaagaagaggcaaaatctaataccaaatccgaattgccgtttattagggcggtccgagcatgggtgaatgacaacgtcattctgccgcaggatgttgcccgtgatttgcgtgcggcactgaacgcttgttatgaaattcatgcgcaaccagagttgttcggtatgtcttcgcggccaccgctgaaagaggggcgttttacattgatttcactgccaaaagcggcgtcggatccttcaagcattataacgaatttttactctgagcaagacctgaccgacccttcccgacgggttgatgtgtataacgccgcggtaaccttgttacgtatccagcattacgccggtttaaagcaaggctttaattatcccgaggcgcaggaagactacactcgctatcaaaacttcatccagtggtgggtacctcaggctacggaaagcgctattaatcacttccgagcgcgtaacttacgggatgcgttgaaaaagcatctgcaaaaagctctgctgcttggtctggtgaccgggaaagaagaaccggcggagatcgtcaataccctctgcctcacccagaaaggagtcggaagaaccgaagagaaaaatatcggtcgaacgctggcgacctcaccttccgagatctgtttcagagggattgaggcgaccctgcatccgcacgccagcgccagagtagccgaagccagggcgcaggcgctcctaggatgggatgatgccagaaaagcgtggcttgaacaggtagctatcactgagcaaggctcaggcttgggctccagccgtgcgattgatgccgatgtaatattttccgcacttaaaacagttttaaagcagccacttggcgcagaaattgaacgtgcggcactctccgttaaacaggaacttgccagcacactaaataatgttcagctctttgccaacattaaagatagcgacgatttcctcagccaactgaacgactggcagacgtttattgagactgtgcgggccgaacactaccccaccggtggttctcagtacaagccatcttcgtggctgttgggtgaaattgaagccctcagaaccgatgccgaggagagtctggcgactttaatttcattactttccattgaaaaagagaaagatagcgcgagattgtggctggagatctgtcaacttgacggtgactacgtttcaagaatcagcagcgtacttgctcaatggcaactggtacaacctaagattgcgttcgcactccaacagatgaacgccaaaggggatatacagcaactgactcttgctctgagtagagtgaatgaccgtttgaaaacacttgcgagcgatatcatcgcctctggagtcgatcaatga

SEQ ID NO: 388710 - DNA, 876 bp, Salmonella enterica
atgtcaataattaataacgcaggtgctgggagcgtcctagtactccttcctctaattgaacgcattctacaaagcgcacaggaaccgttgtctcaggacactctactcgcccgttatcgccctgataacttgccagctaacgataacgcgtgggggaaattcacagagaacttgagtttctggtgcaaccagggactatggccgatgcgcgacggaatgatgttaccgcttgaagaaaacgcacgtccactggcgcatcgcctgcttgcctgtgcgattgattcttgtcgcgaaaaaggcgttgccaatgggaatgaatgcgaaccgttatggcgggtgctgagttgtctgttgagccttcagcagcattcgccaggaggtcaagaaccgctctccccgccaatcatcacaaagaaaatacacaaatggctaccaggtgaaaaggtaaacgaaaacaccgcgaagttagtaagagactttggccgttttctaggttttctcgagctaatgccggacggaaattatgtcaccgaccctacccgggccattcaatgttttctgccaataatctttggcaacacacgcactcttcccgccaaaatcttcatggcaaacatggcggaggtcatgccgatgatggacggcgggcagtttagaaactccgttcatgatgtgatgcagcaggaaaaagactggatctctccggaaggtgacaatatctgcaccagcacatccattgcgctacaacgacttgaaatcagtaagcgcattattctcaccaccggcagtgatgatgaagacgcctcctcactccagttacccgacggcaaaattcgacgggttagccaaatcacgctgagggaggatgcacaatga

SEQ ID NO: 388711 - DNA, 2481 bp, Salmonella enterica
atggaagaagaatggtcacgcctacagcaggcgctaaccacctgttttagccaaggggtcacatttaaggatggcatcgaaaatcagtttctgaacagactgattcagatcatcactgatgcttcggcagggcatggtgatatttttgccggctacgccgatgcattacgtgcggctcatgtgagcggtattagtgagccgtggctccccttgccgccggaactgaccgacgttccggcacctgagtggggcatgacaaagtcgcctgcaacgcaacaaattcaactggttgaagaagcagacctggcgctgaccagagccacttatctgcgtaaaatccgaaggaacttgctgcgcccggagaccgatcccgcgctgaagcgcctattacccgaggagccctggctgactcattatcagggatttggtcaacaggccgctattcggacgctactgacgtctgatgataactgtacgttgctggtgaacctccccaccagttgcggtaaaagccttctcacccaactccaggtgctcagcgcaccgacaaacaccctcacgctagtgatcgtccctaccgtcgctctcgctattgagcaggctgacgacatgcaaaaactgcttcgtggtgccgaccaagatcatggtgggagttatgcctgggtcggaggacaagatcagcccgcacgtcaggcgattaaggaaagaatcaaagcgggaacacagcgtgtgctcttctgttccccggaggccgttcgctcttctctggttcctgtgctgtttgagctttccagactgaatatgattggcgcgatcgtcatcgacgaagcgcatttgatcgatcaatggggcgcggaattccgccctgactttcagctgattgcccctatgattcgctcactgaaagcccagggaaaatgccgttttcgtacactgctactttcggcgacgtacagcaaaagtactcggaacattctgatcgatcagttccatgatgaaaatagcgaactgattgaagtgtcagctaatttcctacgcccagagccggaatattttgtgcatcatgaggcaaatgaaaacacgcatcgtcagcgggtcgaacaactactgatgaccgtaccccgcccgctgattttgtattgcaccacacgcacagatgcggaaatgtggtctgtccggctgcacgaactaggttactggcgaaccggcatattccacggacaaattgacacaaacaatcgcaagatattgatttctaaatggaaaaatgaccaactcgatatcatggtcgccacctcagcctttggggtaggaatgaataaaaaggatattcgcagcatcatacatgctgccattccggaaagtatcgaccgttattaccaggactgcgggcgcgccgggcgtgacggtagatcctgccaagtgcaccttgtatggcataaggcgcaaatgaaaacggcaaaatcactggccgttgagacgctgattggcgtagaaaaaggctttgcccgctggaaagcgatgtttgatgatcgcaaagaaagtccgatcgctgactacatgatttcactaaacatcaagcccgttcatattgatcaccagggcgataaaaatgaagcttggaaccgtcggacattgctgttaatgcaaagggccaaactcatcaaactggtctttgatgatccgaaaattcctgacacccttcgagataatctggatgacgacagcacgcaactaagtgaatggttcgaaagctactacaaccacattcatatccgtcactgtgacgatgcgcattattcagaagcgcattggaacacccatgtggagaagatccgccaagcagagttaaatgaccgtcgggaagcctttatggtaatggaaacgtggttggaggatcccagcaaatcactgtgtaaaattttccagaaattctatgaataccaacagcatcctcccgagttaacctgcggaggttgtcccggatgtcgtcagaaagggaaaggggcgttttcgccaaccgtgggcacagatgtacaaattttacgttccgaaccgaagaaaaaagcgctcttcgtaggtgaggaaaagaaagtttattacaatgaaaacatgaaattacattcgttattgacggaacttcgtgtgacattgaggttgctgatcacctctggcgaatatgtgtttattcgtgcagacaggcaagtgttcctccagttagagaacaacctggactcgctttcgcacttctggagcgcacagaaaatgacagcgcctgcatcggatggaccagagatcgtgatcatccctaacaccgccgatgcgttcccgaatctacccgtgacgcgttttgagcgaattattattgcacctgagcatctcgccgatcctcagttcccacatcgtacatggtgcgaaagcgcaggtaatgcgctgtcgctggacacttttatcaggcaactacaacatgtcaataattaa

SEQ ID NO: 388712 - DNA, 3108 bp, Salmonella enterica
atgaacgtattacccattgggtcactggttgtctctgagcaatttgaaggcataggtaaagttgtcactgtcgatagtgatacaaataacgccacggttgctttttttgagtcaccggcgcagcctttcgcacggcaaacagatgtttctttagaacaactcatccccacgataccgcacgaagagacggtaatttattgcattgaaccacaaagcaaacgatgggccagagccagatttggcggtccgcgccccaaaggggattttctcgtaatctttcgcgaagatgatagtacgactttgccaatcgacgaaatttttgttctgaacaaagcaccagataccccagtaaaccctgctgatttccttgccctacaagctaatgatgctccgttctttttccctcaccgccaagcctttattgaaacttacatccagcaacgtgctgcctgccgagcgatggcatccatttccagtagtgccgttgaacttgagccccaccagttggcggtggtacgtcgtgtgcttcaggataaaaatcctaagtatattctagccgatgaggttgggctggggaaaaccatcgaagccggcatgatcgtccgtgaacacgcgttagaaactactggccacgtcagcatgcttattgcggttccagcaccgcttgttaaccagtggcgggaagaactgggtgaacgctttcaactgaaacaacttattattgatgcctcgtcaggcctcgcgggtttgcgacaaaatgaagtcgcagaaggcatcttgatttgcagccattctgatgcctgtaccttgattgaacagggattctcaccttcgcttatcgtggtcgatgaggttcaccagattgctccctggccgtggtcaggagacaaagatgaaagttataacttcagcctgatcgctcagggttgctggaaagcccactacgttctgttactcaccgggacacctctgcatgggcacgaaaggaacttcctgtcaatgttacactgtattaatcccgaagcctaccaagtggatgaaccccatctgcgagactttaccgaactggtaaaaaatcgtgaaaacctcggcgggatcttctcggggttagtgcctaccgtctcgaacgtcagcttacgccgtaatctggaaacactgcagcagcagttcccggaagatacgattctgatgacgctctgccaacaactcatcccacttattgggacgttttcaccaaataccccggagcgtgaagaagggatccgagatattcgccggcacctaggggaaaactatcgcattcatcatcgtatgttacgtaaccgccgtcaggtttcactcagcttcgatgaaacgaaaaacctcaacctgaaccttctgtttccagggctcaatggagccgtggagtgccgctggcattgcgatgggttagcgttagacgagttgattgatgagtatcgttccttatctttactgccacagaatacgcagtgggcaatgaatgaagactcgtacctcttatggatcgacgatctcctgtcaagtccactctgcgtcatgcaacgcgctaaagtgcatttgggtgaattggaacgcacccaggaagaacgagacctattagaacacattgtttctactgcaaaaaatgaacttcagatcattgataacaagctagccatcaccctgaatgagtggctgcaaaagaatcccacaggaaaagccatcgtcttctgcgatcgtccggatctagcccgacacctagcaataaaactcgagttgctgctggagtatccgcaggaacgttatcagtcgggtcaccccctggtgtacctgaaacccggaagccccattcgggtcctgatttgtgataaaagcggcgaagatggtctgaatctccatggaggtctgcgactggccgttcactacggtttaccgcgctcttgtagtcgcattgaacagcgccttggtcgtctgaacaggtacagtgcaaacctgaaaggtgtaaaacccgttcagagtctgatcctgaaaaaccacgccgatcttggattacgcaatatatgggccagcattctgaaagacagcattggcgtatttaataacactatagccagcctccaattcgtcctcgataattatctggaaaaggcgtggcgaaatgtctaccaagaagggccggtggcccttgaacgtattgccagcgaattccctggcgaacagggcattctggccaatgaaacgaacaaaattaacatgcaggaaaagttgcttgcgatggatgacgagattgccgaggcggcgatttttgcgcaacagatcagcgctgacgatcatcttgcggtagcgcaatgtaatgcgctgaccaactggatcacacgtgcgttgcgttttcgcgctaccggcaccgcagaaaaaggtatcaagtttcagttcgaactatctgatcgcagtacagggacactggttgattttaaaacctttctcaccacctgcatgctcagtttcgataaagaaggaggcaacccaccgtcaacgcatctgatgagcgctgaacgcattccatctatcgacgggacaaccgtttatccattgcggtacgggcagccatttgtagatacgatctggcaactgttaaacttagatgctcgaggcagttctatggcgatactgcgtgtgatccccgggcaactgaaggaacccagttacttcttccagtctacctggctcgtcacccatcaccagacgcaggatacctactcacaacgccgcacagcagacgaactgtcccccccacgtattatgcaacattggctttcctctgaaggtaaaccagtgactaatccgcaggtactggaacttctcaatggtgaatatgccaaccacgaaacatcgcagaaattctatgcagatatgaatctgcgccctaaactctggcaagaaattgaagagcttatctcaccgaactcttggaaagagatggtggaacgaatctatgccagtgaccgggaacaacagcaaaccgccctcggtgagcaggcacacctccagttaatggccgtcaaaggcgtggtggtgtgcagcaaaaatctactggaggaaatcgcctga

SEQ ID NO: 388713 - DNA, 195 bp, Salmonella enterica
atgcttcatacgacgaatcccgtcagcaagctaagcaaaagccagcaatatcggtctatttacaaattcacacagaaaattctcttttgtttaccggtcattttgccgatcttgatcctcatggctggggttctctttacgaaaaatttactggtcagacatttgaagcagagggttatgaagttgaatacttag

SEQ ID NO: 388714 - DNA, 1530 bp, Salmonella enterica
atgagtagggggaaattgccggaggggtggactaccgctccagtgtcgacagtcacaaccctaatccgaggggtcacatataaaaaagaacaggcactcaattatctacaagatgattatttgcctcttatacgtgcaaacaatattcaaaatggcaagtttgatactacagacttagtttttgtgcctaaaaatcttgttaaagaaagtcaaaaaatatctcctgaagatattgttattgcgatgtcttcagggagtaaatctgtagtcggaaaatccgcacatcagcgcctaccatttgaatgtagtttcggcgcattttgcggggcattgcgtcccgagaaacacatatccccgagttttattgctcatttcacaaaatcttccttttatcggaacaaaatttcatcactttctgctggtgcaaatattaataatattaagccagcaagctttgatttaataaatataccaatcccgtcacttgctgagcaaaaagtcatcgccgaaaaactcgatacgctactggcgcaggtagacagcaccaaagcacgtcttgagcaaatcccacaaatcctgaaacgttttcgtcaggcggtgcttgaagaagctgtcagtggtagattaacggaaaactggagagatgcgagcattagtgaaaaatcagcggaagaacttctcgttaccataagtaaaacaagaaaaaaaaatcttaccagtggcgcagactctctagctacagagtctaagcgatatcttgcaaagattgacgcccatcattttaatattcctgatgttattcttccagttggatggaaatggactactttcttacaatcgatggaaaaagtggttgactgtcataacaaaacagcaccatatacagagaaaggtatttatcttatcaggacacctgatattcgtaacggtattatttcattaaaaaatactaaatatgtcaatgaagacacctataatttttggtcaaaacgatgccccccaagaagtggtgatataattttcacacgagaagctcctatgggagaggctggaattgtacctgagaatacacgtctctgcatgggacaaagaatgatgctacttcgccccatgcagagctatctcagcaataaatatgttttgctgaatattctatcaattagttttcaggcgagaatgttgtctcaggcaataggtactggagttaagcaccttcgggtagctgatgtcgaatcattaatgtatcctttaccaccactcccagaacaacacgaaatcgtccgccgcgtcgagcaactcttcgcctacgccgacaccattgaaaaacaggtcaacagcgccctgacccgcgtcaacaatctcacccagtctatcctggcaaaagccttccgcggcgagctgaccgcccagtggcgtgctgaaaaccctgatctcatcagcggtgaaaacagcgccgccgccctgctggaaaaaatcaaggccgaacgcgctgccagcggcggtaaaaaaaactcgcgtaaaaaagcctga

SEQ ID NO: 388715 - DNA, 240 bp, Salmonella enterica
atgaatacagtctccagtaatggtgagtacttagagcctatcccattaggctattttattcgccattttgggaccgggcagtgctcaaaatcctcaggtttctgcgcgctggccggccccaaactggcttcaacaattacgcctggtgggataggctcttatcctgaaatgatgctctgcgaagaatttataagccatataaaccaatttgagggtgggaaggccagaccttcccattaa

SEQ ID NO: 388716 - DNA, 162 bp, Salmonella enterica
atgtgcgtcaatggcaatacggtgacggaagaagactgtattttgagtgacagaaagcaacgtatctacgatgtgcatgtcggacctgacggctacttatatgtgttaaccgatgagtccgacgggcagttactcaaggtaagtcctgcagccacgcgttag

SEQ ID NO: 388717 - DNA, 153 bp, Salmonella enterica; identical to SEQ ID NO: 38610

SEQ ID NO: 388718 - DNA, 228 bp, Salmonella enterica
atgccgtctccacgcatccgtaaaatgtccctgtcacgcgcactggataagtacctgaaaacagtttctgttcacaagaaagggcatcaacaggagttttaccggagcaatgttatcaagcgatatcccattgcccttcggaatatggacgaaataacaaccgttgatattgctacatacagagacgttcgtttagcagaaatcaacccccgaacgggtatcgtttag

SEQ ID NO: 388719 - DNA, 954 bp, Salmonella enterica
atgttaacccagctcaaaaaagtcggtacagaagttcatagagctactaatttgtttgcaacgtatgttggaaaaaacaaagtaaagtgtcccggggatgtgaaaaaatttattttcctatgtggagccaataaaaataatggagagccttcagcaagacgtatagaactaatagatttttctgagaaacatcttagtaattgtcatttctttcttgctgaactggtgttcaaagagcttagtaaagatgaagaggattcatcctctgataatttattagatatagaagccgatctatcaaaacttgccgatcacattataattgttttagaaagcttttcatcttttaccgaacttggggcatttgcatacagtaaacaattacgtaagaaacttattattattaataatacaaaatttattaacgagaaatcttttataaatatgggtccgataaaagcaattacacaacagtcccaacaatcaggctattttttgcattataagatggctgaaggaaatgaaagcattgagcggtcagatggaataggccagatatttaatcccttatatgacatattgtcaagaaatgatcgagcaattgcaaggaccctaaaaaaagaagatttagatccctcaaataactttaataaagattcagttaggtttatacatgatataattttagcttgcggcccattaaaactaaatgagctcattgaaatagcgataaaaatattcggaaaggatagtttttatagaaaggaattgctgaagcatcttggtattttgatggctataaaaattatttcttgtaaggatgatttttattactcactttacaagcagtattattttaaatatgattttgatatggacagcatatcatcaatgttcaaggtatttttccttaaaaacaatttagataggattaaaaacaatggaaatatataa

SEQ ID NO: 388720 - DNA, 951 bp, Salmonella enterica
atggaaatatataacttaattgacgctgagacattgatgagaaaaggattcaccagcgaggtgatgcgatcccctgaattgcctaaaaaatggtatattcctaaaagaaatggtggtatcaggacgatttatcacccttcatctaaagtaaaactaatacaatattggcttataaataatgtattctcaaatctacctattcataatgcatcctatgcatttgttaaaaaacgctccatcaaaagtaatgctcttatgcacgcaacggctaaaaataaatattatgtcaaagtcgacctgaaagactttttcccctcaataaaatacagtaattttgagcatgcttttaatacttatcgagatctcattgaatttcccagaatatatgatcaagaacttttgcaactgataaaaactatatgcttcatttcagattctagtcttccaattggatttcctacatcacctattattgcgaattttgtcgcaagagagtttgacgaaaaactaactttgaatctcaattccatagacagtcttaatgctatatatacaagatacgcagatgatattatcatatctacaaatcggagggggaaaagtgctcaaatattaaatgctataaaaagctcaataagaaaagtcgagcctaattttaaaataaacaatgataaaatccacatttgcagtgcttcaggtggaagtataattgccactggattaaaaatctgccatgattttcatgttaccttacataggtcaatgaaggataagatacggttatatttatctctgttatctaaaggtagattaaaaaaagaagattataataaactttcaggttacattgcttacgcaaagagtattgaccctcatttttatacaaaattgaacagaaaatattttcaagagatgagaggtcttgaaaactcgcataataaagtaatctaa

SEQ ID NO: 388721 - DNA, 528 bp, Salmonella enterica
atgaaagcaaacactgcaaaaccaaaatccatgccccctaaggagcttattttggagcgtttgagctatgaccctgacactggcatattccgtcggaagatgaaaaacaaccgtaatcaaatcattggagagcaggcaggctctctttctagcgagggttacctaattatacaaatcgacaaagttaggtattacgcacatcgattaacatatttccttattactggaaagcagccaatgtctgtagatcacgtcaatggaataagaacagataatagagcggaaaacctgcgatctgcatcgcgctgtgaaaatgtctataacacgaagaaaaatattcgtaatcgaagtgggcataaaaacatccactggaataacagaagcaataagtgggacgtacatatgaatgcaaacagaaagtctcactggggaggttgctattcttccttggaagaagccgtgaaggcgtgtaaagccctgcgcctaaaactgcatggcgaatttgctaaccatggagagtctgaatga

SEQ ID NO: 388722 - DNA, 141 bp, Salmonella enterica
atgaaaccagaactgatcgagatactccgcatgcgctggcagcgcctccgcatttaccgccgtccggggtcggtgttggttgactacagaattattcgtaacacagtccgattacttaagaaaacaggagcatcagcatga

SEQ ID NO: 388723 - DNA, 324 bp, Salmonella enterica
atggagaacgcaatagcacgcaactccgaaccaccgaagctaaagccggttgagatggagagcttaattctcaatcagcttgcatcggttgggcagaagccggtagctgacgctatcggaattgatgagtcaaccatcagccgctggaaaggtaaaggcggtcatgttgaacagttttgtcggtttctggcggagctgggtattcagcttgctccaccgggagcggtacttgttcgccgtgattatcttttttcggtggaaacattagcggacattgggatgaaagcagtgcgtatgcagcctgagccgctggggtgggattga

SEQ ID NO: 388724 - DNA, 171 bp, Salmonella enterica
atgcataaccaaaagacatgcgcttaccacctgtgtggaaagacgattgagcaaggcaaagaagtaaaaagtccccttctctatcgcaaaggctcgcaactggcgcgcaaagaaaaggaatattgttccaggcagtgcgctgaatacgaccagatggcgcacgaaagttaa

SEQ ID NO: 388725 - DNA, 288 bp, Salmonella enterica
atggaaatcgtaaaaatcgagatgaatctgaaagcagttaataagagcattgctttattcaattgcgaaaagagagtctcaggcgttattcactcaaattcaactggcgaaactactgtgattctcgacggtggatatgtactcggaaagttcgactgtcctcattgtgctgtagaagccatttcgctgctcacagtcaaggtaagtgatggagaacaagcagggtttggtaattaccgaagttacaagcttgattactcagaaaaattttatcagaccatccattaa

SEQ ID NO: 388726 - DNA, 249 bp, Salmonella enterica; identical to SEQ ID NO: 376948

SEQ ID NO: 388727 - DNA, 549 bp, Salmonella enterica
atgaccactattagcaataacaaactaacagacgaaacgctaaaagcctggaaaactgaggcgatgatttcgctgggggaaacaccgaaagattgccgtgattactctcaccacgaagcaatactcgcgttagtaacagagctacaggaactccgagctgccatgctccaaagtagccaacctgtaagtaatcatgatgagttgccatacgcgcaggttaaggcagtcgctgacctgtacgccctgtgctggcagtcgggagaagtagttacttatacgcctgacccagaaaaggcgaccatctggctaaataactactcgggaacttgcgttcaggaatacgtgaagcttgaacgactgcaagaagcgctggctggcaacgcttcgataattccggatggttacgcacttgtacccgtcgaacctacggacgaaatgatagcggctgctatgaactgcgaagatgtgctgttcaatagcgatgagtcattctgcgtacagttcggtaatatctacgaggccatgctcgcagcagcaccgcaaaaataa

SEQ ID NO: 388728 - DNA, 474 bp, Salmonella enterica
atgatgaagcccggaaccatggaacggtcgctaaaaataactagacagagaacaacgccaataaaagccatagcagatgtggcaatcaacaacaggcgaactggcaaccgtagccacaacatgatgagaaagcttagggagcgcaaaacgcttcctaagccttttgccgccgccccagcgatccacttagctttcgtaacgccactatcatcatcattagaagcggcccctccacccggacgaatcggaacaacgttgctcgtcggactccgggtttggttgcttaaccctttgaatgctctcatcacaatcccctttttgtataaatcccatacgctaatgataggccaaaatggcctacccatcaagaaatattcgactatttttcgtgcatacgaaggaaaatcaactcttccattatcatcaatatggtgtatattgattatcgaaaggtgtaattttgataataaatga

SEQ ID NO: 388729 - DNA, 261 bp, Salmonella enterica
atgataaattaccgactcaaacccattaggacgcaagcaaagctttctcaggagaggctgggcgttctggcgggcctagacgaaaccacggccagatcgcgtatatctcagtacgaaaccggcacttacagacctacctttgaaatggtgtgctcaatttctgccatcctcgatgtaccagagtgctacttctatattgttgatgatgattttgccgaagaggttttgcagctttacagaagtaaaaaacgccagaaataa

SEQ ID NO: 388730 - DNA, 321 bp, Salmonella enterica
gtgtttgaattgatttttcacccggaagcacaacaggaaattttggatcttgatagtccaatgcaagggaaagcgtttgctgcactggataaacttgaggcccaaggtaatcagttgcgttatccacatacggatattattcaagatggcctttttgagttaagagcgggtaaaaaagatattacacgtaccttttttgctttcgctaaagggaaaaagatatatatcttgcgcacgtttgttaaaaagtcacctaggacgccaccggcagagattcaattagcattaaagagactggaggaactgacagatgaaagttaa

SEQ ID NO: 388731 - DNA, 285 bp, Salmonella enterica
atgaaagttaaaggtatcccttatactgaagtgaaggctaaagccttacagaaccctgatgtaatggccgcttatcttgcagagaagaaagaggaggaattacaggaacttttggctgatctgcgccgcagagctggtatcaatagtacccaagttgctgaacgtatggggattactcagccagccgtaagtaaattagaaaaaaacgccagtaaagccagtgtttcaacccttgagcgttatgcggcggcatgtggtgccagcatcaaaattgtaatgggctaa

SEQ ID NO: 388732 - DNA, 552 bp, Salmonella enterica
atggtaagtacacatcagtataatcgtaatatttatgtcgctatgcgtgtaggtgcgattgtgcttgctggctgttttgtgtttattgcaggtgtagcagctttctacagcgcaaaaggcgtattttataatccaatttttcattggccagcttggatatttaataaagttataggtaaaacaattatcccatcatcgacggttgaatttacacgcttaaataatattcctgatttttttagccttggcgatatgattattggcggcacatatcttatagctgctactggttttactttttacctagcgtgtatgttaggcggttacattgtgaggtttgttagcgattattgtcttacttataagcttggcgttgaaggagcgcgggcttataaaaaagaacagatggttaaaatgagacttgatagagagaaaaagaaagctgtatcagagttggaatcagcccagcacgagcattggttgcaatggaagaaattctacaaaagcgatttaagttatgatgagtggaaacagaagattttaaataagtaa

SEQ ID NO: 388733 - DNA, 198 bp, Salmonella enterica
atgaggacacagcgcctgagaccacgggtgcgggcagaaaaggaatttcgtgatgccgcccgcaaaaatcggcgtgtttttatgtgcgccagcacgcattactcacatttatgtaacacagatcacataaagccggggtggggcgtaggggctgtctcttatacacatctgacgctgccgacgagcgatctagtgtag

SEQ ID NO: 388734 - DNA, 543 bp, Salmonella enterica
atggtgcagctgcgcacggtgagtaagcgggaaaaaatcctctttccggtggtgctgttactactggtggcgctgctgctgccggacgccgcgccgctgctggggatgttctgctttggcaatctgatgcgcgaaagcggcgtggtggagcgtctgagcgacacggtacagaacgggctgattaatatcgtgaccattttcctcgggctgtcggtgggcgcgaagctggtggcggacaagttcctgcagccgcagacgctgggcattctgctgctgggggtggttgcctttggtatcgggacggcggccggggtactgatggcgaagctgctgaacctgtgcagtaagaacaaaatcaacccgcttatcggttcggcgggggtgtcggcggtgccgatggcggcccgcgtatcgaacaaggtgggcctggaatcagacgcgcagaacttcctgctgatgcacgcgatggggccgaacgtggccggggtgattggctcggccattgcggcgggcgtgatgctcaagtacgtgctggcgatgtaa

SEQ ID NO: 388735 - DNA, 216 bp, Salmonella enterica
atgaggtggtgtacaaaccataatactcggcttgcgtttagaaaggaaaaacaagaaaaaatggtggtcattctggtggtcttgacaaccccaatttttaggtttagttttccaatcagccagttaatggcaaaggcgatcccagtcagaggagccaaatttagggaagcagacgttcactggcgtctgctttctgcatttatatcaactgattaa

SEQ ID NO: 388736 - DNA, 372 bp, Salmonella enterica; identical to SEQ ID NO: 376483

SEQ ID NO: 388737 - DNA, 327 bp, Salmonella enterica
atggaaacgccggagcaaatcaagaccaaagccatgaaaagttcccacccagagtgccgctgccgcatgtggttgtttccgggcgatacgctcagacatctctgctgctgctttattagagaacgtcaacagaagtatgcgtcgtggatcaattccatcattaaacagactttccactctcgctacgagggttcgcgttttgcctgtacccggccccgcctggagcaagaaagctttccctctgtgcctaaccgcttcaatttgtttgtcattaagcgacatatctggttcgggctggcgtggtttatgctcaaccattggaagtag

SEQ ID NO: 388738 - DNA, 288 bp, Salmonella enterica
atgctgcaattgctggcgcaattcctcatttgtttcaagcaattgtaccggacgcataaccaaatcaccaaaatcaagacatcccctctgtttctttatcttctcgtaggtgtcataaacaacagcaacttccagcgctcgctcggcagtttcacgctcttcagcactactggcactattgagcatttcctgggcaagggcgcggtattgcaatgcgtctgtaacttcatcttttgctcgagagatagcgttcagaatatcaacaatattttgagaagggtcgtataa

SEQ ID NO: 388739 - DNA, 1257 bp, Salmonella enterica
atgggtattacgtcccgcttaaaagtcatgtcgttcttgcaatattttatctgggggagctggctggttaccctgggctcttacatgatcaacactctggattttaccggcgcgaatgtcggtatggtctacagctcaaaaggactggcagcgattatcatgccgggcattatggggatcattgctgataaatggctgcgcgctgagcgagcctatatgctttgccatctggtttgcgcgggggcgttattgtacgccaccaccgttaccgatccccagacgatgttctgggtgatgttggttaatgcgatggcgtatatgccaacgattgcattatccaatagcgtttcgtactcctgtctggcgaaagcaggtcaggatccggtaacgtcatttccgcctgtgcgcgttttcggcacaataggttttattgttgcgatgtggacggtgagcctgatggggctggaactgagcagtgcgcaattatacatcgcttctggcgcatcgttattgctggccctgtatgcgctgacgttaccgaaaattccggtagccgagaagaaggcgaacaccacgcttgccagtaagctcggactggatgcttttgttctgtttaaaaatccacgcatggcaatcttctttttgtttgcgatgatgttgggggcggtgctgcaaattaccaatgtcttcggtaatccgttcctgcatgattttgcccgtaatcctgagtttgccgacagctttgtggtgaagtatccctctatcttgctttcagtttcgcagatggcggaagtgggctttatcctcaccattccgttcttccttaaacgctttggtattaaaacggtaatgctgatgagtatgctggcgtggacgctgcgtttcggcttctttgcctttggcgatccatccccgtttggctttgtgctattgctgctgtcgatgattgtttatggctgcgcatttgatttcttcaacatctcagggtcagtatttgtagagcaggaggtggactcaagtattcgcgccagcgcgcaggggctgtttatgaccatggttaacggcgtgggggcgtggattgggtctcttttaagcggtatggccgtggattatttttctattgatggcgtaaaagattggcaaaccatctggctggtctttgccgcctacgctctggcattggccgttatttttgcattgttctttaaatatcagcaccatccagaaaaactgtcgaccaaatcattatcacattaa

SEQ ID NO: 388740 - DNA, 750 bp, Salmonella enterica
atgaaggttcatcgtatagtatttcttactgtccttacgttctttcttacggcatgtgatgtggatctttatcgctcattgccagaagatgaagcgaatcaaatgctggcattacttatgcagcatcatattgatgcggaaaaaaaacaggaagaggatggtgtaaccttacgtgtcgagcagtcgcagtttattaatgcggttgagctacttagacttaacggttatccgcataggcagtttacaacggcggataagatgtttccggctaatcagttagtggtatcaccccaggaagaacagcagaagattaattttttaaaagaacaaagaattgaaggaatgctgagtcagatggagggcgtgattaatgcaaaagtgaccattgcgctaccgacttatgatgagggaagtaacgcttctccgagctcagttgccgtatttataaaatattcacctcaggtcaatatggaggcctttcgggtaaaaattaaagatttaatagagatgtcaatccctgggttgcaatacagtaagattagtatcttgatgcagcctgctgaattcagaatggtacctgatgtacccgcgagacaaacattctggattatggacgtgatcaacgccaataaagggaaggtggagaagtggttgatgaaatacccttatcagttgatgttatcgttgacaggactgttattaggagtgggcatcctgatcggctatttttgcctgagacgccgtttttga

SEQ ID NO: 388741 - DNA, 1824 bp, Salmonella enterica
gtggatgccatcgagattgcgcgccagcgtgctgagcaactacattatgctgctatcagcagaggtttagatccctggaagccttatgcttttgttgttggtgaagctaattctcgtagtatcgacgtagagaaatgtttacaaggttctgatgagctaaatggtagccgtgcatttttcgatagtgcttacaggttaattacacatgaagactctggttcattgttcgagcaagcatttctggttgcacacgaaatcgggcatgttgagttaggcgacgatacgcaggatgaatatgtcatcgatatcgaccctgcgcgtacagcagaacctgcgccatcgggaatagaccgtgttgtagattatagccatcgacaaaggcgcgaagttcagatggatcttttcgccagggagtttctgctaccgcgttcggttgttaaaaagttacatcttgaatgtggtatgagctgtagtgatatatccagcaaactcggtgcacctttcgatgttgtcgcccaacagatgcttgatgcaatgctacttccaatggttgagcataaaccacgccagcccgaaccagatatgtcgcttaatgacaaacaaattgaagcggttaggcacagagggaaagctttcttgctccaggcggggccgggtacaggcaaaacgcgaaccctcgtagcgagagtggaaagtctgtttaatgatggaattgatccacgacgcatacttctgttgacgttctctaataaagcagcagcagagatgtctgagcgtatcgcccggaaacaaccacatgcggcagcggcactctgggtgggaacttttcatggctttggtcttgatttgctccggcgtttccatgatctatgtgatttacctgcggagccccgcttaatggatcggtcagaagccgtagaacttctggaagaagaatttttacgtcttaatctcgtacattatcgtaatttatacgacccttctcaaaatattgttgatattctgaacgctatctctcgagcaaaagatgaagttacagacgcattgcaataccgcgcccttgcccaggaaatgctcaatagtgccagtagtgctgaagagcgtgaaactgccgagcgagcgctggaagttgctgttgtttatgacacctacgagaagataaagaaacagaggggatgtcttgattttggtgatttggttatgcgtccggtacaattgcttgaaacaaatgaggaattgcgccagcaattgcagcataattatcaacatgtaatggttgatgaatatcaagacgttaacagaagtagcattcggctattaaaagctctcaaacctgatggtgaaaatctttgggtagttggtgatgccaagcaatcaatttaccgttttcgtggagcatcatcatttaatatatcgcgtttttgtgtggatgactttcctggtggagaatcgcaatcacttgagattaattaccgttctgtttcagagattgttacagcattttctgagtttgcgtcagaaatgaaaacggggggaatcaagagccaccttgcggcaaatcgcctagcgtcgggattactgcctgaaatacaaacagtcgatcctttgcacgggacattgccacataaaaaagacattcttgttcattctcatgggcttctttggctatatcttcggacgaaccgttcccaccagcaaccataccctcaggcggagggcattttactcctctatatgaacccgggatcgtatccttattcacaccacttagatgaaccacggggaactcaagaccttttgcaccatgaattgtcattaatttga

SEQ ID NO: 388742 - DNA, 849 bp, Salmonella enterica
atgattgataaaaatttttggcaaggtaaacgtgtattcgttaccggccatactggctttaaaggaagctggctttcgctatggctgactgaaatgggtgcaattgtaaaaggctatgaacttgatgcgccaactgttccaagtttatttgagatagtgcgtcttaatgatcttatggaatctcatattggcgacattcgtgattttgaaaagctgcgcaattctattgcagaatttaagccagaaattgttttccatatggcagcccagcctttagtgcgcctatcttatgaacagccaatcgaaacatactcaacaaatgttatgggtactgtccatttgcttgaagcagttaagcaagtaggtaacatcaaggcagtcgtaaatatcaccagtgataagtgctacgacaatcgtgagtgggtgtggggctatcgtgagaacgaacccatgggagggtacgatccatactctaatagtaaaggttgtgcagaattagtcgcgtctgcattccggaactcattcttcaatcctgcaaattatgagcaacatggcgttggtttggcgtctgtgagggctggtaatgtcataggcggaggcgattgggctaaagaccgtttaattcccgatattctgcgctcatttgaaaataaccagcaggttattattcgaaacccatattctatccgtccctggcagcatgtactggagcctctttctggttacattgtggtggcgcaacgcttatatacagaaggtgctaagttttctgaaggatggaatttcggcccgcgtgatgaagatgcgaagacggtcgaatttattgttgacaagatggtcacgctttga

SEQ ID NO: 388743 - DNA, 225 bp, Salmonella enterica; identical to SEQ ID NO: 383690

SEQ ID NO: 388744 - DNA, 219 bp, Salmonella enterica
atgaccagcaggccattttgcgtgggcgatccagtaacgcaaaatcggcgggagaaagcccttgcgccagacaggccactcaccaacaatcgcgatgtcagcaaggggctgaaacgggaaagcccctcccgaggaaggggctttaataaggaaagggttatgatgcaccaggtcatcatactgattgttctgttactgataagtttcgcagcttactaa

SEQ ID NO: 388745 - DNA, 570 bp, Salmonella enterica
ttgccagttccgggtattcttcagcagaaaatgccgcaccgttgcatttcagccagcctgttggcggtgtggctgaaggccatggaacaggcacaccaacaggtaatgcagagccttctcccaaaccaagatttttggtcagaataccataggcttcaatttatcgacaaagtcagctttacgctgattactccgaatatcttcggaagcagtaagcaagcgttaaccaatgatttacggaagcttgaaaaagataccaatgcaaatactgtgaccactatttttgaaaacaaagatggcaatttgaaactcaaaggttctcattgggctgagactcttgttgactgggtcaaagatggtggcgggtcatggttgattaaaggacgtaagacactcaagtcaaaatctactacggtatccagtaatcagacagccaaaatcgtgctgatcgaaggtgagatatcagaaattgaacttgatggctactcagcaaatgatattaaagagatcatagcattacatcaaaacaggtatacgttcaaaaatgcaaaatctaactgtctggattag

SEQ ID NO: 388746 - DNA, 279 bp, Salmonella enterica
atggaactcacaagcactcgcaagaaagccaacgcaattaccagcagcatccttaaccggatagctattcgtggtcagcggaaagtcgctgatgcgttaggcgttaatgaatctcaaatttcacgatggaaaggcgatttcattccgaagattgggatgttattggcggttctggagtggggtgtcgaggatgaggagttggcagaactggcaaagaaagttgcgcatctgctgacaaaagaaaaagccccgaagaacggcgaattcttcgaggcctga

SEQ ID NO: 388747 - DNA, 204 bp, Salmonella enterica
gtgaaaagtgaggatgagttctttacggagcttcacccgcaagtggttgaggttctcggtactgcgctgatgcaggtactggtggagcagcgcgaaccttcgcgtgaagctttgatagaaatgattcaggtactgtggcaggaagatgatgtggacttggccgtagaactggctattgatgttctgacactgccgaaagagtag

SEQ ID NO: 388748 - DNA, 240 bp, Salmonella enterica
gtgaatataactgagttgcttcagaaagtatcggcgcttgcttcagaatgccacttgctggcctgtgaacttgatatcggtgacgagagaacagaggctttcgaaatatatgaagtacttcgccggttacagcgacgcggctcagcaagtgaaatgttggctgcgaccaacccgcttttgtgcccgggtatcgaagatgatgcggagtggatcgactttgatgatgacgatgacgactaa

SEQ ID NO: 388749 - DNA, 378 bp, Salmonella enterica
atgagcaaattccccagccatgagatggacagatttaacatcagacttcctgctggaatgagagaagccatagctcttagggcaaaggaaaacggtcgctccatgaacactgagcttgtctttataattgatgaggctttgaagtcccccattcccgcagatgtagataactcaagaataatgaaactctattctaatctcgctgagaatcgcccgaccaatgaggaggaatttgaaaaatgggaaggtgagatgattaaagctatattctacttattagatagcataaattcttattctcaaatgtatcaagctcttaaaagcttacgacaagatgcttctaagaaggtttttggtgataacgaagtcgaattttag

SEQ ID NO: 388750 - DNA, 171 bp, Salmonella enterica
atgcacgacatgacttataccggacgaaaaacccagagcttccaactccgcttgccagaacgtatgaaagaagagattcggcgcatggctgaaatggatggtatttctatcaattctgcaattgtgcagcgtttggcaaagagtctgcgagaggaacgtgcgaatgggtag

SEQ ID NO: 388751 - DNA, 975 bp, Salmonella enterica
atgggtagtaaaaacagcgaagccccgaaggcggcaaccaacgaggcttcaaatttgtcagtaacttccaaggaactaacgaatatgagtatagcagcgcagatcactacaatcaatgtgccattccacggcgatacgttgtacttggtgagctataatggtgagccattcaccccgatgaaacctattgttgacggcatggggttggattgggcttcgcaatttaccaagatcaaaaatcgtttcaaatcatccgttgtggaaatcacaatggttgcggcagacggtaaaaacagggatatgtcgtgcctggccctccgcaaactaccaggctggttgcataccattaatgtaggaaaggttcgccctgagctgcgcgaaaaagtgtctcgctatcaggaagagtgtgatgacgtcctttatcaatattggactaatggtgaggttaagaaccaccgcaagaaaaccacagtagatcagcgcacacctttgcgcgacgccgtgactatgctggtaggaaagaaaggactccgttatgacgatgcatacactatggttcatcagcgctttaacattgatagtattgatgaactttcactcgaacaaatcccgctggccgtagagtacgttcaccgcgtggtgcttgaaggtgagttcatcggcaggcaagagaagaaaaccaacgagctttcagcaaaagaagcaaacagccttgtatggttgtgggattatgccaaccgatcgcaggcattatttcgcgaactgtaccctgcaatgaaacagattcaatcgaactattcaggaaagtgctacgactacggccatgagttctcgtacatcattggaatggcgagagacgttttaatcaatcacacgcgagatgctgatattaatgaacctgacggaataactaatctttccgcatggatgagactcaagaataaagaattaccaccttcgttacatcactactaa

SEQ ID NO: 388752 - DNA, 645 bp, Salmonella enterica
atgaagaaggtttttgggagtgttgtgtttgcgctggcgttgtcagggtgtgcatctcatgagcagccagtcgattatcgagcgggtgattatgttattatttatcaagcttttggcaaaccaaataacgtagtatcgcgcgctgctgctatgtgtaacaccaagccttacaggatggcttcttatccgaagactatcagaccagtaagaagcacttatttctatccaaatgttttctcatgcgctaaggaagccgccttagaatatggtagtgcagaagctcaagcagatttgattgaggagacaaaaagagcaagtcaggaagaaatgaaaatggtggagaaactttctccaacagatgcaaaaaccttcttcatgaaagaaaaacatgccttcacaactaattgcttagtattcggtgatgtcacaatgataactggtgagtctccggccatgattatagctgggggggttagtatgggagcaaaacctaaatggaatggcgaagagtattcatttgtcttcaatggaggctcaatgaaggcatcattcaagccatataggggagagcataagttctttattatcggcggtgataaagtatacggatgtggtccatctatattagatcacagatatgactaa

SEQ ID NO: 388753 - DNA, 288 bp, Salmonella enterica
atgattaaattattgaaaggtgctgtgattgcaaagcctccagtaaagcctcaatcgttaagcgagaaggaaaagaggcagagagagcacgatgatgtagagcactgctgtcgatatgaagcggatgactggaagtatcctgactttagcgcagtgggtgggcctcataactggcgaaactatatcactcctcaactaaaagaggcgtggtcgacattcactgactggcaaaagaaagtgatagctcatgcgctgaatgatgcagcatcacacgaagaatgggattaa

SEQ ID NO: 388754 - DNA, 231 bp, Salmonella enterica
atggtatgtgcgactaggggtgtcggtgtactggtcacgatcaataactgcacccgcaatggcggagaacggatagctaaggttgtcgtcggtgatttcactgtagctattccagatagtgccgttggacagcaaatcgctgctgctgtcgggtgtaatgcggcgaacgcgaatatcaaacggcttgatatccggagcatcaatcagatgggcctcaagatactcgcctga

SEQ ID NO: 388755 - DNA, 549 bp, Salmonella enterica
atgaagcgtccactggttagagcgcccgaggaactgagcctggtcttcaatatcgtcaggattgacaatctggttctgcccggagtaccagaactcaaacgatgtgtctgtcgttgccgtaatgcgcatgacaggcacaaggtcagcagagaacaggccgggagtccagacaacgccggatggcgctggcggcgcaccaataaccatgtttacctgcgtctccgcccctttcattccgttttcgttgcgaccgcgtacgccgagagtgtaactccctgcttccagcccgtagaaatcgtagcggaactggtctgtttcatactgagcaacaaccttgccttcatcgttgtacacgtacagttcgaacatcagttttttggtggtggtagctgtctcccatgtagcagtaacctgaacagtctcagagttggtgttgatgatgcgcaggttctctacgttcggcactcgatacccgttcagtgtatcgttgggaacttcaaacacggcaccttcatcaacaatggcctgtttgttcgggtcatgttgtga

SEQ ID NO: 388756 - DNA, 669 bp, Salmonella enterica
atgagcaacatcgacaaacaggcgcttcgtgagcgctattcaccaaaacctgtacctgaatgccatatttgcggcaaagaaatgactatacagcgcatgtctgccagtcgaattacctatggctgcacgggcgcgacatacgacgctaaaggttgccactacgcagaaggtcgcagtatcgcagatgaccactacgagcaatcacgcgtcactgtcgtcgatgtgagcgacccggatgtgctggcgctgcttgacgagaatattcaactccagcgggaaaaagacgcaatagaggccgtggcgctggcgctgcgtgatgatatgcgacaggcacgggagcaactggcagccgcagagcaggagcgggaaaactggcgtatcagctttgataatgagcggtaccgcgcagataagctggcggctgcattaaatgcagagcgcgagaaattagtaatggcgaatcgatcgcttattacacaacacacccgtgcaaacagtgccgagagtcgcatagcagagctggaggcgcggacagtttgcctccctaaacttccagttcttggctctactgctgagcggtacgagggatttgctgatggtgcatccagcatgagaaatgaatgtgctaatgcaatccatgccgctggcatcaaggttgagggggagtga

SEQ ID NO: 388757 - DNA, 477 bp, Salmonella enterica; identical to SEQ ID NO: 387930

SEQ ID NO: 388758 - DNA, 327 bp, Salmonella enterica
atgaaaaagatgccagaaaaacatgatctgttaaccgccatgatggcggcaaaggaacagggcatcggggccatccttgcgtttgcaatggcgtaccttcgcggtcggtataatggcggtgcgtttaagaaaacactaatagacgcaacgatgtgcgccattatcgcctggttcattcgtgaccttttagtcttcgccggactgagtagcaatcttgcttacatagcgagtgtatttatcggctacatcggcacagactcgattggttcgctaatcaaacgcttcgctgctaaaaaagccggagtcgatgatgcaaatcagcagtaa

SEQ ID NO: 388759 - DNA, 1002 bp, Salmonella enterica
atgggtggagagacttcggctatacaacgagtcgcgggtaagatttctgatgatatcttctcagtgttcaaatgggatcgtgccgctagagcggacatgaattgggattgttgccaagaggctcattccaagaaaacgcatccaagcgatgttgtatttttctacatagatccatatgaggaggaaatggtctatctcaacacagacctcaaaagctatgcagaaggtactattgggaaaaaaatagtcgagggagctttaacatcgcttgctttagctaccgagtgtgcaaatgtgagtgaagaatggcgattgaaatatgttcatgatgattctttaggttataacgtaagagggttattattcttatataaccatgataatttatatgataaggacttctatgagaatattacaaaaaaattagatcattcatctataaattgccctccaaacatcaaactacatttgcttgacccttataaaatatcagatttgataaacatatcttctgacataactaaattaattggttcaggcaaacttcctcaacctgataagttcacatattattacccagatctttccctaacaagaataaagcaccctattaatcagacaacacctgcaacaattgaattattaacatcaccatacattataatcaagcatgaggctttcagttggctcagagataaaaatcctgagggatatgttgtttattacaatcaaccgggggattcagtagacgaattcgtttacttctttgatatgttatcaacttatcagatattaaccgaaggtaaaccaatcgtattacgccattgtcacattcacccaaatgaaaatgccattcatcattttgaaagagcgaaaaagaaatacagcactgactggctcttaggcgaggatgaaagactttttcttaaaattgacttcgacaagacagacaaaattgttgttgaatataatcttgaacaaatcggcatggagcaacggtaa

SEQ ID NO: 388760 - DNA, 1080 bp, Salmonella enterica
atggctaaaaaactatatttcgcaactgataaaaatatttatgatgcattacatcataaaaggataaccgctgcaaagttgcatgaattattgttgaatcgaggtgtgtttttatcaccagaactcgacaaggaaatactaattgaggaaatatccaaacttcctcacggatttaatgaattagaacacataaaaaaactggtcaaaacatatgacccaagggaaagcactactagtgtgagcttccaaacctcaacaaatcaggccgaattaaaaagtgctgctgaagcactaaaaaaaacatgctcccctagtaaaggtcaaagcctgaatattgtagctaaaaaagatggctcccttacagtagaatacaaatatgaagaaatagacctgtctaaaactgcattacgtcagatcgacaagcggaatgttataatagaacttcgacctggagctgacaaagttgaagtacgtatgcctcaaaaccccgaggcaaaaaaagttatagagagcttgcaaaacgagctatctaaaatcaagtctgaacctatcgagcgcttcgaaatatcattactagcaataactgatcctacattgcgaagtcagttttttcaggaattaatgaatggcctacgtggttatgagactgatgacgtaacaaaagtcgaattaaatcgcagtactgatgctagtgaggatgaagacaaggaagaaactattgataccggatttgttaagaaagccgtccttaatggtgaaggggtaaatagttcagctatattttctcaactacatgagaaaggttattatatcgggcgtattgcatggtcttcaaagccgacaagtggaattggagacagaatcaacgtcgaagcatttttcaaagactcagaaaaatgctgtgactttgcctatcaaattaaagggataaacaatcaaaaagaagacggtttcaatgtaaccattcgcgcggcaacggcacaagagaaaaaacatattagtgaattaattgagtccgccgctgaaaatgcctataatataataataggatcagaggtgaacgaagatgaaaaaggttaa

SEQ ID NO: 388761 - DNA, 684 bp, Salmonella enterica
atgaaaaaggttaaatggcttaagttaaacatacggcttgagtttgaaacagccgttagacgtctttctcttgattcttttacagaggataaagggaaagggtttatttttgataaaatacgccatgattttgcaaatgggcgctttgtcgagcgtattgtttatcatgacaaaatatcaagctttgacggaagcgaaactaccgttgaaagaatcgaatatcgtaccacaaattttagcgtggctttagactctcttcctgtaatgcagattactaacccacccagaactttaaagcctttttcgcaggctttggtaaaaaatcttggcttaggtgttagtttggaagaaattgacataaaccctatagactggcttaatgaaatatcttcaagtgtaaatatcaatttaacacaacttgatatttcaagggttagagtttctgattacgccacagctaaaatgcaaataattggcagcagtgatcttaggaagtattataaagaagaattagagggtaaaaaaataagaattgacaggcttgtttgctctgttaattcattagaatattccggtaagctcaagatcaccaatagcggccttgcttatattgatgttagaaatgaaaatgagtttacgaaaatcgtttttgatacgttaaaaaaagtcacccttcaatcatag

SEQ ID NO: 388762 - DNA, 309 bp, Salmonella enterica
gtgaaaaagagtatggcaggtcagggtgtggcaggggcgttactgctggcagggctgatggtgagtgcgggcgcaatggcagcctccggcgacccggtacagggcggttcgggcaccgtgaccatcaatgttccgatagtgacgtcaacctgcagtgtttcgatgccgacggaggtgaattttgactcgattaacataaattcgctgccccccgccgactttatagcaagcaagaactttgatactgtgttttcgaactgtaaggataaaaccctgcagatgaagtgtgcaggcttcaactccaattag

SEQ ID NO: 388763 - DNA, 186 bp, Salmonella enterica
atgccggatatgaaagatatcgtcaccgacgacagggtgaaaaacgccctcaaatcagatgcggtcactactacggttaaagcgcagattaaatccacactggataaagaaattgatgctgcggttgatactgcgctggtggatttgccgggtgcggagcaggacccgacaggagcgggtcagtaa

SEQ ID NO: 388764 - DNA, 627 bp, Salmonella enterica
gtgcgtgaagtgaaaatatttaagggaatacccgacagggagccggaaacgcttcaccgtgaccgcatggacgccataagggagagagcggagagcggcaacagtgttttcaccagcggcatttttacgccactaccggaggagaagccggacgaccttaaaccgcgggtagaaaagcgtgccgatggcgtgtactggatagccccgaaggtggacagggaaagcggggaaatcatcagtaatgaaacgtggctgagttctcccctggaggtaatcggaacgggaagggatgacgccgggcagtattactttgtgttgcgctggaaaacgccgggcaggaaagaggaaacgacccgcgcattacccgccggggatattggcgagcgtgagggctggcgtgcgctgaaaagtggcggggtgaaggttgtcgccagccccggcagcgtgggcgatgctgccaccgtcgaactctctccgggtgctggacaaaacgttctcgatatccgcgccggaatcatcagcgaccagggaaaaactgaagtatttgcaggagtacatcaggatgcagtgcagataaaaaaatccccgcaggaggagcagccgtatcctgcggggaaacatggataa

SEQ ID NO: 388765 - DNA, 402 bp, Salmonella enterica
atggaaaaagcgagcaaacaatcaagatccggatggggtggaaagcgtaccggagccggagcaccttatggcaataccaacgctgtaaagcatggagagcgcagcaagcgcgcttttttaccgctggaaggtgaagaacggttaacgccgctgatcgggctgagggtgcgaaacctgatactggcggagcgtgttggtaagatgcggcgtgacggacgtcttttttcaggcaatgccgccgactggcgcgaaatgatgctgattgaaggtctgatgtggcagcacaccagaaaaatgatgcggcttgaactggcagcatcgagggcagcagcggcagaggtaaaaacagcactggcaaaagcgagggcgatgcataaagccgtcaggtacagccaaagatag

SEQ ID NO: 388766 - DNA, 264 bp, Salmonella enterica
atgacaatcaccgaagccgatttgctggctgtgctacatgatatcgccggaaccaatgagaccccgacgcacaaggtatttacggattatgctggtgtcgtggactcagcgttacagcgcgaagggtacgacctgaacggacaggatttgttaaccatacgtaccaggacggcggtaatactggcagcacgtcgacgccaccagcagagggagaacgcagccccttaccagtggaaaaagccatcgccacggcgcggatggtaa

SEQ ID NO: 388767 - DNA, 276 bp, Salmonella enterica
atggtaaacgacagcaaagctgaagcgctggaagcgaagggtctgtaccgccgggcggctgcgcggtgggctgaagtgatgttgctggtggacagtgataaagaacgcgagcaggttgctaaacgtcgcgccgactgcattcagaaatcattacgcccgcctgttcgcctggacagttacggcggtgtacgggaagccgccaaccggacacaggcaagtatggggctggacaggccagacggtgcagcattcaggaactacccgaaatcacgataa

SEQ ID NO: 388768 - DNA, 333 bp, Salmonella enterica
atgaaacagaatggttttcagaactggcaggcgacgttatggcctggtgtactggcattcggtaaacaggccgacgcgctggccaggcaccagaaaggcgaccttgtgagcgtggcggggcaattacaggtaaaccagtggatagggcaggatggcagcacacaaagcggttatacgttgctggctgacagcgtgataagtgccagaacggcgcgaccgggcggcaaaaagggtcagcaggggcagacaacggacgcactgagacgtgcgcagcagccattccgtgatgaatacgaccagcgcccaccattcgacaatgaagctccattctga

SEQ ID NO: 388769 - DNA, 2025 bp, Salmonella enterica
atgggtaagcagattgccggggataccacgccacctgtctggctggggccaaagcaactggcggaactgcataacctgcgcattatcgaccaggggcggcgctgtgcgcgtgtttatcaggccggggagattaagccaataataatcaatgctatcgctgaaaagctggcgttggctggcgtacaggaggcgaagctgtacaaagggatacccgaccagcagccggagaactggcgtgattatctgatgcggctgcgtgagcaggccgaacgcggggagtcgctggtggaggaatgccgccgggctaccgggaagcgtgcgccagtggatgaactggccccctgcgtggagtcccgcactggtggcttgtattgggtgacgccaaaaattgataagcagtccggagaggttatccgtcccggtgagtggcttagtgaccagatgcgcaccgtcgggattggcaatgacggcagcgaagcttacctgattattgagatggtgccggaaggcgcagaaaaaatcatccatgaagccatgccacgcaatgaaatcggcctgccggtcggctggtcacgtttgcgcggacgaggtgtcgccatcactaccagcgcccatttgcttaataaactggctgaatatctccagcgtcagggcgaaagaactatgtgggaagtcacatccacagccggatggcactgcggcgcttatgttatgcctgatggtgaggtgattggtgtaccggatcgccccgttgcgttctgtggtggttcggcggcaatcagaggttatgttgttcgcggtaatccgccggactggcgggagaatgtggccgccctgatgcgtggcaatcactcaatgatgcttggggtacttaccggactggcggcaccgcttaactctcttgtggggggcggatgttttggtattcatcttttcgctcagtcatcggcgggaaaaacaaccaccgtggaggcggcgaccagcctttacggagacccggaagtgctcagactgtcatgggatgccacccgccacggcctgacagtggaggccgcagcgcgtaatgatggttttattcccatcgatgaaattggtcagggcggtaaagtgaccgaaatagcccatgcggcttacagtctgtttaacggcgtggggcgtattcagggacgtaaggaaggtggaaaccgggcagtggcacgctggaaaattgccgcgctcagtaccggagaggaagacttcgagacctttcttgtcaggggcggagttacccccaaggccggacaactggtaaggcttcttagtgttcccttcatcgatacccttttttttaacggatacagtgacggcgacgagcacgccagagcgataaaacagatggcttcccgttattgcggtgcggcaggccgtgagtggatacgctggcttgctgataataaagagacggctgtacgtgccgtcactgaaaaagaaaatcagtggtcagggatgcttcctgatgaagcatcatctcaggttcgccgtgtggcttcacggtttgcgttactggatgcggtcggagatctggcgacgaatatcactggctgggggccggaggagtgcagcgtagctgtacatgcagcatttgatgactgggtgaatgatttcgggctggagaaccgggagaaataccaggtcatcagccgtgcgcgtgactttattcagcgccacgctttaacccgttttcagccttatacctttggcaaaagtaacggcgatatggacaggcagtgcgccgggcgcataaatcatcttgccgggtatctggttagcgggcggcgtgatgacggtaagccggaatatcacattattccgtcagtattcgatgaggagatattgtgcggtatcagcaggagctacggctgtaaggtgctggaggaagccggaatgtttacaaggcaggagcctgatcgcctgacgtcaaaaacaattctgatcaacggaacacagcagcgttttatcgtactgaccgaccagccagaagagtag

SEQ ID NO: 388770 - DNA, 201 bp, Salmonella enterica
atgattaatcagcctgtaacactgaccgttaccctgaatgtgccatctgattttaccgggcgtattttgctatatctggaaaaaggacagctaaacaacaatcttattctcagggataacgatattgtaagcaccctggcggggttttcagaacttcttatcagagacgggacagacgcgcgccatctgacgggagaataa

SEQ ID NO: 388771 - DNA, 228 bp, Salmonella enterica
atgaacagcgatcgcttaaacaccctgaaagcgaatctgaaaggtgcgccactggatgcaagggaagccgtgggatttatttctgacctgataaaagcctcttcttttttagtcaccacagacggatacgcacagacaggtaatatcctgatggatatagcccaggactacgcagaactggtggcagaaatgaatatccgggatgtgcgcggggtgggacatgattaa

SEQ ID NO: 388772 - DNA, 276 bp, Salmonella enterica
atgtttaattcatccgcctgcaaattcacctggatttttctggggactcatccgggcgacactgttgcaccagtcgttttacgtacctccgccgacgccgaagacgccgcccgcgctgagtttcccggatgggagctgacctttgccgcgaaaatctgtactgaaagcccgctgatgcatggctggaatgattatgacagtgaaacgatatggacgattatcggtagtaaagcatgtccacttccggccagtttttgtcaggaggtacgtccatga

SEQ ID NO: 388773 - DNA, 384 bp, Salmonella enterica
atgtgtaaaaaaaccttgcccgcgcttattatcgggttgtatattcccgttgctggtgtaaatccaccagccgggtttagcagcctgaataatttggcgggtagccgcttaatctccgatatgcggtttttttatgcccgtaaaaccacccttacccgcattatggcggggcgtaatgggggagcgttcgcgctcgctggttcccaaattgccagtctgctaaccccgttacgtctcgccaccccgtttagcagcgttgtagcgagactccacaaaatcaatttgggagtcattcacatggctatttccgcacgtctgcaagggcgcacatcttcacacctgaacctttcccgcaactccgctcagggggtgcgccatgtttaa

SEQ ID NO: 388774 - DNA, 1887 bp, Salmonella enterica
atgcgtaactctatcaccgtacaaaacagccttatgccgctggtggaatatcaggggcagcgtgtggtcacgttcgctatggtggatgcggcccaccagcgaccgaaagggacggcaaaggcggcatttaaccgcaaccgtcatcgctttattgaagataggcatttttttgcactgactggggatgttttacgtactcagtcgtttagcagtatttttccggcgcgtacacgtaaagggatactcattaccgaaatgggctacatgttgctggtaaaatcctttaacgatgatttgtcatggaaaatccaggaggaactaatcacggcctatttccgccacttcccgcaattcccggatctacaggaagtacacataccggatgctaaatatctggcggccatgccactgacggaagcgcaaaatttactggcaattgcagatcgggagtcattcaccgaacacgggcagaagggaggtgcgggaatgcggctgcgtcgtgatgagcttaaaaaactgcgtccggcattgtgtctcattggcgagcggccacagttaaatttaccggggtattccatgaataacacccaaataaaaagcaccccactgccggagcgctctatcgaacatttgactcgttgcacagtgttatgtactagtgacaaggcgcattatatgctgtatccggcattgcatgaagcggactatgctgcgctgttatgctcaatcctgaaatcgaaatgtacggcgtcaaacgggaagatgattttacttccctcatgctcaattatcccggcgtttagcattgtctgcacgtcacgatgtaccgatttaaaatcacgctgtacacggcgggatagttcgcggatggttattgcgccagccccggccattgtgttgatgatggtcagtcgattaggtgcgagcatgacccgcgccaaatcttcaatgctggagaacgagaacacaaacggatcatcgggttgttttccggtcatgacctgctcgaatgcttcgcccatttgcgtccacgcgtctttttctggcaatacttttacggttaatgtattcatggcgttagctcctcattgcggtaacgtcagtgcggaattgtttaatcaaatctttcagggtggaaaagctaacggggtattcattctcgccaatatgcttgtgatctcccttacccgcttcattgtcgtagcgcaccatgcagaccccatcaacaacataaacaaggctgtatttgtagttgtgctggctggcagggacgttcggattaacccgccatatcttgatgcgtataaaagcgtctccccccggaaaatcgtgtttctgatacatcactatttcagatggcatttacttttccctcttgttgatggcaatattaacatcaatattgtgatgatgtcaatgaagccatctaaagcgcttgaccgtctgaattgctggcgttatgcttaccctgcacctgcaaaatcaggtgtcgggattagcctcttggagattactagagcgcacaacacgcgccatgcgtgtttttttgtgccgcacagtcacaccctttcaatggtgggctgtatgggggcggagcaatccgcgccgggttctctagtgaccggtaaggctaaccctgtacagtccgccaccagcgagattagcctcttcagtggcgggaatatcaagcccactagagaggatgccgctatgctggctactacccctgcccaaaatccgcttttcgtcaggcgcttttattccggccagaattcaacctatttaaccacaaccgccaccagcgaacgcgaagcctgcgcacagctaccggatgcgccgtgtctgtttgccgcccgtatccgggtacagggggtgcgccatgtgtaa

SEQ ID NO: 388775 - DNA, 558 bp, Salmonella enterica
atgtgtaaacctgtctttcatgccggacgctctgaaatctctgtcattaaattcgatggcattaaggtgcgcgtagtgaatatcaacggtgaaccgtggtttgttggcgctgatgtgtgcgcagcgctggaaatcagcaacgttactgatgctgtttcagctttggataacgacgaggtaatgaccctaactttaaccgagggtcattccggtaaacgtgggggtgccagaagctggaatgttgtatctgaatcaggtttctacaaactgatcgcccgcagccgtaaagcagcttcgccaggcacatttgcgcatcgtttcagtaactgggtgttccgtgaggttatcccgtcgattcgcaaaacgggggcttatggtgttccgttcgccttactgaatgatgtcagtaaacgtcaggctgcttatcaacaggaggccagcaagcgcggttacaggctacagcaatgcagggaagccaaagaggcgttggaacgtgaggagctatcactatggcgcaagtatcagcctgattttctggagggtgaaaacaatgcgtaa

SEQ ID NO: 388776 - DNA, 801 bp, Salmonella enterica
atgaaactgcgaaaaacgcccgtacaggggcggggcttcgttcggcctgaaaaccagaatctgcaaaatttcggcgaaattctcccggttatttccggcgttattggcgggagtgaaaccaatattgttagcgccagagcgttgcataaggcgctgggtgtgaagcgtgatttcactacatggattaaaggacgtattgatgagtacggatttaaaaagggtgtggattttgaatttgtagaaaatttgacctcccccaatccggtgagcgcaaaatctcgccaacgtgtagagcacgactacctgagcactatcaacatggcgaaagaactggcgatggtcgaacgcactgaacagggccgcgccgttcgccagtacttcatcaaatgcgaggaggaactacacaaggttgcgcctgtacgttccgcagcgttacgccgtgaactgaaagcccgtatcaccgttgccaactactttaagccgatgtgcgccgcactggaggtgtaccgggctgagctgggtaaaaacactctacagcaccactacacaacggaagccaatatgctggcgcgtatcgtgctgggtggcatgactgcaaaacagtgggcgcaggcgaacggcatcacaggtgaaccacgcgaccacatgagcacgttgcagcttgagcacctttcttacctcgagcagagcaatatcacgttgattgagttaggccaggactactaccagcggaaagctgaattaattcgtctttcgcagcgttggttagcccgtcgcatggaggaaaacagccatgtgtaa

SEQ ID NO: 388777 - DNA, 240 bp, Salmonella enterica
atgtctcccgtaggcatcaataaacaacgggagacgattatcgtgtcacaatctttaattcgtatgtcagaaaccatgcgccgtacaggctatggtagggcatggatctataaactcattgcccaagggcgttttcctaaacctgtaaaaattggctctcgcgctattgcctttgtcgaaagtgaagttgacgagtggattaatcagcgtattgctgaatcacgcggaacagctaactga

SEQ ID NO: 388778 - DNA, 756 bp, Salmonella enterica
gtgacttacaattcaaaaagctgtagttctcttgaaaaagcatattacacaccaattgaagcggcgctacgttggtgtaatttaattgctcatgaagttttaatattggagcgggttggagatggagttttacctagcgttggaatgttccctcaatggccttgcttgcgtgttaatgctgagaaaattttagatgcaatccataattgtgaaattccttatggtcgcgatggtaaaactgttcaacctggagagcaagttgctaagcaccgtttaaccgtccgtcattccgatctgaaatcgtggatgtcaaaaaattatcccaaccaaaaacctgctttcctttttgatgctgtagagcagcaattacatgctggaattacagtcgaggcatatcaaactcttcaggctgaaaacaagcgtcttaatattcgcttagataatgcaatgaagactttccaacagcaaaaaaatgaaatttccgaattacaaggagaacgtgattctcttcgacgaatggttgataattcggtgcaaaacattgaccaacgttctgaaacaacgtatttaaacattattggggggctgctttttttaatgttggggcgctcacctgctggtatgaaacaatctgtattcgaaaatcaaagctcgattattagtaatttattagggcatttcgaaggaaagccggggatgagttcgagaacgttggaagcaaagtttgctgaagctaataaatcaattaaatcgtag

SEQ ID NO: 388779 - DNA, 684 bp, Salmonella enterica
atgtcagccttatcaactactggccataatgacgggatcactctccattgcttacagagcattgcgcaactcattcctctgtcgtcggcggttttttatcgtgttaatgcttatttaaagccggaagcctatgttttacataacatttctaatagcacacaccaacaatatctggagcattttcaaccattagacccgctatcgccttcccggttcggccagcaggttattaccgtagcgacgatgacgcccggtatctgtgcccgtcatcgccattattatcatgaatttatgctacctaatcatgtgtgcgacatgattgagatctttattcgtcggggccatcgtattatcgcgggcatttcattaatgcgcgatatacctttttccagcgaagagcgtttgcgagcccaggcagtacaaccattactgggactggcaattcatgattctcttcaggaagacaacaatctggcgtcaatattgaccgcaaaagagcgtgaaattgtgggaatggtctgcgaaggggccagtaacaaattgattgcccgtcagttgaatatatctctctcaacagtgaaaacgcatttacgtaatatttttgctaaaacagaagtgataaatcgcacggaactggtttcccgaaccagaatgtcctcggtacaacattcacagcatatgtga

SEQ ID NO: 388780 - DNA, 411 bp, Salmonella enterica
atgaaaacaaataaaaaaacaataccttttttaatttcccttgcaattattattatatcattaactccattggctgtttatttttatcattttcacggtgaactttctaataatcaagctaattggtcaagcctaggttcatttttaagcgggacgagtggcacacttttgtcagcatgtagcatatttgcgttaatatatacacttcatatcacacttaaaaacaatgaaaaaacacataacctaacaatggagtcaatcaaaaacaacgagcggcaaataaaaaacatggagaaagaattttctttaaagctgtttgagagttatatcgacgcattcaattccatacttgagaggaaaatatatgctataaacaaaaaaaaacatagttccccaggaggatttcattaa

SEQ ID NO: 388781 - DNA, 543 bp, Salmonella enterica
atggatgctgatttattaaataaatatttatggactgtgaaaaaacaggctattgcatttatttcttcaattctgttgctggagatgatttcaccgctgggcctggcagaagacgccttaccaaaaggtaaagattaccctgcggttatttatcatgggaaaacggcgacaagcgtagaccgcacggatgagttcaccaatatgttccacacacgtttcaaagaagcattgcagaacgacgcagtttttgcgggtgagtatgcccagaccgaatggggctgcggcggttctgggtgtcatgttattgcttttatcaacaagcgaacagggcgcgcgttatcccacacctttcaggtctattatagcgggacggacgaagagccgcagcctataggtgaagagattctgtatatggataaaaagagtcgattgctggtagcttataaaaccactgagtcgttggagaagtcttatgattattatcttctcaatggcaatgagttagtgcttattcgcaaagttccagataaaggaggctactga

SEQ ID NO: 388782 - DNA, 525 bp, Salmonella enterica
atgaagtttctgaagactggcaaggtttcggcgctcaaacaattacagcgtctgactggagcccctgctgccagtggtaaaactttgagccgacgcaattcgtacgcacaaattcaccgcgtacgtttaacgtacggacatcgcaacccattgaatcaaattgattataacgaatcgttagaatcggctaactggctgattttgttaaattccttcgattcaacggaatcggctaactgcggtgctaaaagatacgcagatgacaaatacgaacagcattcgggtgcgcctgaacatcaacacagcttaggttcagaggttccgacgaataacgtagagagctgcgaggttaacaaaccctctttaagagggggagttcagcgtttgtgcgggtcattacgtcctgcacaaaatttgcaggtaactaaaagtcactcgcaaaacaaccccgaagttatcgggtcagttcacagcattacggggagtaacactgttcacaggactaacgaccctagccctgtgtaa

SEQ ID NO: 388783 - DNA, 462 bp, Salmonella enterica
atgagcaaaattcaaaaccctgtcgtgcttatccataagcgcaaaaacagtgacacctacgccgttgccatcaccagcgacagccaggactatcacgacgccgttctaatggcgacgatggaaccggatatgactggcgatgatgtagatacctggagcaaaaccggttactacatggcggcggagatcgagcgcttacgtcagcagcttatcgcaccgctgagcatcggagaattattacaacgactggaatcgcaaactggcgaaaaatgggggcatgaagttaacgaggctacctacggtaaacagttgaccatcaccctgccagatatcatgtcaaaggcgttctggagcagtacaggaaagaacgaaactttccatcctgaaacctataaacgccaggtgaaagaagcgatcgagcgggcttgtgttatcgccgggatcggtgtggaggtgaagtaa

SEQ ID NO: 388784 - DNA, 864 bp, Salmonella enterica
atggccaagaaaactgaacttacaccagtagcagcccgcgatctgcaaatcattgagtatcgcggacaccgcgtagtgaccactgagcagttggcggcgggttatggtaccgatgtagagaatattcgccgcaacttcaaccgcaataaatcacggttcattgaaggaaagcactatttcccggttgcaggcggtgaactggaaaatttgcgagtgacttttagtcccgcacaaatttcgaacaaaacacgcagtctgacactctggacagaacgcggtgcggccaaccacgcgaagatgctggaaaccgatcaggcgtggaactatcacgaagacctggttgagttctatttcacacagcgtgatgcgattgcgacaccagcaaaccagttaacgatcagccgcaaagaactggcgctgatgattatcgaggcagaagagcgcgccgaatccaccgcactcgaaaataaaattctcaatgctaccgttgagagtctggagaaacatttcactaaaggcatgacgataccggctttctgcaaggggctgaacggcgtcaacgtaagcaaaatgtcatggtgggcttatcagcgtaactggctgtacaacgcccagcgggatccggagaaaaatccaaagtggcgtgttgcttcctatgcccgcgataagtacctgaccgaagacgaaacgaaaatcactccacatggacaggatgaatttaagaagttcacgcctgtactgctggagcaaggttgccatcgcctgtaccagctttatatgaaaggcgaactgccaatgaaaaagacctggaacggcgaatacagccacgacaaagccatttatacgccggaggataaagcatga

SEQ ID NO: 388785 - DNA, 201 bp, Salmonella enterica
atgactaactcccccctctttttcacacacaaaaaagtgcaggtggttatgacgattgaaaacggccaggtaattgacactcgtaatgttcgcgataacgaactgattgccagcatggataccttcttctggatggcaaagaaagccggttacaaggttatcccaccagcagacgaaacagcacaggtgacggcaacgtaa

SEQ ID NO: 388786 - DNA, 297 bp, Salmonella enterica
atggaaataccaatcagaacactactggaaatgcctgaaatatacgggcaagcagataaggactggattgttcagcagttagcaagactaacaccagctgtacggcagaaagcagctctgcgttatgccgctatctaccaggaagcgtttgacgccgagtcggtttcataccgtaaggagaaccgggcaaggcatgaagcaaacaccaggcttcgcctgttcgtgggaaatcacggcagggctttacaggggtataccgccgaacctcccctggccggaacgccaccgcgttcctga

SEQ ID NO: 388787 - DNA, 7311 bp, Salmonella enterica
gtgaaatcgaaaaagtgtgtcggttttttatcctggttgctgttatgcgcctttattttaacgcctttcttcgcgcaggccgtgcgaaacagcggcgcatggcaggaactcactgagcaaactgcggctattaacggtactccccctcaggccgatagtgtgacgatcccggtctatcagggcagcgttcagttgcgatctgatgcggctaattctgttgattactccgcgaaacccagccagttcagcaccagcgatgcaggcagcgcgctgaccttaaccaatccgcacgataccgaaggcgatattttcgccgatccgccgctggcctggcaggctgaacgcgcgcccaccgtcacgctggtgtgggccgacgccgccacgccggatacgccgctgtctccgcagccatcggcaaacctgacgttctgtgagcaaaatatggcgggccgccacctggtggtctggccgcaactggatacctcaaccgccgtaccgccgctgtggctgcttacccgcaccggcgtgccttatgacagcgcggtagagatactcaatcaaaagattgcggtggatattgcccccgccgtgggcgacccggttactctcgtcgccgatcatctggacgagtcgctaaacgccgcgaaggtcaaagccggtgaaagcatcacgctgacggtgaataccaaaggctgtaacggcgagcctgcgggcaatatcgcgttcgtgattacccgcggcgatgcgctgaatcgccagggcgtggtgaacaataccgcgccggtacgcgtcggcaataccgaactgaccaccaccgccacagaatatcacggcaccaccaatgcggaaggcgtggcgacggtgaccgtcacccaggctaacggtccgggggtaaaaaccccgctggtggcgcacccgtcaggcgcgcctgcgctgaaagccgacgtggacgtgatttttaccaccctcaccagcccggacagcggcagcgccaatatgtacggccatatggcggacaattccaccgccacggtggacggcgaaagctacacctttagccgccccaaactggcggcggaaaccgacggcgaagaccgcgccgtcagtatcaacaatgaaagctgggcgcagttcaactgggctaatgcggataaacactgcgatattctgccggatgcgcgccaactggaagggttaaaaattgagcgcggcgatttatccaccaccctcggctggccggtggggctgacatccggagatgaagagtactggtcctcctcccaggggtcgatcgccgccgaccatatcagcattgatatgcgcagccgcagccttacgcaaatgccggacgccacgcaatcgctggtaagctgcgtggataaagcctcgccggaggttacgccgaagttagtgattagcgccgacagttttgattcaacggtcaatgccgcgaaagtcgaggttggcgatgagatcaatatgaagatcagcgtgaccgacagcgccaccaacaaaccgctgccctatcgctactttaatgtctatctgggcgacgaacagaatcgccagaatcaaaagaacgccgatattgacgcggcgcatcagtggtcggatgaaccggtcgtcatcaccaatctggaaggcagcgacggtcactatcacggcgtcaccgacgccaacggccagttctcgctggcgctgacccaggatcggggcgcgggcgtgttaaccccggtgcgcgtggtgctgttcgacgggacggaagcgacgcagaacgtcatttttaccgtagtcaccagcccggacgtggcgcaggcgcgcatgtggggccatatgcagggcgtggtggaggcgggcaatatctacaaacgtccgctgctggcggacgaagccgcgcaggacaccggctctgaatttgagaataacgaatactgggccacgtttaactcggtaacggcggcgacaaaccagtgcggcgcgggccaggtgccggggcaactgctgctggatacgctgtatgcggcccattccggcaacgcgatggaaacgacctacggctggccgacgcagaaacacagctatatcgcggcggataccgatggctctaccaccgcgcacgtcaacctggcgaccggcgcggacagcatgttcagcggcgctgaaccgaactatctttcctgttccggcaacgaactggtgaccatcctgaacgtttacttcgatggcaacgagtcgttacgcaatgcggtcgccaaagtgggcgaacaggtaacgatgaacgtgcactccgtcaacgcgctgaacggactgactgtgcctaacgccgcgtttaccgtgaccatgtcgcatggcaaaaatcgcgacaacgcgacgaccggttttaccgactccagcgacggaacgttggtcatggggggaacctcgtttggctcctcccaggcgtcgatgacgtatcagggcatcaccgatgccgaggggaacgccacgctggtgattgaacagccgcagggcgtcggcttgctgacgccgctgaccgtactgccgctccactcgctgatcaccacccccgtcaaccgcagcgtgaaattcaccgtccccaccagccccgacacgccaaaagcgcatatgtggggacatatggcggatactatcaccgtggacaatatggaattccagcggccaaaactggcggcggaagcgactgccgcgaccaggaccgaagatcagaataacgaaacctgggcgcgcgttacccatgccgatgcgctgaacaaccccgacgccggaggctgcgaggttaatcatctgccgcaagatcaccagcttagcgcactctataccgcgaacgatggcaataaaattcacaccgtatccggctggccgacgtcgtataactactggtcttccaccttcgccagcgccagttcgtggcagacggtatcgctggcctccggcgacaaaaccgcttccggcgacgcttccgattttgtgagttgcctggttggcgtcaatcccacggccgcctcaattaccatcgaaccggtagatacgtcgctgtggtatgacgtcggcggcgagcacgcggtgaaagtgaaaaaaggcgacacccttcagctcaaggtgacggcgaaagacgccagcggcaatccggtcccggatgcgccgtttgtgctcagtcgcggcgacggctatacccgccagggggaaaaacatatcgccggtagcggcgacggcatcgtttctgcggtggtcatcgacggtgaatcgctcaacgataccgccaccaaaatcggcgaactgaccggcgaggacggcagcaaaattatcaccgtcacccgcccggatacccacggtacgaaggtcgcgattacggcggcgctgtacgataacgccagcgcgacggccagcatcgacaccatctttaccgtggtcaccagccccgacagcgataaggctaaaatgtggggccatatgccggaaacggtagcggcggccaacggcgaggtatttaagcgcccgctgttatcggctgaaatcgccagcggcattacccacggcagcaatacggaaaataacgaaacctggggcagcgtgaattttgaggtggcgaaagacgcctgcggcgcgggatttgtgccctcgcttgccgatctccagtcgctgtacgacgcctggccaggcggcgccatgaatacccagcagggctggccgctggacggtaaaaactaccaggacagcaccgccgatttaagcaggacatcggaaaaccgctacgttaagtcgattaatctgcgcgacggcggcatcggttcgctgctgtgggatgaaaaactctattttgtctgcctgcaaaacgcccatccggtggcgacgcagataacgctgacttcgccgcagtataacgacagcgatggtttcgctaaagcgaaggtcggcgagacgattccggtcaccatcaccacgctggatgcccagggcaagccggtggcggacacgccggttatctttacgcgcggcgacagcattgggcgggcgaatcaggaggttaacggttcgcaggcggcagccatacagattaaccacagcgacgcgcgtaacagcggcgttgagtattacaccgctaccggcgcggacggtacgctgacgctggatatcagccaggacgggagcgctggctttaaaacgccgctgatggcgtcgatagagcacagcaacgccacaacgaccgcgccattgccggttattttcaccgtggttaccagcccggacaccccgaaggccagctactggggccatatggcggaaacgttaaccgacagcagcggcgtggcgtacaaacgtccgctgctggcgagcgagttcagcgctacgcccggcaaaacgctgaccatcgccaacggctactacgacaagggcgaaacctggggcatgataaccgtcgataaagcctggaacggcgtcagcggcggctgcgggcgcgattatctgcccagcgtcagcaacctccagacgctgtacaatacctggcctgataatgccatgcgtagccgtaacggctggccgatgaccagttcgggcaacaacaacgtcagccgctactggtgggcgggggattacgtgatatcgtcagacggcgcgcagtcgctgtacgcagcggtcaacctgtttaacgacggcaatgatgtcaaaacgacgaccagcaccacggcttactacatgctgacctgtcttgtctcggcgcgccgcgccgctgccagcctgacgctgacgctggcaggccaggatgaagccaccgggattgcgaaggcgaagaagggcgagcagattgccgccaccgtcacggtgaaagacgccgcaggccagccgatgaaaaacgtgatggtgaaaatcagccggggaacgtcgtacaatcgcgccaacagcgccgcatcggcttcaggtgccacagacgatattacgctacgtaatgtgatgccgtccggccttgcgacatccctgctggatacctccgcgaaatatctgtacgtggaaactgatgaactgggtcaggtgacatttaccctggctcaggacagtaccacaggtttaaagaccactatcagcgccgccacgatggacggcagcaacctgacggacagtaaagacgcaatctttaccgtagtgaccagcccggacagcgataaggccaaatactggggccatatgccggaaacctttaccaacagtaagggagttgaatttaagcgaccgctgctgcgcgctgaactttcttcaacagcggacacgtcgggttatacggaaaataacgagtcctggtatacctggagccgttatccgaatatgtatcaggacaccgccagcccgtgcgatcggctggggttgccgacggtaaatgatttacagacgctatataccgattatcccaatggcgcactcacgacaacgcttggcctaccggtggcatcaggaaaatattggggggcgggtaactcagtaccggatgccacgcactcagacagtcagttccagtatgtcagactcagcgataataatacgctgacaaccaaagccaataccgccacggcgcagctttgtctggcaaagcgccgggacttgtcgatagaactcacctccagcgccatggatccggataaaggcgctccagtggcgaagaagggcgagagtctgccgttgaccgtcactgtgagggatggttctggcacgccgcagcccaataccgctatccgtttgggacgaacgctttcgatagaccgggcgggtgtcgttgatggcagttccggcggaggcatggtactcacatcggttgcgccgtctacgggctcaatgacgtttaactgcacggtatcttcgtgcacaagttattggtatggcattacggatgaggatggtaaagcgcaactcgaagtgacgcaggatgactcccgtggcctgagaacaccgctgcaggcgatgcttgtcgacgatccgctgacagttagcaatatggacgtcattttcaccgtcattaccagcccggacagcgataaagccaaatactggggacacatgccggaaaccgtgaccaacagcgcgggcgtgaagttccgacgtccgctgctggcggcggagatgacgtcgaatagcggtacttacctggttaacaatgaaacatggcccttagtcaccgcagcgaacactgaaaaagcgggcgcaaccggctgtgatgtcgaataccagtcgttgtcaggcgatctgcaaacgttgtatggcgacaatcctgacggcgcaatcggtacaaactacggctggccggtggcggggaacaaattctggtgggcggcggatcgtgcgccgaataccggatattaccaatttataaacctgaatagcggcgataaaggcaccgccagttcatcgactgccaccggcgctcaggtgtgtctggtcgagccgcgtacttctactcctgccagtattacgctgacctcgacggcgatggacggcgcgaaaaacgcggcggtagtggagaagggaagcgcgatgccgttaacggtgacggtaaaagatagcagcggtaacccggtcgccaacgtcggttttacgttgtcacgtggcgattcgaaaaatcgggcaggtacggtggtaacggatggcgacgtggcagcggatgccggagcagacgatctcatgcttaaagcgctgacacccgcaagcgccagccaaagtatgaccaccaccgggattgtctttaccggcactaccggcagcgacggtacggcaacgtttacgcttaatcaggataaaagcctgggactgaaaacgccactcacggtgaaactgacggacaatacgactcttcacgcatcactggatgtgatttttatggtacttaccagtccggatacggataaagcgttgttctggggaaatatggcggatacgacatccgttaacggaaaaacgctgcatcgtccgtggcttcaggctgagctgctgtcaggcgtgacgccagtatttaccaacggagtgcatacaaataacgagtactgggcgatggcgcatacggtggacaacactaaatgggatattgccaagcagtgcggtagccttagcaaagcaccggataataacgacctgttgacgctgtatcattccattagctcgttaggctggccgacgcagggctacccctatttatctaaatcaacctcgagcggcggcatgtattgcggcgtggatgagaataccaggaatcaaaactgcgccattaagccggcaagttcagcaggttatgcgacgtgcgtggattaa

SEQ ID NO: 388788 - DNA, 249 bp, Salmonella enterica
atgaaaggtgcattaggcaaaaaggaactgctggcggtggtgccgttatcaatgagcacaatcgatcgcctggagaagaacggccagttccctaagcgatggtatatcacggacaagcgtgcaacgtggaccaaggaagaggttgaaatgtggcttgataaaagaagagatgaaagtccagaggaattcgaagggaaaaaaccacctgttgagcagcgaaagtttcgcccagtaagtaacgccgcatga

SEQ ID NO: 388789 - DNA, 246 bp, Salmonella enterica
atgagcaatacagcaaaacttcaactcggattctctccgttatcaaaaaccatcatgctcgcaaaaatgcgcgatgtggaaggtggccgcctgcgcgtcggtaatgatcgtggtcgtgatgttaccaatgaggctgcgcagctagtgtggcagcttgtcatggcggaaggtggtgaaatcggctgggagcttgatgacggtttacgcatggtgctgaaagctgagaagcaggaggccgccaaatga

SEQ ID NO: 388790 - DNA, 231 bp, Salmonella enterica
atgtcaaataggacatggttcgcggtgttggatattccaggcatggaaaaacttgttaaccagcaacataccaatgacccgctcgatgtgactccagccaaagcgaaaaagatggctgacatcgtagaagcatggataccacctgaaggatggtccggtgacatggatgaaaaaatgaagggatatatcgtcgaatttcttcgcggttgcaacggattcaggagccactaa

SEQ ID NO: 388791 - DNA, 708 bp, Salmonella enterica
atgaccactattaccaaagaacagggacaaaaaataattgatgctgccgacgaggtcatcactgcacttgctggtactaacgaggatgtacacccggacaacagccaagagatgatccggttgtacgatgacctgaatgaccactacgccccgccagaagttgtgcgcgagctggcgcgtatcgcgttggtatcgcttaccgctgaacctgtggcgtacaaccaagtgcagcgcgacatgatgaaggacatcatcgtccgtaaactcggcagcaatcttctcggccataaactaatgatggccgatattcatgcagtaacaatggcattgattcaagcgggattcagaaccgccccgctagcgtcagaacgcgaacgtattcgccgtgagcatgccgagtggtcagataagacgttcggcgatgttggccctataggtccactgaaacatctctcgaaagaagcacttgaggccgctgccgacccatcagacccgcttgagtgggctgatatgcaattcctgttgtgggatgcgcaacgccgtgccggtattacagatgagcagattacccaggcgatgattgaaaagttggcgataaacaagtcccgccagtggccggagccgaaagacggtgagccgcggctgcatatcaaagagcagccagtgccggtagtgccgcccgccatgctcaatggaggtaaattgtga

SEQ ID NO: 388792 - DNA, 378 bp, Salmonella enterica
atgagtaaattcaccacccccgcgattctggagatgctggagcactacaggtggcgcgtctatgaaccgtttgagttttacctgagcgatgacaacagcgatgttattgaggtaccggctggtttcgtcaccgacctcgccaccatcccgcgtatcttctggacaattcttccgcctgacggcaaatacgccaaagcggccatcattcacgattacctttacgacaacgcgctacgaacaaaaaaagaagccgacaaaatcttcctcgacgggatgacggtgctgggtgtgccgaagtggaagagaacggtaatgtattgggctgtgagattatttggtagaggcatgtacgatacaagacgcgattactgtaattaa

SEQ ID NO: 388793 - DNA, 2328 bp, Salmonella enterica
atgacggtctcaactgaagttgaccataacgactacatcgggaacggggtcacaacttcattcccttataccttccgaatttttaagaagtctgatctggttgtgcaggttgcagacctgagcgagaacatcacagaattagtccttgatactgattacaccgttactggtgcgggagagtacacaggagggaatgtaatactgtcaacgccactgacaagtggataccaaatctcaatttcacgtgagcttccagttacacaggaaacagatcttcgaaatcagggtaagttcttcgcagaagtgcatgaggatgcttttgataaactgactatgctgattcagcaatgcttcggtggtttacgtctttcgcttcgccggccttcattcgttgctaacttctatgatgcgatgggctactacatccgaaaccttcgcgacccgtcacgacctcaggatgccgccaccaaaaattatgtagatagcgtagctaataccaatctaagccacacactgagaactcctgaagcaatcccttcattgcccgggatagaacaacgtaaaaataaaattgtcgcgatgaatgatagtggcgatccgataatggttcttcctgagtctggttccgctgctgatgtgctgatagaactggcaaagccaacaggtgctgaattaataggaactctttctggtaaatcagttcagcaagagttgatgataaagacatcctcattcccaactttacaggatgctgctaactatgctgtaaacgggataattgttgatgatgattatcattttactgacggagaaactgttgattttggtggaaaggttttaaccattgaatgcaaagctaagtttatcggtgatggaaatcttacatttaccaatcttggagatggttctttagtaaattcaccatacatggaaagtgccacaaccccttggatgattttcccatgggatgaggatgaaaactggattactgatgccgcatcagttgttgcaacgctgacacaaaccagggataaaggttatcaaccaactgtaaacgactacatcaaatttcctggaattgaatcacttcttcctaactatgcaaagaatcaaggaataagttcaacattacgtattttcgaatgtacaggagttaatgtagaaaatgcatctgggtctgtagcatgctatctttttgttggatgtaatcattgtaaaatgattgaaccagattcgatctttggcggttatgatggagtaataacttttgagaatttgtcaggaaacaaaggtattggaaactattgtattggtggcaggacaaattatggttcagtaagctccgtgcaatttctaaggaatgatggtggaaatgggcacgatggtggcgttataggatttacttcttatcgacctggtgagtcaggtataaaaacatggcaaggaaccgtgggttggacttcagccagatgctataatcttcagttccgtaaatcattatccatatctactgtatgggatggatttgaccttggcgcagacatcggcaatgaaacagacagacctggagacttccctttatctgagtatcctgttcatcaattaccaaccaatcatttggttgatgaccttgtagctattggctcactaggtgttggcataggaatggatggtaaaggtggctatgtatcaaacatattgatgcaagattgcgcaggcgctggcggtctatggtatgcatatggtaaaacattcactaatgtctctgtcatcgacacaaatactctgaacttcaatgccaaccagttattcatacaaggcgattgtattgttaatgggttgcgtttagttggtataaagccaacgccatcaaatggattgatagtcgacgcacccaacactacaatctctggtattactggtaatattgacagtagcagggttaatgctgctaacattgtcgacccaatgcttggcaattccaggattaacagttatcaagatactggttcattagacatcagactccatcatctgagcactacaattgacgctttaagtcttaaaacacattcaaatggcaatggtagtggatcatcatggtcgtctttaggggcagcgtctggtagtgttagtgatgccgtatcaataaaggttaactacaaagacaacaggtcatctgaaatacctttcagcccaaccgtcgttagcgatagcgcagtaaaagataactcttgcttcgttccatactgggaaggaagctcactaaaagcacttgtcaagaaagctgatggttctttagttagaattacactagcaacagtgtag

SEQ ID NO: 388794 - DNA, 1077 bp, Salmonella enterica
atgttgctactgaacccaacttcgacgccatttatgggaagacctcgcaagaatccgaaagacagccaattgccctcacgtgttaccagaaataagtacagttacgtctggaaaccaaagggaacaaaactcagcataacactgggaaaaattagtgataccagcatgtctaagctctggcaacgctatgaagaagaaaaggcaaaacgtcatgatgtgatgacgttcgcgaagttatggtcgaagtttctggatagcccaacattcactgacttatcagccagaacacagactgactatcgccaacaccagaaaacactgctggctgtgttcggcaagatgagggcagacgacatcagaatcgagcaggtccgcatatatatggataaacgtgggcttaccagcaaaaaccaggctaatcaggaaatatccagtatgtcacgcgtttatgggtggggctttgaaagaggctatgtgaaaggaaacccctgcaaaggggttcgtaaatttacgctaaaaccacgagaggtatatattactgacgaagaataccaggctatttatcttgaggcggcgccagctctgcgagttgggatggagatcgcttatttgtgcgcagctcgcgtttctgacgttctctcactgcgctggtctcaggtcagcgacgaagggatttttattcaacagggcaaaaccggcacaaaacagataaaagcatggacagatcgtttacatgatgccattgagcttgccagaacgttaggaggggtaactactgtaatttgcagtagtaaaggtacgaaatattcaaaaagcggatttaatgatttatgggagactgcacgagaatcggcgggaataacccttggcagaaaacttaactgtactttccacgatcttaaggctaaagggatttctgactatgaaggttcaagtaaagaaaaacagctattctctggacataaaaccgaaagtcaggtactggtttacgacagaaaagtgaaggtttctcctacactcgacagaccatcactggcacatccggattgtgatcgtgatgggaaatataccaagtga

SEQ ID NO: 388795 - DNA, 180 bp, Salmonella enterica
atgtacaaaataaccgccatcgtcaaaaaaccaggtaattccccgacaaactgggttcgtttttctgacaaaaaaatgaataaagccgagtgtgaaaaaatgctgtcgggcagaactgaagccggaaaatctcgcgaagagaaagtcacgctggaggattttaaatgtattaaggaataa

SEQ ID NO: 388796 - DNA, 315 bp, Salmonella enterica
atgaacaaaatcactgcattacccgtagagcgcgaccgggaaggttactggattcatccggcatacaaccaactttgcgttggccgtgaatttatatctacggacgagcttaatacctggctggaagctaacggtctggaatggaaaatctcttaccgggatgacgaggaaattgatcctgacgttgacggatacgacagttctgcctggcaaccagaagcccctgaaggtgacggctggtttgttggttccattcacgacaccgaagacggcgcggtctgtatctggctacgaaataaaggtggtacagaatga

SEQ ID NO: 388797 - DNA, 810 bp, Salmonella enterica
atgaacctcgaatcaatcgctaaatacttcgcgcctaaatcaccgatgtacagtgactcctcgagggcgactgtcaccgactgcctgaccggaactgacgtgatggccgcacttgggctggttaacgcgaagtgcggatttggctttgatctctacctggcaaagattggcataagtagcccagaccgggcgatggaggcgctctatgattcatctgttgagatatcccaacgcttcaaatcagttaaagaactcgatgaaaaagttcgccgacgcgtgctcgaaattatgtgtgcttttgcataccaggattatgcgcgcagcgcggccagtgtgcgcagatgtgactgctgcgatggtagcggctttaccgaagtcgaagttttcaccaataaaattcagtacccggacggaaagccaccaaaatgggcaaaagttaccaagggcgttttcccctcgtactgggaggagtggaaatcagttcgggagagcgcgcgggttctgtgcaaagcatgcaacggcaaaggcgttatcagtaatgcctgtcgttgccacggtaaagggatggtgctggataaggagaaaacagacaagcagggcgcgccggttatgaaagtttgcgaccggtgcacggggagaggttatgcccgacttaaattctccaatgttttggaaggcgttcgtacggtatgggatgtaaaaaaaaccactgcttacgatcacgtgcaaccactgtttgaattgctggtggaggagtgtcacaggcaagaaagttatgcagacagcgctttaaagtcagttacgaagtag

SEQ ID NO: 388798 - DNA, 207 bp, Salmonella enterica
atgacgatgaaatactcctggttccatcatcacgactgcacaaccgagcaggccgatgagctggtggctcggtatcgggcacgcggtgtcaaaactgagcgtagcctcaatccggattacaccacctggacagttagcgcgtttcttcctacctccagcaaaccggccaggccggataaccgctggcgtaaccgggtctgggggtga

SEQ ID NO: 388799 - DNA, 963 bp, Salmonella enterica
atgccaatcacatcagctggaacttatgcccgggcgtttaaagcagaaactaatcttcatcacgccgcagggaattatgagaatacattaacaacaaagtttgcgaaaggcatcgtaggtgtgctcacgttagggattggatatggcctttttcgattaattgaagattaccgtaatgtcaggcctaaagtggctgagttttgtgctaatgcagagaaaattcatgcaaatctcgcagtacaggtcgccttacaaggtttaggtacttttgtagaagtttaccttaatgatggtcgtcttttaacgttacacgaatttacttcctggccgagcggagaaagacatgtcagcatatccgatggcgaacacactgaagaaattgtcggtaccttccatgacatttgtgtaaaactggaaaaagactttgaaatgatgccggggctttatgacctcagtgatcattatagaacgcttacctcattgtcagatatgagtgtctgcaaaatagcgcctgttattaacttctcagagtccagtgctcatccgaacagaatatatgacagtaacatgcgtattatacaccaacgactgagccagacggttgccgaagggagtataaatgtgagcatttcgttacataaggggctggacagcgtgggggaagttgagtttatagaagcgccaagccggaatagcgtactggttaaaaaaaatgaaagtaaaatagtagttaacgatggactactcaatctttgtcgggagtttgaaacgatatttcatatgcttgatcctaatgatcgatttaaatccgttgacgaatggattgagctattgactgacccttgtgaaatagcagatgaggtaaacatagcgggggctatctctccggaagaaataatggaggactattttagcaacgagtcgatcccaccgttgaagttcgttgatgaccatttccgctaa

SEQ ID NO: 388800 - DNA, 444 bp, Salmonella enterica
atgacaatcgacaaacaggcgctgcgacagatagcagaaagcgttgatcgcgaagaatgggacgttctcgataatggcgatgctgattatcaggttatcgtcagcgggagtcttgaaagaggagcaacctaccgttcttaccagccagttactaatgaaatatcgaacaaaaaaatagcggcttttatcgctgcatttaaccctaaagtcgcgctggcgctgctggatgagctggagagcaaacaaactttccagcatgcatttttccgccaatccctcatgtacgacgtcgtagctgaggcatacgaagaggccaaagagcagattgccaaagacgttgagataaaagccagactttgccgagagagcaatagcctgcatgacagactgcgggccgcagaacgcagcatagccgaactggaaagtaaaaacggttacctgtga

SEQ ID NO: 388801 - DNA, 600 bp, Salmonella enterica
atgaacgagcgtggaatgatttttaacgctgagatggtgcgggcaattctcgacggtcggaagacgcagacgcggcgtccggttaagttcccattaatcgataagaacatggggtgtgagttagcaggcaacgaattggccggtgagctggcggcgcacaactactggaatagcccttatggtaagccaggcgatcgcatctgggtgcgggaaacatttcgtgtccatagccgggcaacggatgtcgccacgctggtctaccgggccagtgtccgaaactcctggactgagcaaactcatcgcgttcccgttgcggtttgcaatacaccggccacaccagagaagtggacgccgtctattcatatgccgcgctgggcaagccgtatcacgctggagattactggagttcgagttgagcgcctcaactcaattactgaatccgacgccgaagcagagggagtaactgatacagggtttggtgatttgctcgttgatggttaccgatatctatggaaatacatctacggcgaagagtcctgggcggctaacccctgggtgtgggtgattgaatttaaacgcgttgaaggcggtgcagcatga

SEQ ID NO: 388802 - DNA, 687 bp, Salmonella enterica
atgaaaaacattgctgcgcagatggttaattttgaccgtgagcagatgcgccgtattgccaacaacatgccggaacagcatgacgataaaccgcaagttgagcaggttgctaaggtcatcaacaacgtgttcagtcagcttatggccgcgttccctgcaaccacagctaatcgcagccaggccgagatgaacgaaatccggcgccagtgggttttggctttccgtgagaacggcatcaccaccatggagcaagttgcggccggaatgcgtgtcgcccgccgtcaggaacgtccatttctgccatctccgggacagtttgtagcgtggtgcagggaagggcgttgtgtgctgggcgtcacggttgctgacgtcatggctgagtactggaagtggcagaaactggttttccgttacacgaacagtgagaaatatccgtggcccaaggatgttctgtatcacatctgtctcgaactgcgtcaccgtagcaccgaaggtcaattgagcagaaaggagcttgagcgcgaagctgtggaggtactggacatgtgggaacgccgcgtgttgtcaggtaaacccataccgcctgttcgtcgcgctttagccgcgccgtcgcgggatcgcggtccaacgccagccgagatgttaatggcgaaatataaacaacgcaaagacgccggtctgatttaa

SEQ ID NO: 388803 - DNA, 240 bp, Salmonella enterica
atgcaagaaaccattcaacaaaaaatcattgcactttgtggtagtcagtcagagcttgcgcgtcggcttggtaaaaattcccagacagtatctgtgtggtttcgctctcaggtagctagcacagaggttattaatgcgagtcgtgcacttgactggaaagtcactccacacgaactgcgccctgatctctacccaaacccaacagatggcttaccaagccaagaggcatcagccaaataa

SEQ ID NO: 388804 - DNA, 429 bp, Salmonella enterica
atgcttagctattggctagatttggatatgaacatgaaattcgaagagcgattacaaaaagccattgacgatgccggaatatctcaatccgaactgggacgacgcattggagtaaactcccaaacagtcagccactggtgtaatgctggaatttttccacgcaaagaaaaactggttcttctgccagaggctctaggtaagccgctgtattggttctttatgaatgatgatgaagatgagtatctcgcatccattacagccagcaaaaccgtactgaatcaaaaacaaagagcccttctggaagtttttgatcaactgccagaaagtgagcaggataggttcattgatttagcaaaaaccaggttagaagagctggacgcttttatggctgaatttctccgtcgcagaaaaatagaacctccaacctaa

SEQ ID NO: 388805 - DNA, 249 bp, Salmonella enterica; identical to SEQ ID NO: 376948

SEQ ID NO: 388806 - DNA, 144 bp, Salmonella enterica
atgattacgggaacctcaaattacgacgaagtgccgacgataccctgcaaaatctgcggcggttatttcaaagccgatgatccagaaaatcacaaatgcgagggccagcccaatgagcaacatcgacaaacaagcgctgcgtga

SEQ ID NO: 388807 - DNA, 870 bp, Salmonella enterica
atgaattcagcagatttatcgaagattcttgaagaacacaaagtgtggattacctcaatgcgtgagagcggatcgagagccgacctgtgcggtgccaacctgcgcggtgccaacctgcgcggtgccgacctgcgcggtgccaacctgcgcggtgccaacctgtgcgatgccaacctgcgcggtgccaacctgtgcggtgccaacctgcgcggtgccaacctgtgcggtgccaacctgcgcggtgccgacctgcgcggtgccaacctgcgcggtgccgacctgcgcggtgccaacctgtgcgatgccgacctgtgcggtgccaacctgcgcggtgccaacctgcgcggtgccaacctgcgcggtgccaacctgtgcgatgccaacctgcgcggtgccaacctgtgcggtgccaacctgcgcggtgccaacctgtgcggtgccaacctgcgcggtgccgacctgcgcggtgccaacctgcgcggtgccgacctgcgcggtgccaacctgtgcgatgccgacctgtgcggtgccaacctgcgcggtgccaacctgcgcggtgccaacctgcgcggtgccaacctgtgcgatgccaacctgcgcggtgccaacctgtgcgatgccgacctgcctgatctcactttcgtaatcctgggtgagaaatacttcataagtataacgaacggtgaatatgtacgagcagggtgccagaaccacacagttgaggaatggagaaaatatagtaagcaggaaattactgagatggatggtcgtaaagctctaaaattttatccacgattgctttcgataattgacttttacctcggggccggagaatggcctgattgggttaaaagcgatggggaggagtga

SEQ ID NO: 388808 - DNA, 423 bp, Salmonella enterica
atggcgactgaaccaaaagctggtcgcccctctgattatatgccggaggtggctgacgatatctgctcgttgctttcttctggcgaaagtttgctgaaagtatgtaagcgtcctggtatgccggataagtccactgttttccgctggttggcaaagcatgaggattttcgcgacaagtacgcgaaggcaactgaggcacgagctgattctattttcgaagagatattcgaaattgctgacaatgcgattccagatgctgctgaggtggcaaaggcaagacttcgcgttgatacccgcaaatgggcgctggctcgaatgaatccacgcaagtacggcgacaaggtcactaatgaacttgttggtaaagacggcggcgccatccagattgaaacatcacctatgagcactctattcggaaaatga

SEQ ID NO: 388809 - DNA, 1413 bp, Salmonella enterica
atgacaacgattaaccctatcttccaaccgttcatcgaggcgtatcgttacaaagtcgccaagggcggtcgaggtagcggtaagtcgtgggcaatagctcgcttgcttatcgaggcatctcgccgtcaacctgtacgcatactttgcgctcgcgagttgcagaacagcatcagcgactcggtaatccgattgcttgaggacacgatagagcgcgaagggtatgcggctgagttcgaaatacagcgctcaatgattcggcatctcggcactaatgctgaattcatgttctacggcatcaagaacaacccgacgaagattaaatcccttgaggggatagacatctgctgggtagaagaggctgaggcggtaacgaaggagtcatgggatatcctgattccaaccatccgaaagcctaactctgaaatctgggtcagtttcaacccgaagaacattcttgacgatacctatcagcgcttcgttgtcgaccatccggatgatatctgtctgctgacggttaactacacagacaatccacactttcctgaagttctccggttggagatggaggagtgcaagcggcgcaatccaactctctatcgtcacatctggctaggtgagccggtaagcgcaagtgatatggcaataatcagtcgcgaatggctggaagcagctacagatgcgcacaagcgccttggatggaaagcgagaggtgcagttatagcagctcacgacccatcagacacagggccggatgccaaaggctatgcaatgcgtcacggttcagtggttaagcggatagctgaaggcacattgatggatgtcaatgaaggtgctgactgggctactgatttggcaatcggtgacaacgcagatcacttcctgtttgacggtgacggattaggcgccggcctgcgtcggcagataacggattcgttcagcggcaagaaagtcaccgtgacgatgttcaagggtagcgaatcgccattcgatgaagacgctccatatcaggctggagcatgggctgatgaagtggtgcagggtgacaacatccgcactatcggcgatgtattccgaaataagcgagcgcagttctactacaccctcgctgacaggctctatctgacataccgagcagttgagcatggcgaatacgcagaccctgacgaaatgttgagctttgacaaggaatctatcggcgagaagatgctcgaaaagctattcgccgaactcactcagatacagcgcaaatttaacggtaatggcaagcttgagctcatgactaaggtcgaaatgaagcagaagcttggtattccatcccctaacctggcagatgcactaatgatgtgcatgcactgcccggcattagctccagaagaaacggacatctacgttccatcatcctccggttggtaa

SEQ ID NO: 388810 - DNA, 2091 bp, Salmonella enterica
atgctcaggtttgaccgcgcctatacgccgcagcaagacgtgcgcgaaaagtgcattgaggctacgcgattcgctcgtgtccctggcggtcaatgggaaggggcaacggcagcgggaactaagcttgatgaccggttcgagaagtacccaaagtttgagattaacaaagtagcgacagagcttaaccgtatcatcgccgaataccgaaacaaccgcatcaccgttaagtttcgccctggtgacaaagaagccagtgaagagttagcaaataagctgaatggcctgttccgcgctgactacgaagagactggtggtggagaggcttgcgataacgcatttgacgacgccgcaacgggtggctttggctgcttccgcttaacgtcgatgctagtcaacgaatacgacccaatggatgagcgccagcgcattgccattgaaccggtatacgacccttcacgctcagtatggttcgatcctgatgcgaagaagtacgacaagtcagacgctctgtgggcgttctgcatgtactcactttctccagagaagtacgaagctgagtatggaaagacacctcctgcatcgctagatgtaaccacgatgaccagttgggaatatgactggtttgagcctgaagtggtttatatcgccaaatattacgaagtacgcaaagagtctgtagatgtcatcagttatcgccagccaatcactggcgagattgctacctacgacagcgaccagattgaagatatcgaagatgagttggcacttgctggattccaggaggttgcgcgtcgctccgttaaacgccgccgtgtttatgtatcagtggtggatggacagaactttcttgagaaacctcgccgaatccctggcgagcatatcccgcttatcccggtatatgggaaacgctggttcatcgacgacattgagcgcgtagaaggtcacattgcaaaagcgatggacccgcagcgcctctacaaccttcaggtttcgatgctcgcagactcagcagcacaagacccgggtcaggttcctatctttgaccctgagcaggtgagggggcttgagaagcattgggaggatcgaggcaagaagcgacctgcattcttagttgctagagccccaagagacaaggctggaaatccaattggtccagcggcgccaggttcatttactccagcgcctcagttgagtccggcaattgcaacaatgcttcagctaaccagtgcagacattcaggaagtaaccggtagcagccaggcaatgcagcagatgcctagcaacatcgcacaggaaacggttaacaacctgatgaaccgcgcagatatggcctcgttcatctacctggacaatatggctaagagcctgaagcgcgcaggcgaagtctggttatccatggctcgagaggtatacggttcggaacgtgaggttcgtgtcgttaacgaggatgggacagacgacatcgcgctaatgaatgctcaggtcgtcgatagccagacagggcgagtggttgcactgaatgacctctcaacaggtcgctacgatgtcaccgtggatgttggcccaagctatacggcgagacgtgacgcaaccgtatcagtactgacaaatgtacttagcacgatgttaccgaacgacccaatgcgccctgctattcaggggatcatcctggataacatcgacggtgaaggcctggacgacttcaaagagtacaaccgcaatcagttgttaacctctggcatcgttaagccgcgcaatgagaaagagcagcagattgtcatgcaggctcagcaggcagcagctaaccagcaaaatcctgaaatggttctcgctcaggctcagatggttgcggcgcaggctgaagtacaaaaagcaacgaatgaaacggcacaaactcaaatcaaggcattcaccgcacaacaggatgcaatggagagtcaggccaataccgtttacaagctggctcaggccagaaacatcgacgacaaagccgtcatggaggctatccgcctgcttaaagacgtgtctgagtcgcaacaatcacaaatccccacatcaccacagtcaccggcagacttaatgccgagttaa

SEQ ID NO: 388811 - DNA, 894 bp, Salmonella enterica
atggaaaacgaactgatcatcgacggtcaggttattgacttgtctgaaaaacaggaaacagtcgaagaagtaaccactgaagaacaaaagcagcctgaggagcagaaccgggcagaaactgagaacgaggtggaagctaacgataagaccgaagagcagccagatccggatgaatactcactgcaaatcggtgatgaggaaataccgctgacggaagaggatgacgatcacgttgatggtcagcctgcgccgcagtgggtgaaggatttacgcaaagggtttaaagagacacaaaaagaaaaccgtgaactgcgacgccagcttgaggaagctctagccaagccagcggaacagcaaccaacacaaacacaaacagatgctattccaccaaaacctacgcttgagtcgtgtgactacgatgaacaggcgtttgaaacagcactgactgactggcatgagaaaaagagccgtgccgaacaacagaaacagcagcagcaacgtcagcggcaagaggttatacagcgatttaagcagcgccttgagaagcataacgaacgtgcgaccaggcttccggttaaagactatcgggagactgaggaaattgttcgccgtgaacttccggccattcagcaggaaatcctgatccatgcagcagacgagggttctgaactgattgcctacgcactcgggaagaaccaacaactacgccagcgtgtagccgctgagacagacccaattcgcgcagcattcctcttaggccagattagtaagcaagttagccttgcaccgaagcctaagaaagccccaaaaccagagccggaagttcgtggtggcggtgctgatgcgaaacaagacgacttcaacaaactctgccccggcgcaacaatcgaatag

SEQ ID NO: 388812 - DNA, 1278 bp, Salmonella enterica
atggctaccaataacaaactagacagcaacgtcagtcaaattgttctgaaaaaattcctgccgggctttatgtccgaccttgttctcgctaaaaccgtagaccgtcagttactggcaggtgaaatcaactccagcactggcgacagcgttagctttaaacgtccgcatcaattcgcatcagtgcgaacccctactggtgacatttccggtcaggccaagaacaacctgatttccggtaaagccacaggcaaagtcggcaactacatcaccgttgccgtcgagtatgggcaacttgaagaagccatcaaactgaaccaactggacgagattctcgccccggttcgtcagcgaatcgtcacagatctggaaactgaactcgccaaattcatgatgaacaatggcgcgctgtcacttggcactccgaacaccccgatcagcaaatggtctgacgtggctcaaaccgcttcattcctgaaagacttaggcgtgaaagagggtgaaaactacgctgttatggacccatggtctgcgcagcgcctggctgatgcccagtccggcctgcatggtaatgatcaactgattcgttcagcgtgggaagatgcgcagatttcaggaaacttcggcggtatccgtgcgctgatgtccaacggccttgcttcgcgaactcagggcgctttcggcggtacgctgactgtctccacaactccaaccgttacttatgacgcggtgaaagatacctaccagttcagcgtaaccctgactggcgcgacagcatctgtcactggcttcctgaaagctggcgatcagattaagttcacaagcacctactggctgcagcagcagaccaagcaggctttgtataacggttctgcaccaatcagctttacggctaccgtactggctgacgccaattctacatctggcggtgctgtaactgtgactctttccggtgttccaatttacgacaccactaacccgcagtacaacgcagtgagccgggccgtgacttctggtgatgaggtaacagtagttggtaccgcagggcagaccatgaagccgaacctgttctataacaaattcttctgtggactgggtaccattccgctgccgaagttgaacagcatcgactctgcggtcgccacttacgaaggcttttctatccgcgttcacaagtactctgacggcgacgccaacgtgcagaaaatgcgtttcgacctgctgccggcctatgtttgctacaaccctcacatgggcgggcaatttttcggcaatccataa

SEQ ID NO: 388813 - DNA, 186 bp, Salmonella enterica
atggatcgcatgagtgtatttcttaccgctgataacgaagccggttatgttcaggcagttattgcagaaaaagacttcccgatttacgaaaaactcggcttcgttgcatcagtagacgacttaaaaccagcaaccaagcgtggacgcaaggcggcagataatggcgacgactctaacaaagggtga

SEQ ID NO: 388814 - DNA, 483 bp, Salmonella enterica
atggcgacgactctaacaaagggtgaaatcgtactgtttgccctgcgtaagttcgcggtggcatccaacgcaacactgactgacgtagaacctcaatcagtagaggacggtgttgtcgatttagaagatatgatggccgagtggctaattaaccctggtgaaatcgggtacattttctctgctgatgacgaagagccgctacctgatgatgactctggtctgccacgcaaatacaagcatgctgttggctaccaacttcttctccgcatgatgtcggattatggcattgagccaacgccacgaatcgagacaaacgcgtccaaggcatacgacgctctattgaccgacacgttggtcgttccatcaatgcgccgccgcggagactttcctgtcggtcagggtaacaagtatgacgtgttcacatctgatcgctattaccctggcgatctgcctccgattgatggcgatattccaaacccatag

SEQ ID NO: 388815 - DNA, 1296 bp, Salmonella enterica
atggctacttggcaaggaacaaacggcggattgttggctggtatcggcggcgtcaactcaaacgctccgagcgtaaatgacatcggaaatacgcttcagcttatcaggcagaacaatgatattgagcgttcaggcgctaacaatgttggactgacggctttgcaaggtctttcaggtattgcgggtgtttttcagcaggaaaagcaggctcagcggcagaaagaatttcagcaggcgtacgctaatgcttatgcgtctggtgatcgtggtgctttgcgtcagttggctactcaatatccagaccagattgaatctgttcgtaaaggcatgggattcattgatgaagaccagcgcaattccatcggcaccttagcggctggcgcacgccttgcgtcatcgtctccagaagcaatgcaatcatggctgcaaaacaacgccaaggaactgactcgcgtcggtgttgaccctaataacgttgttcagatgtatcagcagaatccttcaggatttggtgagtttgttgatcaccttgggatggctgcgcttggtccgattgattacttcaatgttcaggacaaaatggctggtcgtgaaattgaccgaggcaggctggcagagacaatccgcagcaatcaggctggagaagctcttcagcaacgcgggcaagatatcactgtacgcgggcaaaacatcagcgctcagaacgcggcgctatcgcgtgaaattcagagagcagaattacaggataaggttctcgatcgtcaaatcgccagagagactaaccagataaaactggatgagcttaagcagaaacaagctgatgttcgtcagaaggcagaaatagcaaaggctgacagacaggcctccgctcagggcgcagttgatacgttcagcactgcgcttgattctctcaacgagatagagcaaagccccggcctttcaaaagcagtaggcattcgctcagcgtttccgacagttcctggttctgatgcagctaactttgaagcaaggctcgacacctttaaagctcaaactttccttcctatggtgcagtccctgaaggggatgggtgctctctcggatgctgagggtaaaaaattatccgatgcagttggtgctctaagtcccaaaatgagtgaaaaagcttttcgtgactctatcggaaagattcgaaatcagcttgaaagtaagttaagcactgttaaaaaacagtttgattatcaggagccggtacagaatgcgccagtacaacaatctcctgctggcagcaacttttcttcactatggggtgattaa

SEQ ID NO: 388816 - DNA, 1998 bp, Salmonella enterica
atggctaaagcatggaaagatgttatcgcctctccacagtatcaggcgttagcaccagaacaaaaagcgcaggctcaggagcaatacttcaatgaagtcgtggccccgcaagccggagaaaatgcagagcaggctaagcaagctttctatgctgcctatccattgccatctgtgcagccagtggagacacagcaaccagtagcacagcaacaaccacagcaaagtggatttatgtctgatcttggcgaagcagtaaaagagactggtcgcggactggtgcaggctggtgtaaacgtggcaaacatacctgcatcagttaccgatgctgtgacaagcgcggcggcatgggctggcggtaaactcggcattggcgatgggacatatcaaccagcgccacgagtaacaacgcagggattagagcaggactttggccttcagcaaggctcgctgactccacaaacgacagaaggaatggtatttgctgaggcattaccttacctcactcctgctggcgttgagagagcggcaacacaggcaccaacacttgctggtcgaattgctcagggggcaacacgacttctcgcagaaaacgcagtcggatcacttgctgcaaacagtacgaaagatgatgcggaagcactcgccaccgatttaggcgttggcgttctggctggcggcgctattaacgctgtaggacgtggattaggtgctgcttatcgtggcgttcgtggtgcgatagcaccagaagcgcaacaggctatcagatttgcagagcgtgaaggattgcctctgcacaccaccgacctgttacaacctacttcccgtgtcggaaaaatggcgcagacgacagcagaaaatatcccactggctggcacaagcggagtgagagcaacgcagcaggaagcaagaagccagttggcgcagagatttgctgataaattcggcgagtacgatccggtagttgttattgacagccttaaagcgaaaacatcaggaattcgtcgtgccgcagggaaccgtcttgagaaggttaagaatgcaatggcgggagtaaacattcagcctgcacgagcaattcagcagattgatactgagatatctaacctccagaagcttggtaaggtcgctgataacgagacgatttcaaaacttcagtcatatcgtgatgagcttgttcgcaatactggtcctgatggtccggtaaatctggatttgaagcaattaagcgatctgcgcagccagttcagaatggacgtgaagggtgagcgaccagtgttaccaaaccgttcagatgccgccattcagcgcgtttacaaggcgatgaccgacgatatcaatggtgccattggtcagaatcttggcaacgatactctccgtaaatatcagcaggccaatgccgtctacgctgacgaagcggcgaaactaaagaataccaggctgaagaatgttctcatgaaaggagatctgacgccggaagttgtcaacaacatgctattcagcaagaacaaatcggaaattaagacgctgtataactcagttggtcgcgttggaagggagcaaatgcgcaacggcatcattggcaaggcgatggagaaatcaggcggatcccctgaccagttccttcgtcagcttaacatcctacaaaaccagactggcatcacatttaaaggtcaggatgctgcttacctgaaaggattgaaaaactacctgcagtccactcagcaggcagcgaaagcggcagtaacaacaccgacaggtcagcaaaccatccccttcatcatcggatatggtacagcaatgaacccggcgacaactggcgcagcagtaagctacggccttcttactcgcgcgtatgagagcgagccattcagaaatgcaatgctccgaatggcaaacactccacgcggatcaacagcgtttgagaaagccatgcagcaggcacaaaaggcaattaacgccctgactcagggggctaagtctgatgcgttgtcagaatag

SEQ ID NO: 388817 - DNA, 255 bp, Salmonella enterica
atgtatagcaaatacgacgaggcgcagtttcacttgaggcttacgcacgaattacacgctaagattaagcagcgagcgaagatgaataacaggtccatcaatgccgaaattgtggcaacgatggaggaatcgctatccaagccgtcgcctgtacgcggatatcgtgatgaagaggagcgattagcctccttaatttcagagcaggtaaaagaagtagcggctgatattctgaggaaagaaaaaacccgcagttaa

SEQ ID NO: 388818 - DNA, 1206 bp, Salmonella enterica
atgaagctaacagcccgtcagataagcactgcaaagccaacagataaaccatataagctgtctgatggtggtggtttgtatctgctggttaacccgaatggttccaggtactggcgcatgaagtaccgctattcaggcaaagaaaagctgctttccattggcgtttatcctgatgtgacgcttgcggaagcaagagacaaacgaaccaaggctaaacgtatacttgctgcgggcgatgatccatcagaagtaaaacaggccgagagagaggcaaagaatcttgcggttaataacagctttgaacttctggcgctcgaatggcatgagcataaaaagccaaactggtcttcaggctatgctgacgacattatggaatatctgagaaaagatatatttccgtatatcgggaaaaaagctataacggatatcaaaccaataaccatgctttccgtgctgaaaaaaatggaggagcgtggtgtactggataagttaaagaaaaccagacaagcctgccgtcagatatttacctatgcaatcattactggaagggctgagtttaatcccgtaacagatttagctggagcgctgaaaacgccaaagcaacaacatttcccgcatcttatgccaactcagattggccccttcattcatgctgttaatacctactcaggcagtaaagtaacccgcatcgctacgctattacttatgtataccagtgtcaggacaatcgagttaagggcttctgaatggactgagttcgacctggacaacgatttgtggcagatccccaaggaacgtatgaagatgcgccgtcctcaccttgtaccgctttcaaggcaggttaaatcgcttcttttggagctgaaatcgattaccggttgggggaaatatgttttccccgggcgtaacgatgcacacaagccaatgagtgaggctagtataaaccaggtgattaagcgcataggttttgcaggaaaggtcactggacacggattcagacacaccatgagtaccatattacatgaaaaggggttcaactctgcatggatagaagcacagctggcgcacgctgacaggaatactatccgtgggacgtacaatcatgctcagtaccttgatgggcgacgggacatgctccagtggtacgctgattatctggatgaactggcgggcaagaccgttggtaagtcatttattcacatgtag

SEQ ID NO: 388819 - DNA, 972 bp, Salmonella enterica
atggttagtgatcgtctactaaaaataaagaaatggatagggcttgatgaagctgcggaacggctttcctcaatagttgaaggaaacgttactgttttggatttgatagagcttggcttgtctcacgatctgattttgtctgttcgattgccatatggagaaaaatttgttggtcgggagatgatttacaaagaagtaccaattattaaccacttgcaagaaatgtttcttttcaggctgatgtgcgatcctaatctgaaaaatgcgagcgaaggagatttactttcagcatatgaagaagaatttaaacagtatttactggaggagttcgaaagttcgaaagagaaaatgtcggctaggtatggctctaagtatgaagatatgacgttggaatcctatcttgagaaaggtcggtttggtgattatgaatatgtgtctggccctgaatatctaaatgaagtgatttatgatctacccttgattggctctgaggttctggatcttcaaaggatatactcaactgggaaaggttatgaatcgaatgggttaataaatctgggtggaccattaataaaagatactaacgggcgattaattaatattatggaagaatttgaacgaggtaaaatcacaaaagataaagatggaaatatacgtttgttagaattggatgcaatgaactatttccccactgatgggcttccagttaatagtgaaattggtttacgccctgataatttaatagcatttgaaagaacgatcactggaacgccagaagttgaggaaatggatttcagtttcttggttggctcaatgttaagtgttataaaaaatacaaacagcaggcaaagacgctggactcaggacctattgaaagaagagttggttgaaatgtgccctaattttacccgccgtgcccttgatgattactttgcagtagccaacaaaaaatttaaagaaaaattcaattaa

SEQ ID NO: 388820 - DNA, 198 bp, Salmonella enterica
atgtctgcaacactcattcgtttgttagaagtgcaacgccgtaccggctacagcaaagcctggatctaccgccttatgagtcagggtaaattcccttcctctgtcaaaattggctctcgtgccatcgccttcgtagaaagtgaagttgatgactggattaaccagcgtatcgaagaatcacgtcaggaggttgcctga

SEQ ID NO: 388821 - DNA, 651 bp, Salmonella enterica
atgaataaattaaatgccctctccgggcaggggctcgctcaacctgaaatcggtcagagcgctaattgtcgcgagctgaagttccatgatcagacagtgattccgtatgacaatggtgacgggaaagtttgggttactgcgaagcaggccgctaagttgcttggctatgccaatgctaaatcagttactaatttatacaacagcaatgctgatgagttcacccccagcatgtcgcaggtcattgttacagtgacctcgggaaaatcaaaaggttgcggtaacttaaaaacgaagacgcgcattttctctcttcgtgggcttcacctgttgggtatgttggctgaaacacctatcgcaaaagatctgcgcaaatgggttcttgatttgatcgagagcgaagctgcctcacagtttcctgatctggcaacactcagttttaactcactaaaggatatgtccattaaagggatgatggatttcctgtccaaagctgaggaacactcgaagcgtacgaacggtactgaaggaagcctgaagctgcatcgccgcaaaaaagagaagaaagcgatcgcaaatgcagaacgtgctgcgaagcagtttattaactttacgctcgggcttgagtttgatgatggcgaggagtgtgcctga

SEQ ID NO: 388822 - DNA, 132 bp, Salmonella enterica
atggtaaaagaacccaatggctctccaccggcagaggtagagaaaaagccagagcaaatgctgccaaaatctgtgctgaaacaactcaggcagcggcaacgaaaagaatcgaaggaaaatctcgaccagtga

SEQ ID NO: 388823 - DNA, 186 bp, Salmonella enterica
atggcaacgggtactgttaacaacaagtcacagcaaaaaaccgcaagggttcctcttgaagtcctcaaagatatggaggaagtcaaagaggagcatgaaacggacgcgcagtttatggtcacagccatgcgaggcgaaattaaacgccggcagcgcaaaaagtccaaagttgattcggcggactga

SEQ ID NO: 388824 - DNA, 288 bp, Salmonella enterica
atggcatgttcacatgatacccaaactcgcccggagtttacatacctgtttctgggaaccccgtctgataaacctaacaccacgcccgttgtcctgcgcgtggaggctaacactgaacaacaagcccgttcgcatttcctgaactggaatctggtattcgccgcgcagatccgaaccaaagccccatgccgtctccagttgattgacggtggcgattacttcacctggatttttgaacaacgtgtcgatgcctgcacctccggtgttcatgaggtggcgtatgtctga

SEQ ID NO: 388825 - DNA, 162 bp, Salmonella enterica
atgtctgaactcaccagaactgatgcgcttatcgaaattgaagcactggcgtgcgcggcacagtttctgactgatacgccagccaggattgaactggcaggcgctcttatgtcgcagattgaggaaaccgctaaaaaagcgcaggaggccagcgatgactga

SEQ ID NO: 388826 - DNA, 405 bp, Salmonella enterica
atgactgacattctcgaaattatccgtccgcacgttcatctggagcgccagggaaaaaattatgtcggtctttgcccgtttcatcaggagaaaacgccgtcattcacagttgatccgtcagaacagactttctgctgtctggggtgcggtgcctgcggtgatgccggggaatttgcaaatctgatgctgacgaaagggcctggtgttgttctgaatgtaaaccttcatgtcgctccgaatttcacaggtcgcgttgtcgttcagcttaaagagggtcgtcatgtgtgtgactacccactggtgaatggtgagcatgtagccacgttgccgtcatttctggaaatggcccgcctggctggctggtctgtcacacctgaacaggggggatgcaatgcgcaacgttaa

SEQ ID NO: 388827 - DNA, 171 bp, Salmonella enterica
atgcgcaacgttaaggtactcgatgctttcaacgcactgaacaaaattcagtctcttgcagccgctgcaggattcctgacttccagtgaggaagaagaggagatgtgtttcaggctggtggaactcattgaaaggatcgcccgcgaagctgcggaggccgaccatggataa

SEQ ID NO: 388828 - DNA, 228 bp, Salmonella enterica
atggataagccacgtatttaccgaactgatggtgatgtgctgctgaacctgcaacgctcactggatctgatgaattgcgccacccgtattcttggttccggcgagaagagcatgcagatgtatgtgatgtcgctcgttgacgttgcctcacatctgacgcagctatcaacaaatgcactggatcttggcgaacagactggtgatgaaaatggggtgtgcaatgactga

SEQ ID NO: 388829 - DNA, 402 bp, Salmonella enterica
atgcactggatcttggcgaacagactggtgatgaaaatggggtgtgcaatgactgaaaattacagggaatacaccagaaggctgtgttgtaagctggcgaaggcgtatatccgccatgtcgtgcaggacagtggcagaccagtagcttacgttaatgccgacaatggtcagcggtttctggtcatgcttgaggaagcgtcaacggccgtttgtatccacaagggactggttgttccggctgagaaggaatatccgggacagacaggaaaggaatttgccatccacatgctgaatgtttgttttgacggcgacgatatcagcagtgaagggctggaagtgatgaaaagcgtgtttgctgatggtgttgcattcattctggagcaggagaaacacaatggctaa

SEQ ID NO: 388830 - DNA, 753 bp, Salmonella enterica
atggctaataaaaccgaactgattataacaggcggcgtaccggcgggtggtgatgactatatcgattcacaggaattgctggtaatggtgaatgatgcacgtaaggaatgtgggcaaaagccgattcgcaataatgattttgttgcccgcatcaaggatgagctttccggggagggttacgaaactttcgtaacccccatggacagtaaaaaaggtggtgcagatcaggaagttataggaatgcgccgtaagcaggctcttcgcgttgctgcccgtgagtcaaaagctgtgcgtcgcgtgctggttgacaaactggaagcacgttctcagccagtaccagtacagcgcgaactctccacaatggaaatcctgcagattgctatggcatctgaacagggtcgccttgcagcagaagagcgcgctaaacacgcagaacgcactaaatcacaaatcagccgtaagcgcgaagcctcagcgctcggaaaactcagtgccgcaacccgccgttgtcgtgatctggaagaacgtctgggagaaagcgaaaagcaggcaacgattacccgcgtggagaagtccacgggtaaaaaaagggaatacagctatgtcctgctgcgccggtggtgcagggaaaacggtattaagcctggtgacgttcctgacgagcgctatggcagcgtgaaggcgtggcctgctgaagcatggctggctgtttatggtatcgacctgaaaaaactggccggaggtaatgtatga

SEQ ID NO: 388831 - DNA, 306 bp, Salmonella enterica
atgagcagcatcgaacaactgcttacccgttgtgatatgggcaaagaggatgatgaggcgcttacggagatccgtatacattccgaaggtgcttacgagggcatcatgtccgggctgggatctgtcggtaatatcgtgttctgggcctgcggcaataaagattacaccgatgaaatggcgcgtgaggatttgtgtaacctgggtgaaatgctgatgtatttacccggtatcgcttccgcgctgaaatttaatgcggatgaggctgacttcagtattaacgaacgaaaacgaaagtcagggaaataa

SEQ ID NO: 388832 - DNA, 384 bp, Salmonella enterica
atgacccggaaaacgcatagtctcgaaataaaccgcaggcatattgctgatgcctttattaattattgccgcttgcgtaacagcggttcggcggtacttaacctgatggtaaaaaaacaggttgttgccctggataacctgactgcggtcgcagtggagaactgcctggtccacagcattgagttgcagtgtttcagtaagttcgggcgtgacagggggctgcccatgctggtggaaacttactcaggcatgatgaccaaagataacagccgtctgacaccggaaggcgtggagtttatgaatgaagtcatgacagcagcaatcacagcagcactggctaatccgaaagataataattttggtctggagatttatcatgcgtaa

SEQ ID NO: 388833 - DNA, 648 bp, Salmonella enterica
atgcgtaatacacaattaaatcaattttcggctgaatgtaaccagacagataaatatatccggatgagtcttctggaagcggaaaaaaattttgtactttattaccaccgtcagcaggctggaacccgtacggttgagccggaaaacattattcagaaactcgatagcggtgaatttgactccgatttagtaaaagggttacgtcatgtcgcatctctctggcatggcatgcacaccgggtgttttgtacttactggcgagcaaaaccttgcgctctggcgctgggtagtggccgctgtgtttgtctgtgagatgcttgatacaaacggaaccgtcgaagtgaaaaatgagcagggagagcctgaggaggtcgccgtttatagcggagatcatggcggtattgttatttatccgtggtctgagcgtttttccctggcaaatcatgttgaaggactggcgtatgaaatgttcccggcgaacaaagccccggaaatggccgccgcaatttaccggagcatgatcgacatcagtcctgttactggcatcgatatgtctgaagaggggcttaaaggtatgtctcttcttcacgacagctttattgaaacgctgaaaacggaaggtattccggcagcgccggtggcgcactga

SEQ ID NO: 388834 - DNA, 2142 bp, Salmonella enterica
atgaaaaaagcgcctaattttaggtatctgccagcggataaattcactgaggccattatttttgccggatctgaagcttactctcacgctaaaggctgggaagaggggatgggcaggcaggtggcctgtgattcaacaccgccggtttatcttggcacgaagcagctccaggagctggggagactgagagttgttgatgaagggcgccggagcgcccgtgtctacctcgccggagatatcagtccgatcatggttaatgcaattgcagaaaagctggcgctggcgggagtgcaggatgcgaaattatacaagggtatccctgacagacagccggaggactggcgggattatcttgcgcggttacgtgagcagtctgaacgcggagagaacatgattctgcagcttcctgcgttcaaaaagggccaggaggcagaaactgatgatgaacttaagccgcacgttgaaagccatgatgatggtgtcttctgggttacgccaaaagtcgataaggaaagcggcgaaattatcagtaacgaaagctggctgtgttccccgctggatgtggtgagtattgggagtgacggcagggatcgttatctgattctgcgctggcagccggagggagagaagcttcctgttatccgtgcggttccactggcggatattggtgaacgggagggctggcgaaccctcaaggccggaggagtgaatgtcaccaccaaaagtaacctgcgggcgattctggctgactggttacagcgaagcggtcacggacagttatggcaggttgcccataccacaggctggcagtgtggcgcttacatcatgcctgatggtgaaatcatcgggaaacctgaacatccggtgctctttaacgggcgaagttcagccgcagccgggtatacagtgaaaggggatgtggaaagctggcgcaaaagtgtggcggctcttgcgaacggtaactggtcaatgatgacggctgttgcggctgcgctggccgccccattaatcggattgacgggcgcagatggttttggcctgcatttctatgaacagtccagtgcgggcaaaaccaccactgccaacgttgcctccagtctgtatggaaatccggatgtgttacgcctgacctggtacggtacagcgctgggactggcaaatgaagctgcggctcacaatgatgctctcatgccgctggatgaaataggccagggggccgatccggtggaggtctggaaatcagcgtatgcgctgttcaacggaaccggaaaactacagggggcgaaggaaggcggcaaccgcgaactgaaacgctggcgtacagtggcagtcagtaccggagaggttgatatggaaacctttgtggcaggggcgggtcgcagggcaaaggcaggacaactggtgcgtctgctcaatattcccatgagccgcgctgtggttttccatgggtacaaaaatggcaagcaacatgctgatgccattaaggatgcgtatcagaacaactatggtgccgcggggcgggagtggatcaggtggcttgcagaacatcgggaagacgccgttgcagccgtcagaacagcggaagaacgatggcgcaatcttgtcccgtcagattatggcgaacaggttcaccgtgtggcttcccgctttgctgttcttgaagctgcattgctgctcggaaaggtgattaccggatgggatgaacaaagttgccgggatgccattcaacacagttacaacgcgtggattggtgtgtttggtaccggcaataaagaaattgagcagattattgaacaggcggtgagctttctgagcaccttcggtatgcgacggtttgccccactgccctatgacgagcaaagcctgccgataaacgagcttgccggataccggagcaaagggaatcacagtgatgatcctgtactgttttatgtattacccaccgtgttcaggactgaagttgcaagaggattcgacagcggtcagtttgcccgcacgctgtgtgaggcagggatactgaaaaaatcaccaagtgataaaggatatcagacgcttaccccccggctccggcatgtgggaaatatccgcctgcgttcgtatttactggttcaacttgatgaaagtgaaggagcagaacaatga

SEQ ID NO: 388835 - DNA, 396 bp, Salmonella enterica
atgacagcacatattgcagcacatgggcggctggtggctgatgttcagagcaaaactatcagtaacggcaacatcatggcatttacccggctggcagtagcacttccctgccgggatacagaaaacggtgaactcacattctggctggcggtgacggcttttggcaggcaggcggagtacctgctgaaacaccagaaaggtgacctgattagtgtttccggtaatatgcaagccagccagtggaagggaaataatggcatcttgcagaccggctatcagatggtggcggactcggtgatcagtgtgaaaacggtacgccccggaggtaaccggaagaaaatttccggcgggcagccagcgccgcaggatgatttttcggatgacgtgcctttctga

SEQ ID NO: 388836 - DNA, 993 bp, Salmonella enterica
atgaataaagaaatgaaagagaacattatcagactgaaacgcagtggtatgggttataaagccatttcgcgtgaaacggaaataaacatcaatacggtaaaaagtatctgccgccgctccggattatttcgtgacaatcctgagcaccgggcgcttttcacgataccggaaccgaaatacagcacggaactggcgacgattaaacctctgccaccgcaacaggttatcaccgggcataaacagacggatgcttatctgtgggtactggaggtaataaagctaaacgagccggctcaccttgaggctgcacaggcagcgctggagaaactgaccattaccccgaaggaagcgcaggatcgctatacccgctatcttcagtcaaatggtgtcgacgggttcaacattgtgtttggcacaatgatgatggataacccacagcactttatagagcgggcgcgtgaacaggctgcacgcgctgcagaggtacgcggtgtgtttggcagttatgaagcgatctacgataagttaacggtgccggaacagttgctggaggatgcgctgggctggctgtacaacgacagttatggctggactgaagaagaaaagcgccaggggcgaatcgaaggtaaacgtgtaatcgaggttatggaacttcgcgagaagaaatgctttgagattattacagatgtactaccagcgccttttacgttgtcagatgtagtacgtgagtttcagtactgggagtgggtttatcgcatgcgggatgctgctaaaaaggaaattgcccccaatgaactaagcggagacggtgggctggtcagcgatcgggaaagctggctggataaacaactggaaatcatcaggccagtaagccgggatgaagccctgaatgttctcagatggtatctgcgaagtgaacgacatcaggggtttatggatgcagacagtgatgccgtatacctcaatcttatcggtgcgcacaatgcagaataa

SEQ ID NO: 388837 - DNA, 147 bp, Salmonella enterica
atgctttctggttatatggcgacaagtttttgcatgatggtgttgactttgcataaaattgtcctgtatgcttctaatcatggatacgtgcatccaaatgaaactgattatgaaccctgccatctggcggggtttttgcttttctag

SEQ ID NO: 388838 - DNA, 2445 bp, Salmonella enterica
atgaaaactaagatccctgatgccgtgctggcagccgaggtgagccgtcgtggtttagtcaaaaccaccgcgataggcggcctggcgatggccagtagcgcatttaccctgccatttacccgcatcgctaacgccgcagaggcgataagcccggcgaaaaccggcgagaaagtcgtctggagcgcctgtacggtaaactgtggcagccgttgtccgctacgtatgcatgttgtggatggcgaaatcaaatatgtagaaacggataataccggaaacgatgattacgatggcctgcaccaggttcgcgcctgcctgcgcggtcgttctatgcgtcgtcgcgtctataacccggatcggctcaagtatccgatgaagcgcgtcggcgcgcgcggcgaaggtaaatttgagcgtattagctgggacgaagcctacgatatcattgctaccaatatgcagcgtcttatcaaagagtatggcaacgagtccatttatctgaactatggcacgggtacgctgggcggcactttgacacgttcatggccgccaggaaaaacgctggtcgcccgtctgatgaactgctgcggcggttatcttaatcactacggtgattactcttccgcgcaaatcgcagcgggtctgaattacacctatggcggctgggcggatggcaatagtccatccgacattgaaaacagtaagctggtggtgttgtttggtaataaccctggcgaaacccgcatgagcgggggcggtgtaacgtattatcttgaacaggcgcggcagaaatcaaacgcgcggatgatcattatcgatcctcgttacaccgacaccggcgccggtcgcgaagatgagtggattccgattcgtccaggtaccgatgcggcgctggtcaatggtctggcatatgtcttaatcaccgagaacatggtcgatcagccgttcctggacaaatattgcgtcggttatgacgaaaaaaccttgcctgccagcgcgccgaaaaacggtcactacaaagcctatattctgggccagggtaaagacggtatcgcgaagacgccggagtgggcggcgcaaattaccggtatcccggcggatcgcattattaagctggcgcgagaaatcggcagcgctaaacccgcctatatttgccaggggtggggaccacaacgtcatgctaatggagaaatcgccacgcgcgccatctcaatgctggcgatcctgacgggtaatgttgggattaacggcggtaacagcggcgcgcgcgaagggtcttatgccctgccatttgaacgtatgcccacgttagaaaacccggttgaaaccagcatctccatgtttatgtggaccgatgccattgaacgcggcccggaaatgacggcgctgcgtgatggcgtgcgggggaaagataagctggacgtgccgatcaaaatgatctggaactatgctggcaactgtttgattaaccagcactctgagattaaccgcacccacgaaatcctgcaggatgacaagaaatgcgaaatgatcgtcgttatcgactgtcatatgacatcgtcggcaaaatacgccgatattctgttgcctgattgcactgcttctgagcagatggactttgcgctggatgcctcctgcggaaacatgtcttacgttatcttcactgaccaggcgattaaaccgcgcttcgagtgtaagacgatttatgagatgaccagcgaactggcgaaacgtcttggcgtggaacaacagtttaccgaaggacggacgcaagaagagtggatgcgtcatctgtacgaacagtcgcgtaaatccattccgaatctgcccacctttgaggagttccgtaagcaaggcatcttcaaacagcgtgaccccgaaggccaccatgtcgcctataaagacttccgcgaagatccgcaagcaaatccacttacaacgccatcgggcaagattgaaatctattcacaggcgttggcggatatcgccgccacctgggagctgccggaaggcgacgtgatcgatccattaccgatctacacgccaggttttgaaaactataacgatccgctaacggataaattcccgctgcagttgacgggtttccactataaagcgcgtgtgcattccacttatggcaacgtagacgtactgaaagccgcctgtcgccaggaaatgtggattaacccaatggatgcgcagaaacgcggtatcaacaatggcgataaagtccgcatcttcaacgatcgcggcgaagtacatatcgaggctaaagtgacgccgcgcatgatgccgggggtggtcgccctgggagaaggcgcatggtatgacccggatgcaaaacgcgtggatcagggcggatgtattaacgtactgacgacccaacgtccttctccgctggcgaaggggaacccgtcacatacgaacctcgttcaggttgaaaaggcgtaa

SEQ ID NO: 388839 - DNA, 993 bp, Salmonella enterica
atgtcgattaagcaactcaaagacggacgttatcaggttgatgtaaggccgcagggtgcggagggaaagcggattcgtaagattttcaccctgaaatcaaaggcccaggagtttgaaaaatatgttttacagaatttccacgataaaccgtggcaggctaaacccgccgatcagcgccagttatctgaactgatgaatgcgtggtggatgcttgatggccgcaaccaggcttatggtgatacctacagggtcaggctggagaaggtgattcgtgaaatgggagatccacgcgccagtcagatgacgcgaaaatttatgcttgagtatcggtcagataaattacaggctggattaatgccgtccagtataaaccgtgacttgtgcgcgttgtctgcaatgttcaccgtgctgattgatgcagaggtcttccacaatgaaaaccctgtacgtggtatacgcaagctgaaagttcagaatacggagatggcttttctttctgacgaggagatcgatcggcttcttgaacggcttgaaggggatgcgcgacgtgttgctatcttatgcctctctaccggcgcgcgctggagtgaagcagcaggattacgcggagaacatatagtgggtaaccgtgtaacgttcttcaacaccaagaatgggaaatcgcgctcggttcctgtcgctgattcggtaattccgctaataaaaccccggcgaactgggttgttgtaccgcgttgactacctccggtttcgggaggtcttacaggaagtgaagccggatttaccaaagggccaggcaacgcacgttatgcgtcatacgttcgccacgcactttatgatgaacggcggaaacatcgttacactacaacggattctgggccatgccactattcagcaaacgatgacctatgcacatttctcaccggacttcttacaggatgcgatcagctttaatccgctagctgacagcgtccataaactgtccatcagttag

SEQ ID NO: 388840 - DNA, 342 bp, Salmonella enterica
atggtgaacatgtcaagagactacgccaataaattaaaggcgatcagaaatgcggaaaaactcacacaagctcagttttctgaggtgacgggggtttcggtaggcactatcggtaactatgaatcaggttataaacctgcaagggtagagattgtggaaagagtaattcaagtccaacgctttgaaaaatatacaatgtggcttcttcacgataaaacatttcctcaagccggacagatcgccccggctctctctcttgatggctccattcagtcggaggaagatcaggtttcaatcgaaactacgcaaaaatctccccgctcacgccgcaatgctggctga

SEQ ID NO: 388841 - DNA, 561 bp, Salmonella enterica
atgcaggagttcattgccgctaaagagttatctgacacagatcacattccagaaaaggcaaatgtcaatgaagttacgcccgctccggaagacgaactgtcagttgtaccagtggacgtcaccaacgacggcaaacacgaagaaagcaagccaaaaaacacgtttaaaaaaggcacaactttgcgactggatgggccgatttctggagtttgttcactggaaaaaggtgcggcatatgtgggactgacaaaaattgcactacgcacagctattcagcgtaaccagatgccgggccataaaacacgcaccaatccggaagacgaagaatcagacggtacatggtggtttaacgctaaggagtgggacaaactggccgatgaactaccggaatgcgagccgccagaatggcataactggaaaagctactggacatatgaccgccggaaacgaaagtttaaccctgcaaataaagaggaatgcaaggtaattaaaggacgacgcgttcatacaggcagaaaatcaaaattagaacaggctaaaaataacgacaccagtaaataa

SEQ ID NO: 388842 - DNA, 174 bp, Salmonella enterica
gtgacgcagtttcgcgtcttgcagaaactgacagcgctgtacctgagttacttattgacgctgcatatattaacgccgatacagcgattaacgatttatcagaaagaactgttgaacttaaaaagcggcttacaattcctgaacgtattgcgatattcttatctggttgcatga

SEQ ID NO: 388843 - DNA, 450 bp, Salmonella enterica
atggtgaagaacattttcatagcgcgcagcctgtttttttgccgcgcctgcaatttcacccggattgtatacaaaaatgtatgcagccagaactgtggagataagcccagcaagccagccgctggtgatttcagccatgaaagcgctaccgaggatcacctgcacaaagcagatgaagttaaatatatttcggtagagtcgcgccgtcatgtactcacgaaaatacgactcataagcgttaaatcgttgttggttcgttggtgtattggctggctgctgtttcatacgttattcccctttcggtttatgctctccctgcccgggttttggtgtattgcctccactgtccggggctggtcggcgcgttatgtggaaaggttcgatcggaagttttccgggttgtggtgtacctgtccacggctttttatcctggctcatatggcctcctga

SEQ ID NO: 388844 - DNA, 243 bp, Salmonella enterica
atgaggaaacacacggcagaacaggtaaacgagttcttacagggatactacttcgacaatgaagccaatccccgccagaaagggacgcattttgacgttatgaagcacggtattttgagtgtccgtaacaccctgttttactcaaaagatacagatgcgagcaaagaccttaaagaacttaactggatagtaaaacaattaactgacggcatcatacccgaacccgccagaattacggagtga

SEQ ID NO: 388845 - DNA, 186 bp, Salmonella enterica
atgaatatcagctattcgttcaccacgcaggaatcattacttattgttgcgataacggcactcatattattactggccgtccgtctggtaatgtttattgacatatggcgggagatgagaaatatgcgtcgccaaaaaaaacgtgggatgaatacaataaattcattcagcgtaaagaagatgtag

SEQ ID NO: 388846 - DNA, 438 bp, Salmonella enterica
atgattaaccaaaataaaaccctttcccaaaaagccttagccggtgcgtcatttttgcgtatgcacgccgaaggaatgtctgaagacgatgatttttttatcgcactaatgtccgaacctcacgtcatcgccgctaacgccatcgaacagctcgttaaagagaacgaagaactacgcgcccagctcgtcgcctttcagaaagcggctaacactaccgttgcatttgacccggcaaagaaaggttccgaacacacctggtacaccacattcacaaaaggtgctcgcgtatgcctgagagctcacccgtaccagcgtggaacagtgagcgataccagcattgatgatcgccgtggtcatttgattttcgtctgtttcgactccgaatttgaggtagaccgctgggtaaaggcgaagaacctggaattaatcccacagtaa

SEQ ID NO: 388847 - DNA, 537 bp, Salmonella enterica
atgctacagatgaaatttcaccacagctttattgaggcattccgcagcggccagaagctaaccacactgcgcctactggattttaaatgtcgttactacgaagagacagacgaccgttcggctgtttatttccacgaaggaaagctgaaatacaacatgcatgtaagcggtgctgacggcataaatgtatccctcccgtcaggaacaaccgttaaatattcaaccgaccttgccggacttctggaaagacaaccttacagacccggtgacgaaatcgaactgatcacagaaatcgaaggcggcgaaaaaatgccgttcgctaccgcgactattgctgacgtttccgttatcaggggaaaagaagtagacagcattgacgccattaatgacggatttaaccctgaccgtgacccgctcgccgaactccatgcattcatgcgagacgtttaccacatcacagaccccgacaaggcaatgtactggcggtacgtcttcaccagtgtgcagatgtttccgcagtggggaggtgaagcatga

SEQ ID NO: 388848 - DNA, 279 bp, Salmonella enterica
atgagcatgaaactcaccagatgggtggtattcgaacttgtgcctggcggggacatattacgcatccacgaagaccttatcgactggaacagatcgctactggatgacatctacacgccgcatgaagagcgttatgtgttcctgattaatggcgtgcagtaccgcgcctgtaatatcgctattgaagggaggatcgaaccagcaccagaaaccacaccacacactgaactctcgccacgcgaggaatacgagcaatacggtcagtggggtggcgtatga

SEQ ID NO: 388849 - DNA, 936 bp, Salmonella enterica
atgaaagcctggaagagttcaccgttaatctgggcgggcagtaaataccgcaccctgaacagacttcttaagaacgaacgtctgccccgttctggcggttgtctggttgagccgttcgtaggtagcggcaccgtatttttaaacaccgattaccagcgctatgtgttgtgtgacaccaacgaagcgctgatcaactttttcaccaccctgacatcatgcacggaagagctgattaacaaggccagaccgttgttcagcgcgaccaacagcgaggcatattaccaactcaagggaaaattcaacgaaaccgcattaaagcgggatcgcagctatgaagactgcctgaatctggcggcgctgttcctgtacctgaaccgccacagtttcaacggcgtctggcgcaccaacaaaaaaggagaattcaacgtaccgttcgggcgcaagaaatatcgtttccccgaagaagaaatgtgtcagtttgccgaaaaagcccgcagaacacgcgcggagtttttatgcgtggatttccgccacacactccgggcgcaacacctgctcatgtcaaatgacacggtaatttactgcgacccgccttatctgcccgaaagtaaaaccgcggatttccgcagctacaccgcagccggttttacgcctgatgaccatcgggatcttgtctcgtatctgctcgacgccagtcaggattacggcgcaaaagtcgtgatttccaacagcgacaccaaagagacccgcgcaatttatgcgccattcaaactgcatcgcctgaatgttcaccgttctgtcagtgccaacggccagcgacgcgggaaagccgctgaagtgatcggcgtactggatggccgggagaggtatgtaagcgcaccacgccgggcgggaaagacattctccgccgcacaacaggaggccacgtcatgctga

SEQ ID NO: 388850 - DNA, 237 bp, Salmonella enterica
atggcaaaccgcaagcaacgccgtacccgcgctgacgtcgagcgcatccacacccagaccgaaatcaaccgccgcctgtaccgcgcgcacaatctggcgtatctcctgcgtatcgaaatgctcgccagtccgtgcgacagccgaatgttatggttgccgtcagtcctggactacatcgccgacgatatcggcgatattcaggcgctacttaacaagccagcgcacaccgcgcaataa

SEQ ID NO: 388851 - DNA, 393 bp, Salmonella enterica
atgaccgattttcacgcctttaatgaatggctgtggtcatgtgacccaggtctggccgtcaaggttcaggactggcacgcacaatggcgggccatgcttgcacatcacaaccgttacaaactgaaaaatcagaccgctttcactattgacggacgttaccgcgtggtagtggttgatgaaggttttgcgctctataacctgatggagcgcagcggcaacgaggggccgatggcgatttaccaggcgccggggccgctgttcgccgatctgcttgcgcacagcatccgccgttccggcagtctgtcatttgaggacttcatgacagaggcatcccgccttctgctcgcctgccacgagtcatgggatgcggtagccggggaaggtgaacaatga

SEQ ID NO: 388852 - DNA, 2295 bp, Salmonella enterica
atgagctatccatacgtatgggactggaacgccccacgttccgccatcgatccggcaacattcggccatgagatccatgaagagtcgaagcttgccaggctggtcgcgctttttgacagagaagaggaactcacccgtcaggcgaagtcaccggacggcccgaaaacataccctgaaaagataaaggccgacgccgatatcagggaaaccagacgtaacggcagactggcggaactggccaaaaagcgtcttgttgccgccagcgataaggataacccggtattaacccggctttatgccctcccggcatacctgcgcgatccgctaaaacaacacctgaaattcctgcgcataaaacagaatcaggcagaaaaggccggaaaaaaagcgcgcccggcaagccgttacatacatggcaaactgacgaacatactcgacagaatagagcaaacagatgcccgcttctgcacaaagggctatcagcgcattgttgttactgaacgtcttgatgccctgctgacgctgccgcagctcagcaagcgcgaggtacagaccgccgccaccctgacagccggtgcgtttaacggtgagttcgaccgcctttgcacgcagtacggtgacgagatgacgctgaacgatgcgctgacggtgtaccagaaactggcacgccgggcgctgcttctgaatatcaccccgccataccacgagtcactgagaaccgaccgggacagacgcacggagccggatatcgaaaaactccccggcgcatttctgcgtctgagctgcgcggactggtggaaccggaagctatggcgtctgcgccgcatctggcgcgaggagcagttacgcgccgcctgtctggtatcgcgtaaaaaatccgcctatctgagccgggatgccctgacggagtttcgtgagcagcgccgccgtatgaagcagtttctgaaatcgcacgaactggtcaatgaagacgggtttacgattgatatggctgacgtctactacagcggcaacagtaacccacagcaccgccgctatgaaatgatggcgaacatgaagggactggaactgatagcccaggagcgcggcgacgaggccgtattcgtgacggtgacgtgcccgtcagcctggcacgccaccaccgcagacggccaccctaatcctaaatggaacggttccactatccgcgacaccagtgattatctggttaacgtgtttttcgctgccgtgcgcaagaaactgaaccgtaaaaacctgcgctggtacggcgtacgggtggccgaacctcaccatgacggcaccgtacactggcacatgatgatattcgttcgcccggaagaccgcgaaaccatcgttaacgagatgcgggacatcgccattcgtgaagaccgcgaggagctgggcgacgatatcaccccgcgctttaagcaggagcttatcacgccggacaagggcaccccgaccggctatatagcgacctacatcggcaaaaaccttgataaaggcgcggtaaaaggcaacgacccgaaaaccggcaagccgctcgttgacgatgaaagcggcctgaccatgaccgaaagcgtcgaacgcgccgttggctgggccgggctgcatggcgtgcgccagtttcagtttttcggtattccgtcccgccaggtatggcgcgaactgcgccgccttgcctgccagttgcagcgcaacccggacggcccgcaaaaactgaaagatccggcaatggataatgtactggttgcggcggacatgggttgcttcgcttcctacatcatgaaacagggtggcgtactcgtcccccgcaaggattatgtgatccgcactgcctacgatatcgccgacaagcccaacgactacggcgaaaccggcattcaaatctacggtatctggtcgccgctcatcgggccggagtcccggatctgcacacacccagacaactggatattagttaaaaaacaaccaaaccccaaaaacgacgcccccgaaccgggttttgacgttgaccttcctggcggcttcgccgccccttggactcgtggcaataactgtcccgctgaacaaaaaacaggcatatcgccgacagcagaaggcttcattctgaaggcgctttcccggaaagggatacacatcagcgacggcgaaatcaccctgttaatgagcggcataaagttacagcagagtggccggatttaccgggtaaaagacggcgtactccgtgataccccaaccgctgacggcctgacagcccgctggcaggccgcgataaggaggagagatgcgtga

SEQ ID NO: 388853 - DNA, 432 bp, Salmonella enterica
atgcgtgatttctttctgacaatgacgcctgaacagtgggaaaaactgaagaacagcccccggaatttcccggttgttgaggatttttttccgtcacaaccggaacccggcgaccggctgcgggtcaggtatcagcgtccgcgctcgctgtacaacaccgaaaccattaccgaactgggcgagtgtgcgattgccagtgccgttccgacaggcaacaccccgcaccgttaccggctgaaagtgacctttaacatgacgccggaacaggtaaagcagcgctacggttgtcgttgcacgaagctatcgtcgatattgtgccggtacaaagaacaggaagcggaaaaagagcgggctaagtgggaaagaaagcgccggatactggcccataaggcaaaggtagcaagcaaatacctgagtaacaaaggcggctga

SEQ ID NO: 388854 - DNA, 408 bp, Salmonella enterica
atggatatgaaatttctttgttgtcaggacatcatagatcttcaccgtgatattcttccatccagtggctccataaaaatagatagtcttgatggtgcattatcccgggtcaaaaatcttaattactatgaaggcgttgatgatatacacatgctggcggcaatgtatcttgagggactaacaaaggctcatgcctttaatgatggcaataaacgaacagcattcaccgcgacggctatatttcttgaaagtcacgattatagtattgataaaaacacatccgcattaatgaaactcactgtttttgctgctatagggattgctgatactgatagcattgctttcgctctcagactgctatccagctacggcgatgatttcatggactggtctggcattgagcgttag

SEQ ID NO: 388855 - DNA, 399 bp, Salmonella enterica
atgaaggttttgagctattcccgtatgcgtgctgagcttgcagatgttcttgattgtctgcgaaatggtgaaatcgtaaccatcacacaaaagggcaaggacgatctgattttgtatagcgacaatgggcaggctaaaatcaatacgcgccttaccggttcttctggtgtggcttctgccgtagaaatggctgataaactggatagattgccgggaggaggtgtgaaaatgtccgaatacaatacctttgataaaggctacacattaaagcgcataaaagaagtagaaaagctaaatccagccctgaaaaaaaaggggagcgggctgtcgtttgaggaagcaaagaaaaaagttattgaacggcatgcggatgttattaaagggctggaaaataactaa

SEQ ID NO: 388856 - DNA, 264 bp, Salmonella enterica
atgaaaattgaatgtccggcgtgtcactgtcgggccgctatacgcaaaacggtatggcaggatgacgcaaaaacgctggcagccgtttactgcacctgcacaaattccgactgcaatatgcggtttacgttcaatcttaccgacttacgcgtgatttcacccagcgacctgcaaactgacggcgtcgttaaagcattgctccagcgccttaaaccagacgaaaagcaaatggcgctggatattctccttagcgacggtgcgtaa

SEQ ID NO: 388857 - DNA, 1056 bp, Salmonella enterica
atgagtaaacgtaaaagcgcacgcctgtgtaaaaaggcacagacagaaaattttacccccggacgcgggaacattatcaccttcggggagccggaaccggtactgacgaccggcacggagtatatcaacgtctggtataacggcagttatgactactggatgttgccaatagaccggctggcgctcgcgcaactgccaaacctcaacgcccagcatggcggcgtactgtatgcacgtaaaaatatggtgtgcgccggataccagggcggcggactgacgaccgatcagatggaaatggccgtctttgactacctgttgtttggcgacgtggctttcctgaaggtgcgtaacggatgggggcgggtggtggcgctggccccgctgccgtctttatatctgcgacgtaacaagcagcttgattttattgtgttacaggagggcgatccgctggtctataagccgtcagatattgtgtttttacgtatgcacgacccgcgccagcagatttacgggctgccggattatatcggcggcattcattcggcgctgctgaacagtgaggcgactatcttcagacgtcgctattaccacaacggagggcatcttggctttattctgtatgcctctgacccgaatatgtcggttgaagctgaagaagcgatccgtaaaaaagtggaaagcgggaacgggctggggaacttcaaaaacctgttcgtcagtatcccgaaagggcaaccggacgggattaaaatcattccggtcggtgatatccagcaaaaggatgagttttcgaacgtgaagaacatcagcgcccaggatgttctcacggcgcaccgcttcccggctggccttgcgggcattatcccgcagaatgccacgggactcggcgaccctgataaagcgcgggccacctacggacgggatgaagtgacgcccgttcgtcgtaaaatcatgcaggccgtgaacagcgaccctgacataccgccatctctgtaccttaattttacgctggaagacggggaaaatacggcgtctgtaccgtctgatgaaaagtag

SEQ ID NO: 388858 - DNA, 1887 bp, Salmonella enterica
atgtacgaaaatcatcgaaatttagtcatatttcgggcgattctgactctttatgatgggcgcatgaaatatgccgaagaagtcagggacgccgcgcgcgccctttacctgaaattcaacacgccaaaagagatagcggcttcgctgggccttcctgtgcgtaccgtttacaactgggctgtccggggtaaatggagcgaaatgttgcccgccgagtcggtggaagtggctattgcccggcgcgttgagcgactgaccagcaaggacgctaaaaacgagctggagcttgaagagctgcgttttctggtgtcgcagcacgtcaagctgatggcgcagaagaacaaacacgccgaacggatggaagagatccgggcgatggtcaataccggcgtggcggtaaatgacggctggcagggtggcggtgaagagggtgacggtgaaggcggtaaaaaaaggaagcgaccgcgtaaaaatgacgtcagcgaactgacgaaagcgattttcgacgaaaaagcagccgggcatctgttcgaatatcagcaatatgtgcgtgaacacagcgacgagctgttccgtttcattctgaaagggcgacaggaagggtttacctactattttgcatgggaggggttcgaaaaggccgttctcacgggtaaaaaccagatcttcttttccgccagtaaaccccaggcggaagtcttccgcttttatatcctcagcattgcgcaacagttcttcggtattgagctgaaaggaaacccgatacgcctcagcaacggcgcgatactgcgttttctggcaaccaaccccaacacggcgcagtcctacagcggcgacctgtacggggatgaagttttctggataccgaaattcgccaggctgcacgaagtggcgtcggcgatggcgacgcatgacgagtttcgcatcacctatttctctacgcccagcgccaaaacgcaccaggcctacaggttgtggacgggtgacgaatggaaaggcgacgatccgaaacgtaaggcggcggagttcccgaccaacaaagaactgcgtaaaggcgggcaggtctgcccggatgggatctggcgctatgtcattacgatggaagatgcgtgcgctaagggactcagtgccaaagtcaacattgagaagctgcgtaaccgctacagcgcgacggcgttcgctatgttgtatatgtgcgagttcactgactcccgcgacgcagtatttaacttctctgaactggaaaaatgtgaggttgagttcggtatctggcaggacttcgacccgaccgcattacggccttttggcaatcgtgaggtgtggggcggcttcgacccgtcacgaacgggcgataactcaacgtttgttatcgtggctccgcctgttgacccgaaagaaaaattccgcgtgctggccgtgtatcagtggctgggtctgaattttcgttttcaggttgaacagatcaaggagctgatgaagcgctaccggtttacccatattggagtggatatgaccggtattggccggggggtttatgaattgctggcagggtatgccccccgcgagattatggggattaactacagtgttaatatcaaaaatgatttggtacttaagatgatagatctcgtgaaacatcatcgtatccagtgggtgaaggacgcggttgatgaggtggccaaagagcgtgctgatatcccgctggcatttatggccatccggcgtgtattaacgcccagccagaacaatcttacctttgcggcagagcgcagtgaaagtaccggccatgctgatgtgttcttcgcaatatcgcacgcggtttgtaaagaaccggtcagctatgatgataatcgcccctcagtgtgggcattcaggaagtccgcatga

SEQ ID NO: 388859 - DNA, 1113 bp, Salmonella enterica
atggcaaagcagaaatacaccactgactggatatgtatagcgaccgaaggctacgccatcgacggtcgccccattacccgcgaaatgatccagcaggccgctgacagctacagcaccgccgaatacacggcgatgatctggcctaatcaccctgtatacagccttcaggagcgagaatttactttcaatctggggcttgtttccgatctgtcggcgaaagaagacgccggaaggctgcgccttatggcgaagctggagcctaaccaggcactggttaacctcaacgagcgcggccagaagctctttacctcgtgcgagttctgggagaactacgccaacaccggaaaaacctacctgtacggactggcggcaaccgacagcccggcaagcctgggaacccagcgcatagaaatcaaatcagcggaaaccagcacaccgggttcacgtccgcagtatgccgcagccgggaatattgaaatgttcagtcttgggcgtctgacgccggtcgctgacaccacaacaaatcatcatgaggaagaatccatgaccaaagaacaggcgaaccagttgttagcccagattgtcaccctgacggcgaaaattgacgcacaggcgaacacgcaaccacagacgcagcaacccgcaccggcacagaccccggcacccgcagcagcagacacacagccagcaacccaggatttcagcgctcacgctaaccacgttgctgatctgggcgaaaagctttccattgccactgacgcgctcgccgctaacccggaagacgccacggcacgccagaactacaccgccgccgtgacggagctacagaccgcgcttggcacctttgcggtacagccgcaggacgctgaaaccgcaaaacttcaggcgcgtatcgccgcccgcaatggtggacagcagccagcgccagccgcagcacagaatttcagcacccggacgcccgcaaaagatgatgaggccgacgccgccacactgacaacgcttaccagcgcgttagaaaacctcagtcagcgcttttcggtcattgaaggccagcgcacgccgacgccgggcgcggcaccgagcggacaacccgcacagtttgagccgctgtaa

SEQ ID NO: 388860 - DNA, 1050 bp, Salmonella enterica
atggccgcacagatgttatcgccgcaggcacaaaagtttctgcgtaattacgctctctcgatggcaaaagcgaacggcgtatttacggcgcaacagttttttaccatcagcccaccgcgtgaaaccctgctacgcgatgccctgattgagaacgccgacccgttcatggggcaaattaccgtcatgctggtagaacagcttgtcggccaggtcgtgagcaccgggattccgggactgtataccgggcgcaagaaagacggacgcttcaataaagcactgggcattgaaggcaacgagtacaagctttacgaagtggattcaggttcatttctggactataccaccctgaccaactgggcaaacgcaggcaccgaaaacgagttctataaccgtcttcaggccttcttttacaagtcaatcaccaacgacctgttacgcgtggccctgaacggtacacatgctgcggatgaaaccgatcctgtcgcctgtccgaacgcggaagaccttcaccccggatggcaccagatcgtcaaagaacgtacaccaaaacagattatcaccgacaaggttgtattgaaccgtatcggcaccggggctgatttcacatctgttgatgctattgccgccgacgcaatcaatacctgtattccgcctgagttccgtaaacacccggatctggttgtactggtatcgcagaacgttatcgcggcggatacggtaagtatgcttaaccgcatcgaccgcccaagtgaaaaagtcgccgcccagctcatcaatcgtgagattgctggccgcaagtcattcagcccgccgtttatgccggataaccgcctgattgttaccacgctttggaatctgcatatgtacttccagcgaggaactcagcaacgccgcgccgagtggattgatgaccgcaagcgcttcgaaaataactggctgcgtatgcagggttgcgccgtggaatatgacgaactctacggatcgttcgataacatcgaactggcgggattgccatcaccggaacatacccagccgcaaccggcagcgtaa

SEQ ID NO: 388861 - DNA, 702 bp, Salmonella enterica
atgcagaccccggcgcaacgattcagggcaaggatagccgcacaacaggcgatggagcgccgggacgcgctacctgacggcggtagcctgcatctgcaactggcacaactggaaatcgactgtaaggccgtgagcagttgcgccaccaacgccgatcgcgtggcgttaaagcgtgaaaccctgttaccacgctggacaccaacgattgaagcctggctgcaaaacggcgaggtgtacaaatacaccccgttcgtctggtgcattgtctggctgtttgataccggcgaaatggataaagccctggactgggctgatattgccattaagcaaaatcagcccatgccgccacgctttgaccgtgatttaccaacgttcgttgccgatgaggtcatgcagtgggcacagattcagtttgatgagggactctccgtcgagccgtatttcagccgcgtgctgggccatatcggcgaagactggacgctgcacgaagagatagtagccaaatggttcaagttcgccgggctgaacctgctacgggacagcgacggcaagccgaccagtccggccactctccgcgacgtgaaaagattacgcgccgccgatgaatggatggcccgcgcgcaaagcgccacgcccaaagcaggtgtacgcgccatacgaaacaagatagccgcccgtttacgcgccttacatgcggcataa

SEQ ID NO: 388862 - DNA, 471 bp, Salmonella enterica
atgaacctgaaaccaggctacagcgaagaccaggacacagacgccaccacaggcgcactaaccaatgatagcttctggccggatctggccatggctgattttcgcaaaagccgcactattccgctggatatccccgcgtcgctggcagaacaggcgttgttgtctgccgtctatgaggtaaacgccgcactgtccggggtgaaatcccgctacgtgatgcagggaataacacaggcagcggaagcggaaggcccgcagcttaacggcgaaaacgccctttgcgcgcagtacaaaaaagcggtctttgcccgcgctaaagccgatcttctcggtgagtttacggcggtgaatacccgtcatgctgacagcaatatcgacagtaatgacacccgcgaaaccctgcttgctgaagcggcctttgtgctgcgtgctatccagggtgcaggccgtgtgggggtgtacatcttatga

SEQ ID NO: 388863 - DNA, 480 bp, Salmonella enterica
atgagccagtttgacagcctttatgcatatctgcgtcaggtatttgatgcttccgtgtttgataacacttatttcgacacctggatgagcgatatccgccttttgcccgccatgaaaaacatggggcttggacagatgcgaatgggcattcgccagtacaacgccgtatttgactggcagcgctggccgtggcgtcagattgacccggatttactgttatgcgccctgcttatctggcgcgacgaacaggctaacgacctctacagccagcttgaacttgacgcgccggatatcagtgtcgaacccacggatgacaacgtcgccgaagtgacgatcagtatgccacttgccgacgccatcatcctgatcccggacgagtccggccctgtcaccatgaacggcaaccgttatcgcctggataagcctgcaatatgggtggctgaagatattgccgtgtcagccgtcagaggaaagggataa

SEQ ID NO: 388864 - DNA, 735 bp, Salmonella enterica
atggatatctccctgcacggtgaactcaacaaaacgcagttcaaacagatgcgcgacatgatggccgcaggcgaattacccccggcaaaacgccagcgcctgttacagcgtatcgcaaaacgcggcgtgatcccggcagcaaagcgccacgttcgcgaacaaaagaacgttgacggcagcagttttgcaaaacgtcgctacggcgaccggcccctgcttaaaggtatccccggattcctgaaagtacacgacatgccgtcagtggcatcggtgcgcatttacgcgtcgggaaaaagctatcgtcagccttacagccacaaggaaatcagcgtgggtgctgtgggctatatccagagccatggcgtcacgtttacggtgaatgcgtcgcagttaaaaacggatgccatgctgaaggccaacaaggaaccctgcacccaccgccaggcgataaagctgagaaagctgggttatacggtcaaaggcaaaaaggaaggaacccgtcgcaaaccatcaacagcggagatccaggcctcactacaaaaaggccaggcgggattaattatccgcagcatggaaggcagaccgtcaaaaaacaactggacgattaccattccgccccgtcagtttctcggcgtcagtaacgaggaatttgcgcagatactggccagacagttgcaggggattaactttggctggcagacaaaaccacaggatattaagaggaaatcaccatga

SEQ ID NO: 388865 - DNA, 1152 bp, Salmonella enterica
atgacgttccctcagaccaccattaatcagcttaacacccgcagtggcggtaagcgggatattgtccgcaccctgctgatggtgggtgagcataaaaagaccctcgccccgacgccggtcacggcacagaccgatcttgatgccctgctgggatcggaagcatcactgttacgcagtaatttacaggcgtttctggataacgccggacagaacgccatgatctggctggccacccttccggcacagcaggtctacgacaagagccagccggaacaggctggcgtcacaccggtgacgtggatggatacggtcagggatgcgcaggccaccgtctcagcagagggtgttgttgtggttcgccctgacgccaccgccgacgatatcaatcgcgcacaacagctacgcgaggaactcaacaacaaatatcagcgctggacgtggttcattctggccgttcgcggatgcggtacgggcgagaagtgggccgagtacgtcaccgccatgaccacgctacagaaaggcattgccgcttacgcggtacagcttgccccgatgctgttcggtaacgagccggggatgctggccggtcgcctttgcaatccgtcagtcaccattgccgactcccccgcccgcgttgccaccggcgcactggtcaacatggggcgcagtgacaaacccacggacagcgacgggcgggagctggagattgccactcttaaagccctgaacacggcgcgtttcagcgtgccaacgtggtatcccgactacgaaggctactactgggccgatggcgtcacgctcgatgtggacggcggcgactatcaggctatcgagtatctgcgcgtggccgacgaaatcgcccgccaggtgcgcctgctggctatccccagaatcgccgaccgctcgctgaactccaccccggcaagcgtggccacacatcaacagctttttgcgaagcccatgcgtgacggtgcaaagagcctgaaaatcaacggtacggtattccctggcctttgcatgtcaccgcgcgacggcgacgtacaaatcacctggccggcaaaagacagggtgcagattgcgatcgtggttcgcccgtacaactgcccgaaagaaatcaccatcagcatcatgctggatgaaagcggagagtaa

SEQ ID NO: 388866 - DNA, 462 bp, Salmonella enterica
atgagcaccgaacgcatcagcggcatgagctttgacgtgtcattcaatggccgcaacattcacgtaaagaccgccacgctggatatcaccgacaacaccaaagccattcaggaacgcggtgtccccaacggctgggtacgcggtgacgtggaagcgagcggcgagattgaagtggataccgtcaatttccagcttctgggcgaagccgcccgtgaagcgggaagctggcgcgacattgaagaggccgacttcctcttctttgcccaggctgcaaagaccgaactcaaaatagaggcctttggctgcaaactgttgatcagtaacctgatgaacgttgacagcaaaggcggtgacagcctgagccataaaatcaaattcctggtgacctcaccggattttgtccatatcgacggtacgcccgtcctgtcaacgcaggatgttcgcgacctgctgagtcgctga

SEQ ID NO: 388867 - DNA, 339 bp, Salmonella enterica
gtgaataacgggccgcataactggcaggactggtggctgatgatcaaaggctggctgaatggcgatattccgctcgacagcctgatgatgaccgccattatcgccgcgctgcgggtgttttacaccggtaaaagctggcgacggttactcctggaagtaccgttatgttgcctgctggccgtggcagccttctccgttatcaagccaatcccggtcgcctggctgtctgaagactggcgcgtggggattggtgctgctatcggtcttatcggcgtggagcacatcagggcgcttggcgtactcatgaccagtaaatttacagggaaaaatgacgaatga

SEQ ID NO: 388868 - DNA, 273 bp, Salmonella enterica
atgagcaaagaaaacaccaccaccctcaccctgaccgtcgcaggagaggatattcgcttcaccccgaccgaagccatctacaacaagttcgtgaacgaaatggcgatggacaacaaggtcgcaccggccaagaactacctgatgcgctgcgtacacccggaagacaaagagaagctggaaaagctgatccaccgccccggcgccgcgcttcagattgccgccagactcaatgaagagtttgccgtcgatctggatatcaccgtaaaaaaataa

SEQ ID NO: 388869 - DNA, 2088 bp, Salmonella enterica
gtggccgctgaactggattttacattaagcctggttgataagctgacaaagcccttaaaacaggcgcagtcggccctgaccggctttgctgataaggcggaggccagttttaaacgcatcggcgggggtgcggttgccctgtggggggttaacaaagcgctgatggggatggtacgtcccgcctatgacttacaggacgccctggacgattccgttatctcaggttatgccgcatcaggtctggataaactcacccgtgctgcgaacgatttcgccattgaatacggtcgttcgtcgctggagtttgtcaaaaacagcacgcttatccgccgcagcattggcggcatcaccgataacgacctgcccgcctacacccacgccgccagtgtgctcggcgtcgccatgcgaaccggcaccgaagatgccgttaactatctgtcgcacatgactaacctcatgccgcagatggtcaaaaaaatgggtagcgtcgattttgcgggcgcgatggccggactggccacacagatgaaaaacagcttcaacagctcccttggcgatatcagcgccatgatcgagcagtcgaaaggcgcaggggccgcatttggcgtgtcgctggccgagcagctcggcacgatgggaacagcaggccaggtgttagggagtggtgccagcgcaggttacgatcagttattgcgccatctcggcagcggtgacgccaccaaagccaccggcattaacttccgtgacgcacaggggaaattactgccgatcctgtccattctggacaagctcagggccagatacggcgagaatatcgacggcaacgcccgcgtacaggccgcaatggaaaaggcctttggcaaggggacggcagttatccgggcactgtggaacaacacggacggactgagccggagtattaacgcactgggtaaaaatccggggctgaaagccgtcgaagaccaggccaaaaaaaccgtcgtaccgtgggagcagttcgacgccattatggaagcgatccgcgccgaaatcagtatgcgcctgcttcccacattcggcccgttctttgactcgctggtagcgtgcggcagggagtttgttaactggcttcatgccttccccaacatcacccgctggattggctatatctcggtaagcctgctgggtatcgccgcagcaggggcaataaccagtgtggtgatgggcctctttggcttcatcatgaccggactcagcgggattgctggcgtactgaaaggcgcatggaagggactcatcttcaccctggatttattacgcccttccctgctttcgacccgtcttggcctgatgggattatggattcaggaaaaagccgtctggatgtggtcaaaactggtcgccctttgggcggggatctgtaaagtggcgatcgctgcctggaacgtggtgttacgtacctgtaccgttgccatgcgtctgtttggcattgccgcccggtttgcgggtatggggctgggctttctgctctctccggtggggcttgtcctgctcgccctcgcggcgctggctgccgggatctatttcgccatcagatactgggatgacattaaagccgccatcatggatacggaggctttccatgtcctgctgaaagtcattaacgccgtggtgggctggtttgatgacgcctggaacagcatcagggctggctgggacgggctgatgaactggtttaaaaacttctcactggccgacacgttcggcaacatcacagccgggatcggcaaactctttgacggtgtctggaatgccataaaaaacacctttaccggaacatataactggataattgaaaagctcaacaaaatccccggcgtcaatatcagcaccgcacaacaggccgttgccccgacaccagacccgacgcttatcaccggcaaccgtagcgccgccatccagggcgggccggtcagtcaccagataagccacaaccagaataaggggccgacccatatcgatcgcggggtgcatattgaaaatatgcacgttgagaccctggcaacgccgggacaactggccgaatacagcgaactggcagcggggtaa

SEQ ID NO: 388870 - DNA, 339 bp, Salmonella enterica
atgaataacgaatcactttacatcgacctgctcattactgacggcgatcttacactcaactccgccagtgagccggtactgtgtgacaacagccgcagcatcagccaggacatgatccatgccctgattgaaagcggcctgccttaccgtctgatagcggagaacagccccacgctcagggccgatctgtttacgcagatggtgatactgctggaagaggatgtacgactgataccgggcaccgtgtttatcgacgaagaacgtccggggcggctgctcatcaccgcagaaacctgggattttggcccgctcagccgggaggtgagttatgcagaataa

SEQ ID NO: 388871 - DNA, 1179 bp, Salmonella enterica
atgcagaataatatcgacttcaaaaaaatcctgcgcgaaagcgggatgccggtcgatgatcagacggtaagggataccctgcaacaggcggcagatgatgaaaaactcatcaccaatacgtcacgcatgtcgccgttctggcggattattcagttgatggttgtcacgccgtacctgtggatagtcgacacactgataaacaacgtcctgcgtaacctgttcctgatgaccgcctccgggccgttcgtggatctgtttgccgctgcactcaggctgacccgtaaggatgccacacgcgccaccggcaatatcaccttcattaaggcaagcccggataccagcgtgatcgtgcccgcaggcaccgtcatccagaccgaacgcattaacggcgtcatttacgccgtgaaaaccacacagcaggtggttatccccgcaggaacggcacaggccccggtcagcgcgaccgccaccgacagcggcaccgcgtttaatctggcgccgggctactaccagatcctgccggaggctgttgacggcatcgctgcggtacgcaatgacgataactggctgaccacgccgggatctgaccaggaaagtgacgacgagctgaaagaccgctgccgcaaccagtttaatctggcgggcagttaccacacggacgcggtgtatcgcagcctgatagccgcacaggcggggctgtccatcgaccggatattttttcagcatgacgcgccgcgcgggccgggtacggcaaacgcgtttctgttgctggacaccggcgtcatctcacagccctacctcgaccgggttaaccagtacatcaccgaccaggggcatcatggccacggcgacgatatacgctgtttcgccctgccggaaacccgtcacgatctggcggtcacggtatacgtcaaaaatctggccaatatcagtgcggatgataccgcagcactacagtcaggcgtggaaaacctgatccgctgcgccttccgggaaaacagtaactatgacgtcacccgcacctggccgtacagccggttttcattttcacaactggggcgcgagctgcatgacgcgtttaccctggtggattccgtcacgttctccctgaccgatatcctcagcgaactgaacattcccagactgaacaccctgtcagtggaggtgaaagatgcctga

SEQ ID NO: 388872 - DNA, 573 bp, Salmonella enterica
atgcctgacagactgccggacattacactgccgtcatggatgaaccgtggcgatattgtccgcctgaaaaataccttcacccgcttctgggggaaggttcacacgtgggttacctggccattacgccagaccgatccgctgacctgtgccgaatccattctgaacctggcggcctggcaatatgacatcgcccgttttaagggggagccgatttacctgtaccgcaggcgcgttaaatacgccttcgttaacgcacaggatgccggaagcgtggcgggatttaagaccatttttgaacggctggggataggctatgtggagatacgtgaacgtcagccggacaccgactgggatattgttcttttgcgactggcagataaccagatatcagaaaatacagccctgctgaaccagatcatccgccagtacgggcgtacctgtcgtcgctatcgtctccaggtgattaccagtacgaccagtatgaccgggcacggttactggcatggcggataccattatttttacgcaccggagaaaaaagatggcacagagcgttatcacttcagcctttga

SEQ ID NO: 388873 - DNA, 1713 bp, Salmonella enterica
atggcacagagcgttatcacttcagcctttgagcggctgaaagcgcaggaagccgcaggcggaaaccgtatcattattgaccagttcatttttgcgaacctgcccggccaggacgctgacgccacgccgtctcccgacgagacgataccggcggcagaacatatcgtgcatacacagcaggttgataaaaacggcatggtaaacgaaaacaccgtagcctactccgtcacgctgcctgaatcagcaggtaattttacctttaactggctgggactggtcagcagcgccacgaacaccctgtgtatggtggtatacctccacccccaggagaaaatcaaaaccgccgacggcatacagggaaatgtcctggtgtactccgaaatcatggagtatgccggggccagcgtcgccaccgggatcaccacgcccgtcagtacctggcagattgattttacggcccgcctgcacggtatggatgaggcgacccgcaaggcggcgctggacatctacgggccgggtgtgttctttgacgacgcctttaagctgaccgccagcggaacgggacaggccacgtttgcgccgggtatcgcttatctgcgcgggctgcgtgtggagctggaaaccagcgggacactgactttcccgacaggtgtgatacagacggtttatctggatgcggcattaaccggcacgctgaccggtgaaaataaggccaccttcagcctgaccagtaaaatgaccgccgactatacggacagcagcggattttcacactatgtcgaaccggtggccaccatatcagccagtggcctgattacggatatccgtaaaacccgcaggccattacacaaacgacttgagggcgaatttctgacccgcgacgctaatctgtctgacgttcaggacaaggcccggagccgggagagtctggaggtttacagcaaaaccgagagcgataaaagctacctcgccaaagaccagaatggcgcggatattccggataagccactgtttgtacaaaatatcggtttaaaagaaaccctcaacccgacaaaacgcgtgagtatcggcaataccggaaccggcgcttttgacggcagcacaccgtgtataaatatcggtgacagtgacagtggatttattggcagcgcggatggtgttattgatatttattgcaataacggcagggtgggttatatcgatggcaacggattacacatgctcaccgatattcatttcgataatgcgcgcatgaccaataatggcgatatttttagttcagtgtgggggaataactggctgagtacctggatgactaaccagctaaatacccgagggacgattgactggatcaatggtcaactgacaattcgtgacaacaacatcaacgcccgcgccaccattgattatgttaaccagactttcgcccgtaaaaataccgccagtctggccgttaacggctggttccgtgacgagtcaaccggctggatatttcagtggggagtaacgccgtttgccggaaacacgaccatcaccgtcagtctccccataccgtttcccgtccagggatttctggcgctgggcgggcctgcggatgcgctctggtacggcgaggatgataactccagttacgcatcactgctgaacaacagtcagttacgggtcaccacggacaccaacgtgggaacggcctggatagccataggacgttaa

SEQ ID NO: 388874 - DNA, 591 bp, Salmonella enterica
atgatgtatcactacagcccgtcaaaaaatatgttttaccctgaccagatgaagcaggtctatatcgatgccgggatattcccggatgacaccgttgaggtcagcgatgatgtctggctcgagttcgccggtaatcacccgcccgacggtaaacaacgcgcagccggtagtgacaatatgccctgctgggtggatatcccgctgccggatattgacgatgcccgccgccggaaacacaccgaaattaacacctggcgtaatacgcaggaaaacgcgaattacaccttcacgtttaacaatcacaactgggactacggcaaggccacccaggagcgattaagcctctcagtacaaatggctaaatcaaataaattacctgaaggctttatctggacggacgccgataataacgacgtgccgatgacttccggggaattattaaatctcagcgacgccatcgaccaggcgatgttcaccaaaggcctgcaaatccatatgcgccagcgacagatgaaagaagaagtggacaaactgaccgacgccaaatccgtcctggattatgttgtcggctggacggagggagcagaatga

SEQ ID NO: 388875 - DNA, 1002 bp, Salmonella enterica
atgataatcagcaacccgggattcggcgttattggtgccggtgccgccagctccggcacgccatcccccgcaacgccaaaattttaccgcccggctgaggagcgcggtatctggcagcgttcgtatgacggcacggagagaaccagcaagtggacattttcaggtaacctgacccgcagcagttacgacgtggttttttccggcccggatgcctgggaggttcgctacccgttatcagagcctgcgaacccgctgcgctacggattcagcacgcgtttttcagtgttactgaacgataacagtgacaccgcgctggagggtaaagacctggcagaggtgcgcctggtgatttctgacgacagggtgccgccagattaccaggttcccccggccacgccggacaaaccccatctggtactggggtgggttgcccgttatcaggataacaagttgctgattttaccgctggacagtacggaaacgccatcagaccggtttgcaactttgtcagtctccccgcgtaacacccagttccactttggtctgtcgttgaatcctggcagcccctggcaatattttatgtatgaaagtaaccgtaacggagtcccgttacggttgacacgaaccagcgtcagcacaccggttaatacactgtgtatccgttccatgacaccggcaaaagaaacgcatttcagctatctggaagtggttgcaccacatgaggtgttcagtcaccggctgacgccggaggatgacggggccacattctatttcccgtggggatacgattcgaactccgggatgatattgcctgacacggaactaccaccaggattcagcgtgacgtcactggcagaaacgtttgtttccccctccattttactggaaaacaacaacattacatttatcaccgtccgtggcgagtcaatatcaggaaataaaacggggtcagggaaacagtggatcactcacgtcggaaataaaatctggaatatcagataa

SEQ ID NO: 388876 - DNA, 528 bp, Salmonella enterica
atgttctgctgcatcgctgcttccagcgcggtgagttcgtcagtggtcatcgggacatcgatgttgtccgcatccgtccagaagaaacctggcgggagttcgccagatttggcaacagcgacaacaggtgcaaggcgggtttgtgaggctttaccacagtcccagcggtggccgttgaggacgaaaatcacgctgccgttttcctgttcatcacgccacgcgttaatttcggcccgttttttctgcctcgcggtctccatgatgaatcccggtaccggaatggtgtacagcgattttatccgggccagcatccacgcgtccgggccggattcgtcatcggtcaccgtgacgggtaaatacactggcgccccgtccgggttcgtggcaccgtcaaactgtacggctgcaaaaatcagcccgtcactcacgtactgtgcggtactgacggcggtgatgcctgtgggtgtgtttatttcagtcatatctgtttcccgttatctgatattccagattttatttccgacgtga

SEQ ID NO: 388877 - DNA, 1689 bp, Salmonella enterica
atgaaaccagttcgtgatctcagaatcgacggcaaacccttctccgtcgtggaagaaaatattgtgctgcgtctcaatggcgcgggaacgggttttatcaccatcaacgacaccgacgacagtaccccgctacggggtaagtcagtggatctttccatcggctacaacgaccagccggtcagatggttttcgggctatgtggaaagcgacagccgcacaggaaaggggctgcgtaagctgatggtgcgtgaagctgctgccattctgcaatacccgctcaacgtctcgatgcagcacccgacgctgaaacaggtcgcaaaacacatcgaagacaacaccgggctacgcgtgcaactcccggacgcggactacaccaccacgccgatcccacacatgacccataacggcaacggctatcatctgatggcccttcttggccgcgcattcagcatcccggattacgtctggtatccgtcagtcgacggtatcatctatgtcggcagctttgccgattgccgctttgcaaagcgtccggtacaactgccggtcgaaataaccaaagacgaccacggggccaacggctggacaatacagacaatccccgtgatgcgtcctggtgttgtcatgaacggccaccgtataaatcaggtacagctacagggcgacagcatgattattagctggagtgatggtcgtcagtcacccatgcagcgccagattgaaaccctctacccggagctgggcaacaaaacccacctgccgcgcatggggcgtgttatctccccgactgaaaacaccactcagggcgatttgcatgatgaatttcgcccgcgctacgctgtcaacgtgcagccgctcgacgagaacggcaacccggcgaaagacacgccggtctataatgccgtccccatccccgtaccgatggccggtagtgaatccggcctgttccagtacccgccagcgggaacgctggttacgctggcccatgtcgatggcagaccggataaacccatcatcaccggcacccacgccagcggccagagtctgccggacataaagcccggcgaacagctacagcagcaacgcgcagaggtgttccagcgcgtacatacagacggtagctggcagcgggaaaccgatcaggccattcgcgagaagtccaccgaccgcaccatcgagaacaccacggaaacgcgcaccagtaccacgcgtaacgtcaccgtgaaggccaacagcaccatgacggtgctcggcacccataagctgatgagcggccatatacagcacatcgcagacggtgactatgccgtcgccgccacgaagaaactgatacagcacgccgacagcgccgaactcgacgtgactcaccagtggcagaccagcacggagaacgccactcacaacgtagcgcaggtactggaagaaaagattggtcagattaagaaatccgtcgcgggacaaatgcagcagatagtcgccccacaggtctggtttggcagcagcaccatcaacacactgagcctgatgctcgagctttgtgacaccgttcagcaactggcgcagctcaccgcgcagcacacccacaccagtaacggcagttcaccgcccaccaacagtgggagcataagcgccaccgcatcaacggcgggcgacctgaaagcgaagtacagcgccgtgattaagcagtaa

SEQ ID NO: 388878 - DNA, 573 bp, Salmonella enterica
atgagccagaacaccacatcattactggcgctgaacggtcaggtgatcccgctgcaacgtctcagcgtcagcgtgaagctgaatatccgggataaggacgcgtcaggacaatcctcatcaacagccacctcagaacagggggtgaaagcgaaggaattacaggtttcaggtctgatcccgtttaaccagccggagtccctgacgctgattttccggctggcagaagccaaaggcagtaatggtgcgcaacaggtttaccgtatcggtaatctggacgccagagcggtcaatatgcagcagggtattttttccggtgccgtaggggccacgcctgaacagggattaatggcctggaaagtcgacttcaccctgaaggaaaaactcagcagcgccgaaaaagccatcggacgcggcccggcaggcagcgccaccaacagcagcgccgatcagcacgcacaggccgccaaagcaggcgccaaagacggcaggccggaagaacacggctggttctggcacatgtcagaaaagcttaacaacctgatagggcccgcaggcaatgaaaccagttcgtga

SEQ ID NO: 388879 - DNA, 705 bp, Salmonella enterica
atgtggttcagcgcacagctacacatcccgtcaggcgcacagccggtgacatgcagccatatcaccgttcatccctgggatgcgaaaaccggccatgtcacaccggacggcagttatctcagtccgccaaacgccattcaggcactggcggataccttatccacggtttccggccatcaggacgtgatggtgatgatggtctgtgacagcacactgaaagggtttgccgcacagttgtcacagatggcggatgccctgcccctcccctccctgacacaggtcgccagacgcgccaccacgcagatcacccaggcggtcacccggatgcagataccggcgtcaccggtaaccgggctaccgacaccgcagccgcttattttcagcacgttacagaacatcgtcagcggtaacgccgccctgaacgccctgcgttctgaggggctggccggaatggacaacctgaaagcggcattatccggatttcaggcacaacgacagcagcacctccgggagataaccgacagcctgtcagggccaggaaataaagcggcgaaaatattcgcctttgtacataccggcgatgtggccactgcccgtgaccacatgctgaaaaatattccttcccccgcagcgtcagtgacctgcgccagtctgtttacaggcgatctttccggcatgatgagctggataacggaggaaaaatga

SEQ ID NO: 388880 - DNA, 246 bp, Salmonella enterica
atgatcacacaaaaaatggcgctgaccagcaactggcagcagctcaccgacggcacaaaaaccgtttatcttgacccgtacagcggttctgccggatggtgcgtcagtgacacgcagccacagcctgacgctgattttcatattctgaaaatgccgatcaccatctcacccccgacaaaagtctggataaagagtacgcgtgagtggaagaaagatacggtcgtgaccatcagcgtgacgggttaa

SEQ ID NO: 388881 - DNA, 387 bp, Salmonella enterica
atgagtaaattcaccacccccgcgattctggagatgctggagcactacaggtggcgcgtctatgaaccgtttgagttttacctgagcgatgacaacagcgatgttattgaggtaccggctggtttcgtcaccgacctcgccaccatcccgcgtatcttctggacaattctcccgccagacggcaaatacgccaaggcggcaataattcacgactggatgtacgacaacgcgctacgcacaaagaaagaagccgacaaaatcttcctcgacgggatgacggtgctgggcgtgccgaagtggaaacgggccatcatgtaccaggcggtaagactgttcgggcggggaaattaccgcaacaaacacactgaaacaggagcagcatcatga

SEQ ID NO: 388882 - DNA, 447 bp, Salmonella enterica
atgggtacagtcacatttgacagcaaggtgtttgtcagtctgtacccggagttttccgcagcgggagcggtggtactgacggcggtgtttaaccaggtgacggcgttgtacctggataacacagacgaaagcccggttgccgatctgaacgagcgggagcagcttttgtttctgctggttgcacatctgtgctcgctgcggggagtgggaagcgggaaagacgggcagtcggggctggtggggcgtatcaccagtgcgtcggaaggttccgtttccgtctccgtggacagtagcggcagtaacgatgcatcgtggtggtatctacagacgccgtatggtgcagcctactggcaggcgacagcgccttatcgctccatgcagtaccatcctggcggctccccttcccgttatccggggcattactaccggagaggcagacgatggtaa

SEQ ID NO: 388883 - DNA, 2202 bp, Salmonella enterica
atggcagcggtacttgatgagctggttctggcactggatatagaaagtaaggactttactgccggggaacaggctgcgcacgctgcactggaccgactgaccgccgcgatggagcgggtggcggacgttttcgaactggggcaaaaacaggccagcaatgccctagcgaaaacaggcagtgatgcggataaagctgcgcgtgagacggaagccgccggcgagcgcacgggtaaggctctgaagaaaacaggttctgacgctgataaaactgccgcgggtatggagcaggcggggaagcgaaccggtgatgcgatcgcgaataccggtaaaaaggccgaaaaaaccgctaagggaatggaggcagcaggcaaacgggcatcaacgtttttttccggcatacgtacccagatactggcgctggcaggcgtcaccctgacgctggggggaattaaaagcctggtcacggattttgccggtgatcttaaccggctgtcaatttcctccgatgcctttggcatgaaagcgaaacatctggacggctggatacgcgcaggacaggcgaatggtactgacgctggcgagatcaccggggcgttttcacggattacggatgcaaaagccgcgttcaaagccggaaagtcctttgatcctgtgttgcaggatttgtttcaggttgcagcccgtgcgggtgtcagtgttgatttaaataccgacagtaccgaagtcatcatgcgcaagctggcgtctgcctttccgcgactgacaaagtcagaacagacagcctatggtaatgcactggggttcagttatgccgggcagcagtttcttggctcaggccatgcgctaaaggacgttgacgattttaccttacgttcgcaggtctccgacgataaaatccggaaagcccgcaaattgcgggaagcccttgcagaactggaccaggtctggtccaacatcgggatgacgattggcaccgcgctgatgccgtatgccacggaattcagcaaatggctggagaaactcggtgactggatgcagcaacatccggaggaagtgaacaagtttattacgggttttctggataaagttgagagtatcgcctcgaaggctaacgaagcagcggatgctgttggcggctggaagaatgtcatagagatattgattgggctgcaagtggcgtcatgggtgtggaaagtcgttggggcgtttaaggggcttcgtggagggttgacagggccaactggtcttattgccgctttactgatgctggaagacctggtcgttaagcccctggaaactaaatacccctggctgaaaaacaatgctgccgcagattttctcaataatccgccgcttacagataaatttgatgcatggggtaaagctttccatgactggctaagggaaacaacggggatcaatttgccgcgaggcgatggctatgagcaggatgacccaacctggagtacgatgggcgatgcttatcgccgctggaataataaactgaaccactatttacccgaatggctggggggcgcaggggataacttgtgggcatcggagggaccagaacagcacgcacaatccgttaagcgtccgcatccgacactcgcaggcgaaaggttacttaacaggctgcaaccgaaactggctcaactggaggagaaatataaccttccgcccggactgctgcgcagtgttgcgatcaccgaatccgggggcgaacagtatgctgtttcccgcgcaggagcgatgggaccttttcagtttactccgcctacggcaaaagagtttggactcaggggctacgacgttttcgatcccgaaaaatccgccgatgccgccgccagaaaattgggtggcctgatgcggttttttcatggcgatctggctaaggctctggcggcatacaactggggtgagggaaatgttcagcgtaaggggctggctgctgctccggaggagacccgtaactatattccccgcgttctggcgaatctgcctcatccgggtgcggcaatggccgtacagtctcgtcatccggcacctgtatcgcagtccaccgtaacggaaaccacgcatatcgggacgctgaacgttaccacgacctcggacaatgtgaagggcattactgatgatgcgcggcaacgtatccggaactcggcgcttgtgtcggtgtattccagcggggtaacaggatga

SEQ ID NO: 388884 - DNA, 498 bp, Salmonella enterica
gtggtccctgcgggccggtgtcgccctgcggtccctgtggccccggttcaccctgtgggcccggggttttcgcaatctgcctggcctcctccagcgcctgctgtgcgcctgtatgactctccgccgcctgtgccgctgatgaaccggctgccgatgcgctaccggcggcagcctgcgcgtaaccgcccgccgcctcttccgacgccaccgcctgttttgcatgagtttttgcggcctccgcgtactggcctgcgacggccgccgaggccgctgctctgtctgcgccactgcctgacgtgtccgccgcggtttctgcccgctgcaccagggcatcaaactgccgcaacgcctccgggcgggtgtcactgttttttgcgttcaggaagctgttcagcgtgccgtcgggagagtcgtcataaatatgtactgaccccagctcaaaaccgccagtcccgttctgtgacaggcgaacgctgtacacgcccggtgttaccgtaa

SEQ ID NO: 388885 - DNA, 222 bp, Salmonella enterica
atgctccagtttacggatataaatatctgcggcgctgctgacacccagttcagccgccttcacccgcagcagctcggtacgggtgaggccctgtaccgtcgtctgctctttcaggcggcgtataaactgtgcttttttctgcgtggccagcgcttcggcatcggtaagctcacgggtcttcctggcggtttcagacaccagcgccagataatcgccctgtga

SEQ ID NO: 388886 - DNA, 549 bp, Salmonella enterica
atgagcggtaagactttttacaccctcgacagggctggaacgttagtagaagatgctcgtattgattatcaggatacttttagcccgatcgtcgaacttaaagagcatatcgaaagccgtttctggcagaaagtatcaaggcacggtaataattaccttttcaactacaatatcaaccttctaagttcaaatgaaaatttaagcgttttcatggagatgctgcttgaagaaagaagacgtgcaagctttcctgataggccatcacgatttcgatcactttttgcctgtgagactgtccgcgaagcggcatggttccggggctcaagcaaagccaatctgagcacagcgatttatgaagttcattctgagcttgtttgtcacagggcagatatgaagctactcaatgtaaactgtacccctccagaaatgtcacaccgactggatctttactggcaaggtaaaacaaaagaattgtatcccggctatgaaccattttgggaagtacttgtaccgttgcctgcaatcattggtaggaggattcaggaataa

SEQ ID NO: 388887 - DNA, 939 bp, Salmonella enterica
gtgggggctgaaatgaaccataccatctaccacggcgactgccttgacgtcatgccgacacttgaacacggcagcgttgaccttatcgtgtgcgatccaccctatggcacgatgaagggggctaacctggacacatggagcgctgcaaccacgcagtgggatgacgctatcgatcccgtagcactgtttgccgcgtgcgaacgtgtactcagggttaacggcgcactggtattgtttgcccaggaaccctacacaagccgcctgataacgcaggcgcacagcaacctgccgttcagttaccgccttgcgtgggagaaagaacacttcggcaacccactgcaagccaaaaacgcccccgtatcatattttgaggacgtgctggtgtttttcaaaaagtacgaaccgaaccttaatcatccgatgcgtgaatactcccgcagggtaaaggcatttaccagggcgacggcggcacaggtagagcgcaagcttggacaccggggagccgatcactttttgggctgtgacgctgtccagttctcgctacccacacgcagcacctacgagcaactgaccatcgcctacaacctgaccgctatgccgggttttctgacatatgacgaaatgaagcatggcgaaatgacattaccagcgcgcgttttcaatctgccaccaggcaaacggcataaacctaacattctgaaatatgcccgcgaccgggaaaaatatcatcccacccagaagccggtagcgttactggaagatctgatccagacatacagtaaccccggcgatacagtgctggatttcacgatgggaagcggttcaacgggcgttgcctgcatcaatacaggccgccgctttatcggtatcgaaaaagagcagaagtatttcgatattgctgcagccagaatagaaaaatcagggcaggtagccgcatga

SEQ ID NO: 388888 - DNA, 465 bp, Salmonella enterica
atgaaccgcataactactggcgtaatagtctcgttgctgattgtcgctgctgcgctggcgtggacaacggaccactaccacggtaacgccgtgaagtacaaagaccagcgcgacacagttactcataagctggcgctggcgaacgcgacaattaccgatatgcagacacgccagcgtgatgttgccgctctcgatgccaaatacacgaaggaattagctgatgtacaaaacaggaatactgatttgcagcgccgccttgctgctggtggccgggtgcgcgtcaaaggacgctgtacagtgcccgccagtaccacatccgccagccccggccgcgtgggcaatgctgccaccgtcgaactctctccgggtgctggacagaacgttctcagtatcagatccggaatcatcagcgaccaggaaaaactgaagtatttgcaggagtacatccggatgcagtgcagataa

SEQ ID NO: 388889 - DNA, 384 bp, Salmonella enterica
atgtttttaaagaaagacacgcttaactatggagatgcttccgttgagttgcatgagctttccggactgcagcgcgttgaatacctcgaatatatccagcagcgaaccgcgcagtatgacgaagaaactgcagatgcgggcgaagaagagaggcgagtcgcctttttgcgtatgggtgttgatatcaacgcctggctggtgtcccgctcattgtggaacagcgatcagacgcaggatatcgacaatctcagtagtcatactgcgtccctgtggtcgtatgaagcgcttggacagggagctgatatggttcttttgcttagcgggatgaccgcccccaacagtgatgcagaactcaaagagacagattcgccggaaaagccctga

SEQ ID NO: 388890 - DNA, 357 bp, Salmonella enterica
atgtcgcagacagacaatctttttgatacagccctgtcccgtgcagatgacgccattctgggtgtgatgggaacgacggtacaggtgacatcaggcaccctggcaggcatcacgctgaccggggtttttgatgaccctgaaagtgtttcatatgccgcgggcggcgtcagaattgaaggggtaagcccgtcagttttcgtgaaatcgtcagctgcgcggcaactgaagcggggtgacaccctggagactggcgggcggcgttactgggtggacagagcgggaccggaagagagtggtggaagccgggttatctggctgggaacgggagatccaccggcagataccaggcgacggtaa

SEQ ID NO: 388891 - DNA, 384 bp, Salmonella enterica
atggcaacaaaagaagagaatatcgcccgtctgcaggaactcgccgtacagctcggtcgggagccggatatttccggcagcgccgccgaaatcagccagcgtgtcgatgagtgggaggaagaagcggctggtatgacggccggggagactgctgaaaagatatctgatgccccactggacggggaggaagctgcaaaaaatgatctcagcggtcttcatctttccgggtttgtccttatcagggcgacccgtacgcttcatattcacgcgctggcagcagacagcgatcggattctggataccgttcaggcaggggatttggcacgtattcaggaaatatatgttgatgaactcgcgcgcgacggactgattgttgcgttatga

SEQ ID NO: 388892 - DNA, 1494 bp, Salmonella enterica
gtgcaacgtaatctcccgcatatactcagccaggccacgaatgccccgctgttacttgaacccgcctatgcgcgggttttcttttgcgcgctgggcagggagtcaggggccgccagtattcagatcccccaggcgcaggaaaacattgaccaggacggtatggcacttgttaccggcaattttatgtcgggtggcaaaccacaggcgcgcttttaccaggtgatgaatggtattgccgttctgccggtatccggaacacttgtgcacaagcttggcgggatgcggcctttttccggcatgaccggttatgacggtatcaccgcccggctgcagcaggcaatttccgatccagaagtgacgggggtgctgctggatatcgacagtccgggcggtcaggctgccggggcgtttgactgtgctgacatgatttaccgtctgggacaacagaagccgatatgggcgctgatgaatgatatgtcctgttcaggggcgatgctgctggcgtctgcatgctcccgccgcctggtgacgcagacagccagaatcgggtctgttggcgtggtgatggcgcattccagctatgccggacaactggaacaggagggcgtggaaatcacccttctgtattcaggaaaacataaaacggacctgaatccctatcaggcgttaccggatgacgttcgtaccgactatcagcaaaagatggatgctacgcggcagatgtttgccgacagggttgcacagtataccgggttgtccgcagaggccgtcatggcgacggaagccgccgtctacgacggccaggcgggtattgatatcgggctggctgatgaaatggtaaacgctgcagatgccgttacggtaatggccgcagcactgaagaacaatacaacaggaggcactatgccggaattaacagcaacagaagcggcagcgcaggaaaaccagcgcgtgatgggaattataggctgccaggaggctaaggggcgcgaggcactggcgcaaatgctggccgggcagccgggtatgagtgtggcacaggcgcaggccattctgtccgcagcgccgcaacaggacgttatcagcgaggccgatcgcattatggcgcttgatgaggcgaaagggcgcgaggagcttgccgccacactggccgggatacctgagatgacggcagtacaggcaaaaacgattcttgccgctgcgccgtataccgtttccctcagcgacagcattctggcgctggacgaggcgaaggggagaggggagctggcggaaaaactggccgtcatgccggggatgaccactgagaaggcgcgggagcttctggcagcagcgccggaaggcacgggatcagccagtgcgaacatgaacactgcatttgatcagttcatgcagacgcattctccggcatccgtttcaggcggtaaaagtaacgacaacagcaacgacagcgaaaccgcgatgctgatgagtattccgggtaccgccgcataa

SEQ ID NO: 388893 - DNA, 453 bp, Salmonella enterica
gtgacgtcaacctgcagtgtttcggtgccgacggaggtgaattttgacccgattgacaaaaattcgctgcccagtgactccacctttatagaaagtaagaactttgatactgtgttttcgaactgtaaggagaaatccctgcagatgagtgtgcaggcttcaaattcattaataatgggggggagcgagtcgtattttgattcaggcgatcctgaccacgtatttatgtatgatattcagccgccaaaggatgcagagattacagggggaggtgtgaccctcaataatacaagagtatttgctcttggtaatactcatcctgtgcttattaagcccggcagcgataattataccatgtcgtcaaaagttgacttgttacacgacttggtctccgcggctaacgttggttctgcattaagtgccagctttacttataatatcacctaccagtaa

SEQ ID NO: 388894 - DNA, 519 bp, Salmonella enterica
atggaattaaaaaacgttcaccgatacattcctgataacccggattatgatagcaattttctgtattttcgtagtgaagatggccaggatttttatgagtcgctgagtaaattcacgaaaaaatataagttgtgcattgattctgaaaatataatccgttccgtatcagaagatgtctctcgtctttatccggctggtttttcggttgttgaagtaaacaaattgcctgccggatttaatatctttggcgactggcagtataagaaaggagctgttgtcgctgttcccgttaattatcatgcaaaagccgaaactacacggcagaaactactggatgccgctaacagcgccattgccgactggcgaaccgaacttgcgctggatgaaatcagcgacgacgataaggccaccctgactaaatggatggcgtatatcaagggacttaagtcactggatttaaaaggaatttcagacgaggccacctttaataaaatacagtggcctgcattaccacagtaa

SEQ ID NO: 388895 - DNA, 396 bp, Salmonella enterica
gtgaagtacaaagaccagcgtgataccgctactcacaacctgaagctgtcgaacgcgacaattaccgacatgcagacgcgccagcgtgacgttgctgtccttgatgctaaatacacaaaggaactcgccgatgcgaaagctgagaatgatgctttgcagcgccgccttgctgctggtggccgggtgcgcgtcaaaggacgctgtacagtgccagccagtaccacatccgccagccccggcagcatgggcaatgctgccaccgtcgaactctctgacgttgctggacaaaacgttctcgatatccgcgacggaatcatcagcgaccaggaaaaactgaagtatttgcaggagtacatccggatgcagtgccagcataatggcggaaaggaatggtaa

SEQ ID NO: 388896 - DNA, 552 bp, Salmonella enterica
ttgagcaataattccagtacggagccgggatggcttacacctgtcagcggcgacccggattatgacgaggcgctcgacaggctgttaagccagtgggtacgcaacgtttccggtttgccgactggaatggttcgcccccgatggcagaaagatcaaccgccactgctgccagttgaaacgaactggtgcgcatttggcatcatcgaatggcccattgatgataatccagcattcatcaggcaaacagactccggaacagagctatggagacacgaaacatttgtcgcaatggcatcattttacggtccttcaggaatgaagtttgcctctattttccgcgatgggatatctgttgagcagaataactccgaactaaatcggatggggctgacattaggcgatgtcagttccattaccccctttcctgaacttatcaaccagcagtggctacgccgttatgacatcacggtgaagatacgccgcaaagtcacgcgcacatacaacattaaatctatcgtcgacggtaatgtcgcgatctcaaccggagattga

SEQ ID NO: 388897 - DNA, 1152 bp, Salmonella enterica
atggcgaaaggcttgcctttaaaccgcgtcaccaacgtaaccgtgacgctttctgccagagctgcgcagggccgaaatttcggttcgatgctgattctgggtaattccactgttattcctatcaccgagcgtctgcgcatgtattccgatccggcagatatcggggatgatttcggcgtcgacagtgaggaatacaaagcagctgtagtctggttctcccagtctccgcgtccgacgcaactgtatgttggtcgctggattgatagcctcacttcggctgaatctggccctactgaaactctgctgcaggcggttaacgcgttgctggattacaactcctggtatggtctgcatctggccgttccggtggctgactatccggatgatgctgacctgatctccgtttcgtcggcgatcgagtctgcgaccgtttcgcgaatcctggctataacttcgagcgaagcggatattctgagctcggcggttgaaaccgatttggctaccaaactgaaggccgcaaaatacagccggacctatatccagtattcatctaccagtccctatgctgcattgtcagcgtttggacgtgcgtttacggtcaacttcaccggcagcaataccactatcaccctgaagttcaagcaactgcctggcatcacctacgaaaccatcggtacatcacaggcgaatgctctggaagcgaagaactgtaacgtttacgtgtactacgaaaacgatacagccatccttgaacagggtgtgatgtgtaacggcgatttcttcgatgagcgtcacgggctcgactggctgcagaacgcagtacagacagccgactacaacacgctttacaccagcaccacgaagatcccacagaccgatgctggtacaacgacccgaatcgccaacatcgaaaaagtgctggatgtggccgacaaaagcggtctgtttgcaccaggtatctggactggcggaccaatggggcaactcggaactggcgacaccctgaccaaagggtattacacctgggcggatactgtggacaaccagctgcagaccgatcgtgaagcgcgtaaaggcgtaccgattcaggtggccgcgaaactggccggggccgttcattacggcgatgtagcaattaccgtggttcgttaa

SEQ ID NO: 388898 - DNA, 441 bp, Salmonella enterica
atgggtgcttactcttttcttgatatttcggcttctctttccgggccgacaggttcattagatcttggggctggttctgccaactccgaagaggggatcacggtcacgatgaccgaggcaaagaacacgatgactatcggttctgacggtgaagtgatgcacagcctccacggcggcaatagtggcgttattaccgtcaccctgcttaaaacatcccctctgaacaaaaaactttccatcatgtacaacgcgcagcgcatgtcgtcagcgctgtggggaaataacgtgatcgtcgtgcgtaacagggtgtccggtgatatcggtacggcgcgctcctgtgctttccagaaacagcctgactggaataacccgaaggtagccggaacggtcgcctgggtatttgattgcggcaagattgacgaagttctcggggagttctaa

SEQ ID NO: 388899 - DNA, 348 bp, Salmonella enterica
atgcgtgatatgtacgaagttatggatcgctggggggcctgggctgctgcagatagtagtggggttgactggcagccaattgcggctggatttaaggggcttctaccgcatggcaaaaaatcacgtctgcaatgcgatgatgatgagggcatcatgatagacggatgtgtggcgcggttacgtaaatataagctggaagaatatgagttgatcatagcccatttcgttgttggcatctctttgcggaccattgcgaagaaacggaagtgttcggatgggactatacggaaagaactgcaagcggcgttgggttttatcgatggatgtgtatgtatgttgggacaataa

SEQ ID NO: 388900 - DNA, 561 bp, Salmonella enterica
atgtctgtattttctaaggtttttacacctgtagattacgtgcgtattaagcacccagaaaaacgcttttttgattgggttctgccagtccttactgctgcgatcatcactattgtaattagcatattgccaaaatctgtctcgatcataggtaaagacagcttagtatctttggtgaatggcatccttcagatactatctggtttctacattgcttcaatggctgctgttgcaacattcagcaaagaaggaatggatgatgttatgcaaggtgaaccacctacactaaagcagcaaaaattaaccagacgtaaatttcttacatatctttttggttatctggcattcatgagcatagcgttatactttattgggggagcacttcaattaaccagttccagcatcaaagaattgcatctttcatcaatacctatgctcaaggcgacattgctattcgtctatctgaccgcagtttgtaacattatttatacaactgcgttgggaatgttctttatgattgataagatgcacgatgaaaaaaataaattgataatcaaatag

SEQ ID NO: 388901 - DNA, 936 bp, Salmonella enterica
atgcttttaggggataatgaacgtttcatgatcaaatgtcaggtaaccttgaaaaggtaccctgaagatgcaccagacatgcccttgattaattgtatccctgttctcaaaaatcgctttctttcaagtgaagctgtttatgaattaaataaggggcgctctgttatcagattgttagccctgcaagatgatggtgagtatctgaagttacttttccaatacattaacaaagatgcatcagacccagccttttcaaacataaaaacaggcgcaaccagaatcgaaaagaaacaaaatgatgagggtatggggtattcggcacatttattaattaagaaaacgccgagtgatccacacttccctgatagctacgaagctgttcttgaagaagtaccaggcatcacgcgcgcgctcttggcacaagctttaactgcttttcttcgtgagaataatttttcctttatccgtaaagatgggaaaaaagagctcaaatgtcgaccaatttttgagattgatttcttagcggcaacaaccttggaacaatcgctttctacaggctatctttgtggactcattgctactcgtcgctttaaagacagctcactagatgatgacggcacagttatgattgaagaagagacgcttaaactggcaacaaagattcgtcgtggagaaggcgctattcgggcaatcaaagcagcctacgataagcttcgcggacgtaagttcactacattacgaatttcttacaaagataaaaacaaacgcgtatcttcggatatcgttacgatcggcaaagaaatgagtcttcaggagctagccaccgcacaacttgctcatagggacaaggctgttttagcaacgaccatagcagtgtgccagacatcgcttcatgctgaactgctcggaaaaatgcaagcgtttatggtaaagtaa

SEQ ID NO: 388902 - DNA, 363 bp, Salmonella enterica
atgaaatcggttataatagctttgtttctggttccggggttattcatggcatctgctgttgcaaaacaaccagagtctgcagcggtttactcacccgggcggggcgtattatgtgatcagtatttttgcgctgactcaacaggtatttcgtttgttctgacagagcgctatgcaggttctgttcagttaaaaaagctgaaatctatgggggattttgatcgtacagcatttactttttcaaatggaattttttgtgatgtgaaagaaagattatgtcgacaggaccgttactttggcaatgatggtaagcgcagtggcgttgtcaatcagtacttcaccaaaattctatttggaaataagtga

SEQ ID NO: 388903 - DNA, 357 bp, Salmonella enterica
atgagactgaccgtaggcgatataaaattttctgaatccggttacgtatccacgaacgttaatgttgagcccggagaatacccatgtatccctctttcaatatgcacgatgcatgtttctgttccgctggtggaaggaaaaacactggagcagtacaaagacgaacttctgggagaagcgcgcgaacgaatttccggtatgtatcaagagattgtgtgcggtggaagtcaggtgctcaaaccctttaagacagaaattacctcatcccccagagacaagctggaagagcgtgttacgtcgctggagagatttgctacagatattacacatagacttaatttgtatacgcttaaataa

SEQ ID NO: 388904 - DNA, 219 bp, Salmonella enterica
atggacagaacgacaacaggcgcatcatacggcgtatctgctgtcacgatgatttactcatttcttgactcattcacacatgatgaatgggcggccataggaatcatgggcggcttattttttggtgcactgacgtggataaccaatgtgtatttccagcggcagcggttaaagattcaggagcgggaaagcagcgatgcagacagggaaaaaacttaa

SEQ ID NO: 388905 - DNA, 945 bp, Salmonella enterica
gtgcagaatgtattaattacgcagctttttaaagcgcgattaattaaagaccagtttgtaacaacccgaacgctgctggactttctgcatcatctgttgatggggcctggctatttgtttgataacctcttcaccggtgcagaaaatgatctgattaaaaaagtttccgattttgatcccgccagattgcacacttatgaacttgatcagtttgttttgcgctatgaattgggattggttgatgctgagctcgatgattttttagccgcacttgagccgttacacattaagtttgatcgccagtgcgttaagcccggtgacgcaacctccttgatccggcttttctggctattgcagcacgagtcgttgggtaatgattatcatcggagattttccgcgttctttaacgaatcgttgtttgaacgttactcagaaatctggcatttgcatagaaattacacagcagatccggagcaaaaaagatcactgaatcgcttttatgcttttgagcttatcgcgggtatccagcgctatgctaaccgcaaagcacctgaattaagtatgcaaaaagaagagttctttttgggtgagtttggtggggttaaaataaccgcgccggtggaggtaaagcctgattgggatgctatccgtaataaacatacggctcatccaactggcttcgatgtctatttaaaggtggggcaaaatccactaccgcatatccatatcgggcttaatttgttcgaattattggacaagttgaataatggctatcgtccgaataaatacgataaaaatgccatcgtgttactggatgaaattgttgagttgatcgcggagcaggctaaatccagcagcgaaatcaaattttatgatggcagacaacgggtttatcgtgcaaaggcggatgacgatatgatcactattagcggtatggagggttag

SEQ ID NO: 388906 - DNA, 414 bp, Salmonella enterica
atggaaaaatctaaacatgacgatcagcatcgtgatcgatttaggaaagataaaaatctaaggttgttacgccattattgtatcagtgtgcgtttgaatcaggcagagctagagcttttaaacaacagaaggggcaagcataaaaaaggggagtggttaagattaacctttttaaatcacaccccaaccgacatcccgttagtaaatgttgaagcttggaaaatgttgtcagacatatcgcaaaagctaaatcgaattgcgatccatatcgatggtaagagcaaagacagcaagcttacgaatacagaattgtttgcagtcagaagacaaattgtagagcttcgccagcacctgctaaatgctgacatatggagcaaacccgatgaagggtatgcagaagatcaaaaggggtaa

SEQ ID NO: 388907 - DNA, 1200 bp, Salmonella enterica
atgaagggtatgcagaagatcaaaaggggtaagagcttcgctggtgtcgttcaatatgcattgaaaccgggagcacatcataaaagtgatcccatcatcattggcgggaacatgttaggtgattcagcccttgaactaatcgctgaattcgatagcaccaagcatcttcgccaggatgtcgcaaaatcagtttggcacaactcgcttcgcttacccaacggtgaatcactaacgaatgaacagtggtctagtatcgcagatgactatatgaaacgaatgggattcagtgatacccatctccgttgctatgtgcttcatgacgatccggctggtcagcacatacaccttattgcaagtcgcatagatcttaatggagggaagctgtacttgggtaggaatgaaaatctcatcagcacccggattattagtgaactcgaaatcgctcatggcctgagagtgaccaaaactgcatcttcccactcgcaagtacaaccgaagcggaagagaatgtcccgtaatgagaaaatgctatcggatcggaccggtgttccctgccccaagaaatcccttcaacagatcattgataaaagtttggaagataagcctgaccttttaacttttatcaagaggctggaagaagcagaagtcggctggacggcgaatatcgcttctaccgggaaaatgaacggcttctcattttcttaccgcgatattgctttcaaagcttcgcaattgggtaaaagctattcttgggcaaatctcagtaatcggcttaactacgaccccgaccacttagaagctatgcaggctataaaggaagctatccctgctcctgctcctgctcctgctcctgctcctgctcctgctcctgctcctgctcctgctcctgctcctgctcctgctcctgcaaaagatgttgcaacaacggatattccaagggaaagcataagtgaaaaaattgtcgaactggaactacggctcagagaagacaaacggaatgaaatcgtagaaaagattcttcaaaaaaatgcagtacaaaggcaaaaacactccagacttagtggctggattccatttttaagaaggttcatagagcttctcagaagctatgggaagagcatcctccaccaggtccctccaaacttctcagtagtctattcatcacattatctgaaatcttcaagaaaaattcgtttatag

SEQ ID NO: 388908 - DNA, 267 bp, Salmonella enterica
atgaaaacatactcaatccttaccgttattcttacagcatttcttctaaccgcatgtaacagcgaaccctcagaaaaagatatttatacagctctaagaaaatggactggaagccatcttacatcagtgaaaaaagtagattgctcaaaagaatctgataaaagttataaatgcaatgtagtaacggtgattgatagtaatctcaaacaagcagtatcaattaaactactaaaaacagatgacggctggcaatttgtaggtaattaa

SEQ ID NO: 388909 - DNA, 447 bp, Salmonella enterica
  misc_feature (199)..(208): n is a, c, g, or t
atggacaaaaacatcatcaatccagagtttactctggaagagcaacttatcattattgtcgataagtatatctcaaaaagataccagccaggcgataaaaatttctcataccagctttacttaatttttgtgggataccatttgaaatatttctacccaagaaagctatacatttgttccaatcggaacatagacaacnnnnnnnnnntagacaacataatgacgatgttcagttctgtgtataaaagtctgacaggtaatctattgcgacaattaaataataaagaggcagttctccgagaactaaattctcttgttaactacatagattgcaatcaagataaaacagaagaaatttatacaacttttaaagctcaatatgaaatgagagtcatagagaaagagctaacccacgaggttgttagagtaagaaagttcagattataa

SEQ ID NO: 388910 - DNA, 2031 bp, Salmonella enterica
atgaacgctgagactattaaagattttctcgtctcccttggctttggtatcgatgaagccggatatgagaaatttgaatctgttcttactggcgtcaccgcaaacgccataaaaacagggctggcggtggaaggtgcggcgctgtccgttgttgcgtttacggcgaaaattgcctccggtctggataacctttactgggcgtcacagcgtaccggcgcaacggttcaggggattcagtcgattggctacgcagtttcgcaggtgggcggtagtgtggacgcggcgcggagctcgctggaaagtctctcccgctttgtgcgtaacaaccccggcgcggagggatttctgaaccgcctgggtgtacagacccgggacgccagcgggaatatgcgcgatatggccgccatttttacgggtgtaggtcagaagctcagcagcatgccgtattaccgggctaaccagtatgcgcaaatgctgggcattgacgaaaataccctcatggcgatgcggcgggggctcggtcagttcagcgctcagtattctgaaatgacaaaggcgattggcttcaatgcggatcaggccgctgtgtcgtcaaatcggtttatgacttcactgaaagcattcggtgaaatggccggaatggcccgagacaaaattggttccaaccttgctgaaggaatggctggttcgattgataatcttcgcaaacgcatactcgaaaatttccccaaaattgaaaccactatcacaaagattgtgaaggggattctctggctgggggatatcgtcggtcgcgtggcgtttcggatcgttgagggcgtgggagatattatcgactggtggggaaaactggataaagaaacgaaaaccctgacagaggttatcggtggtctggttgtcgccatgcggatacttaattctactttctggatgtcacctgtagggctgattactggcctgatcgtggcgctcggtctcttgtgggaagactacaaaacatggaaagaaggcggtaacagtcttattgactgggaaaaatggcagccagcgatagataaagcgaaggatgcgatggtctggctccgtgatcacctgctcgaacttaaggatagcgtgggtggctggcaaaaatcgctcgaaatcctcggaacgtttatcgctggtgtctgggtatccaaagttcttggtgcttttgggaaaatttccggtcttccgatcccaccctggctaaaattgtgggggctttacgcaggctatattgtcagcgacagagagaatattgccgatagcgcaaaatcttcactgagttatacgaagcgaattatcggcgacacgctggccgctatcggtataaaaacagatatcggacgcagggatgtcagtgaggttcgtgaatggcctgcgtggatggactggctacacgggggacccggtaaagttatccggcagggacagagtaacggtgtagtgtatggttccaacatccagccagatatccccggtggcggcactcttgcagatcgcaacaataaccccggtaacattcgcccggtgggcggtaacggcttccggttcttcgggtccgcccttcagggctgggaggcgatgaaaaaccagcttatgcgctaccttacagggaaaacaaccgggcgggcattacagaccattcaggatattgtcagtacctgggcgccggctggtgacaacaacgacccgaaaaagtatgcgcaggatgttgcaaaatggatgggcgtttcaccgaacactgtgttgaacctcgccaacccggaaactatggccgcgctgatgcagtcgatggcgcgcaaagaagggtattcaaactggaacagcccgctggcgtatcaggccgctggtggcgggcgtgcaacacccccaggcggaagccttaaccagcagactgttataaatgtccacggcgtgaacaaccctcaggaagcagctaacctgatcgctgacaagcaggggactgtgaatgccagggcggtacagcaattaaaaggacctgcgtaa

SEQ ID NO: 388911 - DNA, 198 bp, Salmonella enterica
atgacaactaaaataaaagcatccaccaatgaacttgttgcgattaaatctgctcttgctcttatgctctacaagttacataacccttacgacgcgcagtccattcttgactgtctgcgcgagtccggtttcccggaggccatcgcactggcggatgaaatagctaaatttgctccggctcctcctccgcgcttatag

SEQ ID NO: 388912 - DNA, 339 bp, Salmonella enterica
gtggatagttccagcgttatcacaatagaatttccttttagcgaacctgaaatttacaatattttaaccgagcaggggattaagtacaaaactccaggagattttggcctggcttttgactccattgatcttcaagtttttgttgatattgttagctctccttcagttctgccatcattagcgagtatatgtgtcgcttaccttcatcgcaacagaggaaaaaggattgtaataaaacgaggtgatgagatgatcgatctcaaaggctacagcgtgaaggaagtttccgaactcctgaaactgacaacagatataaaaataaccgacaaaaacgactga

SEQ ID NO: 388913 - DNA, 399 bp, Salmonella enterica
atgacagctttagaagtatcaatgtatagaatcagcaggctcctcagtgaaacgggatggagtcaggcagagctcgcccgcagaattggtgttactcagcaaacagtacagcaatgggtaagcggtcgtgcaactcccaaacctgccagcctggataagctagttgaagttaccggacatccattgtactggttcatgctgccaccagaagaaggcgatcaggtagttgtccccgatacgataaaaatcggaccacggcaacaggagctactccagacattcggggcatttccggagcaagatcaggagctgatgctacaggaaatgaaggagaaaaaggagtctatggaaagaactgttgcccggtggcttgcggcacagaaagggcggcgagcgtga

SEQ ID NO: 388914 - DNA, 279 bp, Salmonella enterica
atgcgagaaacgatcagagacaaaattaaagccgcacttacacaagatgaaataggtcgtgcaatgggatgtaaacagcaaaccgtctggcaatggctgaattctcaggttccagcgaagcgtgtgattccattgtgtgatttgatgagatgggaaatcacaccgcatgaaatccggcctgatatttacccaaaccctaccgatggtttacctcttacgcatgaacacatcatatcgtcggtaaagactcaggaggtgaacaaccatgatcacccctga

SEQ ID NO: 388915 - DNA, 309 bp, Salmonella enterica
atgacaatggataaacatacgacatggctggcctacatctgggcattaatcagcggcatatgcgcccagtggacgttaaacgactatggtgcgctgataggtattgttctgggtattggtacgtttctggttaataagcattacaaaaaaaaatcagaacaggctcaggcaaggcaggctgccgcgatggaggagcgtaacaggctaatcgcccggattctggaaaaaaacgaccatgacagcacgttaaagatgctggcggtatctgaaatgccggagggcagtaatggcgctcaggacaaaagttaa

SEQ ID NO: 388916 - DNA, 1311 bp, Salmonella enterica
atgaaggtgtttgctttatctgcattaagtggtttaatgtttttttcttcattaacatatgctgctaactatgtggatgcttcagtgtccggaggaactgaaaaaacaggagttataaaaaccagtgtgcctgttgagtatgattcagtaaaaggtgagtgtaagacgcagaaccccggcgttatagcaaagagagcgacaaaaacaaccggactggagttgaagacttttaaatgttctgaaggaagtgcagtaatttcagaggggaaattcaatggttctaatgaaccgtttggtgaagcatatgcttatatcaccgatattttaaataaatataaggcatatcataaaaaagccttattatcagtccctgttaacctttcattttatgaacgtgatgactggggagccaacgcctcatggaatgctcagacaaaaaccgtaacactaatatcagggaacagcggaagcgggatttatacaccaagtggaaaaacaattatttatcatgaattggggcatgcgatatctaacgccgggcagacatcagcaacatctgaagacagcgcaattgatgaagctttttcagatatatttacggtattctttaataaccatggagtttccggagatgctgtagactgggatgttggtagaggatatagcagaaccggggaggcgattcgctatgttgattctcctaaaagagatggtgcagtagaaaatattcatgatataacaccatcaatgaatccgtatcagcgtggtggatttataaggaaaatgttctataacttatataataaccttcgtgcaagtggctttgataagaataaaagtctggaactgagttatatgcttttttatgatgctaatgaagactggcataaaggcatgtcatttggtgacctgacccgttcattatatactgcatatatgacatcttatacttcgacttacaatgagaaaaatcttttaaatgcaatgagtgatgttggtgtatcacctgaggttcagtataaaatatacagtaaagctggttttgtatcgaggctaaaagttgtgtattatgattatgatggtaatttccatgaagagttcactccacaggttcctgtggggcaaactgcatgggttaatgttcctatgtatgcttctgaatccgtttccataagtgcacagatagattattatggtttcaaagattatcacttactctttccgactccatgggtaaaccagtgtgttattacatgggggactattttttcaccgcaggcagcgataggtagtgaaaaatgtgatttttga

SEQ ID NO: 388917 - DNA, 168 bp, Salmonella enterica
atggtcatgagcatgaacgatctaatccttatcgatgaaaatgcccgcgcgtcacagtatgaccagctaaaggcgcaccgggaggcacccggcaccgcgacaactaaacgaaacaggacagtaatcaagggctacttcggtagccctttctgtatacagttgccatga

SEQ ID NO: 388918 - DNA, 510 bp, Salmonella enterica
gtgttgtacggcagtaatggcatacgtgccgtcgtcattctccgcaatatgcacgcaacggaaacggcggcgcttcagggagggcagtttcagtccccagatactgtatggctgcacggtttccggcatcaccttcagcacaaccctatccggtgcgggctgcgactgaatctccgtactgaacggcgtaccgtcaggcccgacaatattcagcgtggcggtgccgctttccggaagcgtgatttcccggtcaagcgtcagcgtgcgcgtggcaatatccaggtcagtgatacgcccaccgaccgtcgtcccggcgtaatcgttgtcgcagacctcaataatatcgcccggtgtatggcgcaacccttccgcaccgacagaaaaatccaccgtctgcgtttccagcagttctgtcatcatcacccacagccctgcccggtgtgcctgcccacgcgaggtacagccgaacgcgtccattttcagcagattacgcccgtaacgtatctgtga

SEQ ID NO: 388919 - DNA, 408 bp, Salmonella enterica
atgcgatatccagtagtattaacgccagacagcggcggatatgttgtctcgttcccggatataccggaagcccttacgcagggtgatacgcgggaggaggcgctgaaaaacgcgcttgatgcgcttgttacggccttcgagttttatttcgaagacggggagcgcataccagaaccgggtaacgtgacagatgattttgtcgaagtaccggcaagtgtggtagcgaaggttatgcttttgaacgcctggattagttccggcttaactcaggttgagctggctcaacgtatgggtatcaaaaaacaggaagtgaccagattgtttgatctgaagcactcgacgaaaatcgacacgatacagaaagcgctggcagcgcttggaagacggcttgaaatattagctgcgtaa

SEQ ID NO: 388920 - DNA, 309 bp, Salmonella enterica; identical to SEQ ID NO: 388915

SEQ ID NO: 388921 - DNA, 738 bp, Salmonella enterica
atgattaacgatgacattctggcgcatgcccggcggtatgcgcctgcggagtcgtgcggcctggtggtcagaacagcgcatggcgagcagtatttaccgtgtgaaaatctgtctgctgaacccacgatgtattttcgtatttccccggaggattacctgaatgccaggaaccgcggtgacatcgtggcgctggtacacagccaccccggaggactgccgttcctcagcagcggcgaccgcacactacagttacagacagcgctggcgtggtggctggtctgtgatgagcgggtttataaattccgctgcgtgccgcacctgaccgggcggacgtttgcgcatggtgtgacggactgttacacgctgttccgcgacgcgtaccatctggcggggatggatatgccggattttcaccgggaggacgactggtggaataaaggaaaaaatctctatctggacaacctggaggcgacgggattttaccgtgtcagcgcagccagtgcgcagcccggcgatgtactgatttgctgctttggctcttctgttccgaaccatgcagcgatttactgcggcgacggagagctgctgcaccatattcctgaacaactgagtaaacgggagaggtataccgacaaatggcaacgacggacacattcaatatggcggcaccggcaatggtgcgaatctgcctttacggggatttacagcgatttggaaagcgcatcagcctcagcataa

SEQ ID NO: 388922 - DNA, 816 bp, Salmonella enterica
atgagtaacgacattataaatccttttggaaataacggacaccaggataataaagttaatggtcttgtggctgttgagcaacaacgtgccatgcaggaagttcaggctgcacttgttgttgcgaaaaaatttccccgtgatgctattcatgcaatggatcgtattcttcaggcctgtacccgccccacccttgctgaaggtgcgctttattcttatggacgtggaggtacggaggttactggtcccagcattcggctggcagaagcaattgcgcagaactgggggaatattcagttcggaatccgggaactggaaaataaaaacggggaatcaactgttgaggcgtttgcatgggatgttgaaaccaacactcgccaggtaaaaacatttactgttccacacatccgctactcaaataagggaacaaaaaaactcgccgatcctcgtgatatttacgaagtagtagccagtcagggtgctcgtcggcttcgtgcatgtattcttggtgttattcctggtgatgtagtggaggctgcggttaagcagtgtgagttaacgctgaataccagccttgatctgacaccagaatatttacaaaccatgatcaaatcatttgagaggcttggcgtctcaaaagaacaggttgaaaaacgtatccaatgccgaattgaagctataagaccagcgcaggtcgtacagttaaaaaaaatatctgccagtataaaagatggtatgtcgtcacctgctgactggtttgagcaagtcacaccaaccaaagaaaaagccaacgacctgaacaatatggatatcaaataa

SEQ ID NO: 388923 - DNA, 426 bp, Salmonella enterica
gtgttcagcgggaatcccggtaccggaaaaaatcatctggccgctgccattggcaatcgtctgatgaatgccggacgtagtgtgattgttatcaccgtcgccgatgtgatgagtgcgcttcatgccagctacgatgacgggaaatctggcgagaaatttctgcgtgaattgtgcggggttgatctgctgatcctcgatgaggttggcgtgcaacgtgaaaccaggaacgaacaggtaacgctgaatcagattatcgatcgtcggacggcatccctgcgcagcgtgggaatgctgacaaaccttaaccatgacgcactgtcgaagctggctggtcagcgggtaatggacagaatgaccatgaatggcgggcggtgggtgaattttgactgggggagctggcgcccgaacgtgaaccagcacaaataa

SEQ ID NO: 388924 - DNA, 624 bp, Salmonella enterica
atggaatctgtacttgatgcgctgaaagcaatgggaaaagtctcgtctgtcgaacttgccgcgcgcctgggcatgaagcgtcagcaggtgattagcgaattgtgggaattgcacaaggcgggagtggtaactaaaaacggcctgtcatgggagctgtctgaggataccggcgaaatgcctgcaccaaaagttactgaacagcacatgctccgcgccatcggggaacgtggggcgttgacgtctgacgaactggctgccctgttcggtgttacttcacgcaaagtggcttcgacactggcgatggctaccgggaaagggagactcattcgcgaaaaccagaatggcaggttttactaccgtctgccggataaaaagttaccggagccagaaatcgcgggaaaagagcctgtggacagcattgttgaagttgttcagtcgataccgtctttcaccgaaaagcgtccgggtgacctgagcatccctgctccccggtttatcagcgcagagattcgcagaacggaagcgaagttaaaacgcctgagaaaatttcgtgagatatcccgtgagctgcacaactccggcaaccgcagattgttggcactgttttctcagcagggggaatga

SEQ ID NO: 388925 - DNA, 441 bp, Salmonella enterica
atgaacccacttcggatcgttcgggtcgctgataccttcgacatattcaccgcgcgcggctgccagttgtttaccaacatcaaccgggtttttgggtggaatgtttttacgtgcttcgtgcagttctgcccgtattttctggtagcctgcgtctgtctggcttacaggtggctcattctccagcggctgtgggtccggatgatgttcagttgtgtcctgttccactgcttcaggcgttgctggttcatctgccggttgcggtttttcttcataatcgtttgcactccctttcactggcatgggttgagatgtacggccacaggcgatatcaacaataagcggatcggggttggtgtggtcggtttcggtcagcaccttgttcagatattcggtgacgtgtgtggggatggcctcaatgccaatcggggcctctttaactga

SEQ ID NO: 388926 - DNA, 477 bp, Salmonella enterica
atgttgtccgcatccgtccagaagaaacctggcgggagttcgccagatttggcaacagcgacaacaggtgcaaggcgggtttgtgaggctttaccacagtcccagcggtggccgttgagggtgaaaatcacgctgccgttttcctgttcatcacgccacgcgttaatttcggcccgctttttctgcctcgcggtctccatgatgaatcccggtaccggaatggtgtacagcgattttatccgggccagcatccacgcgtccgggccggattcgtcgtcagtcaccgtgacgggtaaatacactggcgtcccgtccgggttcgtggcaccgtcaaactgtacggctgcaaaaatcagcccgtcactcacgtactgtgcagtactgacggcggtgatgcctgtgggtgtttcagttgcacctgtcatgtctgctcatcctgttatgttgtggtccacattttatttccgacatgaatga

SEQ ID NO: 388927 - DNA, 753 bp, Salmonella enterica
atgccagtttcactttcctctcaactcggtagtaaagaacaggctgatacaaggcttgctggttctgtcatgtcagcgctgcgagtttcaatgcctggcatcgtccagtcatttgatcccgacaccgtaaccgcagttgttcaaccttctatcaaaggctatgagccggattcgaatggcgttaaccagtcgacagtattaccgctgctggtggatgtgccggtggtgtttccgcgcggcggcggctgcacgctaacgttcccggtgaaagccggtgatgaatgcctggtgattttcgccgatcgctgcatcgatttctggtggcagaacggcggggtgcaagagcctgtcgatgaccgggtgcatgatttatcggatgctttctgtatcgtcggcccgcagtcgcaggcgcagaaaattagcggtatcagcaccagcgccgcgcagctccgtagcgacgacggaagtacgttctttgagctcaatccctctacgcaaaaaattaaaatcgtagcgcctggcggtctggatgtagttaccccgctggccgacttctcggcgaaagttaccattcatgggctgctgtcctggctgggcggcatggtagggtccgttgtttctggcgttgcatcaaaaatcaccggtgctgttgagtttatcggtagtgtgaaagcgaacggcaaggtgattgacaatacccatacgcatggcggcgttcaacacggtggaagcaatacagatgaggtgaactaa

SEQ ID NO: 388928 - DNA, 261 bp, Salmonella enterica
atgatcaatttatgcgtaacatggagtattcgccgaaaagacgaacgcaagcagaatttgctaggtttgaaaagattagagcccagcgcattggttctaaaaaatttatttggcattctgctggtgattcaggatgttgccctgagtgcgctaaaaataatggtaaaaaattcttatgggataaacctccaaaaaccgggctaccaggtgaaggtaagtgctgccctgatggtaaatgtaggtgttgggctgaagctgtaa

SEQ ID NO: 388929 - DNA, 156 bp, Salmonella enterica
atgaaaacaatcgacttaggcaacaatgaatctgtggtttatggcgtatttcccaataatgacggtacgtttaccgccatgacgtttaccagaagcaaaactttcaaaactgaagctggcgcacaacgctggttaacaagaaaccattgtgagtaa

SEQ ID NO: 388930 - DNA, 450 bp, Salmonella enterica
gtggcggggaaatacggtcccgtgacaccgtttacggcaacgccggagatgatacgggcagcgaaagacaggaaacgtgctgaaattaacgcgtggcgtgatgaacaggaaaatggcagttacctgtttcagtataacgggcatcgctgggattatggtaaggccacgcaggacagaatgagtatatcgctggcgatggcgaaaaagggggtactgccggagggatttgcctggacggacggggataacaatatcgtgccggtgacgaacgacagcctgatagcgctggcgggtgcaattgagcaggcgatgtttgagaaaggggtacagataaaccagcgtcagctgcagatgaagtcggaggtggaggcgctgactgcgctgcctgcgataagggcataccggcctggctggccggatggtacagacatcacaacaaccggagcatag

SEQ ID NO: 388931 - DNA, 825 bp, Salmonella enterica
gtggcggggattggtgccgggattgaggacgcggacgggaagccgctgagtcagatactgctggccgcgaaccgcacggcaattattgacccgtctgacggtaatacggttccgatgctggtggcgcaggggggacagatattcctgaatgaggtactcacgaagtccctcagtattaacggacgatttatcgtaacgcctgacgggataatgacggcaaccggcgcgcatgtcgcgggtaaaattgatgcggattcaggcacgttaaataacgtcactgtaaatgaaaactgcacaatactggggacggtggatgcagggaacatcctgggtgatgtttattttcgttcgctgttttatctggataaggtggtgtacaacgccgtccatccacggggagccggtggtgacagggacaaccagtggataccgtttctgggtattgatggcgagaacttcgaccgctatctggataccggcctgacggtgaccttacgttatgtttcctccctgaacactgcagtacggtatgaactcagcgtgggggcagatgatgcagggggaggggtaagtaccgtatggacgtcaggggagcaggggccgggtgacctcaggaacagctcatggtccattacaggaaatgtaagccggttttttcttccccgcaaggggcggggaggcaggcagtatctgtatgtgaaacagcgctgggcgggagtggtatttaacgtggcaggtgactgggaacgcacagtgacgattacctgccaggcaaacggcgggacgttataccgtgcgggagcggaaaaaatatgggtactgtaa

SEQ ID NO: 388932 - DNA, 687 bp, Salmonella enterica
gtggcggggattggtgccgggattgaggacgcggacgggaagccgctgagccagatactgctggcagcgaaccgcacggcaattattgacccgtcaaacggcaataccacaccgatgatggttgcccgtgacggacagatatttatgaatgaagcgtttcttaaatatctgacggcaccaaccatcaccagtggcgggaatcctccggcattttctctgacgccggacggaacgctgtctgcaagaaatgcggatattggcggtaatattaatgccacctccggaacattcagtaacgtgcatatcctcggtgactgtcaggtggatgctgttctgtctgcaaaccagattcggggagatattgcaaaaattgtcgcctgtaaccggggttcttcagtgtacatcccggcagaggagtttgaccgtacactggcaataccgtctgtctgggtaacggcatggggattctcgaaagattctttccatgtaaacatcacggtgactgtcaatgccggaggtcgtgtgtatacggggacgacgtatgccaccaacaggaaaacggggatctgtgacgttttttgcacaatcccggcaaacacgcctgttgttgtcagttatcaggtggactggacaggcagtgctgcggacagttcctctcaggctctggtatttataaataaggcgtaa

SEQ ID NO: 388933 - DNA, 639 bp, Salmonella enterica
atggcgttcgttttcgcgctccagcgcggcattgcgtgcagcagcatcggcatactgcatggcgttaatgcgcgccaccttccgttggtgtcgcatggattcagtttcattatcccggttcagctcgtcgttctgctcgttgcgaagtttctgcgtttcctgataagtacgctctgcctgcgccttcgcatccagcaggtccttctggcgtttctgttcctgaagttcgttcagctgctgctgatcgtattcagtcaaggaggaagacaccgtccagggcgtttttctggcgcgcgcaattttttcctgcagtgtcgcgattttttcatcgagcgtgtcttcccgcccgatatccagcatccggtcccacgcccacttcgccgcatcacccacggcattccatgctctttcaatccagcccagattatcgtgtacgtcacccgcccgtttattcatctcttccgaatacgcggacatggcaattttcgcggcgtcagccgttcttccctgttcaccgagcaccctgatttgttcaagctgggtggcggtcagaaaatgcagggtctgatccagttctttggcggcattaaccggatcatcctgcaggcgtctgaactgacggatggtttcatccactga

SEQ ID NO: 388934 - DNA, 186 bp, Salmonella enterica
atgccggatatgaaagatatcgtcaccgacgacatggtgaaaaacgccctcaaatcagatgcggtcactactacggttaaagcacagattaaatccacactggaccagcagattgatgctgcagttgatactgcgctggtggatttgccgggcgtggagcaggccccgacaggagcgggtcagtaa

SEQ ID NO: 388935 - DNA, 252 bp, Salmonella enterica
atggctctgactgatactaaagtccgttcggcaaaacctgaagataatgcaaacccgctatctgatggtgatggcctgtttttactggtacatgctaatggctccaaatattggcgatttcgttttcgctttggtggcaagcagcatgtgatggcgtttggcgtttatcccgaagtttcactggcggatgccaggaagaaaagggaggaggccaggatggtatcgatcctcgagcacataaacgtgctgtga

SEQ ID NO: 388936 - DNA, 138 bp, Salmonella enterica
atgaaaaacggccttgaaatagatgctccggtaacaacagaaatcagtagtgctacggcatgggctatacgggcagtggcgctgacggtggtgctgtacggcattgcccgcctgattgtcgcgatacgttggtggtga

SEQ ID NO: 388937 - DNA, 372 bp, Salmonella enterica
gtgacccgtatcgatggtaaacccgtcgtgaaaggccagcgactgacacaaagccagtgcgaccattacaacgccatcgagcgggataaagcgctggcgtgggtcaataaaaatatccatgttccactgaccgaaccacagaaagtggggatcgccagtttctgcccgtacaacattgggccgggtaaatgtctgccctccacgttctacagaaagctgaacgcaggagatcgtaagggagcgtgtgctgaaattcgccgttgggtatatgacggcggtaaagactgccacaaccgggaaaatcagtgttacggccaggtgatacgacgcgaccaggagtcggcgctggcgtgctgggggattgatcaataa

SEQ ID NO: 388938 - DNA, 393 bp, Salmonella enterica
atgagtaaattcaccacccccgcgattctggagatgctggagcactacaggtggcgcgtctatgaaccgtttgagttttacctgagcgatgacaacagcgatgttattgaggtgccggctggtttcgtcaccgacctcgccaccatcccgcgtatcttctggacaatcctcccgcctgacggcaaatacgccaaagcggccattattcacgactggatgtatgacaacgcgctacgaacaaaaaaagaagccgacaaaatcttcctcgacgggatgacggtgctgggcgtgccgacgtggaaacgcataatcatgtactacgcggtaaggttattcggacgggggatgtacgggaaagagcaaaatactgtcattaatggtaatggaggatga

SEQ ID NO: 388939 - DNA, 393 bp, Salmonella enterica
atgagtaaattcaccacccccgcgattctggagatgctggagcactacaggtggcgcgtctatgaaccgtttgagttttacctgagcgatgacaacagcgatgttattgaggtgccggctggtttcgtcaccgacctcgccaccatcccgcgtatcttctggacaatcctcccgcctgacggcaaatacgccaaagcggccattattcacgactggatgtacgacaacgcgctacgaacaaaaaaagaggcagacctgatatttctcgacgggatgacggtgttgggcgtgccgaagtggaaacgcctaatcatgtactacgcggtaaggttattcggacgggggatgtacgggaaagagcaaaatactgtcattaatggtaatggaggatga

SEQ ID NO: 388940 - DNA, 564 bp, Salmonella enterica
gtggcggcctgtatttaccggggggagctgggggataccgaccttaacacggtggtaacggagggtgtctggcagcagagcaacaagagctacatcacgacagaccgtaattatcctgattatccgtctgtaacgatagcgggcctgttgcaggtatcagccctgagagacacatggggtccggtgatactgcagacattccgtacgtccacagggatgacggctgaccgtcgcgggagttacacatccggcgtgtggcaattttccggctggataattcacaactatgtgaatattaaccctgcgccgggggatgtgggtacgtatgacctggcgtttctcccgtctaactgggcggacgatacgtttatgaaaacaggggttgttgaaggataccatctgcagatagcagagataacgaataatgagaccctgacccagaaggtgctcagtgtttccatggttgaccatttagggcgatggaaattcatgaggcggtatttttatgctgatacgggaaaaaacctgctcggctattacggcctgttcctgcggataaaataa

SEQ ID NO: 388941 - DNA, 147 bp, Salmonella enterica; identical to SEQ ID NO: 157315

SEQ ID NO: 388942 - DNA, 474 bp, Salmonella enterica
gtgaccatcaacgttccgatagttacgtccacctgcagtgtttcggtgccgacggaggtgaatctggatcagcttgatgttaataaaatttccgcgacgctacagaaagacacaattgaaacaaaagcgtttgatatcacacttgccaactgtaacggtaaacccataaaaatgacggtgcaatctcacgctgataatggggcgattccttcggataaggtaaccgggggatttagttcaggagatccagatagagcacttgcctattatcttgctataccatcaatttcaggagttacagggggtgttaatggggattttagtttaagaaacgataatcctgttatgattacccctgacagcgacaattttatttttagccctacactcatccttttgcactattatagttccgttaagaatctgggctctacagtaagtggtgcttttgattatacagtaacctatcagtaa

SEQ ID NO: 388943 - DNA, 564 bp, Salmonella enterica
gtggcaggggcgttactgctggcagggctgatgatgagtgcgggcgcgatggcggcctccggcgacccggtacagggcggttcgggcaccgtgaccatcaacgttccgatagttacgtccacctgcagtgtttcggtgccgacggaggtgaatctggatcagcttgatgttaataaaatttccgcgacgctaccgaaaggcacaattgaaacaaaagcgattgatatcacacttgccaactgtaacggtaaacccataaaaatgacggtgcaatctcacgctgataatggggcgattccttcggataaggtaaccgggggatttagttcaggagatccagatagagcacttgcctattatcttgctataccatcaatttcaggagttacagggggtgttaatgggtattttagtttaagaaacgataatcctgttatgattacccctgacagcgacaattttatttttagccctacactcaccctttttcactattatagttccgttaagaatctgggctctacagtaagtggtgcttttgattatacagtaacctatcagtaa

SEQ ID NO: 388944 - DNA, 582 bp, Salmonella enterica
gtggcaggggcgttactgctggcagggctgatgatgagtacgggcgtgatggcggcctctggtgacccggtacagggcggctccggtactgtcaacttaagcattcctgttgtgaccacttcctgcagcatttcggttcctgatacctcatttacttttaaggcagttagcaagaatagtgctgatccagcctggacagagctggaccggcagaaatttgatatcctgtttaagaactgcagtatggacaccctgtctgtaagttcacaggcggctactcaggcaacaggtgctcctaatggggatactggagcctttgattcatcaagtgatcctgatcaggcattttatttcagagtcatgttaccaaaagaagatactgcgagaaaagggggaggaattgtttatgttaatggagacaagtactttaacttaaaaggtattaatcctttgattatcacccccagttctgatgactatacgctatccaataatatcttgcttctgtccagtggtaaatcccgtactaatatagcatcgactgtcaacggaagctttacttatcaggtgacctataattaa

SEQ ID NO: 388945 - DNA, 498 bp, Salmonella enterica
atggataaatttgatcgccccaggcaacgcctctttcttcagggtttatatgaggcctatcctgaagaattaacaaatgaacaactcgaagaactgttatcgacttttcccgacaaaaaagttactacagcaaaccttctgtatctggaaaagcatgggcttatatttagcggattacaagaaggcgctgttggatatcacctggtgaatcgtccagcaataacccataaaggaattgactttatccgcgatgacggtgggcttggagcgatcctcaatgttcagacagttaaatttcatgacagtactatcaccgccctggaagatatcattcgtgttgcaaatcttcctgatgagaaaaaatccgggctgatgtcaaaacttcgagagcttccgtcagatgccataaaacatttgacccttcaattactgacgaagggggttctgaatttgccggcagcacttccgataattgaaaaattcctccgcccggtgtga

SEQ ID NO: 388946 - DNA, 426 bp, Salmonella enterica
atgaaatttagtgatgtttttgacaaccgcttatacgtaactcagatcaaaaccggaatgaaaatagccattcccctctccctgacacttcaggcaacggggttacgtctgggaacggtaatcgatcgctgccgactggtaagccgaactgatttcatgatcagtgccggaatcaggaaaaatagcccaaccgggaatattcatccggatggattgacaaagacatttgtaaaagcaagaaaagcctccggcgttaagttcagcaataatccaccgacatttcacgagatccgaagtctggccgggcggctgtacaaaaacgagcacggcgaggtgttcgcccaaaaactcctgggccacacatcagcgaacaccacgaaactctatctcgatgagcgtgatgataaagcttatgtgatgctctaa

SEQ ID NO: 388947 - DNA, 123 bp, Salmonella enterica
atgatatacaaaataaaatgcgtcacgagtctggatttaaaaatattttcgcccgatacggatattatgatattgaaggtaagccattacttatccggtcacaccaaccacggcaccttttaa

SEQ ID NO: 388948 - DNA, 189 bp, Salmonella enterica
atgacgtctggcgagctgattaacctcagtgacgctattgaccaggcgatgtttactatggggttgaaaattcacatgcgccagcggcagatgaaagaagaggtggacaaactgaccgacgcacaggctgttctggattatgttgtcggctggccggcgaaaccggaggacgccagtgacagtcattaa

SEQ ID NO: 388949 - DNA, 147 bp, Salmonella enterica
atgattacgggagctgacctgctggcgcagtatcgatatatgaatctcggtttttcgctggtggtactctgcgacgtggcagggcaggaaaaaccgacgcaattcgatctcggaacgttctcacacctctatgtcttcacggagtaa

SEQ ID NO: 388950 - DNA, 147 bp, Salmonella enterica
atgattacgggggctgacctgctggcgcagtatcgatatatgaatctcggtttttctctggtggtactctgcgacgtggcagggcaggaaaacccgacgcaattcgatctcggaaggttctcacatctctatgttttcacggagtaa

SEQ ID NO: 388951 - DNA, 597 bp, Salmonella enterica
atggaactgaatactaagcaattgaagtattctatcagcctgttagcacaacagtggcttgacgataatcgcctatttattgataccgaaaccacggggctgggtgatgatgcagaaatagtagaaatatgcatcattgatagccatggatttattctgcttaacacgcttgttaaacctactaagcctattcctgatgaagcaattgccattcatgggatcacaaatgaaatggttgcctatgctcctgcgtggacagatatatgcggcgcagtggaagaacttattagacgttttggctttgttatctataacgccgattatgatctccggttaattcgtcagacctacgcattgaatggaagaccttctgaaggtgcaccatggatgcttgctgctcattctgtttgcgcaatgaaactatatgcagaatatcgtggcgagccggggaaatatcacggttataaatggcataagttagttgatgccgccgcgcatgaaggagttgtgatcgaggggaaggcacaccgtgctttagctgattgcaaaatgacattaggtgtcatcaaagctttagcgcaaggcggtgcaaaatga

SEQ ID NO: 388952 - DNA, 222 bp, Salmonella enterica
atgcgtccgaacattacaatcatcatcccagaaccatacctgcctttagacgagtattgccgccgtactggcaccaacaaagaaaccgccaggaacctgatcgaatacgggaaattacctattaagccgaagggtaagcagaagaaaggcctggtcgaagtcaacatggccgcgctcactattcaggctttaagcgaatgtgacatttcgcttaacgcgtaa

SEQ ID NO: 388953 - DNA, 582 bp, Salmonella enterica
atgagcacattcaaaatcgatctaaacgtagatagcacaccgattcttgacagggttattgaggcatacggatttacgcagaagttacagcttgcggaacatctggacatggcagctagttccctttcgtcacgatacaagcgtggcgttttcccggcagatatagtcgtgaaatgcgtagccgaaacaggcgctaatctggaatggctagcgacaggtcagggacgtaaattcaatgatgatgaattagacatactcaaaatcccgcgcagcaaaattgttgatggtcaactctatgacgctggcgtacttatgcttgataaagtcaccttcctgcccggtaagccactgccacaacttccaatgtgtgttctggatggcgttgttcagtacattgttgaccagtcttattctgaagtttatgacgatgattggcttgttgaaattgaaggaaaaacaagcatccgcacactgacaaggatcccggtacgaaaagtaagagttagcggtgtaggtatggcatttgattgcggcattgacgacataaaaatcataggccgagttgtattaaccataaaataa

SEQ ID NO: 388954 - DNA, 165 bp, Salmonella enterica
atgaatatttacagcttcaacatcgggattacagaattcgccaaaattagcgttttaaaagtaaggaatatcttattagtacaaacagacaaggctaatttgaatattaatttaatgaagagtacgcctggcgcgtcacaaaggaaatatctgcttttcacctga

SEQ ID NO: 388955 - DNA, 1287 bp, Salmonella enterica
atgaaaagaaaaacaatgggatggcttatcgttttccttctatttatagtttacatgctcaactatatggatcgttcagcattgtcgataactgcccccttgatcgaaaaggagttaggatttaacgccgcggagatgggaatgatcttcagcgcattttttatcggatacgccctgtttaattttattggtggctgggccagcgataaagttgggccaaaaacggtttttctcatcgcagcgttactatggtctgtattttgtggcttaactggtttagtcaccggattgtggacaatgcttatcgtgcgcgttcttttcggtatggctgaaggaccggtcagcgctgccggaaataaaatcatcaataactggatttcccgaaaggagtctgccacggcgatcggaatttttagcgccggttccccgctcggcggcgcggtgtccgggccgatagtgggcctgctggcgttatccttaggctggcgccccgcatttggcattattttcttatttggcctggtctgggtactactgtggtactttatcgttagcgataagccaacaatgagtaaacgcctggcgccggaagaacgcattgattttgaaaatcatgaggacgttattttatctgatgatggccgggctacgccttcactcggctattacatgaaacaaccaatggtatgggcgacaactctggcttttttcagctacaactatattctttttttcttcctgacctggttcccaagttacctgaaccattcgttacatctcgatattaaagaaattagtatcgccacggtaattccctgggtcatcggcgccattggtatggtgctcggcggcgtctgttctgatgtaatttatcggattaccggtaatgctctgctctcacgtcgacttattctgggcgtatgtctggcaggcgccgcggtatgtgttgccgtttccggtactgttagcactatcggtagcgcaattacgctcatgtcagtttcactcttcctgctctatttaacgggcccaatttattgggcggttattcaggatgttgttcataaagataaggtagggagcgtcggcggagccatgcatggcctggctaatatatccggcattatcggtccgcttgtcaccggttttatcgttcaatttagcggtaaatatgactatgcgttctatctggctggtgctatcgctatcgtttcaagcctgttggtcttcgtgtttgtaaaaagtaaaggattcaaagccaatgaaagtcaaagctgtgttcattaa

SEQ ID NO: 388956 - DNA, 537 bp, Salmonella enterica
atggaaaggttatattttgtttatattaacgccaagggcgtaatagcagcctatgaattggctaacgttaaatataatggtgattacatacagggctattgtcctacagagggcgcatttagaactttcagaaaagatcgctttataaagtttttggactcatttgaagatgctatagaataccttaataaggttgctcctactttagatataaataaaaatgaatgggtaaaaacaaaatcacggcaccattacgattcttttaatttaaagaaaccagattttaacgatacatttgaagtctgttttactggttttaaaaaaacagataaagacaggctaaaagattctgcaatttctgctggtatgatagttcgcagtgatgtaactgcaaatcttcatattctttgttgtggttacaatgctggtccgaaaaagatggaaatagcaacattaaaaggaacgatggtattaactgaaaatgagtttctggattttttaaattcaggcgtaatccctgataagtattgttcatga

SEQ ID NO: 388957 - DNA, 1026 bp, Salmonella enterica
atgacagttcggcggctcgcatcagggaaatggctttgtgaatgttatccatatggggcaagcggaaagcgtattcgtaggcagttcgctacgaaaggtgaggcgctctcacatgaacgccgattgatggtgcataccgatgtttcagtaggtgatagttcaaaacgattgtctgagcttgttgatatctggtacgagatgcacggtaagacattgactacaggtgaagaacggcaggctaagttgaatgctgtttgtgagaggatgggtgatccacttgtttcagaatttgaccgtaatatgtttgctgtttaccggaagcgtcggttatcaggtgaatggagtgctaataagaaaaagccaactaaggaagctactgtaaatcgtgagcagtcatatttgcacgctgttttttctgagttaaagcgtcttggtgcgtgggctggtgaaaatcctttagaaggtgtgcgccactttaaagttagtgaaagcgaactctcatttctgtatgaagatgagattgagaggcttcttgcggtttgcgatgaatcaggtaacgccgatcttggtactgttgttcgtatatgtctggcgactggtgccagatggagtgaggctgaaaaattaacacagtctcaggttttaccaggacggatcacatttacgaataccaagagcaagaaaaacagaaccgtcccgatttcggataccatccagaagctgttacccaaacgtcgaggccgtctcttctcaaattgctatgaagcttttacctgggcgctaaagaaagcaaaaattgagttgccggaaggtcagcgaactcacgttctcaggcatacgtttgcaagccactttatgatgaatggggggaatatcttggtgctacagcagatactaggtcacagtacgattttgatgacaatgcgatatgcacactttgccccagaccaccttgaggcggcggtaacgctcaatccattagaccgtatttacaccaaaaatagtggcgataaaaacgcactatag

SEQ ID NO: 388958 - DNA, 792 bp, Salmonella enterica
atggcaaaaccggactgggaggccatcgagacggcataccgggccggaattatgagccttcgtgaaatcggtactctgtatggtgtaacagaaggcgctatcagaaagaaagcaagaaaactggaatgggtacgcaaaaacggtacgcaggtacgtaaaaaaggtacgcaaaaacaatcagtgcgtaccacgggaaaccccgccatttctgccagtgagcaaaaaagtacgcaagaaaaaaatgttttccctccggatacgaaaccgattcgtggttcgcgtaccttaccgcccgttaatccattccagccaggaaatcaacatgcgctgaaacacggtggctatgcccggcgatttctcctgaaagatgaagtcgttgaggatgccagagcgctgacgcttgaagatgagctctttcggttgcgggcgaataacctgatggccgccgagaacattggtcgctggctcaccctgctggaggatgcggaggaagagcagcagcgcaaaatcctgatggataacattagcgctgctgaaaatgctatgatgcgaaatactgcccgcattgaatcgatagaacgtaccctggcgatgctggatattattgccgtcactcccgccaaaattattgcagatactgaataccggactgctgccagagaaaaagttaaagctgagaccgatattctcaccagccagaaacagggtgtgacaaccccgatggctgaaatagtgtcagcgcttcatggcatgagccattccgggaggttagatgatatccctgaagagtga

SEQ ID NO: 388959 - DNA, 996 bp, Salmonella enterica
atgcggggaattatggactttgaaatcacaggtgaagaaacccaggaacaactggaagaactcatggcaaaaatgggcgaaatcgaagttaagggtgacgacgaggaaccggaagaaagtgcggagcatcccggcagcgaatcttctgaaacagtacaaactgacacgtgcgataaacaggcaccgacgccgggggccggtactgaggaagaggggcagccgcaggaagatgtgaagggcattcttgccagggacgggaaacacgttatcccttatgacgttctggaggccgagcgtactggcaggcaacgggttgaacaggaagcgtttcttctgaagcaacaactggcggaagagcagcgaaaaattgatttgctgacgtcacaaatcaaacaggctggtatgacgccagaccctcttccggaagatacgcgtatttctgacgagcagatagccagaattaaggaagaatatcccgaagtggcgaacgcgctcaccctgatggcccgtaaatacgattatttacaggcgcggatccaggaggcgcagcaggtgccgcaggaaaacccggttgtacaggcaatgaatgccgttcctgacctggttgtctggcaacggtctgatccggacaagttcgctgtcgccattcaccttgacgagaagcttcagactgaccccgcatggaaagataaaccactgacggaacgttttgctgaggtggcacgacgtacgcgtgctgcctacggtgaagtgcctccagaacctgtagcggagcaggataagaatcagaaggttcttgccgctgtagcagataaagtcgctaaggctgatgctgcggcagcgttacctgattcaccgtctgatgtcggaaatacggcagcagtaccgcaggataaattcgagcagttacttggtgcttcttatgcagatgcagaggccgtaatgagcggcatgagcgacgcagatattgacgcgatccttgagaagcttgggtaa

SEQ ID NO: 388960 - DNA, 414 bp, Salmonella enterica
atggccggacctgtggcagataaaccagaagcgggtgtgatttacgcaccatcttataaggagaacgtctatcagggggcacacggtaacgaatccgttgtggagggttttgtcgaactgaatggcgttgcagcaaatacagaggtgcatttgctgcgccttccgatcgggatgcgtatcaatgcggtacagcttgttaccggggaccttggcgcaggcgtcaccattacggtgaaaagtggtgaccatgagttaattagtaatgaagacgtacacgccgccgtggcgcgtaacgttgtggttgaaccctattccacacaagccgatggagaagtgctgaccgtcgttactggtggtgcagcggcaaccgggaaactgaacgtactggttcgttactccgtggttggctactga

SEQ ID NO: 388961 - DNA, 645 bp, Salmonella enterica
atgtcaacagaaaatataaaggtatttgggtacaaaaagatgaccacgacagtgattaccgatgcgaagaacggaaggtacggtgaaaatggcacgataatggtcgatgtccgtttcgacgatttaacagccgcagatggaacgccgttgtatctgccgtatatcgctacaaaaaacgaccctgaaccgtatggcgtactgctttacaatgaccttgtgtccggtaaatacggacagattgttcccttcaccgccactccagaaatgcttcaggcagcaaaagataccaggcgtgctgaagtctgcgcatggcgagatgctcaggaaaacgggaattacctgtttgactataacggtcaccggtgggattacggtaagtccacccaggacaggatgagtatctcactggtgatggcaaaacgtaatgcgcttccggctgattttgcctggacagacggtgacaacaacatcgttccgatggataacgctgggctgatagcgctgtctgccgcgattgagcaggcgatgtttgaaaaagggatgcagataaaccagcgtcagttacagatgaaggcagaagtcgaggccttaaccacgctggaggctgtaaaggcttacgtggttggctgggcagaagggatttaa

SEQ ID NO: 388962 - DNA, 375 bp, Salmonella enterica
atgagcagattcacaaccccggcaattctcgaaatgctggaccatttcttatggcgcgtatacgagccttttgaattttacctcagtaacgacaatagcgacgcgatagaagtgccagccggatttgttactgatcttgccagtgtgccgcgcatcttctggacactgcttcccccggatggtaaatacgctaaggcggcaattattcatgattatatgtacgacaacgcgctacgcacgaagaaagaagcagatcgtatttttctggatggaatgatagtgctcggcgtgccgaagtggaaaaggatgatcatgtattgggcggtacggtggtttgggcgggggaattacgggaaatgcattaaggttgtgtaa

SEQ ID NO: 388963 - DNA, 198 bp, Salmonella enterica
atgcagctttctggtggagagatcaagtacagctatcagaataatgacaagcaaaaatataacgccaatcccaagcataataagtatggggttattcatgactccaccaaaaagaggggcgtcggatcatgcccctatataataaaaaataacagtaagaactataagcatgaatcttatttcatacgcagcatatga

SEQ ID NO: 388964 - DNA, 435 bp, Salmonella enterica
gtgttacctggcaccttctggtgctctatagtggtacgagtcattattttttctcgcttgctggtagttaatgtcaatagtgattattcgattctggttagagtaccgagcgatccttcccatggttctccgacattgtggagtatgatgtcaagcgtaccaatcaggaccaccacaacacagatgatctgcatcgcaatcatcatgcttctgaaaatcaggaacggcagtatttcggtcagataccctgactttttaaaaaacggactcttcttcaacataatcaggtctgttggcgatatctgcacgtttgaaagtgaacacgatcatggcagaaatgagaagagctatgcgtacaacggtgttcataacgatatttatgacattaatcgggtgaaaaaaatggggccgcattctgaaccccagcagggataa

SEQ ID NO: 388965 - DNA, 1503 bp, Salmonella enterica
atgagtaaaaaaccgtggcgggcaggaaaagacctggcttctgttgttgaaaatatggaaattgggaccggccagcgtggtgacgggaaagatgcgtttgtcactcagcgtcagcttgcagaactgaaactggcgagaatgaacagtgccggaggtggtggaaaagtcagtcttgctcctggtctggggggagggatttttccggagccgttaccgccggagagccccaccaaaccggaaggtttacaggtcacaggcgggtttggctatgtgctgcttgagtgggtgatgccgagatataacgggcattccatggctgaaatctggaggggaaccgaagataacctttctgatgctgttctggtggggacaacgccgggacaggtctacagcgattcagttaacccgggctggaaaggattttactggatacggtttgttaactcagcaggcgtgtctggtccgtataactcgccagacggaaccccggcagaaacacagattgatgtgcaggctgttattgaccagatacatgatgaagcggctaaatccccgatagttgacgtgctgaaaaaggaaatcagtgattcagcagaagccacgaatgagcatatagagaaaattagtgaagatggcggtaaagcgtttcaggctatttggggacagaaagccagtgctgccggaataaccgcaggtattggtatcgttgccgggaaagatgcggcaggtaagccggtcagccaggtggcaatagcttcatcgcagttgtttgtttttgacccgaataaccccggcaatacggcgtatccatttgcggtgtccggcggaaaggttgtgatccagaaggcgctgatttatgacgcggtggtggatacgctggcggcacaacatattgtggccgatgatgtaaaggttggcgcaacgctgacagctccctatatcagaagcgccactatcagcaacggtaattttacggttgactccaacggtaacatgaatgccgttaacgcaaccctgaataacgtgacgtctcgtgggggatatttttacgatctgaatgcgtataacctcaatgtgaatagggggacactgagtgatgtgcatatattgaacaactgtcaggtcgatggcaccgtgagggcaaaccagattgaaggtgatattgcgaagacatatgttattaacgggagcagcgtatatattccgccacagatgttcgatatgaatctggtctgtatgatgggggatttcaatattcggttgaatggcgttgaacaggggccgatactttctgttgagatagccagatggcagacaggaagttcctggaatggtggaagtccggggcacggtggcgggagctatgtaccgtcgtatgatcgcatgtatatcaaagtctatcgactaagtgcaggcactgcggccacaatctccgggacgtacagttatcacggcggcgtcatgccgctccctccgcatgtaatatggatgtcaaaggcttga

SEQ ID NO: 388966 - DNA, 372 bp, Salmonella enterica
atgacaaaactcgaacgatatatgcaacgggtaatggctgatactggcaacccgaatctgctgagtgaaatacaggacgcctgccgtaaaaagcaggcgttttgttttggtgcgccggatggtcaactggtactaaaaccgatggtgaaagacaatgttccgtatgtgctggtctggctggggatctgcgatggttatgacagcgtggcgcagtatctgccagaagtgcagcaactgacccgaatgtctggtgggcgctgggcggaatttcatactacgcgtaaaggatttatccgtctggggaagcgggttggatttgaacggatgtcggatgatgaagacggattcatggtgtttcgtatccaagtataa

SEQ ID NO: 388967 - DNA, 651 bp, Salmonella enterica
atgggtaaaggtggaggaggcagcggagaaatcaaggaaacctcgcagcagaaagcgcaggcagaaatcgcccgtaaacagtgggacttatacaaccaaaggctgaagccaatggagaacatcttcatggctgacgtgggcaaactgaacgacgagagcaaataccagaacctcgccggagtgacgaatctcggttatcagaaacagtttggtgaagtcaggaatcaggctgctgaccagcttgcagccgctggtgttgatccggggagcggtaaattccagggggcgctgaatgatatttccggtgaacaggctattggacagactgacgcaaccaaccgcgcacagtcttctcaggctgataagtatatcgccgggttgcaggatgttgttgctctcggttccggacagaaagccgatgcgttgcaggggtacaacaatctggcagaaaacagtctgcgtaaggcgggcgctgacgctcaggcggcgtatatgcggcgtcagggcaatgcctcactggttggcgcgggcatgggggcgctgggaggttataccatgaataaatggggcggtaagagcggtggttctggtgcaggaccaggaaccggcgctaacgccattcagaattataccaacgggtttaatttctaa

SEQ ID NO: 388968 - DNA, 396 bp, Salmonella enterica
atgagcagtcattatgcctccgacacattcgcgcaactcacacgcgatcagtattacgactgggtaaaccgatactacccgaagcttgaaaccctgatgaatctgggtactgacaatcagttaatgaatgctcaactggacagaactggcggtatagcggcacaaagtttgcggtctgcacagctcgggctgaataaccagatggcgcgttacgggactatcaggccgcagaatccgcaggataatacgttggggttacgttcggcgctggctgtcgccggggcgaagaacgggattcgtgaagcacaacaggaccgtcagatgaacattctgactggcggagcagcaccagtacgccagcaacttaatatcggcgggcaggcacaggcagcatag

SEQ ID NO: 388969 - DNA, 252 bp, Salmonella enterica
atgggatacggattacttgatgcggcaaatcagacgcgacagcaggcgttgcagagtctgggtgaggcagatcaactgaatgaacagcgcgaaatgatgaataaacagatgaaagagcaggccagtatgcagaaaaagcagaatattggttccgggctggggactggcgcggcgcttggtttcgccgtaggaggtccgataggtgcggggattggtgccgtagcaggtggccttttcggctcattgttctga

SEQ ID NO: 388970 - DNA, 1329 bp, Salmonella enterica
atggacggatttgcacaagggttactggcggggttcagtaccgttgataatgcgatgcagcagcgtaaagcgctggggctgcgtgaggccgcactggctcagcagcagaagaacgccgatcgcaactatgaactggctcaggatgagtttggttatcgcaaagagacaggcgatcgtgactaccagcatactcttgaccgggaaaaagtaggtgatgaacattggggaaaagagtttggactccgtcaggctggtatgaatgcccgtgttggaatagcccgccagcaactggcgatgcagaaagaaacgcacgacattcagatgaacaatgcgaagtatttgcagacgatgcagcagtatacgccacagatgaatatggcacagcaggcgataaatcggggagattatgaaacagcaaaaaatatcatggctcctgtccctgatatagttccccttgcccgcatattaagagacccgaattacgcacagtcaacggtatcagccggacaaaaactgtatggcataatatcatcgccgaaagcgcataaagacccgatggcaaccctgcacagtatcaataaaaacatgagtgatatcgcacctcttttccagacagaagccgatcgcgcagttgggcaggttgacccgaaaaccgggcaaaaaatagtctcagcacagataagtcatattgctcctgtgccggataaagatgatccaaaccaccattctccggatgatgtcgccctgttcctgaaggtgaaatatgccaacggcaaggaggcgattaagcccgttacggagaaccggagttctgatttacgggacaacgtgaaacgcatcagtattcatggattactggatacagcgtcgtcacgcgttgctgccagccacaattaccttcagtatttgcagcaaccgcagggactttcaaaggccgatattcagaaagaagaggccaggatttatgcgagcgcggcaagaggcggcacagatgggcaagtagcggttgaccagttcgaggcgaggcttggaattcctggcgcgaaggaaagactactgcagtcgcaggcaactgatgcggcaaaaacatgggctggtgatgatcaggtcagacaaatgtttatgcaggatgcattaaccaggaagccagaactatttgcacccgggaacgagaaacaacgcgatatttatttccagaattataaagccagaaatgaaagtactcaggagaagttgaaggatgccagtgcttcaggttgggctggtcaattgagatatcaaagagaacaacagcagaagaataatgattttctgtacggttcagactaa

SEQ ID NO: 388971 - DNA, 1113 bp, Salmonella enterica
atgacaactaaaaaaaccgaacaaaaaacaagtggcattggcgattacttctttgaattcccagcatcacgcggtttacagggtggtgcaattgtactgctgatgaccgttccggcgcgaaccttatcacgagttctggcgtcagatgacgttggcagcacactggaacgctcacagcgtgaaattaatctcacgcgcgtaaaaaagttttacgaatacctgcggaatgcccacgagagtaacgagccttttatcattccgccactggttgggaactgtaactcggagattgagttccaggagtttggcaacactaatgttggcgttgtccgctttcctatggacgctgaaatcaagctgttcgacggacagcaccgcgcggcggggatcagggagttttgccgcacttacgaccgatcgcttcatattccgttgatgctgacgcaccagttaccgctgaagacgcgacaacaatttttctcagatatcaacaataacgtatcgaagccgtcagccgccatcaacatggcctataacggcagggataaaattgcccaggacatggtgtcattcctgtcctcccatgccgtgttctcagaaataacagactttgaacacaatgtggttccggcaaaaagcaatctgtggattagcttcaagccaatgagcgatgcaactgcaaaattctctggtaatggggacgctcttgcgacaggtgacatctatgacatctgggaggcgtggctaaaacttacagctatcgagggtattcgacatggttgtacaccggctgaatataagcgggattacatccaattccacgcagtgatgatcaatgcgttcggttatgcaattcaggaactgctgagacatcgccccgcgcacatcattgtgcagatgattgaagagttagtctctaaggcgaccatgcttgacctggaaaacttcttccacatttcatcctggtcaggtatctgcgctaatacagacaaggagcgagcgacagttattgccagcattccagcgcagaaagccgcagcaaggaggttggtcaaggtaatcattgaacagaaattcgctgagagtattggcgtagttggggagattgattaa

SEQ ID NO: 388972 - DNA, 327 bp, Salmonella enterica
atgaccaataacaagcaggacttagatgccgcgctggattttgaccttttcgaaggtgatttcggaacaccattcgataccgaactatcgaacaaaattgttacctcccgcggtgaatacaaatgccacatttgcgctggtgaaattttaaaaggtgaaaatcatcgtagtacgacctggaaattcgacggcgaactcatgtcctatcggtgctgcaacgagtgctgtatggcaatggttaaaagcattaattgcgaatacgaagaagacgatccgatagaagcacgctacgcgctggggcatcaacgcagaggatgggcagcatga

SEQ ID NO: 388973 - DNA, 312 bp, Salmonella enterica
atgaaaattaccagcgttgatattattgatgtggcgaacgattttgcgtccgccaccagcaaatggcgtccggtggtggtaaaaattaataccgacgagggcattaccggttttggcgaagtcgggctggcttacggcgtcggtgcctccgcgggcatcggcatggcaaaagatttagccgccattatcatcggcatggacccgatgaataacgaagctatctgggaaaagatgctcaaaaaaaccttctgggggcagggcggcggcggcatcttttccgcggcgatgagcggcatcgatatcgcgctgtag

SEQ ID NO: 388974 - DNA, 150 bp, Salmonella enterica
atgtccctgtccgacgcgaaaatccgtagtatcaagccatctgataaaccctttaaactgaccgcttctcacggtctgtatctgcttatcaatccgggcggttcccgcctctggtatctcaaaatcgaaaagaatcccgcattgcgttag

SEQ ID NO: 388975 - DNA, 180 bp, Salmonella enterica
atggatagcagaagcgcaatagcaatgattgaagctgatggatggtatctggtgagagtgaaagggagccatcatcagttcaagcacccaactaaaaaggggttagtaacggtaaaacacccccaaaaagacataccattaccaacgctcaaaagtatcaagaaacaggcagggctttaa

SEQ ID NO: 388976 - DNA, 402 bp, Salmonella enterica
atgttatatccggttgctattgataaaggcgattcatccttcggtgttcgcgtacctgatattcctggttgtttttctggtggcgacaactatcaggacgcactcgaaagcgctcgtgaagctattgatgctcatcttgaactgctcgttgaagatggtgaggctataccagaagctaccagtgtggaaaaatggctgtccgatccagattatgacggtgtagtttgggctttagttgatgtggatatcacccgattaatggggaaagcggaaaaaatcaatgtgacgcttccctcgctgttaatccgccgtatcgatcagtttgttgccgcccatccagaatacggtagtcgttccggtttcctctcgcgcgtggccgcagataaagtgactggtttgtga

SEQ ID NO: 388977 - DNA, 510 bp, Salmonella enterica
atggtgggatgtaaggtgaaactaaaatatatatttcttttaacggcattatcggcacctgtggcatatgcagactggacgaccaaaacagatgatgatgtatttagcggtgggaagagcgctatgatgttaggggagctatcatctataatgagtaatgcggtttttgactgttcagaaaacaaactaacgttttcgttagtggaagaagacaataattctaaacttgacgaacctatacctgtggatttgttcgtcaagattgatggtgatgaggtcataaaattaaatgctttgttgatgagaagaaactcaagatttataggggctgaatcctcagataaagacgatataattaaattattaaaacaacttcaagcagcaaagaaaaaaattattgttggtattcaaggcaaaggtggtgaaagtaggcaatcatattctggtgatgtaataaattcaacaggagctgtttctaaatttgttaaggcgtgtaagattaacttataa

SEQ ID NO: 388978 - DNA, 270 bp, Salmonella enterica
atgatgatttgcccgctttgcggccatgtaggccacgtacgcagtagttttcggataccaaaaactaacgtggttgagcgttacatggtatgcaccaacatcaactgtggtcacaccttcataactcatgaatccttcacacgctcaataatgcgccccggcacaatagatcccgtcacaccccatcccggaacaggaaagccgcaactcgatctactggctggcctgcaagcagaagaacagccagacgccaacaacaatcacccatga

SEQ ID NO: 388979 - DNA, 1146 bp, Salmonella enterica
atgagtttctccactatcgccggacaactgacggacagggtgacgggctacggcgttcccacccctgccttcactatcgttgttgacggcgtggacgtgacaaataaatccagaagccgcctgatatcgctgtcactgacagacaaccgcgaggccgaagcggatacgctggaactggtactggacgacacagacggcgagcttgatttaccccgccgcggtgcgcttatccatcttgccatcggctggcagggaaagccgctaatccccaaaggcgcatataccgttgacgagataacccattccggcgcgcccgaccagctaaccatcaccgcccgcagcgcagattttcgggcaagcctgaacgttaaccgggaacaatcctggcataacgtcaccctgtcagatattgccaaaaccatcgctacccgcaacaaattaacggcaaaggtacagccggaactggcgcagataaaaattgaccacagcgaccagacgaacgaatcagacgccagttacctttcacgtcttggccgtgaatatggttttgtgctgaacatcaaaaacagcgctcttcgcctgatctcagcaggcagcgaaagaaccgccgacggtaaacccattcccacaataacgattacccgcaaatccggcgatcagcatcagtttaccattgccgacagggacgcctacacaggcgtgaccgcccactacatcaaccatcacagggccgaacgcgaagacgtcaccgttaaaagacgcaggaaaaagcagcacaccgccacacccacacaggaaaaagaccccggacaaactaccggagacaaacatcagggcgattatctgattggcagcgatgaaaacgtgctggtattgcgccacacctacgccagcgaaggcaacgcaaagcgtgcagcaaagagcgcgtgggaacggctacagcgtggcacagcttcattcagcatcacactcgccacaggccagccggagatcaccccggaataccccgttaaggtaagcggctttaagccagccattgatgaagccaaatggacaattaccgcagtcacacacgaaatcggggatagcggcctgatttcaacgctggagatggaagtaagcgtggacgcacttgatatggtatga

SEQ ID NO: 388980 - DNA, 525 bp, Salmonella enterica
atgatggccacgcttgggctgtttgtgtttgtactccagaccgccccctatcaacagatgcagcaggaagtttcatggcgtcacgtcaccaacagccgggtaggacaacgaccggcgacgcaatttttaggggttgacgaggagaccatcaccctttcgggcgaactgtacccggaactgacgggaggcacgttatcgctgatgacgctgcaatggatggcggacactggcaaagcctggccgctcattgaaggcacagggtttatttacggcatgtttgtcatcacctcactgagccgtacacgcgccttcttctcacccaatggccacgccagcaaaatagagttcacgctgacgctaaagcgcgtggattcgaacctgaaggaactttttggcgatcttggcgcgcagcttgaacaaatcagggacggtatcacagataccgcaggaaaagcgctggacgccgccaaaactaccgccattgacgccgtgaccaaaggcgctaaattcatttcagggggctga

SEQ ID NO: 388981 - DNA, 2844 bp, Salmonella enterica
atggataaagatttacgcctgcaggtgattctgggtgcggtaaacaaaatgaccgcacccatgaaagccgcacagaacagcaacaggaagctggcacaggctattcagtcaaccaaaaaaaatatccgcgcgctcgatgagcagtccggcaaaattgccgggttccgtaaaaacaaacaggcattaactcaactttccggggaaatgcgggcagcgcaggcccgcattaaagcgcttgctctcgccatcaaaaagggcgggaaagacacggcaacgctaacaaaagagcaaaaaaaagccattgaagccgcacgcaagctgaaaattaatcacgccgaactcagcgccacgctacaacgcgaacgtactgcattacagcaggacgggatcaatactcacaaactggcatcagcacagggagaactaagcagaaagacccgacaggcaacacaggcgctggaagcccagcaaaaacgcctgaaaatcagcggtgaagcacaggcccgctaccagcaggttatgtcacggcgcaacagtatgctgattggcggcgggatcacaatggcaaaaggcactgccggactgtacgcactgaataagccactggatgaatcaaagcattatcagcaggaagtgtcacaattccgcgcgctgggtgtaggtgaagacactatccgggatgcaaagcaatttgccgatagcctgaacgttatcggtaatagtgttactgacaacatgcgcaccctgaaagaagcgcattccgttctgcgtcactatgacgaagcaaaaatagtgacacccgaactgcttaaaatgcagtacgccacaaagttcatggccgcaggtcagggtgaagcattacgcgatcagtcacagtctgtactgaaaatcgcggaactcagaaacgaaataaacaccccggaacagttcagaaactccgttaacctgacaacccaggcatttgcggccagcggcggcatggttaagccggaagattatctggaagccattaaaacgggcggagaatccaccaagaaccttgacgacaagtttttctactttggactatctcatattatccagcagttaggcggggatcgtacaggtacatcactggcgagccttaatgctggctgggttggaaagcaaatcaaagaacgttcaaaagacgcgcttcaggatttaggattactttctaatgccacgttttcaaagaccggccatgtaaaagattttacactgaagaaccaggcgctttaccagagcaacccatttgcttatctacagcaggaaattctgcccgctattcataaaaaataccctcacgccaatgaactacagataagaaatattctgagtagcctggtatcgaaccgtaaagggcaggatctgttgttactgatgtatcgcgagcaggcgaacatagagaaacagataaaagcaggcggcgaagcgtacaacgtcgaccagttggtgggcgaaggcgaaaaaacaccttacggaaaagaaattgccctggaagccaaaaagcacaccctgtacaaaaacattggcgacaaaataatgccgatgtatgtgtgggggctggagaaactcgacaacgccctcacctggttaggaacatttattgataaccaccctcagcttgcaaagttctttctcctgacagctaccggtatttctcttgccgccgtcgcaggcggtgcgctgacggttgcgatggcgggcttgcttggcccgcttgcggttgcccgttatgggttttcggcgctgacaggccgggaaatgcccgcgcttggcagtatgttaaaaaaactcaatatccgcgcattcgggcggggcattatgtggctgatcagaagtccactcaccctgttacgtggcgcgttcattggtctgggttcaattgtggccgcgctgggctggccggtgacgctgataatcgccgcactggtcgctggcgcgtttctggtctggaaatactgggacagggttaaagcctggttttccggcttcctggacgaactgaaacccgcatgggaagccatcaaagaccttttcgcaccgctcgccccggtatttgaatggatcggcgacaaaatcaaagcggccattaaatgggttaaagacttcatcacgccggtaaaaagcaccagtgaagaactgaaagccgccgaagagtcaggccgcaaatttggtaaggcaatatcagacggcatcattactgctatcgataaaattaaagaactgtggggctggctggtcgatataaaaaataatgtgctgaatatcggcgacaatgccattagctgggtaaaagagaaggtaggctggaacagcaagccggatacaaccagcaccctcccgacaatgccagtgcccggattactgccgtcaccctatgccatgccctttggcggattccatgacgcaggcggcacgctcgcggcgggtcgctggggtattgtgggcgaacgtggcccggaaatcatcactggccctgccagcatcacaagccgcagcagaacagcggggctggcgaatttcgccctgtcattgcccgcgctgttagcggacagcgtacagtccatgtttccgctacagtcgccggaaacgctacccctgcacccttacgcggtattcgccggggcggacagtccgccaggtcgccagcatcatacgcaggcatacgactatggcgcgatatcacagccggttatccatattcacgccgccccaacgcagaacgcgcaggatattgccgatatggtcatgcgtgctatcaaaaaagagcagcgccgggaagaaatacgccgccgcagcgcataccgcgacaggagatag

SEQ ID NO: 388982 - DNA, 333 bp, Salmonella enterica
atgaaagaaaatgaaatcacgatggatattacggacgcttccgttaccgccaaatccgtaacactggacacgcccattgtacgcggcagcaccaccattgaaacgctcactatccgcaagcccagcgcgggagaattaaggggggtaaaactacaggcgttaatggagtctgacgttaacagcattatcacgctcttgccgcgtatcacctcacccgcgttaacgaatggcgaagtgaacagcatggattcatctgacctgctggcgctgggtaacgagatcatcatttttttgttgccgaagtcggtgcgtgcggatttggaaaaagcctga

SEQ ID NO: 388983 - DNA, 516 bp, Salmonella enterica
atggcattacccgcaaaactaaagaacttcaacatttttaacgcaggtaacaactggcgcggtctggcggagtccatcacgctacccaagctgacccgcaaactggagaagtaccggggcggcgggatgaacggagcggcacctatagatttagggcttgatgatgacgcgctcagcctggagttcacgatgggcggtatgcacaaactgccgttcgaacaatggggcgaccccgttattgataaaaccatgcttcgcttcgtgggggcttacgaagaggacgataccggcgatgttatggccgttgaggtcgtcgttcgcggacgccacaaagagattgactcaggagaagccaagcagggcgacaacactcaggtcaaggtatcaatggagtgcgtctactacaaactgacgatcgacaatgaaaccgtgattgaaatcgacgtggttaactttgttgaaaacgttggtggtaatgaccgtctggataaataccgcaacattcttggcctttaa

SEQ ID NO: 388984 - DNA, 1179 bp, Salmonella enterica
atggccgcagacgcatatcaccacggcgcgcgagttcttgaactcaatgacggcacgcgcccgatacaaacaatcagcacatccattattggcatggtgtgtacatcctcagacgccgataaaaccctcttccccgctgacaaacctgtattactgacagacgttcagggcaagctgggtaaagcaggcaacaaaggcacgctggcacccgcactacaggctattgccgaccagtcaaaccccgtcgttgtcgtggttcgcgttgacgaagcaaccgcctcttctggcgcaactaccgaagcgaacgttatcggcaaggtcacagacagcggaatgcgaaccggcattaaggcgctgctatccgccgaagccgatctgaacgtaaaaccccgcatcataggtgcgccggggctggacagtcaggcagtaaccaacgaactggcgatcaccgcgcagaagctgcgggcgttcgcctatgcccgcgccaatgccaaaaccaaagaggaagccgtaacctaccggggcggatttgggcaacgtgaattgatgttgttatggccggacttcacaggatgggacgccaccacgcaaaaagcgaaagaagcgagcaccgtagcccgcgcgttgggattacgcgcaaagattgataatgatatcggctggcataaaaccatctctaacgttcccgtcgacggcgtaagcggcctttccgcaagcgtgtactgggatctgcaacaaaccggcactgacgcggactacctcaacgaaaactgcgtcaccacaatgatcaggaaaaacggcttccgtttctggggttcgcgcacctgttcggctgatccgctgttcccgtttgaaaactacacccgtaccgcgcagatcctggctgacaccatcgcagaagcgcatatgtggtcagtagatggcccgcttaatccgcagatggcgaaagatatcgttgaaggggttcgcgccaaattccgccagcttaaaacgctggggtatctcattgacggcgattgctggtacgacgacagcgttaacaccgccgacaccctgaaatctggccagctcttcatcgactacgactacacgccggttccgccgctggagaacctgttattccgccagcgcatcaccgatcgttacctggtgaatttcggccagaaactggcggcataa

SEQ ID NO: 388985 - DNA, 621 bp, Salmonella enterica
atgcaaaaagaccagaacggcgcggatatttctgacgctgcattattcaggcaaagtatcggggtttacgacgcttccacctcacaaaagggacttgtcaggctaaatggtggcgtaaccaatgctgacgatacgctggcagcaacttccggagcagtgaaaattgcttatgatgcggcacaatcagcttaccgactggctctgtcaaaatacaccgcagacggagcaactaccggaaaagctggtcttgttcagcttgtgaattcagtgggcgggtctggttcactggtgatgccacaggcggctgtaactaccgcaatacagacttatccgtctctcggtaaaggtcagacattacaggatttaagaggctctcgtagtatagacgcaacttataccaactcaaccggattcccgattgcggtttacgtccgaatttctggcggttattcagcaaatttatacgctcatgtaaatggaatagagttcggcggcggtgggtcaacagcatctaatacatccatagcaactgcattttttattgttcccaatggcgcaacttaccgcgtaatggcttctggtgcgtccattgcattacaggcgtggtcggagttgagataa

SEQ ID NO: 388986 - DNA, 516 bp, Salmonella enterica
atgaaatattttaagacgaataaaaatgaaatttatgtatacgacgatgatgcagataaaaagttttataaagaagggttaattccgataactgaagaagaagctaacgaaatattaaaccccctgccggatattgaagacgcccgtaaacagaaacacactgaaattaaccactggcgcgatattcaggaaaacggcgttatcacgtttacctggaacaaccattcatgggatgccagcaaagcgtcacaagaccgcctcgcccccgttctggtcgtggcaaagtcaggccagttaccggagggattcttctggactgatgcgaataatgaagacgtccctgttaccgttgacgacctgaccgccattgatgcaggtatgacgcaagggatggttgctcagggattcaaaatccatgagcgccagcggcaaatgaagaaagatatcgacgaattaaccaaagttggcgacattctcaactattctgtaggctggcctgataataacagtaattaa

SEQ ID NO: 388987 - DNA, 591 bp, Salmonella enterica
atgtatcactacagcccgtcaaaaaatgccttttaccctgacgaactgaaacaggtttatatcgatgccggaaccttcccggacgatactgttgaggtcagtgatgatgtctggctggagttcgccggtaatcacccgcccgaaggtaagcaacgcgcagccggtagtgacaatctgccctgttgggtggatatcccgttaccggatattgaagacgcacgcagccgaaaacacgacgaaattaacgcatggcgcaacaagcaggaaagcgcgaattacaccttcacgtttgataatcacaaatgggactacggcaaagcgacgcaggagcgccttacgctatcggtacagatggcaaaagccaacaaactaccagcgggttttatctggacggacgccgataataatgacgtcccgatgacggcgggcgagctactcaacctcagtgacgctatcgaccaggcgatgtttactaaaggtctgcaaatccacatgcgccagcgtgaaatgaaagaggaaatcgacaaactgaccgatgtaaaagcgattctggattatgttgtcggctggccgaatatcccaacaaaataa

SEQ ID NO: 388988 - DNA, 255 bp, Salmonella enterica
atgaatgccaaaattgttaaaatgaaagagaatacacctgttctggcagggctgaaaagactttgccataggaaaatgtattcattccacgctttgcctatttcgagtcatggtcagagtgatattgttggcgataccagagaatttctttctgaatgtctggaggggtcagcaactggtgaactcttcgataatttctttttccctcatgggattattgctgaatcacaaaaattgacagcaaagcatttataa

SEQ ID NO: 388989 - DNA, 315 bp, Salmonella enterica
atgcgcacaaaaataatgctgttatctgcactggtagcgatatgcttcagcgtacaggctaaaccgacgggcattgctttttatgctccaggccatgatatgtcgtttttagttaaaacctacgcgttagataatgccgggaaatggaaaccattccttaaattcgtcgccaaagaaacagaaggctttgaccgcttaacgatggcgctccaccccgatagcgctaaagacgctaataacgtgctggagcggtgtatggcattttatgaatcggacaaattagataaatacgttcgagagacagtgatgaaataa

SEQ ID NO: 388990 - DNA, 261 bp, Salmonella enterica
atgcaggtctgtagcttcagtataaataacgatgtttccttcttcttcggttacatcacgaacatcaacttcagcatcaagcaaaatttcgaaaatatggtcagggtctgttcctttaaatacaatcactccagtattgtcaaacatatagctgacagcacctgccgctccgatattcccgccttttttattgaaaattgtgcggatattagcaatcgtacggttaacattagacgtcaacgtttcagcgataaccattga

SEQ ID NO: 388991 - DNA, 5586 bp, Salmonella enterica
gtgaataaagtggtacatttcttactgacattactgatcatgtttgcagtgtcgatcgcgcctgcgcaggcgttattgaagggcgggacctggcaagagctgaactcgacgaccggcgcggttaacggcaccgcgccgctggccgacggtgccactattcccctgtatcagggaagtatgctgcttgaccctaccaagacctacgatatcgagtttaccgccatgccgcgcgattttagcgctgatgcctcctcaacctcgatgcgtgcggtcaactccaccgatacggaaggcgatctctttaccgatccgccctccatcgcctgggaaaatcaagaaccgccgaccatgagtctggtatgggccgatgccgccacgccgggtacgccgctctcgccgcagccgattcttaaccagaccttttgcgcccaaaacctcgccgggcggcaactggtggcctgggcgcaggtggaagatgaaacgaacgttcccgcgctgtggctctatacccgtaccggggtgccgaacaatgcggtcattccgctacttagcccgaaagtgacgctgaatatcaaaccggcggtgagcgatcctgtttctgtgagcggcgatcatattgacgccaactttgcagcctcgaaagtcaaagcgggggagagcattaccctcactgtctccaccaaagcctgtaatggcgacgtggcgccgaatgctgccttcgtgatccgtcgcgaggatgcaataaatcgccagggcgtggtcaataacgctaacccggtgcgcgttggcgataccgagttaacgactacgcaaacagaatatcacggtgtaacggacgggcagggcaacgccacggtggtggtgacgcaagagcaaggtccgggggtaaaaacacgactcatcgtctcttcgcaaagctatcccacgctgaccgacaatgtcgacgtcattttcactaccatcaccagtcctgacagtgataaggccaacatgtacggtcatatgcttgagaacgccacggcgacgctgaacggtacgacctacactttcacccgcccgaaactggcggcggaaaccagcggaaatggcggcaccgttgtggacaccaacgaaacctgggcgcagtttacctggagtggcgcggataaccattgcgacattctgccggatgccgaacaactggtggcgctaaggcatgagcatagtgcgttggcaacgtacaccggctggccggtgacgggcgatgcggaatactggtcgtcaaccaaagatcagataaacgactaccacgctgccgtgcatatgaacagcgcgtcggtcgtcagggccgccaacagcgacacgctactggtcagttgtgtggataaggcccagcctgcggcgcatccgcagataacgctctctccagaggggccgtataaagcacaggtgggggaatcgattgatttagtgatgaccgttgtggatcgcgacacgcaaaagccgctgccttatcgctatatggagctgttcattgaccctgcgaaaaaccgcaaaggagagcatcaggacgcgtgggataaccaacgggttacaatcaacaccgaagatatgcgcgcctcgtcgccggaacactataccggtgtgaccgacgccaacggccaggtacacctgacgttaaaacacgacagcggcctgggcgtagaaacgcccatccgcatcgtgatgccggatgatgaaggcggcagcatcgagttgccctttagcgtaattttcaccgtgataaccagcccggatgtggacggcgccaacatgtggggccatatgcagggcgtggtggacgcgggcaacctgtatagacgcccgctgctggcggtggaaaccagccacaaagacggtcagttcagcgaaaacaacgaagagtgggcgacgtttaattcagtggaaaaagccaccgcgcagtgcggcatcggccaggtgccggatcagtcatcgctgacgcatttatacagcgaacatgctggcggcaagatggaaagcgaacacggctggccaaccgaagactattacatcgccgcggacagcgacgcttcgggaacggcgcacgtcaaccttgaaaacggcgatagcggtaaatttaccaatcaaccgaattacctgacctgctcggccaacgaaatggtggcggtgctggacgtctacttcaacgatgacccggcgaccaaaaacagcgatgcggttgccaaagtgggtgagcagattaagctgaacattcattcgcgcaacgccctcaacggcatggcgatcgcctataccgacttcaccgtcaccatggcgaacggcaaacggcgcgacgggttgacgaccggttttaccgacaccagcaatggtcagatgctgtttgatgacgtgggctaccttgccgggcaggcttatcatgggatcaccgacgccaacggcgatgcgaccattatcctcacccagccgaagggagtagggctgctgacgccgttaagcattgcgcccgtcgattcattaatcagcacgcccgtttcccgcagcgtgaagtttaccgtcgccaccagcccggatacgccaaaagccaaaatgtggggccatatggctgataccatcaccgtcggcgatctgacctttgagcggcctaagctggcggatgaagtgacgccggaacgtactcaggctgaggctaacgaaacctgggcgcgcgttctgcatcctgacgcggcgggcaacccggataagggcggctgcgcggcgaaccgcctgccgcgcatcgatcagcttgaggcgttgtacaacgccaacagcgacggcgtgatgaaaagcacccagggctggccgacgctgcttaactactggtcttcgaccttccagagcgctaccacgtggaaactgatctcgctgtttagcggcagtgaattcgccaacgccaacgtctccatttacgccagctgtctggccagcgataacccggcggcggcctcgattaccattgaaccggtggatgcgtcgcagtggtacgatggcagcggcgttcacgcggtcaaagcgaaaaaaggcgacacgatgcaactgaaggtgacggtgaaggacgccagcggcaacccgatcccggaagcgccgtttgtgctcacccgcggcgacggttacgatcgcaggggcgagaagtacaccgccagtgagggcaacgatcagcaaggcatcgtcacgcccgtggtgatcgatggcgaatccctggcctggaccaccaccaaaatggggatgctgaccggcgctgacggcacccgcatcatcagcgttacccgcccggacacacacggcacccgaacggccattatcgccgcgctgtatgaaaatgccgccgtgagcgccagcattgacaccatctttaccgtcatcaccagcccggatgtcgacgttgcccgcatgtgggggcatatgttgccgtcgctcacggcggcggatggcgcggagtatcagcgtccacagctctacgctgaattagccaatcaggcaagtgccgcgcaatataccgaagacaacgaaatctgggcggggctttatgggccagacagttcaaaaaccgaccccgctgttaactgcgctgcgggctatttcccttccgtcgaggcgctggattcgctctacagcaaatacccaaaccgcacgataaaaaccgcccagggctggccgatcaaccgttcttactggagcggttccagttccgggtcgttaaccggcggaaagccccgatcctattacattgtcgatctggatgatgattcgcgccggggcgtcgttaatgacggtgtgaacgacaggcaataccaaatttgcgcaacgacgccgaagacgcaggctacgcaaattacgctcacctccacgctggcgacggatgacactattcaggcggtgaaggctaaaaacagtgagtcgatcccactgctcgtcaccaccaccgatgcggcgggtaatccggtgccttatacgacgttttcgcttaagcgcgacgccgggacgccgcgtaaagctgactacccgtttaccaacagctacaccatgacgatgacgcagtctggtggcgcgacgcaagagtttgcctacagttcatcggttctttatggggcgaccggggcgaacggtacgttggccctttcgcttgacgaacctggcggagtcggggtgaaaagcgtggtgactgccagcctgtatgatacgccgacagtaacctcgtcgctgccggcagtgtttaccgtcatcaccagcccgaacagcgacaaggccaatatgtacggccatatgccggaaaccttcaccgccagcaacggcgcggagtttatgcgcccgctgctgtatggcgaactctcatcgcagaatcatacgtcgagttacttcgaaaccaatgaaacctggtttacggtgaataattttaataccgggaattatggcgcgtgcccgataaatcagatggccacgcaggatgatctccagtcgctgtaccgcgatcaccccaaaggtaagatcacgaccgacattggattacccatcaagaaaaaatggtgggcaggcgacagcctggtaaaaaatcaatccatttactggcaatttaccgatctcaatacgggtaatggcggcaccacgttggaaactccggggaatttctattaccagctctgtctgacggaaccgcgacagatgaagattgcgttatctacggacgtgtggaacgcggataaatcggcggcggtggcgaaaacaggcgaggcgataccgatgacggtaacggtgactaacggcgccgggcagccgcaggcgggggcgacggttatgctgacgcgtgattactcttattcgcgtggcacggtggatagcaaatacattcaggccggtgtgattggcgagccggttgcgtccaaaggcgcgttatcagacatgaccctgacgccggtatcgcctgcgggtgcggcagtggtgtttaataaccagaggggaaccagcacgaaatggtatggcgtcaccggcgatgacggtaagttgcggttcacgttaaaccaggataaatcgctgggtttgagaacatccatcacggcgacgctttcggagctggctggcgagacggcgagcgtcgatgcgatctttacggtaccaaccagcccggatacgccgtatgcgtcatactggggccatatgccggataccgttgaggttaacggcgttacgctgcgccgcccattcctgaaaacagagatgtccaaaatgccgccaggcacctggccgcttaataatgaaacctgggcggcgaactatattgattatggtgaaacatccattcatgctacgacatcgctgccttatctttgcggctcgctggaaaacgccgcgacgctggacgatctgaaggcgctgaagaacatcattggcgacctgcactggcctacggctgcgccggcgtcgtcgtatacatatgactatgcatcgcaaacgatggttggcggtaagtattgctcatttaacgaaacgaccaatacggaaaactgtacgctttcaagtcaaggttttgcttatgcctcgtgccgggtgcagtag

SEQ ID NO: 388992 - DNA, 3249 bp, Salmonella enterica
ttgaacaggacctacagtatcgtctggagcgccgtgcgaaatatgtatgtcgtggcttcagaactggcgcgaggccacagcaaagttaaaatacaggcgcacgctaatgaagtcgccctttctattgaaaagcctgagtcaggatggacaattagtgcaaaacacaatgcgctggccttcgcaattgttgccgcgcttgggttcgccagtccgctggctatggccgataattcggtgtcctacattgacggagtcgaccacgacctgaacgcagaaacgtcgccaatttcttattcaggtaccggccagggtacggcactgtacctcgaaggtttgcccacacagaaccagggctggcagccaacctcaggcacaggcacgggcgttgtgattgaaacggacggcggcggcgctctcctcccggacggtagcagccatgcagccgccacggcggttaagcttactaacggcgcgatgcttaatcttaccgacgcggtaatcacgacgtcgggagaatatgctatgggtatcgagctatcaggacagagcagcataatgctaacgggagggactctcctggccggaggcaattatggcatcatgacgctcagcggcgagtcgcaagcgacattgagcgacatcaaggtaacagcaacagcggaaaccggcagcgatgtagtttcgcaagaaggcagcacgctgaacatcacggacgggagtgaaatcacgctcacgaggggacaactgcgcgtggttggcagcacaacaggcaacgctttcctgaatgtgagcgatagtacagtgagttccacgggtacagacagtactgttatcgcgtccaacaagggcgttcttgatattacgaactctaccgtcacgcacgataatgccaaaggcgcagccattgaggctggtaatgcctcaacggtgactatttccggcgataataaaagttcgatggtcatcaactccaaagatataggcattaagagcgccaaatcttccgtcaacattgacggcgccaccatcatcgccaaaggcgatggtattttgatgaccacggggggcagcagtttttacagcaataactccgggctgacggtcaacaatgcggacgtgacctcagacgacgccgccgcgctgcacgttgataaaaacacggtgatggaaaagcccattacattaaccgacagcacattgactggcccaacggctattaaactggataatgcggcaaccgtagaggccaacaacacaacgctgaatggcaacattgacgcggggagcacagtatcgtccttgtcgctggccgaaaaatcctcactgcaagggagcgtcaacggcctgaacagttcattgacgcttgacgaaaccagccagtggaacatgaccaacccgtcaaccgtcggcaacctgaccaacgacggcggcattacgctgggcaacgcgagcggttcgacaggtacgctgctgacggtggacaataccctgaccttgcaggacggcagccagataaacgcgacgctggataccgccaacagctcgccaattatcaaagccaccaacgtcacgttggacgggacgctgaaccttagctcaacggccacctttgtcgcgcccgaaaccgacgagcacttaggatcgttcacgctgattgattcgcaaactgcgatcactaccgattttgacagcgtaacgctggatgccgacatctctgctatgccggattaccttacgatcaacgcgggcgttgatgcgaatgataataccaactacgagttgtctacgggcttgagttggtacgcgggcgcaaattctacgcgcgctgcgcatggcacttttaccgttgatgcaggcagtacctttaccgtcaccagcgaactggacgaaaccacggcgacctccaactgggatggcagcaagctaaccaaacagggcgacggcacgctgatcctcagcaacactggcaacgactacggcgacactgaaattgacggcggcattctgaccgccaaagacgccgcctcgctcggcactggcgatgtgacgattgcagaaagcgcaacgcttgcgctgagccagggcacgctggataacaacgtgaccggcgggggccaaattgtcaaaaccggtaacgatgagctgatcgtgaccggcgataacacttacagcggcggcaccaccataaccggcggtacgctgacggctgactatgcggattcactgggcactggcgttattgccaacagcggcgtgcttcaggtcggcgaaggcgagctggaaaatacgctttctggcagcggctcgctggtgaaaaccggtacgggcgagctgacgttaggcggcgataacacttactccggcggcaccactattgacgacggtgtgctgattgccgccaacgttaacgcgctgggcggcggtgatgtcgataacgcgggtacgctgaagctggacgcggagggcgaattcaaccttgcgaatgtcacaacccagtctggagcaacgactgagctggccaaaggtacgacgctcaacgtcgactcgctgactcagcaagccgatagtatgctgaatattgacctcagtaaggccaacggtgaaagcgccattaccgccgacagcgtcacgctgggcggcacgctgaacgtcaccggcatcggcagcgttacagacagctggacgcctgaggcatacacctacacgctgattgacagcgacagcgccattaccagcgatttcgacaatctgaccgtcgcgggaatgaatagagaagatgttgacttcctgactatcgacggaaaagtcgacgaagcagacaacacccactatgatctgacggcctccctctcctggtatgcggacagagacaacgcttctaccgacgctcacggtacctttacccttagcgaccctgacggcagctttaacgttgcggctaatctgacagacgttgacgacacgcttgatccgaatagcacatgggacggtaaatcgctgaccaaagaagacgcaggcacgctgatcctctccggcgacaacgactacagcggcggcaccaccatcaatgaaggtacgctggtcgccgccagtacgacggcgctgggcaccggcctggtcgacaataacgccacgctggtgctggacgcagatggtgaagtcagcgcggtgggcggcatcaccattcatagcggcgcgacgacccaactggcgctcggcacccgttggatctcggcgacagcgcgttaa

SEQ ID NO: 388993 - DNA, 459 bp, Salmonella enterica; identical to SEQ ID NO: 374350

SEQ ID NO: 388994 - DNA, 237 bp, Salmonella enterica
gtgagcaacatcaacaaacagattcggggatttaaaaacgtaagccgtgacgcttttttcgcatatgtcggacctcgcgatatcattgtttgcaatcgtggtaactggaatgacaacagtcattatcagtcatttcaaaccagaagcgggattgaagttggtcgattttatggcgattcaatccattgcgacgatcggtatttattggctgagaaattaacaggcggtgcagcgtga

SEQ ID NO: 388995 - DNA, 273 bp, Salmonella enterica
atgagcaagtcatacatagtcatccagcaatatctgtggtgtaacgagagcggttacgggattgagtatgcgtccgactgcgttgaattcgataagctcgaccaggccatcaaacatggactcaagcagcaaggcagcgacgatttcaatatcggtgttatagaaaatggacgcctggtgtcattcgactggatggataaaccggtcgagaaaagcccggagattctggcggaaatcgctgacgccatcggttatgaaggagcgtcccagtga

SEQ ID NO: 388996 - DNA, 225 bp, Salmonella enterica
atggaaatcatcgataaaaaatacaacagcaaagaagagactactgcatttcacctgaaatccagtggcaaaattgtctcacgcctgctttcaacaaagcttgatcgtgatgattgggagatcatccataacctattgcatttcgtttacagccaaggtgtcgaggcaggcagtaaaagccgcgcaaaagaaatacggatagctcttggattagaagatgactaa

SEQ ID NO: 388997 - DNA, 468 bp, Salmonella enterica
atgggtttcaaaataagccgttcacaatccctgatcgaagttatcactcagtacccaattactgagctaccaatcgaagagtttgaacagtataagcgggaatgtattgaatatgatgacattcccgctcctgatatccacattcagcttgctcaccccgcccacattgaaaccattggccgtgacaaactcatggaacgccctgttgaggcccgtggtgaagaattgcatcacgttcacatctggcaggaagggtgctgttgggaagatgaggacggccttctggtgcagtgggcttcaaccagtgatagttatgtagtttactcatattttatcgacagagataaagatcatcatttctacgttattgattattgtaacgacaaagcccatgtattaatcgaagataaacggcaggttgcagagtggacccggcaagccagagaattcaggctccagaacatttaa

SEQ ID NO: 388998 - DNA, 147 bp, Salmonella enterica
atgacacagaaacgcgaagtaagggccaatgacaagccacgccagaccctgcgtcgctctgctgactataaagcgcgtctgagtgctgcttccgccatgctggctgagaaaatggaagagaagcgtaacgcatgggtttcaaaataa

SEQ ID NO: 388999 - DNA, 576 bp, Salmonella enterica
atgagcgagcagttaacggaccaggtcctggttgaacgggtccagaagggagatcagaaagcctttaacttactggtagtgcgctaccagcataaagtggcgagtctggtttcccgctatgtgccatcgggcgacgttcccgatgtcgtacaggaatcatttattaaggcctatcgcgcgctggattctttccggggggatagcgctttttatacctggttgtatcgcattgcggtcaataccgcgaagaactacctggttgcgcaggggcgtcgtccgccttccagtgatgtagacgcgattgaagcagaaaactttgaaagcggcggcgcgctgaaagaaatttcgaaccctgagaacttaatgttgtcagaagaactgagacagatagttttccgaactattgagtccctcccggaagatttacgtatggcaatcaccttacgggagctggatggcctgagctatgaagagatagcggctatcatggattgtccggtggggacggtgcgttcacgtatcttccgggcgcgggaagctattgataataaagttcaaccgcttatcaggcgttga

SEQ ID NO: 389000 - DNA, 873 bp, Salmonella enterica
atggaacaggaagaatttcagcaattaccctctccattcgctaaatggaaagggaaaattaatcttggcggagaggatattgattgctacgtacttgatactggcgagcgcgttatcgccctaagagccacagttaaagcgatagcagaagttgaatcaagtgcgctggcggactacattggcgcaaaagcaataaaaccttttatagacagtaacttaatcctggcggaactcatagaattctccatccctggaacgcaatttaagagccaaggattaaagactgagcacttcgaactaatttgcaggggatacgttcaagctctataccaaagcgccccacttacagatcgccagcgacaaattgccattaaatgcgcagttcttacagcgggtcttacaaggactggtcttgatgcgcttattgatgaggctactggctatcaatatgaacgcgctgaagacgcccttcaggtcaagctgagggcgttcattgctgaagaattaagggcatgggaaaaaacattccctgatgaattatgggaagagtttggcaggcttaccggctggagtaccccactacagtcacgcccaaagtggtgggggaagctagtaatagaacttatctatgacacacttgatgaagatgtagccaaatatctaaaagaaaataaaccagcgccaggggttcattggcacaggcagctaaccgaaaaccttggggtaaggcaattagtatcgcgctgctgggaagttataggcgtagccaagacatgcgatacgatgcatgagttaaggagccgggtagcccagcattatgggaaaaaaccagtacaaatgacaatgtatctacccgcaaaagaaaatgattag

SEQ ID NO: 389001 - DNA, 708 bp, Salmonella enterica
atgcaagagagtacacttaagacgctagctgacagacttaactacgcaatgcatgaaatgggtatgagccaagggcaattagctaaagctgccggtatggcgcaaccaaccatatggcgcataacatctggcaatgccagaggaacaacaaaaatcgttgaactagctaatgccttgggggttcggtctgagtggctatcgaacggtacaggaccgatgaggggcgacggccaacagccaacctcccctattgcgaacaaaaaagattctgcgatattcagagttgacgtactcgacctcacagttagtgctggcccaggaataattaacagcgaattcgtggaggtgttgcgttccgttgagtactcggttgaagatgcgcaccaaatgtttaatggacggaagcaggagcagatacgcatcatcaacgtccgcggcgatagtatgtctggaacaattgagcctggcgatttactttttatcgatataagcattcagcactttgacggcgacggcatatacgccttcctctatgacgatactgcacatgttaagcggctccagaagatgaaagataaactattggtcatatctgataataagagttattcagcttgggacccaattgaaagagatgaaatgaacagggtttttgtctttggaaaggtgattggaagcatgccgcagacctataggaagcacggttag

SEQ ID NO: 389002 - DNA, 369 bp, Salmonella enterica
atgaacacagatctgaagcaaaacttaatcgctctcctggaagagcaattcatcagctccgatgacaaagttgttttcgattatgtgatgcagaaaaaaatcaagtctcagggataccacctgcaacgcaatttcagcatcagcattagcggtggtcgtaaaggctttattgattgcctggttacatcaccagacgggcagcagtgcgccattgaggtcgataaaaagtctccccgcaaccgctcgctgatgaagttggctcagcttccagagggaatgtcaggctttgtcctgctcagagatggtaagcaccctcttcgatatagcgagaacggaattgacgttattcgtgcgacgaaatttaagtga

SEQ ID NO: 389003 - DNA, 366 bp, Salmonella enterica
atgcgtaaatttcttttaatagccttgtgctgctttcctgctgtaaactttgcaaaattcattaatccaatggatttcgatggatctgaagcacaaaaaaatgaagtcattgaatacattaaggctcaagtgcataaggattactgcgagagccaaatagatatgtgccaggacactacattacgaatgatggagcgtgaaaacctggaggcatttaagagagccactcaagcaaaagataaaaagataatgaatcaggtgattaaagattattgtctgtcaggcgtggatatgtgcaattatgcaactatcgatatgatgtatagagcaaacctgaaggcatccaaacaaaaccttgagtggtga

SEQ ID NO: 389004 - DNA, 3963 bp, Salmonella enterica
atgggaaccaccacgatgggggttaagctggacgacgccacgcgcgaacggatcaaaatggccgcctcgcgtatcgatcgcacgccgcactggttaataaaacaggcaatctttagctatctggacaagctggaaaatagcgatacgctaccggagctacctgcgctgtttgccggcgcggcaaatgaaagcgaggagccggtcgcgccgcaggatgagccgcatcagccctttctggagtttgccgaacagattcttccccaatccgtctctcgcgccgccatcactgccgcctggcgccgcccggaaaccgatgcggtgtcaatgctagtggaacaggcgcgcctgtcgccgcctgtcgctgagcaggcgcataaactggcgtatcaactggcggagaaattgcgcaatcaaaaatccgccagcggtcgcgcgggtatggtgcaaggcctgttgcaggagttttccctctcttcgcaagaaggcgtagcgctgatgtgtctggcggaagcgctgctgcgtattcccgacaaagctacgcgcgatgcgttaattcgcgacaaaatcagtaatggcaactggcagtcgcatattggccgtagcccgtcgctgtttgtaaacgccgccacctgggggctgctctttaccggccgcctggtctcaacgcataacgaagccaatctttcgcgctcgctgaaccgcattatcggcaagagcggcgaaccgttaatccgcaaaggcgtcgacatggcgatgcgtttaatgggcgagcagttcgtgactggcgaaaccattgctcaggcgctggcgaatgcccgaaaactggaagagaaagggttccgctattcttacgatatgctgggcgaagccgcgttaaccgccgccgatgcgcaggcctatatggtttcttaccagcaagcgattcatgccatcggcaaagcgtctaacggtcgcggtatttacgaagggccaggcatctcgattaagctgtccgccctgcatccacgctatagtcgcgcgcaatacgatcgggtaatggaggagctttatccgcgcctgaaatccctgacgctgctggcgcgccagtatgatatcggtctcaatatcgacgccgaagaggcggatcgtctggagatctcgctcgatctgctggaaaaactctgcttcgaacccgaactggcgggctggaacggcattggctttgtgatccaggcttaccagaaacgctgcccgctggtcattgattatttagtcgatctggcctcccgtagccgccgtcggctgatgattcgtctggtgaaaggcgcctactgggatagcgagatcaaacgcgcgcaaatggaagggctggagggttatccggtttatacccgcaaagtgtataccgatgtctcttatctggcctgtgcgaaaaaattgctcgccgtacctaatctgatctacccgcagttcgcgacccataacgcacacacactggcggcgatttatcatctggccgggcaaaattactatccgggtcagtacgaattccagtgcctgcacggcatgggcgaaccgctgtatgaacaggtcaccggtaaagtagcggacggaaaacttaaccgtccctgccgtatttacgcgccggtgggaacacacgaaaccctgctggcctatctggtacgacgcctgctggaaaacggcgccaacacctcttttgtcaaccgcatcgccgatgccaccctaccgctcgatgaactggtggccgacccggtcgaggccgtggaaaaactggcgcagcaggaaggtcaggctggcataccgcatccgaaaattccgctgccgcgcgatctgtacggcgaaggtcggataaactccgccggacttgatttagcgaatgaacatcgcctcgcctcgctttcttctgccctgttaagcaacgccatgcagaaatggcaggccaaacctgtgctggaacaaccggtggccgacggtgagataacgccggttatcaacccggcggaaccgaaagatattgtcggctggggacgcgaagcgacagaaagcgaggttgaacaggcattgcaaaacgcggtcaatcaggcgccggtttggtttgcgacgccgccgcaagaacgcgccgccattttgcagcgggcggcggtattgatggaagaccaaatgcagcagttgattggcctgttggtgcgcgaagcggggaaaacgttcagcaacgccattgccgaagtgcgcgaagcggtagacttcctccattattatgccggtcaagtgcgtgacgatttcgataacgaaacgcatcgcccgttagggccggtggtctgtatcagtccgtggaacttcccgctggccattttcaccggccaaatcgccgccgcgctggcggcaggtaacagcgttctggcgaaaccggcagagcagacatcgctgattgccgcccagggcattgccattttgctggaagcgggcgtaccaccgggcgtcgtgcaactgttgccgggacggggagaaaccgtcggcgcccagcttaccgccgatgcgcgtgtacgcggcgtgatgtttaccggttccacggaggtcgcgacgttgttgcagcgcaacatcgccacgcgtcttgacgcccagggccgccctattccgttgattgcggaaaccggcggtatgaacgctatgattgtcgactcttccgcgctcaccgagcaggtggtcgtggatgtgctggcttccgctttcgacagcgccggacaacgctgttccgcgctccgcgtgctgtgtttgcaggacgatatcgccgaacatacgctgaaaatgttacgcggcgcgatggcggagtgtcggatggggaatccaggccgtctgacgaccgatatcgggccggtgattgatagcgaggccaaagccaacatcgagcgtcatatccagacgatgcgcgccaaaggccgcccggttttccaggccgcgcgtgaaaacaacgatgacgcgcaggaatggcagaccggtacgtttgttatgcccacgcttattgagctggaaaacctcgcagaactggaaaaagaggtcttcgggcccgtgctgcacgtcgtgcgttataaccgtaaccaactggcggagcttatcgaacagattaacgcttccggctacgggctaacgctgggcgtacatacccgtattgatgaaaccattgcgcaagtcaccggttccgcccatgtcggcaacctgtacgttaaccgtaatatggtgggcgcggtcgtcggcgtccagccgtttggcggcgaaggcctgtccggcaccgggccaaaagcgggggggccgctctatctctaccgcctgctggcacaccgcccgcccaatgcgctcaatacgacgctgactcgtcaggatgcgcgctacccggtggatgcgcagcttaaaaccacgctactcgcgccgttgaccgccctgacgcaatgggcggcggatcgcccggcgctacagacgctctgccgacaattcgccgatctggcgcaggccggcacgcagcgcctgctaccgggaccgaccggcgagcgtaatacctggacgctattgccgcgtgaacgggtattatgcctggctgatgacgaacaggacgcgttgacgcagcttgccgccgttctcgccgtcggcagtcaggcgctatggtcagacgacgccttccaccgcgatctggcgaagcgtctccccgccgccgttgcggcgcgtgtccagtttgcgaaagcggaaacgctgatggcgcagccgtttaacgcggtgattttccacggcgactccgacaagctacgaaccgtgtgcgaagccgtcgccgcccgcgaaggcgcgatagtgtcggtacaggggttcgcccgcggcgaaagcaatatactgctggaacggctctatattgaacgttcgctgagcgtaaacactgctgccgctggcggtaatgccagcctgatgacaattggctaa

SEQ ID NO: 389005 - DNA, 1980 bp, Salmonella enterica
atgagacttacgttgatcgtcaaaggtcttgcactggcaggattacttacctccactgcactgacacctttgtttgcacaagaagcaccaaaaggcgccactgcgtcaacaaagcaagctaacgatgcactttataatcagcttcctttttccgataacaccgatttcacgaatgcccacaaaggctttatcgccgctttacctcaggatgtgattaaaggcgagcagggaaatgttatctggaacccacaacagtatgcatttatcaaagaaggggaaaaatcccctgacactgtaaatccgagcctttggcgacagtctcagttgatcaatatcagcggtctgtttgaagtgactgagggtgtttaccagatccgtaacctcgatttatccaacatgaccatcattgagggtaaagaagggattaccgttgttgacccgctggtttcagcggaaacagcaaaagtcggcatggatttgtacttcaaaaatcgcggcaataaacctgtcgtcgccatcatttatacccatagccacgttgaccactatggcggcgtgcgtggtgtggtagatgaagcggatgtgaaatccgggaaggtcaaagtttatgcgccagcaggcttcatggaagcagcggtcgcggaaaacattatggcgggcaatgtcatgagccgccgtgccagctatatgtatggtaacctcctgaaacctgaagccaccggccaggtcggcgcgggtctgggcaccaccacctcagcgggtaccgtgacgctgattgccccaacgaacatcatcgagaaagatggccagaaggaagtcattgatggtctgacttacgattttatgctggcgccgggttcagaagccccgtctgaaatgctgtggtatatcgaagagaagaaactcatcgaggccgcagaggatgtgactcacactctgcacaatacctactccctgcgcggcgcgaaaattcgtgaaccgctgccatggtcgaaatacatcaacgaagccattgtgcgttggggtgacaaagccgaaatcattatggctcagcaccactggccgacctggggtaacgaaaacgttgtgggtctgctgaaaagccagcgtgacctgtatcgttatatcaacgaccagacgctgcgtatggccaacgaaggcctaacacgcgatgaaattgctgccaacttcaaactgccagacagcctggcgaagacctgggctaaccgcggctattacggctccatcagccatgacgtgaaagcgacctatgtgctgtatctcggctggtacgatggcaacccggcaacacttgatgaattaccaccggaagaagcggctaagaaatttgttgaatacatgggcggtgccgatgcgattcttcagaaagcgaaaaccgactttgaccagggtaactaccgttgggttgctcaggtggtaagtaaggtggtgtttgccgatccaaataaccagaatgcgcgtaacctggaagcggacgcactggagcaactgggttatcaggctgagtccggcccatggcgtaacttctacctgaccggtgctcaggagctgcgcaatggtgtggttaaaggcccgacgccgaatactgcaagcccggataccgttcgtgcgatgacgcctgaaatgttcttcgatttcctggcggtacatatcaacggtgaaaaagccggtaatgccaaagcggtatttaatatcgatctcggcagcgacggcggcaagtacaagctggagctggaaaacggcgtgctaaaccacacgtctaatgcagaagcgaaagatgctgatgccacgattgctctgaaccgtgacacgctgaataaaatcatcctgaaagaagaaaccctgaagcaggctgaagataaaggcgaggttaaggttacagggaatggtgcgaagctcgatgagatgttgggctatatggacaagtttgagttctggttcaatatcgtcacaccataa

SEQ ID NO: 389006 - DNA, 792 bp, Salmonella enterica
atgcgtctttcatactcgatttttccttcatttttatgccttgcctcatcttatgcctatgctgctgaagagcatgccccggatgcggcgcaggcaaacaatccactggcaaatatgactgcattcaatatgcagaactattacattggggatgtgagcggaacgagccaggatgccaatcagttctggttccgttatgcacagcctttttctttaggtgagagcaactggctgttacgcggttcgttaccgattaatacctatcctgttgcgcctaccggtgggcataaaacaggcttaggcgatcttaacctgtttgcgtcatggctaattgacactggcaatccggcagtgagttttggttttggtccgcaaattacagcgccgacagcaactgaagatgcgctgggaacagaaaaatggtctgcaggtctggttaacgtgctcttcgatgccagttcgccaaaattccagtacggctatctggcctcatggcagcatagctttgcgggggaagacaaccgtagcgacgtgaatctcggtactttccagccatttttattctatcagttgggtggcggcacttatctgcgagcggcgcctatctgggtctacaacttccagaatgacagctacagtgttccgctgggtttaggtattgggcaggttatcaagcaggataaaaccgtctacaacttctttgtggagcctcaaggctcggttgcagaccgtggtccaggacagcctcactggcagattttcttcggattaaaccttcagttcctggattaa

SEQ ID NO: 389007 - DNA, 588 bp, Salmonella enterica
atgtttgattacatcctgtctctcggcggcaccgtctttgtgcccatcattatgattatcatcggcttaatctttcgtattccctggctgcaggcggtgaaagccggggtgacggtcggcatcggttttgtcggcatggggttggtgatcgtcatggcgatcgacagtctcagtccgccgattaaagtgatgattgagcgttttggcctgacgctgcatgtgtttgacgtcggcgccgggcccgcgtccggcgtcggctatgcgacggccatcggcgctatgatcattcccgttatctttctgctcaacgtcggtatgttggtgactcgtctgaccaaaaccatgaacgttgatatttataactactggcactacgccattaccggaacggtcgtccagttgatgaccggcagtctgatttatggcgtactgggcgcgatttgtcacgccgccttgtcgttgaaaatggccgactggacggcgacattgtgggtctggaagggatttctattccgcaagggtatggctccagttccgtgccgttgttcgtattgctggatgcgatatacgaaaaaataccgtttatga

SEQ ID NO: 389008 - DNA, 762 bp, Salmonella enterica
atgaaaatggatacccgacattccgcattatattacttaatagtttttctattgctggccctacccgccacagcatcgtgggcgagcgttactattttgggtagccgaataatttacccatcaacagcctcctccgtagatgtgcagttaaaaaataatgatgcaataccttatatcgtacaaacctggtttgacgatggcgatatgaagaccagcccggaaaatagcagcgcgatgccgttcattgccacgccgccggtatttcgtattcaacccaaagcaggccaggttgtacgcgtaatttataacaacacgaaaaaattgccgcaggatcgtgagtcagtattctggtttaacgtattacaggtaccaccaacgaatattggcagcgacagcgggcaaaataaaatgttggtaatgctgcgctcaagaataaaacttttctatcgtcctgacgggctaggtaaacctgataatctggcgaaaaaattacagattaaaacggtaaataagggttccggaaaaagcggtattgttattgttaatccgcagccctggtttgcctctttaagtaacctgaatgtaaaagtgaacggcgcttcgtataacctggatgctgacatgattgcccctttctccagtcaaacctggtggctgccgggcaagcggtcactcaaatccttctccggtacagtcaccgttactttggttaacgacctgggcgcaaggataagcgagagctacgatgtcccccaccattaa

SEQ ID NO: 389009 - DNA, 1326 bp, Salmonella enterica
atgctttttagtttccgaacgctattgtttatcaccagcctgttcgtcagcgccggaacatggtcgtcatgtatcaaagtcaccgataagagcgcgctctctgacgcggcgataaaagcgggctacacggcgcaaaactggatcggcgcaactgacacgaataccggtaatatcggtttgccaacggtgattagcatcagtaatagtgaaacatttcaaccctccggcacactattggccagtgggatcggtaacttcctgacggccgccaccggaacgccctattccagtaagcaggtactttaccgctgcgattccgccgatgccgggaagctctatgagatgtattcgacaaatggcgatagcgcttttgcgggggcattttttactcccgaagtagaaggcgcctattatgatgtggagcgtaatgttgctgtccgtatgacaaacctcagtaccggcgaatattacagccgtttctggaaagaacgccaacttaccgcagatagttggtttcaggatgacaaatatatttatattcctgccagcgcgtttagcaacgtgttatatgagatgtttaaaattgactcaagaaaatattttgcctaccagaatccaatggaccgagatacctggacgcagcctcggggttatatcgcctttaaaggcccaggcttgattaccgagcggatccaagcgggactggatcatgccagcgattattatggttggcccggctattggcccggggcatggagtacatataatagcgtcacctatgttcgcggcgcgttatgtaaaatcacagattatcctgcgatcgtgaaaattccccctgtcgccgtcggcatattagccgccggaggcaatagccaggcgcctttccacgtcagcctggaatgtgagtccggtgccgtgtccagtgccctcccgtccaccagcgccgctaatgtcgcaatggggtttgtcgttaatcaacccaccgccgtggcggcggcgcgtcgcctggggctaaccacatccgcaggcggtctgtcgtggctactggacacccattatggcgaacctggcgtagcttccggagtaggtatccgcatctataacgatgccggtacgccaattaacctgttacccgatcggatcaagacaggcactggcaacgcccgaggctggtatggctataaagatttaaccacacgagtatcatccggttcagtagaaacctacagcggtgattttactgcctcgcttgaggcgatcgccggacaaacagtaacggcaggaagcgtgaatgcgcaattacaggcagtggttagttttcagtaa

SEQ ID NO: 389010 - DNA, 642 bp, Salmonella enterica
atgtcctataccttattttactcaccaggagcagccagttttgcagttcactggatgttgttcgaactaaaaacgccatttactgctcaactcgttgatattgaaagtggtaatcaacgctcccctgaatatctcagtcttaatcctgttggtcgggtgcctacccttatcgttgatggaaaaccagtgactgaatcaacggctattttgatgcttcttgccgagcgccatcctgaatctggccttgcacctaaaccagatacgcctgagcgtgcagaatggctggaactgatgatatatatggcaaatacattacttccttcaatgcgagactggttttacgccgataaggatggtagtcccgaagacgctgacgctattcgtaccctggcccgtagccgtattgaggaagcctgcgaatatttagataaacgtctggcaaatcaacaaacctatctggtgggtgacagactgactacagtagacttattagcgacaatgttgatgcgctggacacgcaacatgccaaccccagccatgcaatggccacaccttgccagttacatttatcgaatgagagaactcccttcatttttacagactcataatcaagaaaaattagagggatggttaaattcatag

SEQ ID NO: 389011 - DNA, 411 bp, Salmonella enterica
atgcccatagatagcattgagtttgtaacgattgcccaagataatctggatagggattctggtgaaatagggtgtagaactgctgttagccgtgcttactatggtatgtatcattcttgcttagagttgacggggcccgtgccgagacagcacccgctgaacggaatattcaaggggggaactcactcacgtcttgctcagtacatgacagagtgtgcagaattgatttctccagttaataatatggaaatacgcaagcttggagttaaacttaagatgtatcataaatatcgttgtgatgctgactatgagttaaataaaactgtgacacgtaaatcagccgagataattatctctgaaacgaaaaatttaattaaactcgtgagtacggtaaaatcctccgcagcttaa

SEQ ID NO: 389012 - DNA, 753 bp, Salmonella enterica
atgccagcagcttcacctcaactaataactgatcagctttttgagaaactttcgccttcgattgaaaaaggggagaatcttttaggcgaatttgaactcttcagtattattcgcgatgccaaaaaaattcctgtagaagatgaatctttagcgattcaggggttggcatggattgtacttggagatattacaaaaggtagtgatctttgtgaggccgctatctcaataaatccctctgaaagcgctttatggggaaattacgcaatcgcagtcggacaaaagggcaaccatgcgttgcagcgaaatattttaaagcgtagcgttgtaatccgaaacccatcattattagttttcaattttatagtttcttcgttctgggctgattataatgaaatggctagagtggttgggctttttcagagtcttgggactgtagaattaactgaaaaacaacaaggggattatatgagtgcggaagctatctataataccttaggtaaactcccggaaaatgagcgtgaaaatttatcaaaaatggcaaatcttgcgatggacataatgatggggcataacttaagcgctaaaaactcaggtcagtatgttgctccagacggaatgttgtcattcaactatgacttattcaatgcatcacctgattttatagtcatgttgaacgatgagcttgctactaagatagttgagcatgagctgcacaatgcaaaagcaatagttctttttactccgggggattga

SEQ ID NO: 389013 - DNA, 438 bp, Salmonella enterica
atgccgttaccattctccttcgatttcaaacatccagattaccagatggtgtttgaatggcggatggaacgcttacagcgcattcgccagcatcctgagatgctgcccgcgttgaagcagttttatcgtactaacccggctcagttcatcatcgactggggcatgacgacggacccgcgtaatatcgattatggcctgccggtcaccatcccttttctgctattcccgaaacaggaagagtggattcactggattatggaacgctggggcaagcgggagaacggtatcaccgaaaaatcccgtgaaatggggctgagctggacggcgatcgggatggcctgttcgctttgcctgtttaacaaagagatggtcatcggctttggttcccgtaaagaggaatatgtcgacagtactggtgaccctaaggcgctgttctga

SEQ ID NO: 389014 - DNA, 1656 bp, Salmonella enterica
atgaacctctggcaacaaaactatgacccggcgggtaatatctggctttccagcctgatcgcatcgctcccaatcctgttcttctttttcgccctgattaaactcaagctgaaaggctacgttgccgcttcgtggacagtggttatcgcgctcgccgtcgcgctgctgttctataaaatgccggtcgatcacgcgctggcatcggtcgtgtatggcttcttctacgggctatggccgattgcctggataatcatcgccgcggtcttcgtctataaaatctcggtaaagaccgggcagtttgacattatccgctcgtcaattctgtcgattacccccgatcaacgtctgcaaatgctgattgtcggcttctgcttcggcgcgttccttgaaggcgcggcgggtttcggcgcgccggtggcgataaccgccgcgctgctggtgggtctgggctttaatccgctgtatgcggcagggctgtgtctgattgtaaataccgcgccggtcgcctttggcgcgatgggtattccgattctggttgccggacaggtcacgggcctggacagctttgaaatcggtcagatggtaggccgccagttgccattcctgaccattatcgtgctgttctggattatggcgattatggacggctggcgcggcgtgaaagaaacctggcctgcggtaatggtctctggcggttcatttgctatcgcccagtatctcagctccaactttatcgggccggaactgccggacattatctcttctctggtgtctctggtgtgtctgacgctgttcctcaaacgttggcagccggtacgcatcttccgcttcggcgatatgggcgcgtcacaggtcgatcagacgctggcccgtacccgctatacgacaggacaaattgttcgcgcctggtcgccgttcctgttcctgaccgccacggtcactctctggagcataccgccgttcaaagcgctgtttgcccccggcggcgcgctgtatgactgggtaattaacgttccggtaccgtatctcgataaactggtcgcccgtatgccgccggtcgtacacgaagcgaccgcttacgcggcggtgtataaatttgactggttctccgccaccggcacagcgatcctgtttgccgcgctgttgtctatcgtctggctgaaaatgaaaccctcagccgcaatccagaccttcggcagcacgctgaaagagctggcgttgccgatttactccatcggcatggtgctggcgttcgcgtttatctcgaactattccgggctttcctccacgctggcgttagcgctggcgcacaccggcagcgccttcacgttcttctcgccgttcctcggctggctgggggtattcctgaccggctcggatacctcatctaacgcgctgtttgcctctctacaggctaccgcggcgcagcaaatcggcgtttcggatgtgctgatggtggcggcgaataccaccggcggcgtgaccggcaagatgatctcgccgcagtctatcgccatcgcctgcgcggcggtgggactggtagggaaagagtccgatctgttccgttttaccgtcaaacacagcctgatcttcacctgtatggtgggcgtgatcactacgcttcaggcctatgttttaacctggatgattccgtga

SEQ ID NO: 389015 - DNA, 174 bp, Salmonella enterica
atgtttaaggtgatggtctgtctgttggtgggtattcctgccatttcttatgcgcaggattatgggtgtgctacggttggagcatcaatggagtcatcgttatttgatgccataaaaaatgacctgaatatagatgtcgctactattataaaggataaaacaaagtgtatctaa

SEQ ID NO: 389016 - DNA, 552 bp, Salmonella enterica
atgatgcctgaacgcattaatccccatttttctggcttgcatcctgcagtcatttccaggtatagtttttccgctgccgcaaaatcggcagccggaattggcgttccgcgaaactcaatggcgacaccagacgcgccaagcgtcttttttttcgtcgaagctctggcacacccattttccaggctgtggtgtttatgcgtacaccgtggttctttcgagataatggcagtccgggcggggcagccttcgggctggccggtatccattgaggccggttacgccaaccccgttcgggctgccaccagtgaaattggcgtttccggtggtagcaataaccgctactcaatggaggctgccatcatggctacaaccctcaccccgttttacccgcaatatgtctttgtgcttgccgcaatccgccgtgctgacactcaaccccgcatctgtatgcttcgcaccgtggcctgcgatgagcgctttgcacgcctttcgctggtccgtgattatgtgctctccctttctgcacggctgcctgccggggaggtgatgtga

SEQ ID NO: 389017 - DNA, 897 bp, Salmonella enterica
atgtgccaacgtgcgatcgccaatattgatatcagcaaagagtatgacgaaagcatgggcagtaacgatgtgcattatcagtcgtttgctcgtatggcggatttctttggtcgtgatatgcaggcgcatcgccacgaccagttttttcaaatgcactttcttgataccgggcagattgagctacagctcgacgatcatcgctattcggtgcaggcgccgctatttgtgcttacgccgccctcggtgccgcatgcttttattaccgaatcggatagcgatggtcatgttctgacggtacgcgaagagctggtttggccgctgctggaagtgctttatcccggcaccagagaggccttcggcctgccgggaatctgtctgtcgctggcggataaacccaacgagctggcggcgctcaaacattactggcagctaattgagcgggagtccacggaacaactggctggctgcgaacataccctggtgctactggcgcaggcggtatttaccttgctgttgcgtaatgcgaagctggacgatcacgccgcaaccgggatgcgcggtgaactgaaactttttcagcgctttaccctgttaattgacaaccacttccatcagcactggacggtgcccgattatgcctgcgagttgcatattaccgaatctcgtttgaccgatatttgccgacgttttgctaatcgcccgcctaaacgcctgatttttgatcggcaattacgcgaggcgaaacgactgctgcttttttccgacaatgctgtcaacgagatcgcctggcaattaggttttaaagatccggcttatttcgcccgtttctttaatcgccttgctggctgttctccttcgcagtttcgccaacgtgaagttccctcttttctcaactaa

SEQ ID NO: 389018 - DNA, 402 bp, Salmonella enterica
atgaacaaacatacccaaatccgcctggcgattctggcagacctggaatccatggcaggtgagaccgtcacgttgttcgatggtctgccggcatttattgaacctgaagaccttcccgcgctggccgtctggctgaccgatgcccagtatgccggcgtcatgactgatgaggatgactggcaggctgttctccatgtggcggtatttctgaaggcacaggcgccggatgcggagcttgatacgtggatggaagaaaaaatctttcctgcgctggaagaggtcaatggtctggagcgccttatcgataccatgaccccgctgggttatgactaccagcgtgacagcgaaatggcaacgtgggggatggcagaaattacttaccggatcacctatatcaactga

SEQ ID NO: 389019 - DNA, 1536 bp, Salmonella enterica
atgaattttctggataaagcgattggcgcgctggctccggggtggggcgcgtcccgcctgcgttcccggatggctatccgggcgtatgaagccatcacgcccacgcgtacccacagggtgaggcgtgaaaatcgaagtggagaccagcttatccagctggccggaaagtcgttgagggagcaggcccggtggtttgacaacaaccacgacctggtgattggtgcgctggacaaaatggaagaacgcattatcggcgcgaaggggatcatcgttgaaccgcagcccctgacgggggccggtacgctgaactctgtgctggcagaaaaaatccgccggtgctgggctgaatggtctgtttcgccggaggtgaccgggcagtacacccgtcctgtactggaaaggctgatgctgcgtacctggctgcgtgacggggaggtgttcactcaggtgctgaccggaaaaatcagcggactgtcacctgtggctggcgtcccgttctggcttgaagcgctggagccggattatatcccgctggaaaaaacggacagtgccagcaacctggtgcaggggatttacttcaacgcgtggcggcgtccggtgaaatacctggtctgccagtcatggccaggtgcgggcgcggcggcagtcgccgttaaagaggtgactgcggaaaatatgctgcatctgcgctttacccgccgtcttaatcaggcgcgcggcgcttctcttcttgcccccgtcatcattcgtctgatggacctgaaagagtacgaggacagcgagcgcatcgcggcgcggattgccgcatctctcggcatgttcatcaaaaaacaggatgtcggcaccgacggctatgtggcgccggagaaacgtaaagagacacaaatccagcccggtatgttgtttgacggtctgaatcccggggaggatatcgggatgatcaaatcagaccgcccgaacgcaggtctggaatctttccggatggggcagcttcgtgcggtggccgccggactgcgcggcagcttctcttccattgccagaaactatgacggaacctacagcgcccagcgtcaggagctggtggaggcgcaggaggggtacagcatccttcaggacagctttattgctgcctttacccgccctctctaccggcgctggcttgctgctgcggtggcttccggtgccattgaggtgcctgccggcacggatatgtcctcgctgtttaatgcggtgtattccgggcctgtcatgccgtggattgacccgctcaaggaggcaaacgcctggcgggtgctgatacgtggcggggccgcaacagaaggtgactgggtgagggccagagggggcgcgcctgccgacgtgaaacgccgccgcaaggcggaaactgatgaaaaccgtaagctggggctggtgtttgacaccgatccggcgcatgaaaccggagagcaatccgatgctaaagaggaaaaaaaggaccctgaaaagtccacccagggcgatggcagccgcgcgcgggaagaacgaaagcggcgctga

SEQ ID NO: 389020 - DNA, 474 bp, Salmonella enterica
  misc_feature (218)..(227): n is a, c, g, or t
atggagaataatctagataatttatgttatgaattctttagagagttttcacgttatgaatattgccttaaggcatgtggacttcatcataaaataaaagatgctaaagcgaactgggatgagtatgcaaagcaagtttctgaaatcataaataacacaactgatccagagctaattgctgctatcacctactttaaagaacacccacccaaaaaacnnnnnnnnnnaaaacaaatcatagaagatgactctttagtttgggatgattctttaccacaagaaaaagatttagcaaaatttctttttttgttaatccgccgtgtaagaaacaatctttttcacggaggaaaatttaacgggaaatggtttgaacctgaacgtagtgaggcgttactgcaacatggccttgttattttgaggcattgcggcacaaggcatagtgaagtaagcaaagcctattctggaatagcctga

SEQ ID NO: 389021 - DNA, 1200 bp, Salmonella enterica
gtggcacggacaacacgccccctgaccaacaccgaagttctgcgcgcgaaagcgttagagaaggatctaacgctgcatgatggcgatgggcttttcctgatagtgaaaactagcggcaagaaactctggcgctttcgctatcaacgcccagcaacaaaacagcggactatgatgggacttggtgcttttcctgccctttctcttgctgatgcccgagggttaagagcagattaccttgccctattagccaacggaatcgacccgcaaattcaagctgaagttgcagaggaacagcagcaaatcgctctggacagtattttttcgacggtcgccgctaactggttccagctcaaaagcaaaagcgttacccatgattacgctaaagatatatggcgttcactggaaaaagacgtattccccaccatcggggagatccctgtccagcaaatcaaagcccgaacactggttgaagcccttgaaccgatcaaagctcgtggggcgctggagacggtgcgccggttggtgcagcgtgttaacgagataatgatttatgccgtaaatactggtcttattgatgccaatccagcatcaggcattggaatggcctttgagaagccaaaaaaacaaaatatgcctacgttgcgcccagaagaattgcctatgctgatgcgttctctcgtcatgtcaaatttgtctgttccgactcgctgcctcattgagtggcaactcctgactctagttcgtccttctgaggcttccggtgctaggtgggctgagctcgatctcgatgcaaagctctggactatcccagctgaacgaatgaaggctaagcgggaacacatagtccctctatctcctcaggcattagagattcttgatgtgatgaagctaatcagtgcccatcgtgaacatgttttcccgagtcggaatgacccaaagcaaccaatgaatagccagacggcaaatgctgctttaaaaaggattggatttggtggtagattggttgctcatggattgcgttcaattgccagcaccgcattaaatgaagcgggttttaatgcagatgtaattgaggctgctcttgcacatagtgataaaaatgaagtgcgcagagcatataatcgttcaacttaccttgagcaacgaataggacttatgaattggtggggccaaaaagtgtacgagcgcaatcaatattag

SEQ ID NO: 389022 - DNA, 201 bp, Salmonella enterica
atggacacaaaaaaagccaccattaggcagctaattattgcatcacttggtgcgaaggccggactcgaacatcgcaactatccttatgatcataagagattaaaaattatcacattggacatgataccaacattgataccaccagtccctattggtgataatcgaacagactgtattagtcatttcgaattggtagtgtaa

SEQ ID NO: 389023 - DNA, 177 bp, Salmonella enterica
atgaattatcaggaaccacgcgcatactcccatacgttcgcagggaaagactacgacgatcgatacaggattaaacagaaggcgaaagtaatgtcacttattcctcttaagcagtttggctttccaccgcttaacgtcaaactcatcaaacatttttctcataccagcctcctttaa

SEQ ID NO: 389024 - DNA, 360 bp, Salmonella enterica
atgggctggatcggcgttgattttgatggcgttcttgcggtgagggtatcaggccagggttcccggctgggtaaacccatatcaccaatggtcgcaaaggttaagggatggttgcgtgacgggtatgacgtccgggtgttcactgcacgcgcgaatgaccggcaacaggtgaaacaagttaaaaaatggctgaatgataacggacttggcgatctggtcgtcaccaatatcaaggatgaagggcttattgaactgtgggacgacagggtggtgcgggtggtcagcaataccggcgcaccgtgtagcagttgcgccggatattccaggctttcgcggcaggatatcaaaacggactgctaa

SEQ ID NO: 389025 - DNA, 1044 bp, Salmonella enterica
atgaatgaaataacagatacccccgaattgcaggccggaaacggtacggaggttttcactttcggcgacccgatcccgatgctggatcagcgtgatatttttgattatctggaatgccctgtcatacaggatacatggtacgacccgccgctgtcttttgacgggctggcgcagtcgttgcgcagcggcattcatcacagttcgccgatttttgttaaagccaatctgctggtcagtacgctgcggactaataagatgctgggtgaatttgacgctcaggggttcatcctggattacctggtttttggtaacggatttctggagctgcgacgtaacggactgggtgaaccgtggaagctgaaacgctcactagcaaagtatatgcgcgttggtgttgagcctgatacttactggtttgttggcggggcgcgggagccgtacaaattcccgaaagggaatgtttttcatcttatggagccggatattaaccaggaggtttacggactgccacaatatctcgctgcccttcattcaacctggcttagcgaatccgccgtactgttccgccgtaaatattacattaacggcgggcatatgggatttgtgctgtatatgacgacgccgcaggccaataaggaagacgttgataatatccgccaggctatgcagaaagcaaagggggtaggcaactttaaaaatatgttcgtctgggccccgaacggcgcggagaaagggattcaggttatcccgatatcggaaatcgccacaaaagacgacttcagcgccatcaaaaaggaaacgcgcgccgatcagttgattgcacaccgcgtaccgccacagatgatggggatagtgccggagaatgacggcggttttggtgatgtggagaaagccgccagggtatttgcgcgtaatgaactggtgccattacaggcgcgtatcagggaaataaacgcctggctgggtgatgaagtaatcgcgtttgatccgtatgttctggacgccgccgaactcgatccagcgccttccattccagcccgctga

SEQ ID NO: 389026 - DNA, 1746 bp, Salmonella enterica
atggaactaagtgaaaacgatatcgatccaaggcgacaggctatgtacctgtactggcagggataccgcatatcgcgaattgctgaatatttaggtgaaaagcccgccaccgtacatagctggaaacggcgcgacggatgggagaactacagcccgttacaacaaatagaacacaccacggcggcgcgatacaaccagttagtaggaaagtctcacaaagatccgggagattttaaggagcttgacctgctggggcggcagatggagcgacacgcccgtataggccgctttggtgataccgggcgggaatctgaccttaaccccaatgttgaacgtcgcacggaagaacgtaaaaagcccacgcgtaaccatttcttagacgaacagatcgccgatctggaagctgcgtttcacggcatcattcgcccgtaccagaaaaagtggtttgacaatcgtcatcaggatattcgcgccatactgaaaacccgtcagtgtggggcgacgtggtattttgcccgcgaagcgctgctgggtgcgcttaaagacgggcgaaacaaaatctttctgtccgccagtaagtcgcaggcgctggtattccggcgcgagatcatcaaatttgcccgtcaggtgggggttaagctttcggggaaccctatagtgctctccaacggcgcggaactgcacttcctgggaaccaacgccagtacggcgcagagctacaacggcgacctgtacgttgatgaatttttctggattggtggctttaaggaaattcagaacacggcgtcagggatggccacgcttgatgatatgcacattacgtacatgtccacgccgtccacttattcccatgaggcttacggcttatggtctggcgcggactataaccgcgaccttcccgcggctgagcgcgtggaaattccgctcacgcatgaccggcttaaagacggtctgctgtgcgccgatggtatctggcggcagatgttgacgatttacgacgcagtagcgggcggtatgaaggccagccctgaaaaactgcggcgtaaaaataccggcgtcaactttgataataaatacatgtgccagttcctggatgatagcgagtctgtcttcccgttcagcctgttacgctcgcgcatggttgacgcgatggagaagtggcgggacttcaagccgtgggcaaacaggccgctgggcgatcgcccggtatggattggctacgatccatcaagtaccggcgacagttgcgggtgcgccgtggttgcgccgccgcggttcgccggggaaccgttcaggatactggagcgttatcagtggcatgaaccgaattttcaggtgcaggccgataagatacgcgaactcacgcagcgctataacgttacccatattggtattgatgaaacaggcggtatcgggcgggctgtggcgcagattgtgaagacgttttacccgatggttgaatccatgcactacaacgccgcaatgaaaaccgatcttatcgttaaggcccgcagcgtgattgaagcgcggcgtatcgaatttgattacggtcacaccgatattgcgcaggcgtttatggctatccgcaagatcgtaacgccaagcggtaaatatgtcagctatgaaacaagccgttcggaagaaatcagtcacggcgatgttgcgtgggctgtcatgatggcacttatccacgaacctatgtccggctacgaggaagactcgcaggggatgatggagatttattaa

SEQ ID NO: 389027 - DNA, 804 bp, Salmonella enterica
atgaagaaaagtaaaaaatttcgtgtcgcgacagaaggcgtaaccgttgacgggcgttcactgtcacgccatcagattcaggacatggcaaatgactacaacaaggacgtgtatacggcggggatcaatatcgaacatctgcgttccgcttatcccaactccctgtttcgtaactacggcactgtggacaaactcagcgcggaagaaatcactaccgggccactcgccggaaaactggcgctgaatgctgagattgaagtggaagacagcctggttaacctctttagtagtacccagaaactctaccccagcattgaatatcatccgaacctttcaggctccggcaaagcgtactgtctggggctgggctttaccgacaccccggcaagtctgggaacgcagattgttaaattctcggccacacaaacagaaaaccagttcgcggtaggtgagcaggtaagcgtcgaatttgccattccaggacaacaggacaacgacgacaagcccggccttctggcgcgtatcggcgaaatgttcagcagcagcaaaaaacacgacgacgaacgcctgtctggcattgaacaggcgattgaactgatggccgggaaactggttgaggtgactgaaaaactgagcacacaaccgcagccggaaaagctgaacgaacagcccaccaacagcgagacagaagcattgcgtgccgaaatcacgcagcttaaagaaaagctttccacgctggacggcagtaacacccaccgcttcaccgcaacaggcggcggggctgaaattaaaacggattgctga

SEQ ID NO: 389028 - DNA, 1074 bp, Salmonella enterica
atgcaaccagaaacaagacagctttttaacaccatgcgtcaggatctggcgcgcctgaacggtatcggcgatattgccgaaaagttcaccgttaccccgcgtattcagcaaaccacagaaaagaaaatccaggaaagcagcggttttctgaaacaaattaatttctatggccgtactgagcagatggggaacaaggtggggattggtgtaaatggcccgattgccagcaccaccgacaccacggtaaaagagcgtgagaccttcaacccgctggatctggatgaaaagggctacatctgtacccagacgaacttcgacacccacatcacttacgatctggttgacctgtgggccggattccctgacttccaggttaaatttcgccagtccactctaatccagcaggcgcttgatcgtatccttatcggctggaacggtacgcaccgcgcgaaaacgtcagaccgcaaggctaacccgctgttgcaggatgtgaatgtcggatacctggaaaaaatccgccagtttgccccgcagaaccacatgagcgaagtgctcagcggcagtaaaaaaatcaaaattggcaagaccatcaagggtaacgaaggcttccgcaatatcgacgcggcagtattcgacgccgtgcattcatgccttaaaccctggtatcagaccgatacccgactggttgccattaccgggcgtgacctgatggccgacaagtatttcccgatcgtgaataacaccgacgagaataccgaaaaactggcgggcgatatcatcatgagccagaaacgtatcggtaatcttccggcgtggcaggttcccttcttcccggctaacgccattctggtgtgcccgctgtacctcctgtcgctgtactaccagattggatcgcgtcgccgcgtcatcatcgacaacccgcgccgtgaccgcatcgaacatttcgagtccagcaatgaagcctacgtcattgaagactatgacggcgttgtactgatcgagaacatcgaactgtacgacgatgacggcgcgccggttcatgcaccatctgccgaagttgttgcagggggttaa

SEQ ID NO: 389029 - DNA, 645 bp, Salmonella enterica
atgatgacaccttttgcccgtcgcagacagcagatcatggcaacgatgcgcaacaccaaaaatgatgtacgtgcagatgatggttatgccctgatgcaaatgcagcttcaccaggatatggagacgctacacaacattctgtcaaatgagcaaaaagccaccgtaaagcggcaaatcctgccgcattacgatgaatgggtaaaaggcgttctggagagcgacagcggattacaagacgacgttctgatgcgcgtcatggtgtggcgtattgacgcaggcctgtattccgaagccctggacatagcggcctacgcgttacgccaccacctgaacacgccggatggatttggccgcagcactgccgcgctggttgctgatgaaatatcacagcaggcacttatcaggatgaagaacggagaggacgtacccgccgccctgctttcaagggtaagggaaatgacggacagcgccgatctctttgatgcggtacgcgccagactctacaaggcgctgggctatgcactgcgcaatgagggccagctacaggaagcccgcgcggttctcgccagggcgctggaacttcatgacggtgtgggcgtgaaaaccgacctgaaagcactggacaggcaactgactgcagactga

SEQ ID NO: 389030 - DNA, 486 bp, Salmonella enterica
atgcaaaccgtcttaaccggcgacttaccggaacccgttaaagcaacccccgccagccccgaagttatcactaatttcgccttctggccggatgttcgcgtagatcagtatcgcgaagtcatgcgccaggagggagaggaaacaccacccagactccgcgaagcgctgatgcaggcgatgggatacgcaaacagccagcttgcacgctgggaacgccagcaacgcggaaagggctttaaccaccttgaggacgttccagccgaaaaagtaggcggcgaatccgttcgcgtgctttgttaccgcagagcggtattttttgccacccgcgccttgctgacagaacaatttcggggaactgacactacacataagggcgatataagggcgaatacgctggaatcgacgatcggcgatatgtggcggcagtttcagtgggcgttaagtgagttacgggatgaaccacatatgaccgtggatcttatctga

SEQ ID NO: 389031 - DNA, 204 bp, Salmonella enterica
atgatcgtgattgcacaacagggcgacactgtggacgctatatgctggcgctactttggtgcaacgcgggggattaccgaagaagtttaccggacaaaccccgatctggcggaaacagggccggtactcagtcaggggcaggccgtcattctgccggatgttgccccggcacaggaaaaaacacttattcagctatgggattga

SEQ ID NO: 389032 - DNA, 336 bp, Salmonella enterica
atgaacagcagcccccacacctggtctgactggctggcaataatcaagggctggctacagggcgatatcccgttagacagcctgttaatgaccgccgccgtcgcggcgctcagggtgttctatacaggccgtagctggcgccgacttttgcttgaagtgccgctgtgttgtctgctcgcagtagccgccttcactatcatcaaaccggttcccgtcgcctggttgtcagaggactggcgcgtggggattggtgcggctatcgggcttatcggcgttgagcatatccgggcgctcagcgtgattattacaaagaaatttgcagggaaaacagaataa

SEQ ID NO: 389033 - DNA, 414 bp, Salmonella enterica
atgaacacacctcgcggcattcgtaacaacaaccccggcaatatccgctggggcgacgactggaaaggacttgtacccaaatcacagcgtacggataaggatttttgtcagttcatcacgccggaatacggtatcagggcgatgatcgttattctgcgcaactaccagcgtaaacacggcctgaacaccatcaccggcattattaaccgctgggcacccacaaacgagaataacacgcaggcctatatcgacagcgtggcaaaatcgactgacacatctcctgatcaatgcgtccacaccgatgacagccgtttcatgatgaaactactacaggccatcatccggcacgagaacggcgtgcagccctacggctttgatgtgtttgtcagagcggtagaactggccggtaattaa

SEQ ID NO: 389034 - DNA, 354 bp, Salmonella enterica
atgaaatatctgccaatcatcttatgggatatagcgctgaccgcattatttgcagccggaatctgccttaatctcagcggcgcgataaccgcactgcatgtgcttttctggctgatgaccgtcactggggcactggctttttcgcttccggacacaaaaaaaagaattgcaaaagactatacgcattgcccgttattgtggcgctcctgggatctgataagcgatatcgcctttgttgcggcagcggcctggctgggctggggcgtactggcggcactcctgttaatacggatgggttcaaagcaggcgttttatagcgagcaggaaaaacgcctgaaggaacaggcagcatga

SEQ ID NO: 389035 - DNA, 471 bp, Salmonella enterica
atgaaccgcgtaacgactggcgtaatagtctcattgctgatagtagccgcagcgctggcatggactaccagccgctatcacggtaacgccgtgaagtacaaagcccagcgtgataccgccattcgtaacctgaatcaggcaaacgagaccatcagagatatgcaaacgcgccagcgtgacgttgccgccattgatgccagatacacgaaggaattagccgatgcgaaagctgagaatgatgctttacgcgatgatgttgccgctggccgtcgtcgcctgctcgtcaacgccacctgtcccacagtgtcgacaggtaaatccacctccgccgcccgcatggataatgcagccagccccagactggcagactccgctaaacgggattatttcaccctcaaagggcgagtaacgacgatgcaaaagcaactggaaggggcgcaagactacatcagaacgcagtgccagaagtga

SEQ ID NO: 389036 - DNA, 234 bp, Salmonella enterica
atgccaacaccacctgtatatcattatctgaaaaatgagaggttaactggttgcttccgtttccggtctgcaagattcactggccgcccgattatgcaggtgcagatcgcagcctccaggataaagacagagaggggacgggatgaagataatggaacggttacattctggcgtgatgccacgctaattgaagccgtgactatccagctaagagcgaacaataatgacgagtag

SEQ ID NO: 389037 - DNA, 459 bp, Salmonella enterica
atgattaagcgtaagttacttcgtgaatttctgctcagaactgtgacctggctgaaacagaacccggaaaagctcaatatggacattgaagacggtcgcatctcttcatcactggcacggtcactgtcacaccgtcatcactacaccctgtcaatatggataacggactggagtggtgacgaaataacccttttatccctgattgaattgtggctgcgtcgccatgagccggatatctttgctacagaaaaagcccgtgaaaccggctttcgttactggattcaggaacaggataatacacattcaatacttaacattcgcctccagttaacggaaagaaccattgtcaaaatagagagcggcacgctaatagccgtatctaaagacgaaatcccccttccggcaccagagcaggacattctttcggcatacctggatgaaggagataacggtcaatga

SEQ ID NO: 389038 - DNA, 435 bp, Salmonella enterica
atgacagacctgaacgatctggatatcgcgctgggcgcgatgttgtctaatctggcacctgccgcacgtaaaaaggtattacgcgagttatcaaaagagctacgcaatcgccagaaaaaacgcattaccgcccagaaaaaccctgacggttcagcctatgccccacgccgcgcccacccggaacgcggcaagatgtttaagcgcctgaaacttgccagaaaccttaaatttcgcgccaccgacagcgaggccaccgttgaatttcgcgggccacatatccgcacggaactgatccatcagtacggactggaaggcagaatatcaccggaaaaccaccacatggttaagtaccccgcccgccgtttgctgggcttttcccgcgaagatgaggcgtggttgcgagagacgctactgaactggctggcgaggacataa

SEQ ID NO: 389039 - DNA, 714 bp, Salmonella enterica
atgaatattgaaaacgaaatcgcagaccttcgccgccgcatcgatagccttatccgcacaggcgttgtcactgacgttaacctgaaagaaggcacctgccgggttaaatccgggaagctggaaacccgccatttgccgatatcagccatccgcgctggcgatgcccgcgtgtggtggcccccgtcagtgggcgaacaggtcacacttttttgtatgagcggcaacccggaaaccgcgatcgtgttccccggcctgttttgtgatgccttcccgcagcctgacgccaggggaaagacgctacatatccacttccctgacggtgcggttattgaatatgacgcgaacgttagcgcactactggcaaccggcatgacgaccgccagtgtagaaacgtctgaaagcattacagccaacaccagtaaagccacggtaaacgcgacggaaagtatcaacgccacaacgaaacaggccacggttaaagcgacgaacataacccttgatgccccgaccgttacctgtaccggactcatgcaggctaaatcaatttccgttggtggcagtggcggaggatcggcaaccattagcggcccggtagatatcaaaggttcagtcactcagacaggagggggcctttcatccaatggtgttgttctggattcacataaacacgacggcgtacagccgggcggcggtacaaccggagggcctgtttaa

SEQ ID NO: 389040 - DNA, 342 bp, Salmonella enterica
atgttatatctgagcatcgaccgacacacaggtaaaaccctgactgacgccgatcacatcaggcagtcgatacaggacattatcactacccccaccggcacccgtgtaatgcgccgtgattatggttcgctgatttcagaacttattgacgccccggtaaatgacgcactccccctgcaactgatggcggcgatctttgacgccatcatccgccaggaaccccgcgttaccgtgacagaaatccagttacgccgcagtgaaaacggcctgactgccgatatcggcatgatgcgcaccgataccggcgaaagtatcaatcttcctgtaagcgtctgggggtaa

SEQ ID NO: 389041 - DNA, 909 bp, Salmonella enterica
gtgccaacagtcaatatttctcaactaccagcacctgacgttatagagacgctggattttgaaaccatactggaaaaatggatcaaccgttacgttgaagcatggcccccggaagaacaacctgccgttcgcaccgccgtgtcgatgttatccgatccggtaagaaagattttggaagtggcagcttatcaggacatgattttacgccagcgcgttaatgatgccgcaagagcctgtatgctggcatttgcagggggaagcgatcttgaacatctggcggcggcgtttgatgtggagcggctggtagtccatccgggagacaataccgccattccacccgttgcccccgtaatggaaaacgatgacgatctgcgcacgcgggcacatgaagcccttgacggaataagcaccgcaggagcaatgaaatcttacgaattccacgccagaagcgccgatggactcgtggcggacgccacagcaataagcccggcgccggcttatgtcaccgtcaccatattatcaagagaaggcgacgggacagcatcaccggaactgcttaacaaagtgagtctggcgctcaacgacgagaccgtgcgccccgttgcagacaggcttaccgtccagtctgcaaatattgtcagttatgaaatagacgccgtgctgtatctgttaccggggccggaagcatcaaaaatactggatgccgccagacaacaggttcagctatacaccgaacgacaaagacgacttggccgtgatattaacctttcagctatctatgccgcctgccatgtggaaggcgttcagcgcgtggtactgaacagcccaaccgcagaccagacactggataaaacgcaggcgtcatggtgtaccagccacaccctgaccgtagggggcaccaatgagtaa

SEQ ID NO: 389042 - DNA, 528 bp, Salmonella enterica
atgagtaaggatctgttacccacaggcagtacccagctggaaagagcagcctcagaagcaacggttatcatcggcgatatccgcgtgccactacgcaccctttggaaccctcagcaatgcccgcttcccctgttgccctatctggcgtggacattctcggttgaccgatgggacgacaactggccggaagagacaaagcgccaggttatcgccgatagttaccgcatacacaaactaaaaggcacgatcgcggcactccgccacacagtggaaccctttggctatttaatcagggttatcgaatggtggcaggaaaacggcacaccaggcacattccgcctggagattggcgcatcagaagacggcatagacgccgacacctactacgaaatggaacgcctgatagccgacgccaggccggtaagccgccatctcgttggcctgaacatcatacttgaagcccccggcgaaatgtttacgggcggcgtgtcttacattggcgacaccatcactatttatgcggagtag

SEQ ID NO: 389043 - DNA, 1293 bp, Salmonella enterica
atgagtaaagaatcatacccaactggcgttgagaaccacggcggatcactccgcatatggtttaagtacaaaggcaagcgtgtcagagaaagcctcggagttcctgataccgctaaaaatcgcaaggttgccggggagctacgttcctcggtttgcttcgcaataagaatgggaagctttgactatgcggctcagtttcccgactcccctcacctcaagcggtttggtctggggaaaaaggatatcactgtaaaggcacttgcaaagaaatggctggaactgaaaaagatggagattagcgctaacgcacttaaccggtatcagtcagtggtaagaaatatgctgccaagaatcggggaaaacagactggtttcatcggtgactaaagaggacttactgtttatcaggaaagacctgttaacaggaagcaagataccgcagaaaaaccgttcccctcagactaaggggagaactgttcctacggtgaactactatatgaccaccgtagctggcatgtttcagttcgccactgaaaatggctacatagaaacaaatccatttaacagaatctcccctttgaaaaaagcaagggcgaagccaaatccattaacccgtgaggaattcgttcgcctgattaatgcctgccagcatcagcaaacgaaaaatctgtggtcactggccgtatataccggacttcgtcatggagaaatcgccgcgctagcctgggaagatattgatctcaagactggaacgatgaccatccgccgtaattatacaaaattaggcgagtttactctaccaaagaccgatgcgggaaccgaccgtgtgatacaccttatcaaaccagccattgatgcacttaaaagtcaggctgagtttactcgtcttggaaagcagtatcagatagacgtcaagttgcgtgagtatggcagggttgagcagcataagtgtacattcgtttttaaccctaaaattgccagaagtcacagcagagcaggtaatcactacgctgtaaattcaataggggcaacatgggattcagcgatgaagcgggcaggtttgcgttcgagaaaagcttatcagtcacgccacacctatgcgtgttggtccctttcatccggagccaacccaacctttattgctgctcaaatgggacattccagcgcgagtatgctctatactgtttatggtgcctggatgcctgagaacagttctgagcaggttgttttgcttaaccagaaactatctgactatgccccatacgtgccccataagggtgtagtcaacaagtaa

SEQ ID NO: 389044 - DNA, 255 bp, Salmonella enterica
atgagcacacaaaatacacaaaccattatctatcaaattgcccccagcgaatgggtcacaaaaagtttacttatcgctactactggtataaaggacggcaccattgaacgcgcacgtaggaagtcatggcttgtcggtcgggagtatcggcactactcgccggaaggaacgccgcattcaggcagcgaatgtctgtataacatagaagccattatgcggtggatcaaaagccagaaacagccaggtgcacagtaa

SEQ ID NO: 389045 - DNA, 216 bp, Salmonella enterica
atgaccagcaaacgccgtctcagacgcaagcagtgcggatgtaaaaaaagacataaaacagcttacggtgcacagattgaactctggattattcgtaaacgttacggacatcagggacagatgggcgtttaccgctgtcagttctgcaataactatcacgtcgggcatacaccagggcgtaacgggatcggttcaggttacgggaggtggagatga

SEQ ID NO: 389046 - DNA, 213 bp, Salmonella enterica
atgaacaaaggccagcaatcagcctatccatgcccgcgcatcgatactccccgtggcatgacttaccgccagcacctcgttgtacagatagcgccggtaatgctcacgaatttttttagcaatgatgcatggcaggattacgacgacctcgccaaaacactggtgatggctgtagatgccatcatcgaagctgagagggagacagcggaatga

SEQ ID NO: 389047 - DNA, 225 bp, Salmonella enterica
atgaaaattgaatatcaggactatggtgccgtggcgaacatagtgatcaccagcaccctgtttgagttccgcaagcatagccggatggttgacgccatgctgctctgcacaccaggaatagttgcaaaccgtagtgggatgctcttcatgaagacggctttatcggggaaatctcgcgacatgctgcgtgcgtataaaactgttcagtgggaggcgacacgatga

SEQ ID NO: 389048 - DNA, 795 bp, Salmonella enterica
atggctatgaaaactgaattagcaacggtggcggcgcgtgatttacagatcattgagtatcgcggccaacgcgtagtgacgaacgaacaacttgcagcaggatacagcactgatgtcgctaacatcaaaatgaactattcgcgcaacgccgatcgctttgtagaaggaaaacacttcttcaaagttaccggcgaagagttagcaaatttgcgagtaacttttagttacctgcaaatttccagcaaaacccgctctcttatgttgtggacagaacgcggcgcggcgaaccacgcaaagatgctggaaaccgatcaggcgtggagttaccacgaagacctggtggaattctacttcactcagcgtgatgcgattgcggcgccagtacaacgtgaactttccacaatggaaatattacagattgctatggaatccgaacaaggtcgtcttgcagcagaagaacgcgccaaacacgcagaacgcaccaaatcacaaatcagccggaagcgtgaagcctcggcactcggaaaactcagtgctgttacccgccgttgccgggatttagaagagcagcttggcgaaagcgcaaaacacgcaaccattaccaaagtggagaaggcaaccaacggcaaaggtgaatttaaattcgccccgctgcgccgctggtgtcgcgataacgccattgaagctaaagatgtaccagacgaacgctacggcagcgtgaagtcatggccagcgggcgcatggcaggctgtttacggtgtcgatctgaaatcactcttcggggagaaaaaataa

SEQ ID NO: 389049 - DNA, 471 bp, Salmonella enterica
atgcttgtgactatgtcagataaagaacttcgtcggatcaacgtcattcagtcagttgttgaaaagcgcatgcgccggcgtgatgcagttcagcagcttgctctgacggaacgtcagacacagcgtttaatgaatcgttttcgcgagtctggtgctgctggcctgacaaaccttcggcgtggacgccccggtaatcacaggcttcctgagtcactgaagctgcgtgttctttcattacttcacgatcattacagcgactttggaccaacactggccgcagaaaatcttgagcaacacggcaaacccctggcgttctacagtgacaagcatggtattttcagggtcaacgttcactcaaatatcaggtgttcgacaaactggaatgtgtcgaccaagggcaaatcgttgatagttaggttctggacatctgaacttagccttgaaaaaaccgtcagctgcccgcatcactga

SEQ ID NO: 389050 - DNA, 282 bp, Salmonella enterica
gtgagcgataatttcttatcaaaacaagcttttgctgattcactcgccatcaggcaagctgtcatagttttaatcagcttcttgcctgacgaaaagaaagcaatggtaaaggatcttcttaataaaacagcagacgatctttcctcaacgccactgacagatattcctggtatcacaccggagaattcaaaagaatttgccaaattaattgccgattcatttctcaaccttgctgagttgatttcaacttctgaagattcctcatcatcatctcatcaatag

SEQ ID NO: 389051 - DNA, 222 bp, Salmonella enterica
atgaatagagataatattggtctaatttcatttttgagcgacaaactaaaatggcttgatggagaacgcattgcaattaaggctcaactttttgatctcggaatcgcagaacagaaacgccgcgatgaaaatgaggcggcgttatatggaggcattcaaaaagctattgatgagatgatgatgaggaatcttcagaagttgaaatcaactcagcaaggttga

SEQ ID NO: 389052 - DNA, 480 bp, Salmonella enterica
atgtttacagctaaagacgatgcctacatcttaaaaagtgatggcagcaggtgcggcccgtataaggccaagtttgcaggtgatacagttatcgtaaacgaccaaatggccgacatcgatgacggagatactgttattcgagtccttccaaacggtaaggaagaatataaagaagtttataaagctaatttttacgacacgagcattggtggatttggcccacacttccaactcaatgttggccccaaaaaggtacaaccatctgtttcttctcagcaaatcaacattcacggagggaatgtacagattggagatcataaccgtcaggagattaccaatagcatcgagacgctgaataacttaataaacagctcacagggtacgccacagcagaaagaagaggcaaagggactgctaagaaagttagcagaacatccattacttactgctattgccggtggcgctataggtctgctctag

SEQ ID NO: 389053 - DNA, 897 bp, Salmonella enterica
atgacgttaaacaaatattgccatgcgctggcggcactacgtagccaaccagcccacgaactgaaagaagtcggcgatcagtggcggacaccagacctgcttttttggggcattaatgcgatgttcggtcccctaacgctggatctctttgctgacgacgataacgctaagtgccctgtgtggtacaccgccgatgataacgcgctggtacaagattgggctgaaatgctggagtcaatcggcggggccgcattcggtaatccaccctatagccgctctcagtaccacgagaagcaggcgatcaccggcatgacccacatcatggatcacacaatggcgatgcgtgaaaagggtgggcgttacgtgttcctcattaaagcagcgacaagtgaaacgtggtggccggaagacgctgaccacatcatgtttatccgcggtcgtattggtttcgatctcccagtgtggtttgttcctgcggacaataagcagaaacccactggtgctttctttgctggcgccattgcaatcttcgataaatcctggcgcggcgagcatttcagctatatcagccgtaccgaactggaggaaaaagggaaggcgtttatgtcactggtcgaatttgctgcgggaaaggttcagccaccagccaccacggttccagagcaagaagaacccattgtagcgccagcagtattacctgatgtggattcgcgtatctggccgcttgaggttggtctggtgttcaaccaggttgagggggcggattctctggacgcattacagcagaacaagctgaaagccaacattaatcaactctggctggaacgaacggccaccagcgaaatcattactgcagcttctgaacttgtttgcaatatgcggggagaggccgtgtga

SEQ ID NO: 389054 - DNA, 180 bp, Salmonella enterica
atgcgaaaacttaaccgatggttcaaagatcaccgtggcgtcccagtccgggttatccgttgggaaccggaaacacaacgcgttatctatctgcggcaaggatataaacatgagtgctttagcccgctcgagcaattccagcgcaagttcagggaaatagggggcgagcgtgagcactaa

SEQ ID NO: 389055 - DNA, 210 bp, Salmonella enterica
atgagcgtaattgtaaaatttaatagcgcggaagttcatccagaggaagcatttgaggaaaggtcatttctcatagtgaaccaagaccgtgattacttagtgggtacgcctttgttcgatgcggatagaaggttcctgtgttttatgaccagcgctggtccggttcaccaaagtgaatatgtgacgtgggcattgctacccacgctttaa

SEQ ID NO: 389056 - DNA, 519 bp, Salmonella enterica
gtgttaaaactagccgataaaatcctctctcttagagaccccttagtcgcgggccgatttgctgcaacagaactagcccgtatggcagctaaccagcagacaaaggtaacgaaagaagtttgggtggaaaaaaagaaaaaagaattaacggaagaagaagcaaaaagcggcgagaagaaataccgcttagaaactgtcgtatgtgggcagattaaaaatactgaagttttgctctcagttaacaacctaaataatatttataaaaatgatattgaggccgttatacatgctcttgaaagacttgatctacaaacagccactccgagacaaatacagaatataggtctggctgcatctgtgcttgatactagactagatacggccgctaggttgaaggaccttgcaactgaatttttgacttatgacaacctttatccgatgtatgacaagatgtattcaatggataccgtaagccgaaaagaccttgaattatacgaaacccttataaagcaattctaa

SEQ ID NO: 389057 - DNA, 648 bp, Salmonella enterica
atgtctttacccgattcgcctttgcaactgattggtatattgtttctgctttcaatactgcctctcattatcgtcatgggaacctctttccttaaactggcggtggtattttcgattttacgaaatgctctgggtattcaacaagttcccccaaatatcgcactgtatggcctcgcgcttgtactttccttattcattatggggccgacgctattagctgtaaaagagcgctggcatccggttcaggtcgctggcgctcctttctggacgtcggagtgggacagtaaagcattagcgccttatcgacagtttttgcaaaaaaactctgaagaaaaggaagccaattattttcggaatttgataaaacgaacctggcctgaagacataaaaagaaagataaaacctgattctttgctcatattaattccggcatttacggtgagtcagttaacgcaggcgtttcggattggattacttatttatcttccctttctggctattgacctgcttatttcaaatatactgctggctatggggatgatgatggtgtcgccgatgaccatttcattgccgtttaagctgctaatatttttactggcaggcggttgggatctgacactggcgcaattggtacagagcttttcatga

SEQ ID NO: 389058 - DNA, 267 bp, Salmonella enterica
atgaatgattctgaattgacgcaatttgtaacgcaacttttatggatcgtcctgtttacgtctatgccggtggtgttggtggcatcggtagttggtgtcatcgtaagccttgttcaggccttgactcaaatacaggaccaaacgctacagttcatgattaaattattggcaattgcaataaccttaatggtcagctacccatggcttagcggtatcctgttgaattatacccggcagataatgttacgaattggagagcatggttga

SEQ ID NO: 389059 - DNA, 600 bp, Salmonella enterica
atgatgcatattggtaaagattacagttggttagggttagtcaccggagaggtgattattggttttttaattgggttttgtgcggcggttcccttttgggccgttgatatggcggggtttctgcttgatactttacgtggcgcgacaatgggtacgatattcaattctacaatggaagctgaaacctcactttttggcttgcttttcagccagtttttgtgtgttattttctttataagcggcggcatggagtttatattaaacattctgtatgagtcataccaatatttaccaccggggcgtactttattatttgatcggcaatttttaaaatatatccaggcagagtggagaacactttatcaattatgcatcagtttttctgttcctgccataatatgtatggtattagccgatctggctttaggtcttttaaatcggtcggcacaacaattgaatgtatttttcttctcaatgccgctcaaaagtatattagttttactaacgctactgatctcattcccttatgctcttcatcactatttggttgaaagcgataaattttatatttatctgaaagactggttcccatctgtatga

SEQ ID NO: 389060 - DNA, 207 bp, Salmonella enterica
atgaatcaagaacaacacgctcataagtcacgattgccgaaaggtgccttcaaaggcaggccgatcgccctgcgtctgacgccggaagttcgtaagaccgtagaggaactggcaaagaaagagcttcgtactgactgcaacatggcccacgtcattttcatgcgcggacttgagatcatcactcaggagggagaagaaaaagaatga

SEQ ID NO: 389061 - DNA, 204 bp, Salmonella enterica
atgagtaacataacgatcaacatcaacatacctacagcctacgtccgcctggagaaatacgcggaaatgacagggacaccagtcggcacatgcagggggatggtacgagatggccggatcattatccgtcctaaagaaaaagccaaagatgctattgaggtgaatcttgtcgccatgctgaaagatgcgattgcgaatagctga

SEQ ID NO: 389062 - DNA, 738 bp, Salmonella enterica
atgaaacttaccatcgaaaacatacaggtcgccattaaaggcgtaacgaaatatagcaatacatgcatatctgaaaaactgcttgccgtcgttgctggcaactacgccaaaaacaacaacattattacggtgcatttgcaatcgctgtatgaagacgagaacttcgactctatagtaggcgagattaaaaacctgtactacaccgaagctgacggacgcacccagctacgcggcgatattacttttgatacagaattattggatttacaaagtctgcttcacagcctggcgcacggctgcgtgtacctgtcaccgcattttatgaacgtcgggtcatcgaattattgtttcgcctgtctgagttcagtcaccctgagtaaagccgaagccgccacctttttaagcatcgaaccgctcgacatttccggtctgaatgtactgattaacacgctttacaaagaaccggaaaccgaagagacaacaaaatacaccacaggccagataacgtacacatcatccccttatattcatgcaggaaatatgaataacgaagacctcagaagatggcttaacagtgtcgtggaacatattggacttgaagagaaatgcctgagcagactggaaagtatcaacaataataaagccaatgcagaatcagacctaaaagagtgccagaattttttggatcaagtctttcgttatacacaaaccatgcggtttaacactccacgttcgtag

SEQ ID NO: 389063 - DNA, 456 bp, Salmonella enterica
atgaaaataaaccatgaaatcagagataaagccgctctcaataacgccatcgtattacgggagatcgcagacagaatgcttagtgaagcaaaccgaagcaacaggacactggacagtatcttttatgcacatcttctcacgtcatgtgctggttttctggatgatttcaggaaagaaaacaccgaactccgcgcccagctcgtcgcttttcagaaagcggctaaccccgccgttgccgttgacccggcaagcggcctggacactacagcctggtacacacctttcgtaagaggcgctcgcgtatgcctgaaagttcacccgtaccaacgtggaacgatagtcaacacccgctttgatgaccgtcgcggctatttgatttccgtccgtttcgaatccgaatttgagagcgaccgctgggtaaaggcgaagaacctggaattaatccccgacgaatga

SEQ ID NO: 389064 - DNA, 534 bp, Salmonella enterica
atgctacagatgaaatttaaaccccgctttattgaagcgttccgcagcggtcagaagattacctcactgcgcatgatggattttagatgccgttgctacgacaaccatgattatccgcccgtatatattcacagtgacaccctgaaatatcgtacgcacgtcgatactgcagaggtctttgatctaagcctgccagcgggtttagcagtgaaatacgcaagcgatttagccggactcctgaaaagacagccctaccagccaggcgacgagatcgaactggtcgcagtatatgaaagcggcgaaatagtgccgtttgctaccgctactattggtgacatttccgttatcaagggcgacaagatagaagatgttgacgccattcatgacggatttaaccctgaccgtgatccgctcgccgaactccatgcattcatgcgggatgtttaccacaccgcaacccccaacgaagaaatgtactggctgtacaccttcaccaacattcagatgttgccgatgtggggaggtgaagcatga

SEQ ID NO: 389065 - DNA, 948 bp, Salmonella enterica
atgaaagcctggaagagttcaccgttaatctgggcgggcagtaaataccgcaccctgagccgacttctcaagaaagagcgcttacccccttctggcggttgcctggttgagccgttcgtgggtagcggcaccgtatttttaaacaccgattaccagcgctatgtgttgtgtgacaccaacgaagcgctgatcaactttttcaccaccctgaccgtatgcacggaagaactgattagcgaagccgcgccattgttcagcgataccaaccacgaggcgtattaccaacaccgcaccgagttcaacgaaaccgcatcaaagcgagatcgcagctatgaagaccacctgagactggcggcactgttcctttacctcaaccaccactgtttcaacggtatctggcgcgtcagtaaaaaaagcgggttcaacgtaccgttcaggaataaaacgcgccccttccccgaagaggaactgcgccagtttgccgaaaaagcccgcagagcccgcgcggagtttttatgtgtggatttccgccacacactccgggcgcaacacctgctcatgtcaagtaacacggtaatttactgcgacccgccttatctgcccgaaagtaaaaccgcagatttctgtggctacaccgcagccggttttacgcctgacgaccaccgcgatctcgtctcgcatctgctcgacgtcaacaggctttacgaagcaaaagtcgtgatttccaacagtgacaccaaagagacccgcgagatctacacgccattcaaacttcatcgcctgaaagtacaccgctctgtcagtgccaacggccagcgacgcgggacagccgacgaagtgatcggcgtactggatggccgggagaggtacgtaagcgcaccacaccgggcgggaaaaacaactgccgcaagcaacgtgaggggtcgactacgttgcttcagttcataa

SEQ ID NO: 389066 - DNA, 516 bp, Salmonella enterica
ttggttgagtctgtatataatttatcacaaaaagatatcattattcaaaacacattaacggacgcagtctggagagggatggatggtccagtatttagcaaggatgaagtaatagcagaaagattaaatgatgttcaacgagggatctcttttagagattttttatcgcaacatccgagatataatattacagatagtaaattttctgatttatctaatgaagacctttggatgaaaaccagtaaagcaggtcttgagtttcaaacaaagttaagagatcgaacagttatttttctcgctgattgcttagttgatacagtaagtgaaattgcagctaagaaaggaaagtatggcaatgctattacagctcatgagctaagatggatatatcgtaatcggaatgatgatcaggttaaaaataatgtcaagttctttcttaaaggccaggctatttcacatgaggatgtttttacaaaaccaggctgggagcaatatactcctaaaaataaaaaatag

SEQ ID NO: 389067 - DNA, 306 bp, Salmonella enterica
atgcccggagccgcaggctgggtcgagcaccttaatgctttctggttcaatgctggcaggcgtaatggcggccagctgcgcctgcacttctggcgtctgctcggctggctcaatgtagtagtccattttgcctttcagcggggagtccgggtaggtctgcaaccactggcggccgacggagttctgcaccagatactgcacaatccagtttggggtaaacagctgggtggcggcaggaatatcttcgctcttcaccaccttaccgataactgcgtcttttttctcagagatatagaactgatatag

SEQ ID NO: 389068 - DNA, 180 bp, Salmonella enterica
atgacggggaataaatatggctctgcagcggcagtacgccgggaggttgctgaatatctcaggcctccacgcagaatgccggtagcggaaggaataaaacaatttatgtttgttccccgcggtgccaatacggcggttccttgggatgacacgttagcgtctcagtccttcccgaaatga

SEQ ID NO: 389069 - DNA, 303 bp, Salmonella enterica
atgcttcatactaccaatcccgtcatcaaacacaaagccggtttgctcaatctggctgaagagctcagcaacgtgtcgaaagcctgtaaaatcatgggcgtctcgcgcgatacgttttaccgttatcgtgaactggccgatgaaggcggcgttgatgcgctgataaatcgtagtcgccgcgtacctaaccttaagaaccgtaccgatgaggcaactgagcaagctgttgttgattatgccgttgcgttcccggcccatggtcagcaccgaactgcgcaaacaggacgtttttatctccggtag

SEQ ID NO: 389070 - DNA, 333 bp, Salmonella enterica
  misc_feature (292)..(301): n is a, c, g, or t
atgaaaggattttacgcattaattatatcatcaatcattatgcccgcccatgcgggaattgtgatctacggtactcgcgttatctacccagcagataaaaaggaagtattagtccagttgatgaaccaagggaaccgatcttcactggttcagtcatggattgatgacggcgacagttctttaccgccggaaaaaattcatgtgccatttatgattacacctccggttgcaaaggtggctggaaactcaggccagcagttgaaaattaaaaaaatggcacatatgctgcctnnnnnnnnnngtactggatattccaccgaacaatccagataa

SEQ ID NO: 389071 - DNA, 1314 bp, Salmonella enterica
atgacagcaaataacctgcgtgagcaaatctctcagcttgtcgctcagtatgcgaatgaggcattgagcccgaaaccttttgttgcaggtacaagcgttgtgcctccttccgggaaggttattggtgccaaagagttacaattgatggttgaggcgtctcttgatggatggctaactactggtcgtttcaatgatgcctttgagaaaaaacttggggaatttattggggttcctcatgttttaacgactacatctggctcttcggcaaacttgctggcactgactgcgctgacttccccaaaattaggcgagcgtgctctcaaacctggtgatgaggttattactgtcgctgctggcttcccgactacagttaacccggcgatccagaatggtttaataccggtattcgtggatgttgatatcccgacatataatatcgatgcctctctcattgaagctgcagttactgagaaatcaaaagcgataatgatcgctcatacactcggtaatgcatttaacctgagtgaagttcgtcggattgccgataaatataacttatggttgattgaagactgctgtgatgcccttgggacgacttatgaaggccagatggtaggtacctttggtgacatcggaaccgttagtttttatccggctcaccatatcacaatgggtgaaggcggtgctgtattcaccaagtcaggtgaactgaagaaaattattgagtcgttccgtgactggggccgggattgttattgtgcgccaggatgcgataacacctgcggtaaacgttttggtcagcaattgggatctcttcctcaaggctatgatcacaaatatacttattcccacctcggatataatctcaaaatcacggacatgcaggcagcatgtggtctggctcagttggagcgcgtagaagagtttgtagagcagcgtaaagctaacttttcctatctgaaacagggcttgcaatcttgcactgaattcctcgaattaccagaagcaacagagaaatcagacccatcctggtttggcttccctatcaccctgaaagaaactagcggtgttaaccgtgtcgaactggtgaaattccttgatgaagcaaaaatcggtacacgtttactgtttgctggaaatctgattcgccaaccgtattttgctaatgtgaaatatcgtgtagtgggtgagttgacaaataccgaccgtataatgaatcaaacgttctggattggtatttatccaggcttgactacagaacatttagattatgtagttagcaagtttgaagagttttttggtttaaatttctaa

SEQ ID NO: 389072 - DNA, 1248 bp, Salmonella enterica
atgaaagggatgcagaaaatccgcagaggaaagagttttgctggtatcgtcctctatgcatttaagcccggttctcatcataaaaaagaccctatcgtgatcggtggaaatataacgatagttggcaatgccgctaaagatctgatcgctgaatttgatagcaccaaacagcttcgccctgacgtgcaaaaggctgtttggcacaactcgcttcgcttacctaaaggtgaatcactaacgcctgtgcagtggtcctacatcgcagatgactacatggcaagaatggggttttctgaaacgcatctcagatgctacgtcctacatgacgacgaagatggccagcacatccatatcatcgccagcagagcgtctcttgatgccggaaagctctaccttgggaagaatgagaatcttatcagcacacgtatcatccaggaacttgaaaaagactaccagttaaccagaaccaaaggaccgaaagcatctccggcagcgccctcacctaaaccgaagctcaaaaaatcccgtaatgagatgatgatagaaaagagaactggtgagctatgcccaaaagcaatcatccaaaacgcccttaatgaactgcttggcagcaggcaatctattatcggcttcgtgcaacagcttcttgctcaaaggatcaaggccattccaaatattgcttcaacagggaaaatgaacggcttctcattcgaatacagcggaatttctttcaaggcatctcagcttggcaaaggatattcttggccagttttacagggcaaactcgattaccagccggaacgcgataatggtttcctgttctcactgataaaatctgttagtgaagcgccttgtatgttcataactacagatactcctcaaatcacaacaagagaggttcacagccccatagaagcacttatcctcgataaccgagctgctggtcaggacgaatacactaacgcttctgtaaagcagtttcacttagaagatggtgctggtgctaaagaatcgttaaaagaagcccccgaccgaagctatgcagtttcagcattcaggtggttggaatacatcccctacctcgatttaatttatcgtatgttgaaaaatctcaaaataccaacccttaaacgccctcgaaaacacaaaaccatcactggcgtgagagtggtagagattatgcctatcccccaaaaaaatctcatcgaatcaccacctcaatccagaagagcatcgctttcgatgtaa

SEQ ID NO: 389073 - DNA, 414 bp, Salmonella enterica; identical to SEQ ID NO: 206123

SEQ ID NO: 389074 - DNA, 735 bp, Salmonella enterica
atgattgtgcccacattacgttgcgaccatacctgcaagtattgtcaggtcagtagagcttccgtgaacgcctctggttatgatctagatcccgctctcatccctgatatcatttcaactatcaaaaaactatcgacaccaccttacaagatagagatacagggtggagagccactcttgcggttcgatttaattcaatctatctatgagcaatgtgctgaaacgctgggaagcaccgattttgagatggttgtagcatcaagcctgtctgtcttgaatgaggatatgcttgaatggccgagagataggaacataacgttctctgtttcgcttgatggtgaggaagttgttcacaacagtaatcgaattcttggtcatgggcttgcttacagtagaacagtgtcaggggtagaggctatcaaacggtctttaggcgctggtcgcgttgcaacggttactacagttactaaagatctcattaggcatcctgaatcaattgtccaggctcacttgtctcttggcctcaaggacatgtttatccgacctgttagtccctatgggtttgcacaaaaagcatcgttcacattttctatggaggaatacttcagtttctatgcctcgttgatagatgaaatccttaagatgaataatgaagggataagggttgtggaacattcggcctccattcatctgaaaaggatttcaatcccggctttagtggttatgcggatttaa

SEQ ID NO: 389075 - DNA, 495 bp, Salmonella enterica
atgcgcatacagtttatatcggaggacacgagcacaccatgtatatcggtccacacggacacgtcgttattgtggacgcagacggtaatgcggaaaccacagttaaaaacattgcatttaactataatgggggccggatgtggtcaggtccccccggacagcgtcgcccggcaaatgaagctggcgtgggaaagtttcagtaatccacccaaagtaatcaactggcaatacgccagcgcccgccagaatgctgtattcagcacaacggcatactgtccgtcaaagacgctttgtccgaacgccagaacggaatatatcggttttggtgattatagaacgtattgcaaaaaatcaggtaacacctgcatcagtccccgtcatcaggttgatgatatttatattggttcgcataaccatgctgtttcccttagccccaattttcatggtaagcacctgaaaccagagtatttatccggagtaaaaaatgacgtttaa

SEQ ID NO: 389076 - DNA, 372 bp, Salmonella enterica
ttgtcgcaagaaatggacggcaataaatcgcactcgcacaccgcgcgggcgcaggatactgacttaggggcaaaatctacctcatcctttgattacggcacgaaatcgaccaataccacgggcaatcatactcaccagttcggcggttatatcaattcataccggggagattccaatcacacctcatttcagcctggaggtggtgcatggacacaggccgctggcgaccatgcgcatacagtttatatcggaggacatgagcacaccatgtatatcggtccacacggacacgtcgttattgtggacgcagacggtaatgcggaaaccacggttaaaaatattgcatttaactacatagtgaggctggcataa

SEQ ID NO: 389077 - DNA, 273 bp, Salmonella enterica; identical to SEQ ID NO: 79436

SEQ ID NO: 389078 - DNA, 156 bp, Salmonella enterica
atgacaatagaaagctatgaggcttggttcagtagaaaagtacaagagtctttagatgataaaaatccgggcataccgcatgaggaagcaatgaatctcgttggtgctaaagtcaacgaggcactaaagcgacagattgaggatgagactagatag

SEQ ID NO: 389079 - DNA, 348 bp, Salmonella enterica
atgaaacactttaactacaagggttataccgggacgatcgaaatcgatatcgaggataatatcctttacggcaagattgcctatataagagatttggttacgtatcaggcggccacgataaaagagcttgaggcggagttcagggaatccgttgatatttatttgcgtgactgtgaagagcttaacaagaagcctgatatccctttcaaaggggtatttaatgtacgcgttgcacccgccacacatcgccatattgccgagttatcggaagatctggggatgtctatcaactcctttgtcaataaagcgcttgagaacgaaatttctcgtacggagcaatcacgatga

SEQ ID NO: 389080 - DNA, 249 bp, Salmonella enterica
atggggaagctggagaagctaagggctgatttcattcagtgtagaaaggtttttgcatgggctgatttggtttcactgttaacgatgcttggttatacccgaaaggagatgcaggggtcacgcgtgcggttttataacgaggcattggagcacactatcatgatgcatcgaccacaccctgagaactacatcaaaggcgggacgataaaggccgtaaaagagacgttaaaagaggtggggttattatga

SEQ ID NO: 389081 - DNA, 165 bp, Salmonella enterica
atgtggcgagaacacaggttatcagatgccattgttgcggcgaacgtggagttattgcccgttcagaattttttgctgatggccggggtgaaatggttgtccgttgctctaaccttgaatgtggtcatgtgtgggttatggtgtctgaatattgccacacgctaa

SEQ ID NO: 389082 - DNA, 996 bp, Salmonella enterica
atgagtataaaaaagcttgatgacggacgttggcttgttgacagcaggccagcaggaacggacgggaaacgcttccggcgtaaatttgactctaaaagtaatgccgtaatttatgagcggcatatattgcagcattatcatgataaagactggctggaaaagccaccggaaaggcggcagcttgttgaattgctggatctatggtggaaatatcacggaaaaaatcaccattacggggaaagtgaaagggtaaggataatggcagtaattaacgacatgagagctataaatattaccaggagcgatcagcttacgcgcaagggaattatcaactatcggctgatgatgcttaataagggaattaagcaatcaactattaaccgttattgcgcaatgatgagcgggttattcactaagcttattaacgccgaagaatacagggggcataatccgtttcatgatgtagaacgccttaaagtaaagcaatccgaaatggcttatttatctcaggatgaaattaatctttttctggaaaggcttacaggtgacgatctaaaggcgtctgttttgtgtctggctactggcggacgttggggggaagtatcatcattgaaaggtgagcacgttataggcggtaagattatattcacaaaaaccaagaacggcaggcggcgcgttgttcctgtttccggtgatctggagcaagcaataaaaactcgctcaacaggtcgtctgatgtttcctgattattcaacggttagatctgtattaaaagcggtaaagccggacttgccatcaggtcaggccgtgcatgtgttacggcacacgttcgctacgcacttcatgatgaacggcggcaatataatcacgctacagcggattttaggacacgccactatacagcagacaatgacttatgcgcatttcgccccggattacttggccgacgcgatgaaatttaatccggttgcggggatctcgcttgccctcccctga

SEQ ID NO: 389083 - DNA, 2670 bp, Salmonella enterica
atgacagtaaaaatagtatcagaaacagccagattagcaaggggaaactggcgtgatatatatcaacggctgggcgttaagattcctgaaaatggtaaacatggcgcttgccctaaatgcggcggtaaggatcgctttcgtatggatgatatagacgggaaagggacttacttttgtaaccattgcgggaatggtgacgggcttgatctggtgaaaaaagtcttttccgttaacgcatatcaggcggctgaaaaagtccgcgaggttctttcagttatgccagtaacaaacacgccagccagaaaaaaggactcaaagaccgtaaatgcgaggtctgtaaactggcaaagaattatcagccagacaacgcagggagaaagcctctatctggtaaataaaggtcttacaggtcaaaggcaattactgactacgcgggaattaaccgcagccggtggtaattttccgcctgattcgctgttacttccgattattaacaccacaggggaaataaccgggattcagttaataagcccggacggtaataaaggcgtttacagcggatctagattttccggctgttttatcagtgtgggcgatattcccgcagagacgccggaacgggtgattgtttcagaggggtacgctacggcggtaagtgtttctcttctggctgacggatggagcgtggcggcgatatccaaaacaaaccttaagcccgcagcggaagcaatacgggagaaatggccggacgttcagatagtcattgccggggataacgattttacagacggcaagcccaatgacggcaaagacaaggcaatcagcgccgctattgcgattaaaggccgggtaagcgtgccgcctggcagatttaaagcagactgggacgactaccgccgtcagtttgggctacagcgtgcgcgtgaggctttcagggaggaactttttgaccccctggatacgggaacgcagaccccggcagggttccggctgacaagtgattttttatggtatgaccgggcgaaaagtgacgaagccggaaacggccagacgcaacaaattaaggtgtgtagcccgttaagggttacggctatcacgcatgacgcagacggcgggagttttggccggctgctggagtgggaagactcaaacggtattaaacatcgctgggctatgcctatgaaggtgatcgccggaacggggcaggacttgcgcgaggttctgttagataacgggctgcactttatcgcggtggacggtacggggcgacaaatgctcatgaattacatttccaattgccgcccggttcgccgtgttacgtgcgttgagaaaacgggctggtacggcggatcgtatgttctcagtagcgaggtgatcggcggtgacgccggttctgtaatttatcagtctgcccggtcatcaaaagacgatttcagggttagcggtgattcggctgaatgggtggagcgtacagggcgctactgtacgggaaactcccgccttgtcttttgtgtaagcctggcatttgccgcgccgctattgcgtctgctgggcattggcggcggtggctaccacctgaaaggggaatcaactgacggcaagactaccacaatgaaggttgccacttcggtatgcggtggcccggactactggaagacgtggagggctaccgggaacgcattagaagagatggcgctacgccgtaatgatgcgccgctcatgctcgacgagataagcgaggttaacggcgcagaagccgcagaaacggcctacatgctcggcaatggtcagggtaaggcacgtgccaaagttagcggaggattgcgggacgccgcattgtggcgcctgctgtttttgtctaccggggaagtctcgatcgcagatcacgccgcagaagccggaaagcaaagaacgggtgccggagttggggtgcgtatggtgcaaatccccagcgatacgggcaaatatggcgcattcgaaaatctccacggattcagcggcgggaaagagtttgcggagtacctggaaaaatcgacggcagaatgtcacggcgcgccgttcagggactggctacgctggctgacaacggatctgaatgctgtcacggaacgcgccgggaagctgcttaaacagtatgaaaagacgttgcggccggaaggtgcaggaaatcaggccgggcgtattgtggatcgctttgcactgctggcggtggccggagaactggcgacagaagccgggttaaccggatgggagccgggggaggcctataaagcggccagcgcgtgccttgatgcgtggatcaatgatcgcggtcatattgccaaccaggaagaagcagacgcactaaacagggttcagcgcttcattacggccaatcagtacaccagattcgcggactggtacgacgataaaaaccgcccatcaaatgcggttggattcaggagagtggaaaagggagacaaaacaaaagagacggtgacgacattctacatttacgccagtggctggaatgaaatttgcggcacgtataacgcgaaaaaaacggcggatctttgccgtgaaaaaggctggttgataccgggagaagacgggaaaaactcacaagcaaaaagactcccggaggtgggattaaaaagggtgtacatcatgaatagcggcgttatcgggtaa

SEQ ID NO: 389084 - DNA, 240 bp, Salmonella enterica
atgagaaattcatgcattgaaattaaacgccgcctttgcagagcggaaaatatttctgaatttatgcaatatttagccacgaaagataatccgcagattaaagccgcgttttgttattacatgggggggatgctttctttcttgtcggatgatatcaattatatccatgacgaaatgaacaatattgagtttttctcggatcatgagtggaataaaaaaatcttttgtttacgggactaa

SEQ ID NO: 389085 - DNA, 186 bp, Salmonella enterica
atgttaaaagtctttcagtgtgatggccgggcggtgaataaacgcggattaaccaaaggtgttcattatactgttaccgcaatgaatagcgccagcgcaacggtgttagccatgcaccaggcgacaaaggaaggttacagctttattaaaattaattacgtccgtgaggtgagttatgcacagtga

SEQ ID NO: 389086 - DNA, 318 bp, Salmonella enterica
atgtctgaatttaatgaaacgcagccagaaaataaactgtattcttatttgctggacgaggataataaatgtcgtcttgataccttagcaaatgctgtaaggtttatttttattctttgcgatgaaggtaaagaacgcgaggcacttgctgacggtatgcaggcaaaaggcgtgacggcaatttttgaaatcattgataaggagatcgacggtataaaaagcagtgtttacgccactagccgggaattttaccccgatataatcgccaccccccaaaattcacgcaaggtcgctgatattcatttaataagggagtaa

SEQ ID NO: 389087 - DNA, 201 bp, Salmonella enterica
atgtataacgtctatttaactcaactaaacacgctgaccggggaaaagaaacgctacggacataaacagggatttaaatcactgagtgaggccatgaaattaacgcgtgagctgatggatgaaatagacagcttccgccctgaaccggatgaatacgaatatacaatagaggttgggaaaagcaaaacgcggaagcgctga

SEQ ID NO: 389088 - DNA, 183 bp, Salmonella enterica
gtgtttaaactcgttatcagtctggtaaaccatgacgcaggcacaacccgtaagcttgaaagcgtgcgctgctacaagcatgagagcgaagcatacaaggccgctgacaaaatgcggtacgtttgcacaaatgatcgcggaaaaataacccatgaatgcaaagtaaaaattgtggaggtgtaa

SEQ ID NO: 389089 - DNA, 186 bp, Salmonella enterica
atgcgtaactatcgcccctgtttcgtctggcgtttcgtttctggccagaacgccacttacaccacaaccgccgccagtgaacgggaggcacgcttacagcttccgggcgttcgcctggtatttgcagcccgtatccgggtacaggaggacaataaaccgtgtttaaactcgttatcagtctggtaa

SEQ ID NO: 389090 - DNA, 276 bp, Salmonella enterica
atgcgtaaatatgccttacgaatcagcctgtactatggcgacacgttaacccgcacgctttacgactctaaggtgttcatctgccagaacgccgcgagggaatacgcagaacggcagaccagcgagcgccagccggggaagtttacccgtcatttcgacgtcacagagctgacgccgcagattgtcaacgagatacgccacgaatacggctggaatgccccggcaacgtcttaccgggttctgcctgatgatcgtcagggggtaagccatgcgtaa

SEQ ID NO: 389091 - DNA, 471 bp, Salmonella enterica
atgaacttttttagcctgaaaatcaaccagaaagccaccttattaaactttttttgtttgcaggggttgacgttgccgcgtgtgctgtcctatcgttactccgcaccccataaaacgggtgtcgggtttgacagcctgattactagagcgggtagccgctatgtttccgatatgcggtttttttgtgcccgtaacaccaccctaccccgtattatggcgggacgtagtggggaggccgtaaggcctgctggtttctctagtaccagtctgtcaaccctgctacgtctcgccgccatgtttgacagcgtgttagcgagactccttaacactactagaggagccgttaatatggctaattccccacaatctcaactcgtcattttgccgtttgtctgtgccgttgatccgcgtaccagagaatgcagcaagcccgccgcagccgacagcgtggagggttcagacaatgcgtaa

SEQ ID NO: 389092 - DNA, 420 bp, Salmonella enterica
atgaatttaccagatggatttacacacctttcaggtggttctacgtacttatcagaaaatgatattgcgaagattccacaattagcgcctcaaccagtacaaccagcgcagccggtacagatggcgcaaccgttatattatgcggtacagccacaaccgcagccgcaaccacagcaaaggcaatatgtatttttgccgtggatacctgatcccaaaaaagcaaaaaatctggcactaagactgttattgcaggagcgggttgacgttattaatttttttattgacgggatgaacaaagcgggcgtgttgtgggtgagtgttaacaccggaaaggattgcaacggcgctcaggtgctaccgcctgtaagtgtaccggattcgatttacaagctggatgacaagccagccgacgaatcataa

SEQ ID NO: 389093 - DNA, 1020 bp, Salmonella enterica
atgcaagacattgttaatatgcaacaacttaaagcggctgttttttcctctcttgaggacgcggcgcagcttgtagaaaatgtgaatattgccttatggcagcaccaggtagaaggcgacatgaaaagctttgatcatatggtgaagccgtgcatgtggcctaaagactggttcatgtcacagattgaatataaacgggtttattctggtcaaccgaataaccttgttataagcgatccggcattatctaccgggcgcggagatagcgggcgctttattcgcggatcagcattaaacagcaaggttaaaccagacgtttacgaggttgacacaggggaaattattaactggtctgaccttatgcaaataatgaatattggcacactgagaaatctcggcgctacgctcgttgcggcgttgtttaataaaatgtttgtcgatgatatgcgtgtaggtttttgcggtaagtatgcgtcaggtgtcaccgacccaaaagctaacccgaacggcgaagacgtcgcgccgggatggcatgaactggcacgacaggccagccagggcaaacaaatcattagcgatgccgtagtcattggcgcgggcggtgatttcccgaacattgacgccgccgcgcagtacctgattaatacaaaaatccccgccgcctatcgcagcgatccgcgtctggttgtgctggttggtcatgaccttgccgccagtgaaagattgcgccttttcaataccgcaagcggcgcgggtaacatcgaagcggccagcgcatgggggagcactattgcgggcaagttcgcctttatcccgccgtatatgccgggtaatcgtctttgtgtcacgatgattagtaatctgtatatcaatatcgtggcggacacgttccggcctgaatttgttatggatgatgaaagaaaaatgttcagggcgagcgctttacgctatcagggctacggattaacggacgttgatttatatgcggcattcgatgaaagcggcttaacatataaataa

SEQ ID NO: 389094 - DNA, 846 bp, Salmonella enterica
atgagtaagttaacacccgtatttaaatgctgtaatgaaatgacgcttatttcatcgtggccggagagctacccgtatgcggcgggaatgccggagattgtattgctgacccgtatttttgacgttgcagcgtgtcagcatgcgcagcaattcgcgcaatcctataaggcaattacaggttacgatctcccgttcactacgttagccgatgatgaaattatcgctatccatgatgcctgtaggcgctttattgctgaaactgaggaacttaaaaaagttgcacagaaggaagttgataaggctaaaaaacacatcagtgatatcaaaagtggcgttattcgttcagatgagcgctaccctttaaaggctatgcttgatgatgctgaaatgcgtcttcttaatgaagaaaagcggcgcgatggcatacatgaaaaacttgataaaaaaatcatggtgcttaaaaaagttataaatgttaaacacgacgatgatttatctcacatcatcaatattagcttacgtgattttagcggcaacgtatcaacaagggttaattgctataaatcgatgtttgctgctttacagcggatcacctctttatcgaatgaaatgaaggtaaggattgaagcggatagcgtgattttacgccagcgtaacacagagggtgaatttaccaacgagcagatagacaaggttacgcgtgattattaccgtggcgataatgaggcgctaagaaactgtatgacgcttgcagagtatacagaattaaggctgtcaaaaattaaagaagatgcgcgaattgatgccgttattaaactcggtcttaatgagcgtgtaattgattaa

SEQ ID NO: 389095 - DNA, 225 bp, Salmonella enterica
atgaacattaaagaaagaatgacgcgcaaagaggcggcggactatataggagtatccccgcaaacaatggctacatgggcgtctactggtcttgtcacaattccttattacagggctggcgcgaaaaaggttatctatatgaaaagcgaccttgacgcctatatagactcaaccaggacattgcaggcaccgccgcgcaatatgaaaaagaaagctaaccaataa

SEQ ID NO: 389096 - DNA, 891 bp, Salmonella enterica
atgatgagttatgattggtttgatgatgtttatgaagatgattataattctgatgattgcgaaagtaaccaaattatcaatcaagataatgaggttatcaatcagaaaacagacagatttattaatgagaaaatgaaaattttcatttctgcactaagaacggatagtgtaatagacagaacttgttttaaattattttcagacataatcaacgaatcaattaatgaaaatcttgatacggtgaaagtttttgattctcttattttatatatagaggccgatgcttctaaggtgattaatgtcatctttcaaaaaattatgaataaaacggcttatcttgattgtttcgggaaagttgtaagttataaaaaccttattgaacaaatagaatttgtttgcatagctaatagttttagctttagccgtaatgttgtcgaaaatatagctagttatatatgggttaaaaataatgcgccaacagaattcaaatcagatgaactattaaatgtaataaaaaaagatgtactacattcatgtttacgtccttattttgaatatatcaaacatgcttattattttttcgtcaaaaatcattctgttataaagataaaaaaagaatattccgttgtcactgaaatgaaaataaaaaaagaaagtaagttgtataaagagtatcacgataaaataatccatattgccagcaaaacacttgaggccgaaccaaatagatcaacgtatgccttaaagaaaaagttatatcaatacttcaatcaacgagtatcagagcaaactatcgcaagatggatcaatgaatacaggaaggaaaacaatattgaagcgcataaaccttatgcaaagggtacgttttctttactcggtattgataattaa

SEQ ID NO: 389097 - DNA, 1404 bp, Salmonella enterica
atggagcctttcaagttcaccaagtcgaagataaacgagctcccgccagcgcaaaagggaaagcaagacgagtattttgatagtcatgtaaaggggctgagattaagggttggcgctactggccgtaagacgttctacgccgtgagaaaagctaacggtaagtttatcagaacggcgctgggacgctttcctgaaatgtcagtcgagcaggccagagtagcggcgctggaaacgttgggaaggataggaaacacagggaagaaccccaacgaaacaaagagagagcagcaggccgctaacgttacgctacgcgctgcgatggagctgtacatcaagacgcgaggcgaccggctgaaggaaacaaccgccattcagtacaggcgcttattaggtaacttttccggtgactggctggacatggctatagccaatatttcaagggacgatacgcaaagcagacacaaggcgattacagagggattggcatggtttggcgatgaacgctctaaattacgtaagggtgtcggcgcaggaagtaaggcacaggctgatttatgggggcgggcgctaagggctgtttataattttgcctatgataattatcgcgacgagtccggcgctaaattattaccagaaccgccgacaattgcactaagcactaaaagacagtggcacggattaaaaagaaaaaatacacgtatcagaaatcacgagttagggcgctggttaagagccgttgaagcagtcagggaagaagccgaatataaccgggacgaccatatagccgctatttgcgatgcgttgaatatggctttatttactggattgcgcaggggggaagtattcgggcttgaatgggacagggtaaatatagagggcggttacttctggattgataaaacaaagaacggtgatcctctcgagctcccgctgactgataccctgttaacaatacttgagcgtcggaaacaatacagaattgacaataataaatatgtattttctgcatacaagggaggaataataacagacccacgtagagccatagaaaaaataaaagaaaagacagcgacgggaaaaaataaaggagagaggccaattaatttcacttgtcacgatgcgcgacgtacattcggcagcatcgcggaactggcaggcgttggatcgtacattcttaaacgtttaatgaaccatcgcgcctaccgtagcgctgacgttacacagggttatttacatttttccgcagatgaacttagagagcctgcaagattaatagaaacaaaaatattaaaagagtctttgttatataaggaagataaaaaaatagaagatatattgaaatcgttgtcggatgaagaaaaaaggaaactctatattaaattaagtgaaggggataaaaaatga

SEQ ID NO: 389098 - DNA, 1593 bp, Salmonella enterica
gtgtgcactgagcgccacagcctgtgtgggcgcaattgctggggaagccgtatcaactggtcatatgaccgccgcccgccgtacacaaattctggatcgcgctcgcgatgctatcagcgtctgttcgtccgcgagctggctggcgtatttgaacggatgtggccatgctcattccagcatccgacactgcgcgatgtggccggatggctggaggaaaacagcgggatcagcattgcggtaccggatgtgccgtacagtgataaaccgaacccccatttcacccataacgggacgggataccagctgctgaataacctgggcagggcattcagtatcacggattacatctggtatccattgccggatggttcgctgtatgtcggcggcgcagaaaaggcgctgtttgccggacgcccggtagaaatcccggcagagttcagccagggaacggcgggcggtaattccatgacattgccggtgatccagagtcttcgtccgggcgtggacgtgaacggggaacgcgtgaccaaagttcatctgactaatgacacaatgaccatcacgtggacaccacggaaccgcgccacaggtcagccattgcagaaaacaccggcgcagcgtcagatagaaagccattatccggaattggcttcaggtcttcacctgcccaaactggccagggtggtggcacccagcgaggccgtaaaaagcggtaattttgccgacccgttccggccacggtacgctgttgacgtgcagctgcttgacgcggacggcaacccggacaaccagacgccggtgtattccgccgtaccgctgccagtgccaatggccggtaacgattcgggaatgttccagtttccaccggaaggaacgctggtagaagtggcgtttacgggcggcagaccggacaagccctttatcaggcagacgctgccggatggcaccagtctgccggacattaagcccggcgaacagctgcaacagcagcgagcggaagtctcgcaacgcatgacacaggcaggagactgggtacgccagacggatcagaccatcagtgaaacatcgatggcgcggacggtgaaagccgacacggaacgacgagaactggtcagccgtgaaaccacggtgaaagccacggataaaatcacagtactgggtaccgccacgctgatggccggagccatacagcaggtcagtgctggcgacttcagccaggcggtaaaaggaaaccggctggccagtattacaggaaatgaagaaaccgaaatcgccgggcagctgtccacgaaagtggccggcgccatgaatgttgatgtggggggaaccctgacagaaaagattgccgcattacgtaaatctgtggcggcgggcggtcagcagattatggggccaaccgtgcatatcggtagtgagggcgtaaatacgctaactatgatgctggtcaccattgatttactggcagagctggcgcagcagtgcgcgagccattcacaccccagtgttggtacgccgaccaatgccggagcattcaaccagacagcagtaaaggccgggcagacccggagcaagtaccagaacatcatcgcctga

SEQ ID NO: 389099 - DNA, 402 bp, Salmonella enterica
atgcctatttcgatttgtaaacatggtgctccttttgttgttcaacatgaaaatcggtacggttccggtgcaagtcagtcatcatcacttttcaaatcaatccgccatattagcaactctcatgaggcaataaactttataagttgctatagtgcaaatggaagctgtttttccaatgcacagatgctagccaatgcctcagggagccctgttataggctactttgggaaaataaataagttaacagccaatctggataatagcggtcgtatattccgcccacagcataagcttgcggccaggatttgttatgtaggtaatcggcttctgagcggtccaattcaacttgggtttggcctgaaacatctgctaaactgccactcagatggtaatgtcagataa

SEQ ID NO: 389100 - DNA, 153 bp, Salmonella enterica
atggacgctgtaaatttatttcctttaatttacagttggttaagttatattttaaagctcccgaaggagcgtgtgtatcaacgaccgaacaggtcgcgttttttaggcttaaatgcctgggctatgacgacggctatcgccaccacaaggtaa

SEQ ID NO: 389101 - DNA, 924 bp, Salmonella enterica
atggatgatgacaacatgaagctcagggtagtctatgatggcccggcacttgataataatgagatggatgtacgcgatctcgctcctgcacttctggctctttctgatgtttttgatgaggccgccagaaccatttatggaaaggatgtaaggatatctgtcaaagtcaatgcttcattcagggcgggatcttttggcgttgacctgatcgcatcttccagctttacgcagcatcttattaatctgtttgccggtaatgccgccactgcaacttgcaatattatcggtcttgttggttttggttgcgttacagggaaggccattaaaaaaggcgttacgcaattcattacatggattaatggccgtaagataaagtccgtagatccattaccggatggcaaagttcgggtcactattgatgaagaagagcagatttttgatcttctggttcttgagctctaccaaaactataaacttcgtcagtctctggaaagggtgatattcacccctctggaaagagagggtattaatgattttgctgttaccctggatggcggagaatcttttgtcagtatcagcaaatccgaatctatactctttaaagtgggcagccctgatgaccgtaaaatctctgaatcagtgacagaaaaagcgcttcagttaatcgatatttcatttaacgaagatcataaatggcgttttaatgatggaacaagtacatttcacgcgctggtcagtgataaaaaattcatcagcgatatcgacagtcaggctattaattttgcaaaaggcgacattttgcttgtttctctaaaaatcacccaatacctccagttggggggaattaaaaccagttatgaggttattcaggttaaagaaatcattaaccctgcacggcaaattgatctccctcttgaggagtaa

SEQ ID NO: 389102 - DNA, 195 bp, Salmonella enterica
atgccggaaatgaaagatatcgtcaccgacgacagggtaaaaaatgcccttaaatcagacgcggtaaccaccgcggtgaaaacgcagattaaatccacactggaccagcagattgatgctgcggttgatactgcgctggtggatttgccgggcgtggagccggccccgacaggagcgggtcagtatcagccatga

SEQ ID NO: 389103 - DNA, 495 bp, Salmonella enterica
atgaaccgcataactactggcgtaatagcctcattgcttatagtggccaccgcactgggctggactaccagtcactatcacggtaatgccgtgaagtacaaagaccagcgtgatactgctactcacaacctgaagctggcgaacgcgacaattatcgacatgcagacgcgccagcgtgacgttgccgccctcgatgcaaaatacacaaaggaattagctgatgcaaaagctgagaatgatgctttgcgcgatgatgttgccgctggccgtcgtcgcctgctcgtcaacgccacctgtcccgcaatgccaacaggtaaatccacctccgcctccggcgtggataatgcagcccgccccagactggaagaatccgctcaacgggattatttcaccctcaaagagcgagtgacaacaatgcaaaagcaactggaaggagcgcaggaatacatccgggcacagtgcagaaaaaaatccccgcaggaggagcagccgtag

SEQ ID NO: 389104 - DNA, 414 bp, Salmonella enterica
atgttgtatcctgcttttatcgaagtggataaagacggtagcgccagcgggtggtttcccgatgttcccggctgtattttcgccggcagcactattgaggagacctatgccgacgcacgcagcgctatctgcgctcattttgaagtgctctgtgataaggggtttgatattccctctccccgcagcatcgagcaacatgttaccgcagaaccagacgattacagtaacggacgctggttgtatgtggatgtaaatatggatccgtttgacggaagagctgaacgcatcaacgtcactcttccccatcgcctgctcgatcgcatcgacgccacggtaaaacagcatcccgactacggtagccggagtgcatttctggcagcagctgcgcgtaatgagttacagaaatcactttaa

SEQ ID NO: 389105 - DNA, 627 bp, Salmonella enterica
atgacgattctcacgtacaaaaaccgcttgctgccatccgcgctcatgggttacatttcccctgcccctcataaaacgggggccgggattcgtaccccgcaggcaaataaggcgcacaaccgcgcgagcggtttttttacgtgcaaagcatcgtcacacctttttcgcattatggtggggcgtatggggccgcttacgggcgggccggtttccttgtttgccggtagtacgaaccctgtacgtctcaccacctcaagcttcgtaccttgggctggtgagttatcacaacttactaaacaaggttatccatcatggccaaccgcaaaccacgccgtacccacactgacgctcagcgtattcatactcataccgaaatcaatcatcgcctgtaccgtgcagaagcactggcacggtgcttatggcttgaatccatcagcgataacagcgttgtggtggagatgtgcatttcatccgttctcagttatctggctgacgatctacgcgacgttcacgacctgtttaacggcaaaaagcacagcacgtaatacccctgaaaacctgacacaaaagcaacactccgcctgctggtggagtgtttgcctgcatgacattcaggaggcgctatga

SEQ ID NO: 389106 - DNA, 783 bp, Salmonella enterica
atgaaaaatatgattaacagtgaaccatcaatgaccagtagcgaaatcgcagaactggcagagaagcgccacgacaacgtaaagcgcaccattgaaaaacttgctgagcaagggattattgttcgtcctcaaattgaggatgaacaaggtacagatgccttcgggagaaaaagggtaacgcagacttaccgctttgaaggtgagcaagggaagagggatagcattgttgttattgctcagttgtgcccgtacgtaacagcccgtctggtggatcgttggcgcgagctggaagctttactggttgataaaaatagcccgccggaaattcattcgcagtctgtggacattgtagcgctagcctgcgctgtcgctgaaacgacggtgacaacagcgataaaagcagctattgaagctgcgacggtacaacaggaaaaactggcatcacagaggcgtgatagtgatgattccgttgtatttgattaccccagcactaacagcgaagttgataacagtgccttccagccaatacatgcgctgtctgccaaatcaggccttgcggattctgcatgtcgtcgtctgattgagtttgcgcatgtcccggccagaaagatagggcggtcaggcctgcacgccgatagcgatgccttcgttgccgccgcctgtaagctgattggtgaatcagtgccaccaaaagggaagattaagcgctggcagcaccatgagttcggcggattcatgcttcgccgtgcattaccagtgtccggtcaggaaaagcaggactga

SEQ ID NO: 389107 - DNA, 741 bp, Salmonella enterica
atgacaatcgacaaacaggcgctacgtgccagggcagaaaaagcaacgtgtggtgagtggtcgctagaatatggagagagccgatttgatgatgatgatgcgctaattcatcgtgaagttgctggatatattcctatttgcagaattgaaggagcgcatcctgaaagcggtttcgatgaagatttccaaatggaacagcaggccaatgctgaattcatctccgcagccaatccggctaccgtgctggcgctgctggatgagctggaagctgaaataggatatcgcgaaggcgcttttatcgcctgtaatcgttggcacgataaattcagagaaacagaggacaaactggaatgcgcagaacgtcgcatagcagaactggagaacagcgaaacccagcttatcaatgagcgtgatgctgctgaatctgcgctggccgatatgtaccaggccgcaacaggagagcgtccagaatggagcaatatgtttggttttgctgacgccgttgatgtggtggaagaacgactggcgacgctggaggccaaccaaagccaaaccacgccaacaggaattcagctcatcacagaagccataggtgcgcacggctatatcgttggctgcctgttgcaaggtcgccctgatttggcgctggaagaatcgagaaagtgggtatccgctttcggtcaggcggcggaaatagttagtgcgcaagacgccgctggcatcaaggttaaggagtcgtga

SEQ ID NO: 389108 - DNA, 243 bp, Salmonella enterica
atgagagttgaatatcaggatggcggagaggagtcacgccttcttataaccagttggttttttgaacgcagggaacacaaccgactggtggatgaggtgctgtttaacgtaccgggactgcgggcagtggatgaagggtttttaaggagaacgacggtcatttccggtgcaacagcgtgggtcatgtgtgcagaagtcacggttgaagaaaacgggtatgaggtcaggagggttaaccagtga

SEQ ID NO: 389109 - DNA, 2274 bp, Salmonella enterica
atgagtggcttattaccgtatttcgtgaatctgcgcgccaaagtgaaatcaggcctgaaagatgttgttttctggataagcgctaaatcagacgccagagcattgcgtgaaatggaaaacgcactggaagacgcagatatcaaacgcagtgcatttttcaaagatgccgttattaccgggcttcctgtatataacgatctgcctcaggaaggtgaactggatttcacctggtgcgagcgttatgcattcagtgatgacaccggcacctggttaccaatagcgccagcaaagccggaacccacctccagtgataacgccagcatcagtgaggggcatacaaatgaaaacgctaccgacaacaccgattccggcgataccaccagtaccgccagtaccgacacaggagccgctaccacagccgccaattccgacagtgccaccaataccgctggatctaccgacgccacaaccgacaccagtactgaaggcgtaggcactgaaacagccactgatgaactccccgccagggaatttaacgtcaacggcgagcggatggcggatgttgaaaaaaagatgcagcagccggttgctggaatggacgatcgatatcgcatactttctcagttcatccttgaggataagttctcacacagcatcacgccggaacagcttgccgaggtaagccgtctggaactggatgtaagcgacaactatatccaggatatgttgctcgccaccaggaacgctccagccatacacaagctcagtacgcctgacctgtggaaatataccgacagttttaaaaaggtttttgcgcgggataagcgccaccccctcagccggatgattaattttaaccaggcatacgctgacgcacacccaatcgatcgcggactgctggtcaaagagtggataaaaggcaattacgtttcacacattgagaaatcaggaacaaccagcgacagtgccagtgcttcaccagagtcacagaaaatcagtgcgactaaagcgaatgcagcgatatcaggcaagccagccacaaaaacaacgtacaaaaccattgatacccgtatcgggatcgctctaaccaaaggggagattacgtttccgatcacggcaaaggtcgttgagcaaggcaaggctattgttgaggctgatggcgaagaatttaagcggtggtccgcaacctatcgcgtaaccgaaaacatccagttctatgacgagaaaacacatatagcgatgatccgccaggctcccagtgatgtggtcgaaggtggtcctgaattgcgccgcgcgtatgtggataactacctgacagcctgcggaacgttagaccaggaacaactggcatttatgccgaagcgagaccctgaagggcatgaggaaaacctgaagcgtgtacgtaaggcggttaaaaatctgcaggatatagcgacagggagatttaacggtaatgaagaagaaccgcagccaacaggcgcactggcagatgaaccagcaacgcctgaagcagtggaacagggcacaactgaacatcatccggacccgcagccgctggagaatgagccacctgtaagccagacagaagcaggctaccagaaaatactggcagaactgcacgaagcacgtaaaaacattccacccaaaaacccggttgatgttggtaaacgactggcagccgcgcgcggtgaatatgtcgaaggcatcagcgacccgaacgatccgaagtgggttcataacgattacagcgcctcaaataagggcgaaaaaacggaaaatgaggatgccgacgatgtaaaccagaatgacgatactgtcatccagaaaaccgattctgtaaaccattctgagccatccgctgaccagatcgaaccagaagtaccggaaaccgagccaaaaagcctgcaacccgaaccagtaatcaaagtcgccgatggtgtttttgatgcgtccgcattctttgcggatacctcaaatcagggtgaaaaaacagaaatcccacaatctaataatgatgtccgttcgcataaaatcgcagaagaaaaagcaacggatgcaccagtccagatggaatcattactgcacgaattagtacgtttgcaggcaataaataaccagttactggaagcctgtattgcgtatcagagccgggcggaaacccgacacgaaagatttctggaggcgcttttctgcggggtaacacgctttgcataccagtgggtggaaggtgaggaggcgctggaatttgaagaaaaattacggggtgattcatga

SEQ ID NO: 389110 - DNA, 474 bp, Salmonella enterica
atggcttaccaaaaaattctttacgaacagttaaagagctacctttatgccctgtacggcattactcgcgaagattgtgattcgctacaggcccgtaatcttcttaactttcgcgctatatcccttaccctttttcacaccgtaataaataagtacagatccagatatgctaattatacaggtcttactgactccgaaattatctcccacttgctgtatgaggagagcggagaaataattcctaaccttaatcaaatttccctttctttaactatgaaaatcctggaacctcgtctgctggatgctctccccaacaccgaccaagaatttcagacgtcatctgaaaagatgtatgaacactttgaaaagcttcttcaagaagaccctcaagcttatacaagaattccagttcttcgtgaactgaaatgggacgatctgccgaataagttgttctcactgactccagatagttaa

SEQ ID NO: 389111 - DNA, 228 bp, Salmonella enterica
atgcctgaaaaacatgttgatattcggttctctcataacgtttcactaactggccttgctgatgaattaacggctattaaaacagctataatacttatttccgccaaattacctttatcagcaaatcctcaagatatatgtgtgtcattaagaaatatgggatcagtaaaatgtaatgaaatggctgaccttattgatttatctattcacaaggataaccaaatgtaa

SEQ ID NO: 389112 - DNA, 336 bp, Salmonella enterica
atgttcagtataaaacgtaatggcgcaagcgtggagataactgaaatcccctcaagcattccgttcagtgtttttaaaaatattgccgatgaaacaggggctaacgaatgcctggttgcttacgcaaaaggcaaggatggctatgaagtggttattcggcacgataacgtaaatatggcggctgctgcggcgtggctggcactggaaaaagaaaagcacattacaggggtagagcaaaacaatgtaataaatagcggtcaggtatatacctccgaccactataaaaatgaagtaaaagccaattatacaattacatttggttatccttgtgaatag

SEQ ID NO: 389113 - DNA, 342 bp, Salmonella enterica
atgactaactcgtcaatagattattcgcaaaaattgcgacaaataagaaaggctgaagggctaacgcagaagcaatttgctgaattaacaggactttcaataacaactgttaaaagttatgagagcagtcaacaaccagcaagggccaaagttgtagaaaccgtacttcaggtcgatctatttgaaaaatatatgttttggctcatgaaagataaaacactaccctcagccggacaaatatccccggctctctctcttgatgggtccattcaatcggaggcagatcacatttcaatcgaaacagaccaaaaatcaccccgatcacgccgcaatgctggttaa

SEQ ID NO: 389114 - DNA, 462 bp, Salmonella enterica; identical to SEQ ID NO: 381765

SEQ ID NO: 389115 - DNA, 885 bp, Salmonella enterica
atgaacagactgaattatgaactgaaaaacctgtgcaaacgtaaccatgacggggcgtttgccacacaaaagaaccgacacaacggtctgcaactgattgctgaccagttacagaccgccggatttcagacgtgcgtgatgtccgtccatgacctgaaagggaggcatatcagccgcctggtgtcattatggaaacagcaggcgttatcagatgccacaatgaaaaaccgcctcgccatgctgcgatggtgggcagagaaaatcggcaatccgggagccgtgaagacaaatgaagagtacggcatcagccagcgccggatggtgacgaatgagagtaaggcagaaacgctgaccgggaaagacctggcgacgatttcgccgtgggtggtgctttcgcttcgcctccaggaggctttcggattacggcgggaagagtcgatgaagttccgggtgtcatgggcgctgaaaggccagtcgccggacagcatcagtgccatcagccttaaaccctcatggacaaaaggtggtcgcccccgttcgatcccggttctgacaccggagcagcgccagttactggcggaagtacgccagcttgcgggaagtggcagcctcattccgccggatcggagctaccgggaacatctgcgggaatttgagcgccagacgtcggggatcggcatcggacatactcacggtctgagacacgcatatgcgcaacgccgttatgaagaactgagcggacggaagccgcccgttcttggaggacgatcccggcgtaccatgcgaagggaagaacgccggaaggatgacgagatacggcggaagatctcagaagagttaggacactcccgaatatcggttacatcagtatatcttggaagctga

SEQ ID NO: 389116 - DNA, 900 bp, Salmonella enterica
atgaagaagcgtaataattcaggcgttaaaaaatccgtactggactggcagactatcggtgaggccgttaacataattaaccagacaacaggcgaatcacttacagaaagtgatatttaccggcatgcgttaggtggcgatatttgtctttctgtatatttccagtctccggtcattttacgaaaaatttcacagacaaacaataaaatcagactcagagaggccggttacccgttaataaaaagattctgttatcttgaaagtcactgcttcatgtacaacctgaatcttgttgcaaacaccgaaggtgattttttcctgccggagtttaatgttattgatacattactgaccggatatgaatatgtgacagtacagcgcttacttgcccgtaaactcagactcccgccacctgtgaaaggcggagtgtatcagaatatgggcgtttcggtttttattgcaggggaaatattccagacttttgaaaaaatcacctggcaggaaagaataaaacaccagataattaaattaccgtcagatatggctcaaaacctgaatgcgcatatatcagaaatgaacagcgccattctttaccagcgtgaatttttcccccttcatgatttaccgggggatgcctgttttgtcatccggcgcactgaaattgaaaagttactcacactgtattcttcttcgcccgcttcaacacgtatgtcttccgctctcgcccgtttcctgtggctggcctgctggcaggatgaatccatccgttcgttaatcaaccagccctacaaacttgtgacagttttcgaacagtgggctgttgacgcagggatcaccgatcgtctcagtggtgacacactcaaaacggcactggagcgcggctctccacggataaggtaa

SEQ ID NO: 389117 - DNA, 945 bp, Salmonella enterica
atgtcaggtatctgctttcgggtcagcgttatgaccggactccttcttatcacttcacaggtattcgccaccgacagacgggaaaatgtcattgtggatctgggagatgtgtcattgcctgtggcacaggacgggaataataacgtctattttgcacagacgaataaagaactaccacctgtagcctgcatatcctgtggagataatgttcgcacaaccactacctggaaagcgctgatgacctataaagaaggcagtcgggataaaggttttctgttcgatcccggtatcagtggagtgttgttacggatccagccagatatgactcaggcgatgcctggatcaactggttctttggtgacattcggccttgtcagggcagacaacttgccagcgaatgcaggaacattcgtgttgcctggtccggtactggaacgtactgtaactgaagcagatggtaccggcagagtgctgaacacgacgacgacgacttttacggtggatggtaaagtcatcgttccgacctgtcagtttacccggtcacaggcagaaattactatgccttcatcggtttctgaacagcaattacagagtgccggaatgggtgtgcctgtgaaagctgtgggcgcaggagaaactgatttagagcttcagtgcgctacacagactaccggaagttttagtctgtcttttacagcaaataaaacagcaagtggtggaaagttgttgtccggaaataagagtggtgccggatttttggtcggggtggttagcccggcaggcaatgaaaccccggttatctggaacagtacccctgtttctgttacctcgatggcaggtgcaggagcaaaaattcgtttacgggcgtggtacagttgggacggtgaagaaataactccaggtgatgttacggctaatggactggtgactttgaaatatcagtga

SEQ ID NO: 389118 - DNA, 2592 bp, Salmonella enterica
atgatgactcgttatattttatcccggcacctgacgatgggatgcatgagtttgcttgcactcagtatctctcaggctgtatctgcaggtcagttggtcacaccacaatcttctcttccgttatccacagaagaagattcttcagcattaacgtttaaccccgacttcctgaaattctcggacggcgatgcggctaaaaatgttaatctgtcatatttttcatataaagggggacaggagccaggcacctaccgcgttgatatcattgtgaacgggaaatacactgatactcagacacttcagtttcagtcactgaaagacaaacctggtcagctttatgcctgtgttacacccgatgtttatggtcagtggggaattacattaccggactcgcaggcagccaccgctcagcataatataaacaacgcaacatgcccggaagggctggcacaacggcttcccggtgcaacggagcatcttgatttaaaccagcgtacgttgcagataactgtaccacagagttatctggctcctccgggatggtttgagacacctccccatcagtgggacgaaggcatgccggccgtcatggtcaactataatttttccgggaatgagcaaaccaatgcagggcagcattatcacagtcagttcctgtcgctgaacagtgtcctgaatttcggaggatggcgcctgcattatgatggtaactggacttccggaacttcttccgcgagtaaatggcagtcactgaacacctggttacaacatgattatgcccggggacagggtggacaactgacgatagggcagacaacaacagacagcgccatttttgatggctttccgtttgaagggatacaggttgcatcagatgacggcatgcttcagtcgatgctgacaagctatgctccggttatacgtggtattgcttattcacaggcgcaggtctcggtccggcagaatggaaccataatttatcagaaaaatgtccccgcaggcgcgttcgcctttcgtgatgtcccccaggtttattccggagatgtgacggttgaagtccgtgaagcagacggctcggtacacaggactattcagactgcggcaaccgtccccgttcttcagcgtgaaggccgcctgcgttataatgtggccgcagggcgctatcgccagcccggaaatcagaacacaggcagggataatccggagtttgtacaggcaacggctgcatgggggcttccttattcatttaccttatatggcggagctatgctggcacggaactatcaggccggtattctgggaactggccgatacttcgaaacgctgggtgccctctctcttgatgtgactcaggcccgatcacgttttacttcacgttaccgtgacggtgaggcacagcagggacaatcctggcgctttgattatgcccgtagctttaatacgaccaataccacatttaacctgacaggttatcgttatgcaactgaagggttttataccttcaacgagttacagcaacttcaggggaccggtgaggatcaccgtacggattaccatcagcgttcgcgcctcatgactatgctcacccaggatctcggtgattcggggcaactgagtctctccggaagtcaggacagctactggaattataacggtcatggttacaactggatagctacctacagtgtcggtctgggtccggtgtcctcttccctgtcgcttggctataatcgtactccgcaatatcaacaggctgataagtcggtgcttctgaatttttccattccgctggggacatggctggggggaaatgtctcggcaaatacctcaaccaccttacgtaatggtacagcccgacagcaggctggcgtcagcggttctctggataacagtaagctgacctacagcataatgcagggccgggaaaatcagggacagggggcaggcggtaatgcaaatctcgcctatcagggaagttatggccagctcagtggcggatacagttatcagcataacagtcagcaatggctgtacggtgtcaccggaggcataacattacatccacatggtgtcacgttctcccagccggtatcgctcagtggcggaaatgcactggttgaggcccccggagccagtaatgtgccacttctgtcaggaaccggactggctacagactggcgcggatataccgttgtcccgaacctggtaccttaccagcgtaataccgtggcgctggatatgggacatttgtcggaaaatatggatatccaggccagtgataatgtggttattcccactcgtggctctctggtgtctgcgccattcagggtcagtgttggcggaagggcattagttacacttacataccatggtctgccggttccctttggcagtatcgtgacactgaaatcagaagcatcttccctctccagtatggtagcggatgagggacaggtttacttcagtggactgccggataaaggacgactgatggttaactggggccagggagcgggcaatcagtgtatcgcctcctatacgctggattctgctcagtccgtactcaacaacattcacgctgaatgccggtaa

SEQ ID NO: 389119 - DNA, 753 bp, Salmonella enterica
atgcgtgttttttatgtgactttattgtgtttttcctccttattttcatgtgtatcgtatgcagaaacaggggggatttctctggccgccactcgtgttattttatcttcagataaaaacagcgcgggactgactgtgaataactcttcaaatcaggattcatggttattacgctcatgggtgacaccttactataccaccggggtaaaaaatgagaaaattaaagcaccggttccgtttgtcattacaccaccgctgtatcgtattgaacctgatggaaaagttcagttgagaattaatgcggttgatgtttcttcattaccagcagaccgtgaatccgttttccgtattaatgttatggcaatcccccccgaaacgaagattaacaggggtaaagaaaaagcagccggagaactgtccggcgggcatatacagtttgccataaataatcagataaaactgttttaccgtcccgccggtctgaatgaaaagtccggattagaccgcgcacgtaaacagttaattttcagcctgaaagggaatactattgatgtgaataatccaacgccttatttctttacgctggttaatatcagggtaaatggcagaccgttatcagatgaaaagaaaactgataccatggtcgcacccttcagccatttacaattacccgttactgatgcccggagtatggagtatcagactattaatgactatggcgggaatactgacgctgagaaagtgactttttaa

SEQ ID NO: 389120 - DNA, 558 bp, Salmonella enterica
atgaataaaataaataatttcctgggcatcaccgccttgttattctccggaatgtcttccgtttatgctgcgccaacaacttcaacttctacgttgaccatcagtggtaccattaccagtgcctcctgtactgccagcttcccgggtgatgtaaccattcctgccattaccgaagctgactatgaatcagtgggggctggtactcagcttggtactgatatgaacgtgggtaacattagtttaacaggatgtaatagcaaaacagtcactctgacaacgaaaggaacagggaatctgcctggagataccaaaaaaggcacattcacttacagtaattcagcgaaggggactgacaatcccctggtctatactcttgggtatactggtggtgatttaagccttgataacggtactcccgtcgattttaacccggataaaataaaatatgatattccgttaacgcttaaagtcatgaaaaatggaagtactcttgcagatatctataaatatatcggtgatttcaacactaccgtgacatatagtatagcttataaataa

SEQ ID NO: 389121 - DNA, 525 bp, Salmonella enterica
atgaataaattagtcaaattaagtatgcttgttgcatcaatgattggtacatcatcagttgtagcggctccccagacaggctcaatgaacgtttcaggttccctgacggccagtacatgtactatttcgctgtctacttcagaaataaacattccggctcttacaacagaagcaataaatgcaaaaaatgagggtgatattttaaatcagtcttctgtaacgattaacacaaaaagctgctcagggcatccggcatggttcactctcaataacggcaacggtgttcttacttctggtcatggtaaatttaagtttcctgatggcaaaactggcaatccaatatatttttcagtatcaaaaagggggcaaaatacgcttattaatgttaacggctcaggaaccactaatattaatgcagaagacataaaaactatggatattaatgttacgcgcgggtctggtacctcaagtggatacgaaggagcatacagttcagttctgacttttaatttctcatattcctga

SEQ ID NO: 389122 - DNA, 210 bp, Salmonella enterica
atggctgatgaaattgacaaggtccaggagaattatgacagttatcttgaatcattgattgaaaagaaacgtttccgggcttcgtcatctgagtccctgcattactgccgtctttgtggcgaacgtataccggaggagaggagaaaaattcttccgggcgtgggaatctgtatttattgccagtctgaaaaagaacgccgccagcgttga

SEQ ID NO: 389123 - DNA, 243 bp, Salmonella enterica
atgctcccgtcacttaactatattacgttaacacttgtattacaggcggtcagggatggaaatattaattactgtaatgctatagggctgacgctggatgaagtaagagaactcaatacactgacgctggatgaatttcttttcatcagtaaaacacctgccatctttcttgatatctcggttaatcatgaaagattacagtataacctgcttcgttcacgtcaggaattacatttacagtaa

SEQ ID NO: 389124 - DNA, 162 bp, Salmonella enterica
atgtcctctcgcagttggttaataaatcatgagcctgatttcgtgcagcggtcagctaatctccggctgatccattcgtcaatttctgactcaagccatgccacgctggctggcccgatctttattgatcgcgggaaacaccccctttgcatgtacagatag

SEQ ID NO: 389125 - DNA, 1257 bp, Salmonella enterica
atgtctctcaaagatacgcaaatccgcagtattaagccttcttcaaaaccctttaaagtctccgattcccgtggtctgtatcttctggtcaatcccggcggttcccgtcactggtatctcaaataccgtatcaacggcaaagaatcccgcattggtctgggcgcatatccagccgtgtccctgtccgaagcccgccagcaacgcgaagatattcgccggatgctgatgcagaatattaacccggtacaacaacgggcggctgaacggggtttactgtcgcctgagaacatctttaaaaccgtggcgctcgactggcataaaaacaaccggaaatggtcacagaataccgctgaccgtctgcttgccagcatgaacaatcatatcttcccggtcattggtcatctgtcagtcacggaacttaaaccccgtcatttcattgacctgctgaaaggcattgaggcaaaaggtctgctggaagtcgcgtcccgcacccggcagcacctgtgtaacatcatgcgccatgccgtacatcaggggtttattgacagtaacccggcggcaaaccttgacggggtgacgatgcctcccgttaaacgccactatcccgtcctgccgccggaaaggctgccggaactgctggcgcgcattgacggttatcagaaggggcgtgaactcacccggcttgccgtcctgctgacccttcatctgtttatccgctccagcgaactgcgctttgcccgctggagtgaaattgatttcagaaataaagtctggacaatccccgccacccgcgaagccattacaggcgtgcgttattccgggcgcggcgcgaagatgcgcacgccgcatatcgtgccgctgtcccggcagtccgttgccattctgaaacagattaaggacatttccggcaattatgaactggtgtttcccggagaccataacccgtataagcccctgtgtgaaaacacggtcaacaaggcgcttcgcctgatggggtatgacacgaaacaggatatctgcggtcacggcttccgggcaatggcgtgcagcgccctgatggagtcggggctgtggtcacaggatgcggtagagcgccagatgagccaccaggagcgcaacagcgtgcggctggcctatatccataaggccgaacatctggacgcaaggaaggaaatgatgcagtggtggtctgattaccttgataataaccgtcagggacatattgctccctatctgtatgcacgacatcataactga

SEQ ID NO: 389126 - DNA, 1518 bp, Salmonella enterica
atggcatcgatcgatttccgaaataaaattaactggcatcgttgttatcgttcaccgcagggcgtaaagacggaacatgagatcctgcggatttttgaaagcgatcgcgggcggattatcaactctccggctatacgccgtttgcagcaaaaaacgcaggttttcccgctggagcgcaatgccgcagtacgtactcgcctgacgcattcgatggaggtgcagcaggtggggcgttatatcgcgaaagagattttaagccgcctgaaagagcaaaaccgactggaggagtacggtctggatgcgctgaccggtccctttgaaagtattgtggaaatggcctgcctgatgcacgacatcggtaatccgccgttcggtcattttggcgaggcggcgatcaatgactggtttcgtcagcggctgcatccggaagatgcggaaagtcagccgctcacgcatgatcgctgtgtggtttcctcgctacggttacaggaaggcgaagaaaatctgaacgatattcgccgcaaggtacgtcaggatatctgccattttgaaggcaatgcacagggaattcgtctggtacatacgctcatgcggatgaatcttacctgggcgcaggttggcggaattttaaaatatacccgtccggcatggtggcgagggccggtgccggattcccatcgctatttaatgaagaaaccgggctattatctttctgaagagaagtatattgagaggttacgtaaagaactgcagttagcgccttacagtcgctttccattaacgtggattatggaagccgcagatgatatttcttattgtgttgccgatcttgaagacgcggtagagaaaagaatctttagcgttgagcagctttaccaccatttatatcacgcgtggggccaccatgagaaggattcgctgtttgagctggtggtaggaaatgcgtgggaaaaatcacgcgccaatacattaagccgcagtaccgaagatcagttttttatgtatttacgggtaaatacattaaataaactggtgccctatgccgctcagcgttttattgataatttgccgcagatttttgccggtaccttcaatcaggcgttgctggaagatgccagcggttttagccgtctgcttgaactctataagaatgtggcggttgaacatgtgtttagccatccggatgtagaacagcttgaactacagggataccgggtgatcagcgggttattagatatctatcagccgctattaagtttgtcgcttaacgactttcgcgagctggtggaaaaagaacggttgaaacgcttccccatagaatcgcgcttatttcagaaactttctacgcgccatcgtttggcctacgtggaagtcgtcagtaaattacctacggattcggcggagtacccggtactggaatattattatcgctgtcggttgattcaggattatatcagcgggatgactgacctttacgcatgggatgaatatcggcgtttgatggcggtcgaacagtaa

SEQ ID NO: 389127 - DNA, 1302 bp, Salmonella enterica
atggacggatttgcacaaggcttactggcgggattcagtaccgttgataatgcgatgcagaatcgtaaagcgctggggctgcgtgaagctgcactggcacagcagcagaagaattccgatcgtaattttcaactggcgcaggatgagtttgggtatcgcaaagagacggaccagaaggatttcgacctcaaaaaagagcgttacgcgaaggacgatgagcactggggcaaagacttcggtttacggcaggctgagacaggtgcccggataggaatggagcggcagcgtctgggaatggcaaaagagcagcaggattacatgataggtcgccagaaacaccttgatgcgctggaagaagacaagccaatagcacaggcggcgttaaattcttatcagcagggcgattatggggcgacagtgaattttattaatcagcttcatgatggtcatccgatgaaacagatgattaagcctggttatgcacagagttccatgaatgccctgaatggggttagggagatacttcaggggcatcctgacgatgctattaaagaactgaacaagcccgatatgttgaaaaatctgtcggtgacgttcggttccgaactgtcacagcgcatcggtatgaaagacccaaaaacagggaaaaccatcactgatgctcagattggcgcgattttaccatctccggatggtaaaggtattgtgctggggctggatttaacttacgacgacggcagcaaatcacataagcctgtaacggaatatggtagtgctgacccgcgtgatactgatgtgttgaatcttcccggtgaaaaagcgattgattatctcatgcaacgcagcgggtttgcttctggactccagaacgggctgggacaactgaaatatatgcagtccgatcagggtttatcgctcagagagaaacaaaaaattgcgggtaatacggcatcgagcacagcaagagccggtggcaatgcgagtgaagcatacgagagtatgctgggtacgctgggtgttcctggctataaggaaaaggctcagcagactcaggctataaacaccgccaaaacgtgggttaataacgatccgtcgaaactggaatttgcacaaggggcgcttactcagatgccggaactgtttgaaccgggtaacgagaaacaacttgaaatttatttccagaattacctcaaaaccaaaacggatcaaggtaaaacgcaaagtgccgtggtgactgctgaagacttacgtaaacgcaggcagccgcaacaacaaagtgattttctgtacggttccgactga

SEQ ID NO: 389128 - DNA, 273 bp, Salmonella enterica
atggcatacggattacttgatgcggcaaaccagacgcgcaaagaagcgttgcagggcctgggtgaagcagatcgccttaataacgagcgcgagatgatgaataagcagatgaaagagcaggccaaaatgcagcacaagcagaatattggtactggactggcgactggtgcgaccacaggagcaatgattggttctgttgtgcctggtatcgggacagcaataggtgccgggataggtgctgtcgcgggtggtctgtttggttcattattctga

SEQ ID NO: 389129 - DNA, 600 bp, Salmonella enterica
atggcgattattaccgatgcaaaaaatgcgcgatacggggataacggtattatcactgcggatgttcgttttgatgatttatccacacaggacggtacgccgttgtatctgccttatatttccacggcacatgacacagcggattttggcccacaactttattccgatttgaagtctggcaaatatggtcccgtcaccccgtttaccgtcacgtctgaaatgattcagacggcaaaagaccagaagcataatgaaattaacgtctggcgtgacgtacaggaaagtggcagcactaccttcagtctcaatggtcataactgggactgcaataaaccgtctcaggaacgtcttggcgcagcccttgcggccgctcgcgcaaatatacttcctgctgattttttctggacggatgctgacaatatcgatgttcctgttaaggcggcagaccttgagtccatgagtgcggtaatggccgccacgatgtttttgcagggcttcaaaatccacgaacgccagcgccagatgaaggaagaggtggatgcgctgactgattatcaggtaatcaaggactatatagtgggatggacggatttggggtaa

SEQ ID NO: 389130 - DNA, 906 bp, Salmonella enterica
atgcttgcagtatgcctgctagcctggggatatggtctgcgccatgcggttgatgcagatcatattgcagcaattgacaatgtcagcaggaaacttttacaacaaaataaacaatctttcaccactggtgcatggttctctcttgggcattccacaattgttattctggcaagtataggtgttgctttagccattaaagagttcagtaatgatatgaactggatgcaggatgtaggaggcgtgattggaacttctgtttccgcagccttcctgctcttgcttgctgtcgttaattttgtgattttctgcaatgtgtttcgtgcgttccgtaaactgaagcatactggtgtatatgactcatcatcagataacgtaacagtttcaggacctctaagctggcttttccgctgggccttcaagctggttaacaggggttggcatatgtactttgtaggattcctgtttggtcttggttttgataccgctacagaagtgtcattgctgggtatttctgcgtcacaggcttcacatggtatgtcgctctggtcgattctggtattcccggctctgtttaccagtgggatggcattgatcgacagccttgacagcattcttatgacagaagcatacggctgggccttcaataaacctcagcgtaagctctattataacatgactattacaggcacttctgtagtggtggcgctgtttattggtgggctggaagctctcagccttatctcagataaacttactcttaatggccatttctggacaataataaacacagccaatgatcacatggaaaacgtcggatttatcataatcggagtatttgtagcttgttggatcatatcagcaatcaattatcgatggaaaagatatgatcaactgacaaccagttga

SEQ ID NO: 389131 - DNA, 579 bp, Salmonella enterica
atgaagatagttaacgcgaaaaacggcgagtttctggaaaatggttttattaatgcactggtgtattttgagggctttgacaactttgtgcaattcaccgcctctccggacgacccggaggaacacggtcgccatctctacgccgacctcaaagccggtaaatacggccctgtcgccccgttcaccgttacccctgaaatgctcaccgcagcaaaacaggcaaaacacgctgaaatcaacgcgtggcgtgatgcacaggaaaacggaaatattctttttaccctgaacgaccacaaatgggactgcggcaaagcctcacaaacccgccttgcgcccgttgttgccgtggctaaatccggtgcactcccgcccggcttcttttggacagacgccgacaacatcgatgtgccaatgactgctgacgaactcaccgcgctggaagccgcaatgcagcaaaacatggtgctacagggctttaaaatccacgaacgccagcgggtaatgaaagaacaggtggataatctcaccgactataaggcgattcagggctatgttgtgggctgggttgaggggagttag

SEQ ID NO: 389132 - DNA, 381 bp, Salmonella enterica
atgattatcacaggaaaagtgctgtctttcggaacatccggaactggcaatggtggtgatctcaccactgtaaaaacagacggcaccactattaccggtgatggcaataccatgccattagcgctggggccggggataattgatggtgtgggtgggtatgctatggcgtactgctcagggaatggcgctggacatgattcttatggggaaactatttgtggttcatctttacgccctacatcttatgcaattagtggataccagggacattcttatgttgtagacaccagccgcccgcgttatttaccaggggtctggagattgtgctgtgaggctattactaccacaggttctattggcctatatcagcgtattgcataa

SEQ ID NO: 389133 - DNA, 993 bp, Salmonella enterica
atgcggggaattatggactttgaaattacaggcgaagaaacccaggaacagctcgaagaactcatggcaaaaatgggtgacattgaggtcgggggtgacaacgaggaatctgaagacagcgcgaagcattccggcagcgggacttctgaaacagtacaaaatgaaacgggcgataaacagactccgccgccgggagttggtactgaggaagagggacagccgcaggaagatgtgaagggcattctcgccagagacgggaaacatgtcatcccttatgacgttcttgaagctgaacgggctgaaaaacaacgtcttactcagcgttacgagcaacaactggcagaagaacagcgcaaaattgatttgctgacgtcacaaatcaaacaggcaggtatgacgccagaccctcttccggagcaggcgcgtatttctgacgagcagatcgccagaattaaggaagattttcccgaagtggcgaatgcgctcaccctgatggcccgtaaatacgattatttacaggcaaaggttcagggagcacaaccgcaacaggaagaaaaggataacactgccgtaaccgctgctttaaacgcaacgcctgacctggttgaatggcaacaatcagacccggacaggtttgcgctggccgttcaccttgacgagaagttacagactgatcccgcatggaaagataaaacgctgacggaacgctttgctgaggtagcgcgacgtacgcgtgctgcctacggtgaagcgccttccgggccggtcgtggaacgggacaaccaggaggttcttgctactgccgcagagacagtcgctaaagctgatgctgcgacaacagtgcctgattcaccgtctgatctcgggaacacagcagcagtaccgcaggataaatttgagcagttacttggtgcttcttatgcagatgcagaggccgtaatgagcggcatgagcgacgcggatattgacgcgatccttgagaagcttgggtaa

SEQ ID NO: 389134 - DNA, 822 bp, Salmonella enterica
atggcaaagaccgactggaaaaaactggagcaaaaatttcagcgcgctcatgccagaacggggataaaactcagggactggtgtaagcagaacaacatcagctatgacacagcccgacggtatataaaactgcgcaaaaatgagcaggagtctgcgcagaaaaaagcgcaaaaaaaggaacaaaaaactgcgcaaaattctgacgcatcttcagaagaaaaaaccagtgacgacgagaattgcgaagaagaaaatctggcagacagtgatgacggagattgcggaaatccggcagaaacgaaacgccagttaatcgggcgtggttctggccgcccatttacagcccgcaataccgcagcagtaaaacaccgtggatacgccaggtatctggaaaaagactacctgtttgatgatgcggctgaaatggatctcattgacgaactggtatttacccgcgccagggcactttcggtaacagcaacgctgaaacgcatgtttactgaactggataaaacggaagatattctggcgcgcacagcattgtacggaaaaattttgcaggctgagacggccctcgaccgcaatattgcccgcattgaatcgatagaacgtaccctggggacgctggatattattgccgtcactcctgcaaaaattattgccgataccgagtaccgggcagcagccagagaaaaagttaaagctgagaccgatatcctgacaagccagaaacagggggtaacgacccccatgaacaaaattgtacaggaacttcatcgtatgaatcattccgggaggcttgatgatatccccgaagaatga

SEQ ID NO: 389135 - DNA, 477 bp, Salmonella enterica
gtgggggcagaaatgaaccgcgtagctactggcgcgattgttgtgctgctgattgtggtagcagcgctggcgtggactaccgaccgctaccacggtaacgccgtgcgctacaaagaccagcgcgacactgccactcacagcctgaagctggcgaacgagactattaccgacatgacgaagcgccagcgtgatgctgctgcccttgatgcaaaatacacgaaggaattagctgatgcgaaagctgaaaatgacgctttgcagcgccgccttgctgctggtggccgggtgcgcgtcaaaggacgttgtacagtgccagccagcgccacacccgccagcaccggcagcgtgggcgatgctgccaccgtcgaactctatccagattctggacagaacgttctcagtatcagatccggaattatcagcgaccaggcaaaactgaggtatctacagcagtacgtcatggaacagtgccaataa

SEQ ID NO: 389136 - DNA, 291 bp, Salmonella enterica
atgctggagaaacacacaacgtggctggcctatctgtgggcggtgatatgtggtgctcttgctcagtggacagtacacgactacggggcgctgattggcatcgttctcggtattggtacgttttgggttaaccgccattacaaaaagaagctagagcagacgcaggcaagacaggcggcagcactggaaaagcgtaaccagatacttgaacagatgaccagaaagccggacagcgcgaccactgccctgatagtggaatctgagaggctggaagatgcagataaaagttaa

SEQ ID NO: 389137 - DNA, 126 bp, Salmonella enterica
atgatgttgaaaaaatggtgtatcaggctgcttctgctctccagcttttttggtggagtagtcatatactgcgttgttattgagcgtatagagcatgagctgatttttctgggagtagatgattaa

SEQ ID NO: 389138 - DNA, 399 bp, Salmonella enterica
atgtcagtaaaaacaccaaagagtgactgggagttaaccgcaacagaacgtctcctcaaggagaagaaacgtcttggtcttagcgatgaagaaatggcgaagatactgggactggattcatatttttactatgtcgttgctgatgaaaagccggactttaaagtttacgaaatgtctggtgaggtgcaggcagctctcgataacgctggctttgatctcttttacatacttacaggtgaaaacaatggcgaaaactatgaaatcatgttgagcgcctttagttatgccattgctgatttacctgttgatgagcagatagaaatgcgcgaactgatgaagcctgtatatgaaaaactgatgaaagccacaaatggtggaaaacactcaacccatcactaa

SEQ ID NO: 389139 - DNA, 468 bp, Salmonella enterica
atgagtaataccaacaaatttaagtcgctgcgtcttgctcgggcctggtcccaggagcagcttgccgaattgtctgggctgagtgtgcgcacggtgcagcgtatcgagaatggcgatcaacccagcctggaaacactgagcgccctggcagctgtatttgaggtgagtgtggcggatttttccggccctgacgcgcctgctgatgaggcgctcgaccagagaattaccgaggcgaagagcaatctcgctgaggaaggccgtttttaccggtcagttattacggctatcgttgtctgtgtgctgctgctcattcttaaccactttacgactacgaacagcgtatggtcattgtgggtagcggggatctggtttgcactgctggttattcgtggcatgaggacgtttgtttttcgcgggctgatcagccgctggcaacagaagcggttgcggcagatgctgcggcggtaa

SEQ ID NO: 389140 - DNA, 660 bp, Salmonella enterica
atgacgatttttgatggaaccgtaatgtctcaaatgaacatctatattctcaatgcgcagaataaactcaccgcccactgtgaatggcttcaaatacacctgactgatacctacaaacaagccaaaaagttaatgccgattcattcactggatgtggtggttaaagccggaaagtgtgtcatcccggaaaaagggcatctcggtttttgcccagaagctggcgttgtctatataactgttgatcctgaaaattctgcattctgccaaaatgatgcgcactctatcgaacgaatgtttgctcatgaactgcaccatgcagttaggtgggctggaccgggatatggctcaactttgggagaagttattgtctccgaaggacttgcagggcatttttcgcttgagctttttggtggtgaacctgaaccctgggaaaaactcgaatcagatattattcagtcctacagccaacatttgcttgaaaactggcatcatactgattacgaccataatgcctggtttttcggaatcggtgatttgccaaggtggctgggatataccgcagggttcagactgatttccagatacctcgcagcatccccacatttaaaggcttcaatgctggtgaatataaacgctgatgagttaaaggcgtttatttga

SEQ ID NO: 389141 - DNA, 390 bp, Salmonella enterica
atgcgcgatattcagcaggttctggagcgttggggcgcatgggccgccaataaccgtgaggatgttgtgtggtcatcaattgccgccgggtttaaggggcttataccgaataaagtgaaatcacgtccgcaatgcagtgatgatgacgcgatggtgatatgtggctgtatggccagactgaataagaataatactgagatgcacgaattgttgatggactactatgtatttggcatgacatttatatcgctggggaggaaacatggttgctcagacacccatatcgggaaaaaacttcagaacgccgaggggattattgagggcatgttgatggcgctcgacgtaaagcttgagctggacaggtatgtgcagcgggagaatagtttgtga

SEQ ID NO: 389142 - DNA, 603 bp, Salmonella enterica
atggcgcaattacaactggtcaagcacacctcatcagggatactgctcccggcgacgccggagagtggcgattttctgcattccgtgaaaattggcgagtggatacacgctgattttaaacgtgtacgcaattacgcctttcacaaacgctttttcaaactgctacagcttggattcgactactggacacctgctggtggctcgttgtcaccggatgaacttcaactggtaaatcgcttcgttgggtatctcgttgagatgtccggtcaacgctatggagaggtgttaagtgccgctgctgatgagttccttctgctggaaggacagttacgtaccagggacgttgcattgctcaagtcatttgaaccttatcgcgcctgggtgacagtcctggcgggttactatgatgaggttatccttcctgataatacccgccgcagaactcctaaatctattgcattcgccaggatggacgaagatacgttccggcagttgtataaggacgtcttcaacgtcttatggaatttcattctgcgccacaaattcagatcacagcaggaagctgaaaacgtggcgatgcagcttctggagtttgcgggatga

SEQ ID NO: 389143 - DNA, 591 bp, Salmonella enterica
atgactagccctatctctaccgttatccctgagataaccattcacgacaatcgtcccgtaaccacttcagtttcagtcgcaaatttctttggtaaacagcataagcacgttctggagaaaattcggagtcttgattgctcccctgcgtttaagacggccaacttttcggccatcgcaataaccactcaagcaggctttgacgaacgcgaaacagaagcctacgaaatgaccaaagacggctttatttttctggtgatgggttttacggggaaaaaggctgcacgcttcaaggaagcctacattgcggagttcaaccgcatggaagaagagatccgtcagcagaagaatccggtaaacggtgacatgattttcggggattcccgtacgctggttatccgactggatgaggctggcaatataaaatccacggaaaaggtttccggggattcaatggtatgtaccttccagagttttaaattttgggtagaacgtaacggttggctggtgatccgccgtgatgacctgacggagttatttaacgaaacgctccggaaaatcgggcttccggcaacactgccaaatccacagtag

SEQ ID NO: 389144 - DNA, 330 bp, Salmonella enterica
gtgaaaaagataatatacctattactattcacaacatttcacgctttcgctatgggtgaagatattttcgattatgaaaatttaattggctacacagtcatagccgtcagcaagattgacggtaatttcgatggttgcgattacagaaaacctattgtactggaaaatgatatggtactaagatgtagctcatttggtatcggatacgcttacgctcctgtggtagtggtttttagcaaagatatgggtaaaggatattcaatcaaaactataattgataataaggtatatgacatggaacccattctaaaaagcaataagcgccattaa

SEQ ID NO: 389145 - DNA, 801 bp, Salmonella enterica
atgagaataatgttgattcctttgtttcttatactaacagggtgtgctcaaaaagtttggtataatccagaaaaatcaactcagcaattttatgctgataatgcaaactgtacagctatgtctcaaggtgtgtctccagatcaaattcaaccttcatatgagtataattcagcttttggttctggttttttgcaaggatttaatacaactaatgctattatggctgcaaatacaaagagtcaaatttattctgattgtatgatggggaatgggtgggtattagttgataaaaaaagagtgggcagccctgctgctgaatatcaggatgtgcatgcttctgaaagtatttacacccctgagcctaatgataaagaggataatggaaaggaaaccttagccagagcatttaactcagtacctgaattgtcatcctggcaggaatcttatcctcaaaaatttgaaacagcagtagctatggatgatattttaagggataatctttattgggagtattcttcattatctgatcgttttcatgctgctaagttgatgacagatgcaatctatggtgatgccgctaagttcaaagaaatttgccttatggacaacgcgttgaaagaaacaaaaatagaatataaatatattcttgcgtctatcaggtcgcttcatgacgatgttctgaaaaagtataatcagatgtgtctggatggccatgactcaggtgagtcaaagagagtgtatgaacagatatatgcagaggctaagttaataagtcaaagattgaaaaaaaagcaccattaa

SEQ ID NO: 389146 - DNA, 372 bp, Salmonella enterica
gtgaggattttcaaaaacgcctggttcgaacgtttcgcccgtaaacagtgcattaccgaccggtcattgtatgacgccatagaacgggcagaaaaaggactgattgacgctgacttaggtggcggtgtgataaagcaacgtgtagcccgccaggggcagggaaaatcaggtggatacagaaccattgttctgtacaaaaccacagaacgggcatttttcatctacggtttttcaaaaagtgacagggaaaacatagaccgggctgaagaaactgaatttaaaaaagccgcccctcacatcctgtcactgaccgaagaacaaataatgttactgattgataaaggccagttaacggaggtattcgatgagtaa

SEQ ID NO: 389147 - DNA, 318 bp, Salmonella enterica
atgagtaaaaaataccgcagcgaagcatatgcagccattcatgaaacgatggaggctctacatgaaattggtgcagtggacaagcaaaccatgcgccagtttgatgaatcatgcctgtcccccatcattcccatgacgccggaaaaaatcagggcattgcgtgagcgcgagcatctgtcacaacctgtttttgcccgttatctcaatgtcagcaaaaacctggtatcttcatgggagcgtggagtaaaaaaaccgggaggtccggccctgcgtttgttaactgtcgttgagaagaatggaatacaagccattatgtaa

SEQ ID NO: 389148 - DNA, 204 bp, Salmonella enterica
atgtttaaaatcaccgcgacgattatcaaggccggaaatccgcccattggatggtgtcgattttctaaggaaaagctgactcagacgcagtgtgaaaaaatgttctttaaagcgaaagaggctggaaagtcattcggggagaaggtgatactggacgatttcaggtgtgagaaggtgaaagaacaggagcgaagggccgggtga

SEQ ID NO: 389149 - DNA, 237 bp, Salmonella enterica
atgaaaattgagtatcaggatgctggcatggaggccagactcattattaccggcaccatttttagcgtacgaaaacacaataacctggtggacaggatgttaatgcgtattcctcagttgcgggaagagagtgaaggtttttttattcagaccacctgtatatacggatgtgtcgctgatgtactactggcagaagaaatagccaaagaacacgggtatgtggttaaaacaggatag

SEQ ID NO: 389150 - DNA, 342 bp, Salmonella enterica
atgaaagatatcaacaccccgccggaagttgttgagaaaattgaagtgctaatcaaagagcttcaccgtgtttgtgttgaaaacggcgtgccgcttgtcattgctgcattagtgagccggacatcgactataaggggggatgagggcattaacaggctactttcgttttatctggatggtccgacaggactcacggattcatcgatgcttgccgccagtgatattttacggatgccatgtgttcctgattcgtttattgccggactggaggtgctcagggaaaaaatgaatcaaccttgcgattgtcctgaatgctttgcggggcgatccagaatgcactaa

SEQ ID NO: 389151 - DNA, 438 bp, Salmonella enterica
atggaatctgtacttgatgcgctgaaagcgatgggaaaagccactgcacgcgaaattgcggcaaggctggatattgaggtacgggacgcacttgaaatgctgagtgaacagcaggagctgggtgcggtcgaattccagaatggttactggtggggaggcactaacgtgcaggagcttatgaattccgtaccgggcactgtcgacacctgtgctgaaagtgatacggtgcgggggagtgataacgtcacagtggcacttactgacagccatcaggacagcctgacgcttccgacgccgaaagaaatttctcgtgtcatccgcaaactcagaaatgctttacgccaggctgaacaggtccgaaaaattgccatagccgcgaaaaaacatgaaaaatcgatgagccgtatgacccgattattacaggaattgcagcaatga

SEQ ID NO: 389152 - DNA, 270 bp, Salmonella enterica
gtgaatttttgtgtaatctatttcgcgagcgaagaggagttcatttcgttctggaaagtaacccccaacgccacaccaaccccctcatatgaaagatggctggcttccttcgactcccaggtacgacaagctgaaatgcaggggcttaccgtcgttaaagtaaaggccgatattgatgactttctcgccttctgctgtgaaagaaatatcgcacccgacggtagcgccagaagaagctatgcagtgcataaggcaggtttcgattcttga

SEQ ID NO: 389153 - DNA, 447 bp, Salmonella enterica
atgataatcaggcacgaaaacatccggtgtgcgctactcgcatgggcggctgaatccagccaggagtttgttgccagtgcaattgcggcggcctacctcgatcttggaggacacgaactcccgttaatccgtattacagatccggttagccagcgtcatgaaagctggcgtaaccagcaaaatatatttcatcgctggctgtccggcgaaacaccggaacagcgccgcaaaattcagcttttgcttcccgccatatctgaagagatccccccacttctgcgcctgagaatggagtttgccgactcggttgaataccgggctgttattcgtgcaagggaagaactcaatcgcgcatttgacgatctgctgcgtgccgttctgtccagtattggcggtggtggcagacacactgatcacgctcgcgatggccccgctactttacggtag

SEQ ID NO: 389154 - DNA, 264 bp, Salmonella enterica
atgaagcttggtgaatatttgaggaattctggcttaagtcagcgagatttcggcaataaagttggtgccagtcaggggatggttagccacgtattgaatggcagggccagactaactggcagaaacacgcttttatggagtaagagtaccggatggcgagttacgccacatgagattgatagctctacttaccccaaccctacagacgggctccctcctgaaatacaggctaccgtaaatcagtgccgggaggttgatttatga

SEQ ID NO: 389155 - DNA, 228 bp, Salmonella enterica
atggttattattctcaccctatatttttcctcaaaaacgacctcaatcacactaatagcctacctgctacttgccaccatgcctctcacgacgtatccccctctctttctgttgcccatacaaaataaaaataacattgatattgacaataaaaatagcgatgttatttttaacttagcaacccaccctaacggatgggacagtcagcaaagctggcgcgacaggtaa

SEQ ID NO: 389156 - DNA, 348 bp, Salmonella enterica
atgaacgagacagaactgaaacacgttatagccatgcttctggaggatgcaaaacgcctgcaacaggtagaaccaaatgcaggcactgaggcccgcatatgggtaggaagaaacgctcttcagtcagatgataatgataaggccgtggtaaataaaccccatgtcgccacaacaaaaatttcatttgtgccaaatgatagttcttttaaaagaaacaaaataactccgctaacgtgtgagggagtcaatcgcatataccacgaaacgatggtagcagcactcagaatggaaatagaaaaactggagtcaattattcatggaggagtccattccgtaaccagggagtaa

SEQ ID NO: 389157 - DNA, 300 bp, Salmonella enterica
atgaaaaatcactatgttcacgtcagtctctttaatgcctcttcggaacaaaaaataaaatttaaagaggttatgtgccatttcggttatcgtgacttcttcaccaccggggaagatacctggcaacttccacctggtgggtatattggtaaatcaaccctgaattgtcaggaggttgtcaatcaaaccttttctattgctaattcagtaggccttaatgcttacatttttacctgcgagtttcagaatgccgcagaattactccctggttacggaatggactcctccatgaataattga

SEQ ID NO: 389158 - DNA, 207 bp, Salmonella enterica
atgtcttcacgtcacgatgtcacgaaatcagttccacgtagggacgttcttccaggaacaattgtaaaacataaaggccatgcctggcgtgcatcagcgaacacgaaaagcgggttatatctcgcaacggcggttgaaaagacccggattaatgtggattacgtggaaatttaccttaatccatttggtaatcctttaggtatatga

SEQ ID NO: 389159 - DNA, 165 bp, Salmonella enterica
atgaaaatcaaatgcgcttaccatctttgcaaaaaagaggttaatgaaaaagagagtatcgaaaaaccacttacgtttatgcgaggtgttatccatacaacggaactaagaaagtattgtagtaatcgatgtgccgaatatgaccagatggcacatgagctttaa

SEQ ID NO: 389160 - DNA, 2685 bp, Salmonella enterica
atgagcgataataaagaagattttgcgctgcactgccctgttaaaaatgaagaggccagaaagcggcttggaataaaagcaggcttcttctgggccacagcaaaaaaattatccgtagctgtttcacgctgtattgctgctatggatgataaggggtatgacgaggacgactttaaaaaacccgttcgtgtcaatttccccgttgttaacgatctgccccccgaaggcgtgtttgatactgaattctgcaaccgttacgaaaaaggcggtcaggacggtatcacgatggtacttattcccggcgccgtagagaatactgccgtcaccagtgatacggtcgccaccgatatcgtaactgacagtgacgatactgccgataatcccctccccgcttacgcttataacgttaacggcgaactgatggaggatgttgaaaaagaaatgtcgcagcctgtttcaggtctggttctcccactccgctatctggctcagtgcggtactgattcagtacaacaccagatcacaccagaacgcctgagagaattgcattcactggagatggacccggacagccgtacaggttctattttgctcgcgctccagaaccgtaaagtacaactggaaaaactggataccaaaaatctgcactcgctggcgtcgtatatcggaaaagtattccctgatggtaaacagcctcaacttaatgatcttatcaatttcatcgatgccttcttatctactgattatatcgatcgcggcctactggtcaaagagtggcaaaaaggcaaccgcgtatcctatatcaaccggactccatcaggtgctaacgctggcggtggcatacggtcagatcgcaaaatgccacaaacaattcttggtcttgaatttgaaatagctcttggacttcttgcgcgtaagtacgagttcgatatttactcactgccgctggaaatcgagttgaaagcaaacaccatcatgaacgcagttgacgatcctgagtggctggcaacgcgcgaattgttcgtatcgatgcctggcggtcttgattattcccgcgcctgcgttattgcaacggtaaaaaccacgccggaaaacctatacgagtcacctttccgtcaccgtgagcatctgaataaagtgttgacggaaactgatcacactaccccagatccgcaggtagtgaatatcgcctgcggtcgctcatcactgcccatgccaatgaaggggaatacaagcgatgatgaagaaaaaccgcaatcagcaggtgcaatggcagatgaaccggcagcgtctgaaacagtggaacaggacacaactgaatatcatccggacccacagcaggtggagactgaatcatctgctacagatgatggcaatcaagatcttcgcgaaaaattcagcgagcaactcgctgcctcacatggtgatttcgttcctggtatcagcgaccccgacgatccgaagtgggtacacaacgattacagcccctcaaatgagggcgaaaaaacggaagtggccactgacagcgcggctgatactgctgattacgttgaccattcagaggacttttcgaaccagcacgagccaaaaaccagccattctgagccagtagcagaccaaaacgagccgaaaatgccacgaactgagccggaagtgtcgaatatcgtaccagccccacaaccggagtggcctacttactttgaatatggtcgctacgagggagtgccaaacagcgcctatcacgccgcagatggtatcagcagcaccatgctcaaggatgcacgtatcagcctgatgtatttttacggacgctatattacaggaaccatcaaacgcgaaaccagtgatgctttcactatggggagcctggtacactctcttattctggagcctgcaaaattcgatgaggaatacgctgtattccccggcatccccgccggtgcatttaccaataccgattcactgaaagcatttattcgggaatacaacgccgacaaacctaaaagtgaacaacttaaactgacgggcaaaaaagaagatttgcaggaagccattcgcgccgtcaaacctgacgccatttttgccgacgagtatgaacagcaatggctcgaaaatatcggtaataaaaccatattaaccggagaacaactgcgactggctaaagccatgcagcaggccgtcttatccgattccgtcgccgggtattatgttaattacccttcccgctccgttgaagtgagttatttcggcatggatgaagataccgaaatggatgtgcgcgttcgtcccgaccttgaaatcactgtcgataacgagcgcattggtattgaccttaaaacaatcagcatggggcgggtacgtcaggatgtattacgtgcaagacttcaccgggaaattattgaccgcgattatcacatcagcgccgcaatgtattccgatgttgccaaccttaataaatttttctggattttcgtcaataaagacgagggttatcactgggtggcagtcgttgaagcatccagcgaggaaattgaacttggcagacttgagtaccgtaaaacaatgcagtcactgaagcaggcttatgattccggcgtctggcccgcaccaattacagaacaatataccgacaacctcaacgactacgaccttcgccgtctggaaattctgagcggactggtataa

SEQ ID NO: 389161 - DNA, 315 bp, Salmonella enterica
atgagcaagataactgcattacccgtagagcgcgaccagtacggctactggactcacccactatacgatgaattttgtgatggccgtgaggttatatctccggacgattttaatacctggttggaatctaacggcctggaatggacagtaacttaccgtgatgaggaaattctcgacccggatgtggacggttacgacatttcaacatggcaaccagaaacgccagcaggtgacggctggtttgtcggttccattcacgacagcgaagacggcgcggtctgtatctggctacgaaataaaggcggtgcagcatga

SEQ ID NO: 389162 - DNA, 405 bp, Salmonella enterica
atgacaatcgacaaacaggcgctgcgtgaagcggcggagaaggttaattctggtgaatggagttatgaagagtttaacagactggaccttccgggcagcgcacacatcaggattaatggtcgtgatgctatttactgcctgaaaaaaccagtaggcggagttgagcaatcaagggcggtgacggctttcatcgctgcatttaacccgaaagttgcgctggcgctactggatgaggttgaagccgcagagcacacagcggcagtagaccatgaagcggcgtgttctttggtcgaagaaaacgaagaactgaagcggcgcattgccgagatggaaagtaaaagcggcaatctgcgaaccattgcgcacgaacagaacgagttagctatcagcgcaacgctgaactga

SEQ ID NO: 389163 - DNA, 258 bp, Salmonella enterica
atggctactttgacgaaacaggaaaaagcctgggtaaagaaactcaataagctactggctgagtgcccctctgatcggatcgggtttgcgaccataggcgatagtgatgtgtttatgtttgatttgacgcgttatgacgaaatcagcagcaagctggatagagggggatgggattttatgccagccgctcaacatatcggcgctaagtttgatgaagtgctgaccttccctaaccaagttgaaagcacagcaggatga

SEQ ID NO: 389164 - DNA, 753 bp, Salmonella enterica
atgaccactattaccagagaacaggtacaaaaaattattgatgctgccgacgaggtcatcactgcacttgctggtactaacgatgatttttaccccgataacagtacaaatatggtccggttgtacgatgacctgaatgatcgctatgccccgccagaagttgtgcgcgaactggcgcgtatcgcgctggtatcgcttaccgctgaacctgtggcgtggcgattgatagattctccagagtcatcagttaccgttacggataatgagaaaatggcggcgatatggaagcgaaatggcaggaacgtgcagccgctatactctacggctcatggttcggctgatgccgtgggaatggttgtcagtgagggtaggcagccatcggcccacaaccctgagagtagaatatttgaggtgctcgttgagtcaggatatgagcctgtgccaggtgacaagctctacgctgccccgccagcgtcagaacgcgaacgtattcgccatgagcacgccgagtggtcagatgccacgttcggcgatgttggtccagtcggtccactgaaacatctctcgaaagaagcgcttgaggccgctgctgaatcagacgacctgagcgaatgggctgacatgcaattcttgctttgggatgcacagcgccgcgctggcataactgacgaacagattacccaggcgatgattgaaaagctggcgataaataaggcgcgccagtggccggagccggaggcaaataatgagtga

SEQ ID NO: 389165 - DNA, 534 bp, Salmonella enterica
atgcaatcaaaaaactttctgatttctgaattcaaagagtggctgcaaaatctccccgagctaaacatcgttaatgatgccacagctcgtaatctacgcgactcgtctcttcgccttctaactgtgcttggtccagatggcactgacggggatatccgtgattacagtgttgcctctatggcagatacttacgcccaatccgctgaaaccaaaccatcagactctagcttgcaagcatacaaaagccgaatgcaaagcgctgttgataagttcattgcttatcagaatggtgagcttgatgctgacaaacagattcagcctgcgaaaaaggagcgtaaaaaggtggcgcccaagaagaaaccggtagttgaagaacaggttggcgttaaaacattcgaactgccaattccattgcgcggcgaccttatcgtcaccattggcaacttgccccgcgacctgacaaaagatgaagccaagcgtatcagtctgattgtggaatctttcgcgatgattgatggcggcacaaaagaataa

SEQ ID NO: 389166 - DNA, 135 bp, Salmonella enterica
atggctcatgatgttaatcgcgatgacttcatctacgaacacgacaagccggtttatgtgcgcagctactgccgcatccgtttcggtgaactcgaaaatgttcgtcagcacttccgctcttatccgacctgctga

SEQ ID NO: 389167 - DNA, 774 bp, Salmonella enterica
atgtcacttgcactgcatagcaaactgaatgaaacgcttgagatgcttacttcgcatattgatgaagggcaacagttagatgcttttacactaaagcgagtggtttctggagcaagtaaaatcccagatgagcccgtgaagcttatggtgttggctctggcccatggagctgcacatcaacacagtgaggctgtcggttttttccgggaggcagttgcatatcgtgacgaagcagtagccaggaattatctctcttatctcagttataccgggcagtatgaattgtatcgtgaagaggctgtgagactggctagggaaattactagtctcgctttgtgtgtacgagccaggaatgcagcctatgcggacggtgatggtgaactatcactcttttttgctcgaaaagctctgtctatgattggaagcgatagcgagcgagaaagcatggagtcagatgttatggaaaaaaaacaggcattagatgcattcataagtgtgactgatttaagtacaaatgaaataagtcttctttccagaacaattgctaatgtcgccaaaaattatggtgttttagcaatttcacatgactacgtcgcaagcccggaaggggatgcgggcatagtttgtgatgtgttatgcgaagatgctgatatgctttccgatatggatattgacgttgctactgaaattgcaatgaatgaagtcttcgctggaaaaaatgtaacagcttggttccgcgggcgtaatcggcaggagattcaattcacaatatga

SEQ ID NO: 389168 - DNA, 549 bp, Salmonella enterica
atgaaaaacggtgtaaccattcgtgccgataatgctcagtccattctcgatgcgctcaaatcgttgaccaaaaaagatgttctggtcggcatcccggcggaagacagcgatcgggatgatgtttcgttcggtaatgccgggattgggtatatcaacgaatacggctcaccagcgcaaaatatcccaccacgtccgcatcttgtacccggcgttaaatcagttgaagaccagacgatgccacagcttaaagctgcggcacaagccgcgcttgaaggggacgcatcgggggcagaaagagccctcaatcaggcggggtcgttggcagctaatggcgtcagagggtacatgaccactaccggctttacaccgcttgctgacagcactgtaaaagcgcgagcacgtaggggacgtaaaggggcaagtgcggagctagcccggcgttctgccggtgaggcaccaggcacagatctggcgaaacctttaatcgatacagggcagtaccgcagggcaatcacctatgttgtgagggataaagatgccgactcttga

SEQ ID NO: 389169 - DNA, 171 bp, Salmonella enterica
atgcataaccaaaatacatgcgcttaccacctgtgtggaaagccgattgagcaaggcaaagaagtaaaaagtccccttctctatcgcaaaggctcgcaactggcgcgcaaagaaaaggaatattgttccaggcagtgcgctgaatacgaccagatggcgcacgaaagttaa

SEQ ID NO: 389170 - DNA, 633 bp, Salmonella enterica
atgacgttaagaagcaaagctaaatcctgcggaattttcctgggaaaatgcatttgtttcccattcaaagaacaccaagcgacttataatataattattgcagttgttactgccctaacgttagtttgggcagcaatgacataccacttgttggatcaaagagaaagagctaggacagagctttatgaaattaaggaaagaataaaaaactccgaatcaacaactgtaaccttaaacactgtattcacttcagacactgataatggatactacatctacccaacagtaactataaaaaatgttggtaaggaaaaagtttctttattcttagatgacgatgcattaacaataaagagagtatatttaaaaaatgataaaataattgctaaggaatcctatacgccaaatttctatgaaaccatatcatctgacccatcaattaaaaatacaagatttcgaataatggaaattccggttgatggggaaagaaaaattccatatgccgtaaaggtagatagtaagggtgtgtattatataacattttcagctaaaccgtatgataaaaagtctgagcgaaaaataaaaaaccatgagttagtatggtttgcagcagaatacaaggacatcagatag

SEQ ID NO: 389171 - DNA, 873 bp, Salmonella enterica
atgaataataaaaatcaaaaaaatatttgggcattaaataaaataccccctttagaatactgctcgttatcaagagcagcaaaattactcaattgtgaaattgaggacttccttcattggcatgatgtggggtctataaccttatgtataaacttacaagaaatcaaaggtactttaaaaataaagatcgataataaaaatgcagatgaaagcccactcaaattttatttcgatgggacattgacgtttaatgagctgactcggatatataaaacatggtctcgacactcaaaagtttataagctgctaactaccaaagatggcctcgtccccccctcaatccatacaggaccgttgacaactacgtatgaactcaaatgttttatcagtgatctatggtcgatagaatccagaaatatctctattctattaaaagatgaaaaaaatgcatatgaagagagaatattgagtgctgtatctccctctgattccatattgtcaaatacgtttcaaccagagttagacgaaagaccaatcataaatctagataatatatacataacaaaagaatcaattgataaaatttatacacacgctataagtggaaagtcactaccatatatggaagattcattaaattctgatgaaaatgatgatactaaatccatctcacctcaaaaagagaaattatctaattttattaggtttttaatacagtctaatccgacgttaaataaaaatatactatcaaccacagcaaataatcggcataaaatcttgagagactacctcgatgagttgaaatcaaagggcactgatattgattatgaaattccatcttcaccgacacttgaacgctatctgaatctttaa

SEQ ID NO: 389172 - DNA, 852 bp, Salmonella enterica
atgtcagaacacactcatgccgaccccgaagtcttaactgaccataccgatgtgatttgctccaccagcattgagcgtatcataaccgggcgtaacgccgcgctgacacaaattgaatcactgctccaccggcttgctgaaatatcgacgctgacccgcagcatcggcggcaaaaccgccccggactgggccatgaagcaggatttccgctgtggctgctggcttctggagaaaccagaaacagcgatgaaagccatcacccgtaatctcgatcgcggtatatggcgtgatttgatggagaggtccggaatgctgtcgctcatggatgcccgggcccgtgaacagtggtacaacagcctggaaaaggatgatatccccgctgtcagtgaagccaatattctcagcacctttgagcaactgcatcagagtaaagatgaggtattcgaacgtggcgtgatcaatgtgttcaaaagcctgagccgggactttaagaccaacaatccatgtaagtttggtgcaaaaattattgtgaatggtctggtaaaatgtgaccggtggggatacagcctcaaccggggctggcagcgtgaccggcttgctgacctggagcgcatgctgatgctgctggacgggaagcccgttcctgataatcgcgccgatgtgacccgacacctgggtgaccacattcatgagaacagaggaagtaacagttacgaagacgggatgtttaaaatcaaatactttaagaagggaactgcccacattacgttcaaacgacctgaactggtggacaggctgaatgacatcatcgccaggcactatccggggatgctgtcggcaaatctacgttga

SEQ ID NO: 389173 - DNA, 195 bp, Salmonella enterica
atgccattaaccactgaagaaggcctgcagatcctgctctgctggctgcaggacaatactgactgcagtacggaaattatcttcgacagcgacgatgctctcaccggttccgccgcactgttgccctgtattgaacaggccctgaacgatgtccggacggtacactgcctccggcttttactttctccccaataa

SEQ ID NO: 389174 - DNA, 222 bp, Salmonella enterica
atgaaaattatcagtaaacgccgggcgatgacgatataccgccggcatccgcagtcccgcctgtttcgcttctgtaccgggaaatacccgtggtccggcagcgtctgccactggtacggccgggacgtacaggatattcgtggcgtactggccgtgtacgctgaacgtcgccgggaccatcacggcccgtacacccgcctgatgtgcgtcaccctgaattaa

SEQ ID NO: 389175 - DNA, 291 bp, Salmonella enterica
atgagaaacgatgaaacgcaggctacacccgctgatattttcagtggcgtgaccgttcttcgcctggagaacggggatgaagcagtttatatacacggcctcttcctggagtgtgctgatatcgcgcagggcgacaggcctctcactgatattgctgcacgtctcgccgggctcctgaagatcccgttcagacagataacgttacctgtcccggatgatgaggagtggtgctggaatgacattgttgatgccctgctgacaggcaccggctcaggcaggtccggcgtatga

SEQ ID NO: 389176 - DNA, 480 bp, Salmonella enterica
atggaacaacagctccctttatttgcagccactctgccactgtccgcccaacaaaccattcgggaagcactcatcctgctggaaaggcagctacgcgaacccggcgcgtcatttacctccggtagctcagtacgtgactggcttcgtttgcagctcgcttcactggagcgcgaagagtttaccgttctcttcctcgataaccagcatcgcctgatagcccacgaaacgctcttcaccggcaccatcaaccatactcaggtccatccccgcgaagtggtgaaggccggtctgaagcataactgcgctgctgtcattgtggcgcattgccatccgtcagggcttgctgaacccagcaataccgatcgtcaggtcaccacgcgtattcagcaggcgctgggcctggtggacatccgtctgctggatcacctggtggtgggtgggatggatattgtctcattcgctgaacgcggctggctttaa

SEQ ID NO: 389177 - DNA, 459 bp, Salmonella enterica
atgaccacagcatttaaccctgaactccccctcccgccagatgaaaccctcatcaccgccacgcccgtagaggacgaggaccgccctgacttctggccccgccacttccggggcattccgcagtggatattactggagccccgtatcttcgcatggacggaccgcctgtgcgcggactacagcggcggtatctggcagttttacacgctgagcaacggtggcgcgtttatggccccggaggcgaatgacggggacgaggtctggtctctgtacaacggcatgaacggcaacggcacggacatgagccctgaggctgccgggatcaccgtctgcctgctggagtacagccatcacgcctcccgtacgaacaacgacctgatgaccgcgcactattaccgactgcgggattatgcccttaaccatcctgaatgcagcgccatcatgtacatcaccgactga

SEQ ID NO: 389178 - DNA, 372 bp, Salmonella enterica
atgggactcgatgtgtatttcattaaacgtccggctgacaccacccgccgggagaaggacgaagccgtcggctattaccgcaagttcaacgccctgctcaactggattgatgccaacgccggggaggtggagaactgcaccgatgtgccgctgacacgtcatgacctggaaaaactccggggcaccctcgaccgcctcacgccggagaactgccacgacctgttcccgaccaccgaaggcttcttcttcggttcacaggagtacaacgacgactactggtctgacgtggagaatctgaaacagtttgtacagcaacagctggcgtcctttgattttgacgcccaccgcctgtgcttccacgcctggtggtga

SEQ ID NO: 389179 - DNA, 819 bp, Salmonella enterica
atgcgattagccagccgcttcgggcggataaaccagatacgccgtgaccgtccattaacccatgaagaactgatgcaggtggtccccagcgtgttcagtgaagaccgccacgaatcccgcagtgaccgatacgcttacatccccaccatcacactgctggagaatttacaacgcgaagggtttcagcccttctttgcctgccagtccagagtcagggaccccggcaaacgcgaacataccaaacacctgctgcgcctgcgccgtgccgggcagattaccggtatgcaagtgccggagattattttgctcaacagccacgatggttccagttcgtaccagatgctgccggggtacttcagaagcatctgtaccaattcgctcgtctgcgggcagtcctttggcgaaatcagagttccacaccggggcgatatctccgacaaggtgattgagggcgcttacgaagtcctgagcgtgtttgaccgggtggaagaaaagcgcgaggccatgcagtcactgcagctcccgccaccggcacaacaggcgctggcgaaagccgccctgacgtatcgctttggcgaagagcatcagcctgtcaccaccgcacaggttcttaccccccgtcgccgggaggattacgggcaggatttatggaccgtctggaatacgcttcaggaaaatttgctgaagggcggtcttcctggtcgcaccgttcagggtaaacgtacccacacccgcgcgataaacggtattgatggcgacgtcaggctcaatcgtgccctgtgggtgatggcggaacagatgcagcaggcgatgagctga

SEQ ID NO: 389180 - DNA, 411 bp, Salmonella enterica
atgaaagcatttatattgtcattaatggtttctggttttttattgagtgcctcagccagtgctgctacggttaaattgccccggacagtgactgatgtgaaagacggcagtgggctgatgtgcggaagtgaagatgtgaaagacggaacgtgcagcctcgtcagtgtctctgatgatggccactatgcgctgttaagtagcccggggggcatggcctgttacgacccttatctcatcgtggtgaaccttgccaccgcaaagggaaaaatgatggactataaccgtcatgcgacatgcagcggtgaggccaccgctaagtttgtccgttcaccggagaacggtcaccttactgtcgttatttacgatcccaccatcaaaaagaatgtcgggcttaatactattgatttttaa

SEQ ID NO: 389181 - DNA, 147 bp, Salmonella enterica
atgaaaataagacgtatcacacccggcaatccgacttccggcaaacgctgcccggactgtggctctcacgacaccattccctgggccgatggctggatgtgccgggactgcgggtgtgagtggggcaaagataacggttatctgtaa

SEQ ID NO: 389182 - DNA, 315 bp, Salmonella enterica
atgacaaaatttacccgcttacagatacaacttcactggctgacgctggtgttaattgcggtgacttatgcagcaatggagctcaggggctggtttcccaacgactcaacagcttaccttttcatgagggaaacccattacaatgcaggtattgtggtctggcttctgatgtttttacggctggggctcagacacaggtatcccgatccgcacattgttccctcaccgccacgctggcaaatgaaggcgggcagggtaatgcaatcgttatgtacatcacttttctggcattacctttactggggatcgctctga

SEQ ID NO: 389183 - DNA, 225 bp, Salmonella enterica
atggcctttaacggtaaaagctggatttttctggggatcatcgtttctccttttgtgacgcccaatcctgtagttaaatcagtactgaaaagtattcacgaaatactgggcaatgccggatatttcttcattgcttttcatgcgacagcggcgttgttccatcactatgtccagaaggacaacacactgctcagaatgattccaggtagcaaaaagacgatataa

SEQ ID NO: 389184 - DNA, 402 bp, Salmonella enterica
atgtacacaccttatccctttaaccccagatatacgatgagctggtttctgctgtctctactcaatgaccacctgaatcagctactgaaccgatactcccgaatacaggcactcagactcgacctgttctatcagaaaggtacagaacgctttaaacattattcatggaacgaaaccgagcgagagatgcgcatgctggttgaatgcaccctgcagcacacaaatctggcagggtatttctgggtacttgagaacgctatagaccacggatgccatgcccatatcgtgttctatctcgacaggcaccttaaccaggctacctacccaatagctgacaatatggcgggaaataacgcaacgagaaggctattacaaccgcttcgagtacaaacccacttatga

SEQ ID NO: 389185 - DNA, 267 bp, Salmonella enterica
atgacagaacaaatttctttgctcgatgaccaactggtggatatgcgcttcatcacgaagctgacggggttgacggacaagtggttctacacgctgataaaagacggcgtattcccaaagccaattaagccgggtcgcagctctcgcaggcgacagagtgaagtcgaaacctggctgcaggtccgcattgatgcatctcggagggagaattcagccccggcaacgacccgcagacttaccacaattgccgtggaggtggagccatga

SEQ ID NO: 389186 - DNA, 573 bp, Salmonella enterica
atgaaaactccgcattcccgtcatgacttcctgttgcagcattaccagcgctggctggacgatttcacccgtctggctgtacggcatgggttgtgtcacccgaacatccgggccagtcatcagctcaccataggttcgctccgcttcacgggtacggggcaggtcactggcgtggtacctcatgctctgtaccggttgttctgcggtaatcagcctccggtcatcacggtgacagaggacatgtccacccggctggattcagacaccacactgctgcttcaccatcccatgctggaaggtatattgctgagtgaatgtgcccgactgaagcagttcccggtacaacgggcacagctggtggtgctacaacggctgaccagccgggaaatccgacacaaaatagtctggctgtgctggcgcgatttgatgtgcggggatgacccttgcggctggctggagcgtctggtcggacagccagaagacgcgctgtatctctggctgagtgaccgccaggatagtgatcccgttttaaccctgatgatggatgaatacctgctgtttaccggcaactga

SEQ ID NO: 389187 - DNA, 189 bp, Salmonella enterica
atgaactcaaccatttttaccgcgcacggtcaggcctggcttgatgacctcacccgattgcaagtcactcatggactctgccagcctgaaattaaaaagtggcacaggctgaccgcgacaacctgcacgttaccgaacggacttaccggattgctcattatcccgcagtttttgctgacggtaacgtag

SEQ ID NO: 389188 - DNA, 399 bp, Salmonella enterica
atgcgcatgctgaaatgttaccttgccaataatcgtgatgggcacattgtgactgctaaagacgcgatgcagtcaccaggcagtgcatggacctgctcttcctgcggctgccaggtcattctccacacgggttcatctggtgagtcacccaggtttgaacatgaccagcgaaccgtgacgacgaacgttctgatgcaatgtacctatctcgatcctgaagtgaaagccgaagcccgatgccaaaaactacgcagtatcattggcaatctggatgcacctgtaatggtgctgttctggcattgcgtgtggtgcggaaatcattacagtgggaaaaagcattgcacttcatgcggaacaggcatctacagtatcgaagaaactgaagcaagaattacgtga

SEQ ID NO: 389189 - DNA, 1404 bp, Salmonella enterica
atgataatatatcgaagtgaaaaggattctatgggggcaataaatgtccctgaaaatcggttatggggagcgcaaacccagcgatctcttgagcattttcgtatttcaactgagaaaatgcctgtttcacttattcatgctctggcactgtgcaaacatgctgcggctaaggtgaacgaggacttgggattactatctgcggaaaaatctgccgctattatgcgggcagcagatgaggtattagctgacaggcaccctgatgagttcccgttggcgatctggcaaaccggttccggtacccaaagcaacatgaacatgaacgaagtactggcaaaccgcgccagtgaattgttgggcggttcgcgcggcgcaaagcgtaaagttcatcctaatgatgatgtgaacaaaagtcagagttcaaatgacgttttcccggcggcgatgcatgtcgccgcattgctggcattacgtaaagaactactaccgcagttgaaagcactcatcaaaaccctgaatgagaaatctcattcctttgaggatatcgtcaagattggccgaacgcatctacaggacgctacaccgctgacccttggtcaagaaatctctggctgggtggcgatgcttgaacacaatcatatccatatagaaaacagtttgccgcatttggcagagctggctttgggcggtacggcagttggcacaggattaaatactcatccagagtacgcacgtcgggttgccaatacactggcagtgatgactggtgcaccatttctgacggccccaaataagtttgaggcgttggcgagctgtgacgcactggttcactctcacggtgcattaaagggactggctgtgtcgctgatgaaaattgttaatgatgtacggtggttggcgtcgggaccacgttgcggtatcggtgaaatttcaattccggaaaatgaaccagggagttctattatgccgggaaaagtaaatccaacccaatgcgaagcgctggcaatgctgtgttgccaggtgatgggcaacgatgtggctatcaacatgggaggagcttccgggaactttgaactgaacgtttatcgtccgatgatcatccataattttctgcagtctgtacggttactggccgatggtatgaagagctttaatacccactgtgcggccgggattgaacccaaccgtgagcgtatcggtcagttgcttaatgagtcattaatgctggtgaccgcactcaatacccacattggttatgacaaagcagcagagattgccaaaaaagcgcataaagaagggataaccttaaaagcctccgctatggagctgggttatctcaccgagtcagagtttgatcattgggttcgccctgaattgatggttggcagtgtgaaactatcgcgttaa

SEQ ID NO: 389190 - DNA, 1368 bp, Salmonella enterica
atgcttggcgttgttcttgcaattattgtaaccggactggttatttttatgctggcgaaaggatataaacctcagccagtattattattaggtgggctattactgatggggctcacggtggtatttgacctgggaacattattaccggagaagactactacccactttcaattttttgatatattcaaagtattcagtgatattatgagtacccggttggccgggctcgggttgacgctaatggccatagcaggtttctctcgttacatggatcatgtcggggccagcaaggcactatttgctgtatttgaaaaaccgttgagatcggttcggtcgccttatatgttgctggttgtcgcttttctagtgactcaaatattggttatttttattccaagtcatgctggtttaggtatgttgttgatggtaaccatgtatcctattctgattcgtacaggagttagtcctttatcatctctggctgtaattggaacctgtcaatttatcgatcacggtcccggctcaggtaatgtcatcatggcggccaagacggcaggtattgatcctgctacgtattttgtttatcaccaattacctgtcacttttcccgtaattattgcagttgctatcgcacatttcatcgttcagcgctggtgggataagcgcgaaggctttgtattcacaaaggatacgctggataaaatcgacgacaatgatcatgcccgccccccgctgatttatgccttattaccggtggtaccactcgtgcttatcattgggtttagcccaatattcaaatcattcatcaaaatagatgttaccaccgcaatgattatcagcactatcgtagccttaatatttgaatatttccgcctgaaaagtgcaaaagcagtaatggatagttttatgttgttctttgagggaatgggcaaacaatttgtactggtggtatcgctgattgtatgcggcgaagtctttgctaatggtctgctccatatcggggccgtggacacaatgataactgctgcacaaaatgcaggattcggtgtcggatctatgatcgttgtgatgagttttatcctggcacttgctgctttcttgatggggtctggcaacgctgcatttttctctttcgcagccctcaccccaaaaatagcggcctttctaaaagtggatgtagtcacgctcattttaccaatgcaaatcatgacgagttttggtcgaacagtttcacctataacagctgctattgtcgctatctccggcattgcaggcgtgtctccatttcaggtagttaaacgcacggcaataccgatgggtgtcgcagccattgtaaatctaataatgacatttatatatttgggatag

SEQ ID NO: 389191 - DNA, 1092 bp, Salmonella enterica
atgagagccagcaccatcattttcgattccattgcaacatggcgggatgcccgttcgcgcagagaaacagaacgccttttaagctatggagctcgcggtacagagaccgcatttgcgctggaggaacttgttactgagttggagggaggataccgagctcaattattcccaaccgggcttgcagcaattgctgtgactacaataagttatgctcatgcgggcggacacgtattgtttgcggactcaatctatgaacctgtacgtaagatagccagtagttttttggcaccaaataatattagctatgacttttttaaaactgatggaagtgatttcgaggctaaacttcgcccggaaacacagctggtttttgctgaatctccgggttcccttctgtatgaaatgctggatctgccgaaactgtgcggtattgcccatgcacacaatattccggtagccgttgataatacctggggctctgcctggttatacaacccgctggagcttggggcagatatttctattatcgctgcaaccaagtatctgagcggtcactctgacgtcatgatgggcattatggtggcaaacgagagcgcatggaaaaagattggcgctctccctgaggcaatgggtcagattagcagtcctgacgatgtgtctctcgtactgcgtggaatcagaacactgggtacccgacttgctgctcatggacaaagtgcaatgaccgtagctcagtggttacagaaacgtccagaggtggagaaagtttattttccgggtctggaagatcatcctcgacatgatttgtttaagcgtgactgtaaaggacttaacggtctgttgaccattgaactgaaatctcagtatacccagaaaaatgctgaagccttcatcgatgcgctggagctttttggtataggggcctcttggggcggttttgaaagccttgtattacctgccaatgtgaagggggctcgttctgcaactgactggaaccaacatggtcagtttattagattccacattggccttgaagatataaatgatctactggccgatctaacccaaggactaaataaactgaatgcctga

SEQ ID NO: 389192 - DNA, 1365 bp, Salmonella enterica
atgtcaaccagcgtttttgactccgttttactaaaaaatctttggtctactgaagaaatgcgtcagattttttctgatgatattcgcatgcaaatgtggctggactatgaagccgcgttggcggtagaacaggctgaaatggggattattccgcaagcggctgccgatgaaattgttgcctgtgccagaattgaacgtctggatatgggacttgttctggaacaggttcgtctgaccaaacatccactggttccgactatcagggctctggaagatgcctgttcaggtgggtttggtgaatatgtacactttggcccaactactcaggacgttatggatacaggcatggtacttcagtttagaatggcccataaaatcatcctgcgcgatataaaggagatttgtcgttctttactggagctgtcagaaaaacaccgaaacacaccgatggtcggtcgtactctggctcttcaggctattcccataacgtttggacataaaacagctatctggcttgcagagttaatgcgtcaccacgaaagacttatacagctggaaccgcgtttatttgttggtagtgttgtgggtgctgtcggaactaaagcctctttcggtgagcgtgctgacgagcttgaagagcgtgtactgaagagacttcaactgggtgttccagaaatttcatggcagccagcccgcgatcgcttttgtgaatacggcatggtactggggatggttggggctactttgggtaagatcgccaatgaaattctgctgttggctcacaatgaaattgacgaagtggcggagcctttcggtaaaggccaggttggttcctccacaatgccacataaacgtaatccagcaataactgagaatgcagcctgcgtcagtaacacactgaaaggcaatattgcaattttacttgatttaatgaaacaccagcatgagcgtgatggcgctatctggaaaatggagtggaaggttttaccggaaatttgtctaatgctgtctgttattttggataacatgaaatacaccctggctggtttacacgttaaaaaagacaaaatgcgcaaaaatctcgatattctcggtggttttatgctggcagagcgcgtcatgtttgaactatcagagaaagttgggaagcaaactgctcatgaactggtgtatgaagcgtcaatgcagggtctggaagaaggagttactttctctcaggcgttgtccgaagatccccgtattaacacagcaatgaccagagaagaacttgaagctgttctcgaccccaccacctatgtaggtaatgctccggaacaggttgacaaaattattgctcaagccaaatcctgcaactggctcagctaa

SEQ ID NO: 389193 - DNA, 1389 bp, Salmonella enterica
atgacctatagcgaaaaactgagccagtttatttactctaaccattttgatgcgattccacctcatgtcatttcccgggcaaagattcatctgttggatagtctcggtgtggcactggctgggacagtacaaaacaacgccatcaatggacggaatgggctgcataaaatgcccaatacacaaggtaagtgtcgagtatgggggagctcctatacgttttcccccgcttacgccgcactggcaaatggaatagctgcgcatgtgctggactttgatgatacccatacagactccattacacatggcagtgcagttctggtcccgttggtgatagcgcttactgaagacttaaacctgaatagccgggagatgcttgctgcatacgtcactggctgggaaatagcagcgcgtgtagggcttactgcgaagggaactttccacaaacgcggttttcattcaacagctattgctggcatctttggtgcagtcagcggggcagcttcattactgaatttatcgccaatagcttgcgcgcatgcactaggtctggcaggcagtcaggcatcagggattgctgaatatttgacgaatagttcttcagcaaaatgttttcatgctggttgggcggctcattcaggtattttgtcagcctatctggcagacgccgggatgacaggaccactctctgtatttgaaggacgcttcggtctattcgcgacacatggtatacaaagcgagataaacgcagcagatgtctgccaggagctgggtgaacactgggaaattatgcgcgtctcggttaaaccttatccttgctgtcattttgctcatgctactgtcgactgcgctcgaatgttaatcagagacggcatcaagcccgaagaggttaagcacattctctgcgttgttgacccgatagcctcagccctaatttgtgaaccaacagatgacaagttttccccacaaacaccttatgcagctaaattcagtctgccttatctcgtagcgtcaggcatgatcgatgatggtttaagcctggaatcattctctccagaacaactgaacaggatcgacgtactggaactggcacggaaagtgtcttatcgctatagcgaagaaggagaaatcccattccccgcatacttccctggtctgatttctgtaactctgaaagatgggcgagaaatgacaaaacgcctgaatgtgaattatggcaacccagagaatcccatgaaaaatagcgatgttgaacaaaagttccgtaacaacgtcagagggatcctgcccccccaagccactgaaaaggtgatacagctggttgcggacatcgaaaatcacccggtaactgaactgacacagtggctgacaaatactgttaactctagatag

SEQ ID NO: 389194 - DNA, 876 bp, Salmonella enterica
atgccatatataaagcgtccgatacctaaccttgaactggacttactacgcacgtttgttgccgttgctaacggtaacagttttgctgcagcggcagaatcggtattccgtactcagtctgccgtcagccagcagatgcagcgcctggaacaattgattggtaaagaattattcagccgaaatgggcgcaataaggcactgactgaacatggtgtaaaaatgctaggatatgcgcgacgtatcttgcggctaaatgatgaggcttgcctatgtctgatgtatgaagacgtggacggtgtgctgcgtatcggttcgcctgatgatacagctaatactattcttcccgatttgctttcccgcttttccaaatcctatcctaaactggcgattgaaattgttgtcaaacgtagtccattcctaatggatatgctgaaaaatgatgatgttgatatggctatttcaacggttgattgtgttgattttcctggttttgtactgagaacatcgccgtcattgtggttttgtggtcagggctacaaattaaaccctgatgagccattaccattagtatccctggatgaacccagtacttataggaatatggcgatcaatcagcttgatctggctgggatcccctggcgaatagcctatgtggcaacaacactgtctggtgcaagagcagctgttgttgccgggttaggtgttatggctcgttcaattgaacttttaggggatgatattcgagtgttgggagaagccgatggtttacccaagctacctgacattaaatttaatttatacatgcgtcgcaacagcccgcagaaagcagcgaaagtgttgtttgaatcgctgcttggagagggcgatgaggtctag

SEQ ID NO: 389195 - DNA, 525 bp, Salmonella enterica
atggagtatttaaacgatgagctgacagaaatgcagcaagtaaagcgggtagttcagcaggccaccgaccagtatccacgccttgtggcatttttgttgacattacctggcataactccggaagcagtacagcattttcacgacgttgtttatcagcagataagggaactggctgtcacccgccagctaagcggcagacctgtgcagccgacggtactgcgctggatttgggggaccccgccaggccagacgggcaggatgttactgctgctgaataaggacaccttctgtcatccccgttacgacagaccaccggaccgctgttttgaaacgatggagacgctgctacgggatgcggttagtacgataaatgatgtccggcaccaccggccgccagagataaccgtgttcagggtgaaccgaacccgcccggcgcaggcagacgcgcagtacagccgccttcgggaatgtgccctgtcgctgccccccgcagccactgcccgtagtgaacgcatcagtccctga

SEQ ID NO: 389196 - DNA, 585 bp, Salmonella enterica
atgtataacccttgtaatgaaataacgcccctggttgacgtgtaccagcgctggcttaacgaccacacccggcttgctgttcgctatggcatcagtacccgtaaaacacaccaatggcatactctgacgaccaccggcatcatgctggctgacggacgacaggtgactatggttgttccgtcctgtctgctgtcggtttcaccgacggtgagggcgtcccggaatgagggtactgtttctgtactggccgatatcagcagcctgcgggcttatccgcagttagccggtattctgctgagtgagtgtgtccgcctgcggcttgatggtttatatgccggtcttgaacaggttttcagccgtctgaaggagccgagtctgcgggagtccctgacgttgctgtgctggtacgagctggtgaatagccggcaagattgtaactggcatggcctggtaacattaaatgaacgggaagtgagtgcatgggtggcaagccggttgtcgcagtatccacttctttacagcgtggtggatgaatacgtgttcttcgccagctttggtttctggtctgaagccccgccatgttaa

SEQ ID NO: 389197 - DNA, 3618 bp, Salmonella enterica
atggcagtggaaaataaattcaaaattaatgttattgccgcgtcagtactgatggggctgagtttgtcagccatgacatctgcagtggcggccgaaaaaaaagaggcagaagttgctcccgcgcctgccaaaaccaccctcgcggaggcggtaaaggctgttaagccaggcgaagttacattcgatattggaagtgcaggtgataacccatcccaaaaagatagtctgaaagacctcattgcgtacctgggtgatgagtcagcccctgctcacgataatggcattagatctgtcaactatgcacgcggagaactggttggtaaatataagcaggcagcggcaggacaagacactaaggcaacggcagctgcgctacagaatcttgttgcgtttaaccgggctaccgctgccgcaatggtgaagcttgacaccgccgcgctggatagcgccgtgaaagataaacaagccgctgccacaaaagtcagtaatgcaatcagtgcagagctgaagaagttgcctgacgctgacagtaaagccaggactgcatatgaagcggcgatagctgattttctgaaattgtctcctgaagaccaggctaagcaagataaacaaaatgtactcaagacagaactgacaaaagtaggtggtccgctggtttcgggtgccgtaatcaacgatatactcgctaacggtagcgtcaccggtggtttcaaaacctatgatgaactgttagcgcagaccaactcgggtaataataaactggcaagtcatgaggcgcttatcaagaaacagggcgagctgagcggtgcgctgagtactatcactggtgcccgtgagaacctcgccggcagcatgaagactctcgccggcaatatgccatttttcactcctgaagagcagaaagacgcccggggaacatatctgaccgcgctgaaggccatcagtaaaccagcaaccaatgcggacagccagagcaaagccgcgaatgccggacatgtcacgcatattctcggcagtctgaccgctgatgagctgaaggagtttgacccgcttaccggtgaatataaatccgtaattgttaatgttgatgataaaggtaacgtcaccggtgtgaaggataactttacccgggatgacctgtataccggtacacaggataaaccatttaccaccactgttctcgatatccgtgccctggagctgggtaacggtgcgcttgctgataccaacacaatcacagtgggggaagccggtaccaaagacaagaaagccactccggttgaggtctgggctaaaactgccgatagcgcaggtactccggcggtaaaactgtccggtgacctgagaaccgccaccgcacaactggatgagaatggcaagacggtggacgggcagattgttcgtggtgctgaccagattcatctgcagaacgtcaatatccacaacagcttcacgcttgctgataaagtgaatatgctggccgatgatgttgctgcgctgaaccagcaggccagagataaacttgcaacagggcagtctgctgaggctgttaatcagtggctacaagacaagaataattcactgaacactaaatacgacggacttaaagtgacaggcctgcagattgccaccaaaacggtcaatccgtcatttgcccctgaaaagggggcgtttgttaataaagacgctactaaggctctggcagacgccaacatcctgctggataatctgaacatcaccctgcagaacgacagcgtgaacggcacatcaactgcgattgccctgtccggagccagcaaccacattctggctaccggtggtgtgtttgatgccggtaaagcagataatctgacacaggcaaacgcccttgatatcactggtgaacataacatcgttgattttaacggttccgttctgaaaggcgatattcgatctgataaagaaggtaacaccgttaatcttaatggtggcagtctgaccggtaatgccattgccaacacaggtaacctccgccttaatctggaccacaatgtctggacgggtagcgcaggcccgaacggcccggatatcagactgagcaacaactccgtctggaatgttaaagactctggcggcataccgtctgtcggtgtgacaggcctccattcttctgtctattcactggttctggaaggcagtaacagtattaatctggttgatgctgacggactggcacaactgggcggacatggctttgcaggagcgaagtctgctgtcaccctgaatgtcgatacagacctgaaaagcgatggtaagggtgtgacttccgttctggtcgggacttactcaccaggtagtattcacagactgacaaacatcgggctggcagatgcagattttggctataatggttatcagtttggcaccctgaaagttgacggtctggcgactggcggtaagtacgccctgtccgtggaaagctccggtgctgagccgtataccgtcggtggtcgtctggctgatggccctgacgcgaccagcgctcatgaattcgtgtcatacaaaacggctgaaagccgcaccgttacgggcaaggatggtaataccgttgctcagactgttaagtctgacgctgacttcaccagtctgagtgctccggccgagctgggtgtgtaccagtacgccgccgagaaggtgatggacggggtgaataaccggacaaacatttactacagcagcacaggtaagctgtccaacagtgctgccaccgtggtttctctggctgcagccccggttgatgtggctaacctggagtcagataccctggcgaagcacatgaacagcgtgcgtcatggtaaggattccggcgtgtgggtgtcctactttggtggggagaaccgcaacaccacagcagcaggtccggaatacaccctgaagactaacggagtcatgctgggtgctgacaccctgacggaaaacaactggctggccggtgtggcggtttcttcagcccgctcagacatgagcgtgatgaacagcagcggtgacctgaacagctacggtgcgcagttctacatgtcccgtcgttatgacagcggtgtgtttgtggacagtgcgctgcagtttaaccacttcagtaatacggccaaagcccgcatgactgatggtcagcaggcgaaggctgacttcagtggtaacagctacggtctggaagctaaggtgggctacgcctggaacagcgaaggattctttgctgagccgtatgtccgtgctgcggcccgtgcctttgacggtgagcattatgccctgtccaatggcatgaccgtgaacagcaacgactataagtccatgttgggtgaagtcggtgccgacctcggataccagtatgacatcagtggcggttacgtgaagccttacctgcacctggctgcgctgaatgagtttgctgacggtaactccgttcgcgtgaacaatgtttcactggataacagcgtgaaaggcgccgccttccaggcgggtctgggagctgaagtgaaggtaacggataacctgggtggatatgcagcctttgattacacgaagggcgataacaccgagcgtccgtggcaggcgacggtgggtgtgaactacacctggtaa

SEQ ID NO: 389198 - DNA, 279 bp, Salmonella enterica
atgaccggagaatggaaagttaatccacatatggaaatctgtaatctgcctgacgatgttgccactctgtttactgaggccactgagtcgctaattggcgcagaatatagcccggttctttatccgggaaagcagttggtcagtggctgtaattatatgttcatttgtaaacagacgctcatgactgtgcaggctgagacacatatcgtgaagatggtaatccataaaccagaaaactccggacaatcgacagtgatttctgttgagtcattgttctga

SEQ ID NO: 389199 - DNA, 795 bp, Salmonella enterica
atgacgggatgtaaccggatgccggcccggcaggtcattattcacggtgactgctggcctgtggtgagtgccgtggcacatctgagccgggcagttctgcccgggtgtgagtgtgaaaccacgtacacactgcctgaactgctgcagcaactgcaccgaaagccggaggcaatgctggtgctgtgcctgcgtccccgtgaacatatttttttgttctatgcccttaaagaggtactgctgtatcatccggccctggttatcagcgatgaactgctgttcagtgaccgggtggttctgcacaactggggggagctgccggcggtactgcaccaggagctcaccgtcatagtgacacgtataaggcagcacgaaaaactgtcctcccgggttaaaaacagactgaccagttttctggctgaccctaaacccgccacaggattattcgcagttccgctgatttttaatcacccgaagcgtctgatgaactacatggccttactgatgttccgggccaccgtaaactgtggtatcacgcctgagcagcagaagttgctggaggaggtttataaagggcagtactcactgtcggaaatgactgatgtactgaacaggaacaagaagcaaatctggcaggataaatatcggctgctggtaaaactgggcatgaaaaaccgactgtatgaacttctctacggcacccggttctgtccggaaaaacagcggaccgctttcattcctccggatgaaataaacaacacgtacggatttgaagattccgggcgtcaaaaagagtaa

SEQ ID NO: 389200 - DNA, 507 bp, Salmonella enterica
atgtgccctgacaatacacacagaaagaagcaatacacggcagcggataatgacattcattatcccggacagacaaatcatgatgcctgttttattccggagagtgttcgccgttatgccggcgaacccctgtatatcatcgtggcgcactggtgtcagcagcaacaggactgggttcagcgcgggcagatatctgaggcctttcacattactgcgaggcgggccagctacctgatgtcctacctgagaaataaagcctcgcgggtggtctgcgtctgtcgccaccagacgttgtccaataaagcccggcgctatgaaatttttgtcgtacgtgttcttgaaaaccctgagccggcccggcgggaaaggaccttaacatcacaggtatcacgtcgtcgggtggggaatggtgacagtacgcaggcgaatgaactgtggaaccggctgtgcagcaacaggaacgcgggaaaaatactgaaaaaggaggatgaggatgacgggatgtaa

SEQ ID NO: 389201 - DNA, 1206 bp, Salmonella enterica
atgattaaggccgggaacggaacaatgaaaacaagggatgaccggccatcgtctgcgctgagtcgcagactgaacctgccggcgctgctccggtggctgctggtggtgtttgttctgaccggaccggggtatgcatatgctgcacctgtaatacagtgcacatcaaatggctccggagtggtgcaactgaaattacccccgtcagtcagttttacgacagcaaacgcccctcccccgggcaccgtgctgtacacaggtccggcgtataccattccctatgaatgcgactattccagtgccgggagttacccccttcaggtggtgttaggtattgttgatgcttctggtggtggcaaccttgacattttaaacgacaccctgaaaaaggcgcatctgaaattagagattctgctgtctgactcatccggtggtggggaggtcacctgggagccgtcatcagcacaacaatttgtgaattttggtgctgtttactacctgagaaccggcccaagaacagtgagtatcagactgagactgacgacgacagacaaaatagcacccgggctttatattatgccgccactgtcgcttttcaaaatatatgctcatcgctctaccatcactgagcccggtatcaccctgggtactccgatggtaaggatacagtatatcccggtctgtttcgtgcagacccgtctgagtacgaacagcatcagtttcgggccggtcattacgacagatgtgaacaacagtcttgacctgcggacttctttttctgtcaccgcgaccacggacgaaaactgtgccccggacagcaatcttctgaagccgtatacagtcaatattcccggagacccgcaaagcctctattatcttatcctgcccctgaaagtgtcttttattctgaacagcggtggagaaatttccggggacggaaaatccatcgaactgtataaagagggcacaacagataaaaatggtctgcaactgaaaatcaacggccccgataataagcaggttacgttcagtcacactgagaccagctcacctgacaataaatttgatactttaaatggaggcaatgcttcagatgcaaaactgacgagtaccaggacttatacagccatgctgtcagcaacaacgggtgatacagtaagaaccgggaaatacagggctcaggtgacggtgaaagtgaatttttactga

SEQ ID NO: 389202 - DNA, 600 bp, Salmonella enterica
atgttcagaaaaacgcttttatccgcagccaccgttgctgccatgatgagtaccgtacctgcttttgccgccgatatccccgctaataatgccggtgggggaacgatagagtttaccggttctgttatcgaggccccgtgcagcattgtcccggaaagccagaatatccaggtgaagctggggcaagtttctaacaaggctctgaaatctgaaggtctcacgtcttcaccccaaccaattgatattaaactgaccggctgtgagtttgatgtaactggggggcagaatccccctaatccggatctcggtctgaaatcaaaagttgccgtggaattcagtggttttactcctgtgacaggtaaaaccggagttatacctaatgtggcaaccgataacaaagctgcgaatgttgacattcagcttctggacagtaagcagcaacctttcaactttgccagtcaggatgctgatgcaatgcagcagcagcttatccccggagacaacactattcatctctgggctcagatgatagccacagctgcaggtgtcactgccggtaatgtaggcgcaaccgtcacctacaaactaaaatacttctga

SEQ ID NO: 389203 - DNA, 759 bp, Salmonella enterica
atggcacctgagagtaaagagaaactgcagtatgtctacaggctccagcagagtaagctggtcagtattggccacctgactgagaacctcagtggtatccggagcagtctggaaagcttctgcgatgagcaaagagagctggccagtgaactggagagttgtaccaacaggtgtcgggtgaccatcagacgccttgagcagaaaggtaataaaggtaacagtaataaagaagaaaataccggaaatgatgacgaggaatacagggcactgtctccggcgagaaagaaatcgtttttacacactctccgggaagtacatgacacatcatcgtcagttgccgggaagatttacagattgtcttccgctcataaatattctgcagagttactggacctgtcggtgattatggtgaaacacttcctctggcgtgagcgggtgtttatggccatcattctgggggggtatgacagtgaggtactgaaacaggtcagtatcagaagttgtgcgctgggcaggtggtatgacgacaggggtaaaaaagcgtattctcatttaccggcgtatcgtttgctcggagaggttcactcccgttaccatgatgtgataaatgaactcgttgataaaggtgcggagagaatgacattcagtgaactggctgcggaattaacaaaactggaagtgctgggtcagcagcttgtgggacttattggtcagatacagcaccatgttgcattgttgcaggatttacagactgactga

SEQ ID NO: 389204 - DNA, 306 bp, Salmonella enterica
atgtaccaccggagtggggaaatcaatcacagcccgggaacgcaccggtgcgggatatctctgcgtcagaaaaaaccggatacgattacccatccggtcctgaacagtaacgtcatcaatcaaagctgcagcgccgggagaatccggcaaaatatgacttatcagccagattttcccggatatggcctgacaattcagatcagaataagagagaatgagccaggccgggtatctgtggaacttcatccggacagaatcgtcattttgtaccgtgccaacagcaacaaacatacctgtaaactgtaa

SEQ ID NO: 389205 - DNA, 783 bp, Salmonella enterica
atgaaaacaatttgccttcgggacatcagaaagcgttttatggcacagccagagaaatatttaaatctgaagaagcaacgtggtatgactcttctggaaatcattattgtactgggtattatcggtaccattgccgctggggtggttattctggctcagcgtgcgtatgactccaaggcaatgactgacctgacaactaatatcaatactattcgtaccgcaatgaaagatgcttatgggtcaacgggtatttatccattgccagcagggacagacacggccgcattgaatgaccagacaataaatgagaccgctggtcaggcaacacctatcgggaaactgattgccctcggaaaattatctgcggatgaagctaaaaataatatttcaaatgatttcattagtacaggggccggtgatatcagtgccaatggtgttcagaaggggtatttcattgagattaatggtctgaatcaacagcagtgccgtaatatcttactccaggcaggaaacagcttcgattatgttcaggttactgatgatgctcctgcaggtacgtatcactataataatacttcagttaatcttgttgacacgcttactggtgtcactcccgccgtgccgggagcagatgccactcaccctggaacaccagccattttaaccggctcaggtgttttccgctctctggcaactggtggtaacacgcagattaccgctgatggtgtcattactgcatgtagtgacaactcgagtaacagcgtagttctcggtagccgttga

SEQ ID NO: 389206 - DNA, 1821 bp, Salmonella enterica
gtggtgaatgggaccttaatgaaaaaaaagataataaagtcccggggcttttcactgctggaggttatttttgttctggctttcctggggattattttactggctgccgggaactatgcccgtaaattaattgatgagaaaacccgtcagactgctgctgatgctgtggcccaggacgtttatggtgccctgcagtttattaatgcgggcagcattaccgcgaccgttaataacgtcacgaaaaaaattataaatcccttatatcagcaaccggctgaccccatctctgaagacccggcagatattaacacgctgggcatacagaagaatcctctctggctggctcatcccgtttcatcagcagaagcctccagccagagtgtctctccatatattgcccggtcatggtcaaaaagcgtgactacacccgtttcaaacgggttgcaggtcactgatcctgacacaggaacaacctattacagccattccctgaaatggagccgggctgtctgggggccggattcggtccggggatattttacagacagtgcatgtgccggtgcttcaggtcatgtttacttcaatcagcagtttttaagctgtgatgagaatcctgtgctgagaggcagtgaaattgccatttcacgtattgatttggtcagcgacaaaggtaccgtcagccggcctgagggggcaaccaccgccgtccccgtcggcattgaccgggtggacgtgtacatcagtttctccccggtggataacaatccggcccggattgagcagtttatcacgccgttaatgacagcgttcaggctgaaaaaaattacgccgaatgcgaatgccatatatctggtcaggcaacagactccggctgccagtaatgcctggacattactggataaaaccacggggcagctggcgaccccgacaaccacggatgtgaacctcgctcacttcagtgacctgccggacatgattgacaaattacagcacggacagacgtatgccatccgcttcagttttgacggtaaaggggattatctcagaactgacggcctgaactctgcagataaagtctgctggaatacaacgactggtaccgccggcccctgcctgacctcgcctgcgcaggacgcgctggtattaaagcagcgtcagaatatccgtgagttcgcaaatctgcaggtgggggatgtgatttcaaaaggaagtcatttacgggctgatggtacgccagaagatgaatattatactgcgccacagattcagtatgccgcttttaataataccggtacgaatattggaccttattacaagggcggtacggatgatcagcaaatgtgtacagccgccggtaactgcggtaatggtcctgctgttgacctgattgccgatacggcaaatggtgccatttctgttccattgcagacctgtccgaccggtgtggatcgtgacgggggaccggttaccttgcatccgagactcagtgcggcagtttcatccgtagtttccggtattaccaaagacggccctaaaaatgagaaccttagcgctgttcagatggtgcccgatatctttaaaaacccggcaggtaccatgacaacgcttagcggcagtgacgtcacgcttaaccggctgggggggaccgttctgcaggtgagactggatacggcatccggtacatggcgaattgccggcatggttgcgtctgaagacgccagtgatccggtgaaaggaaggtcctggatatattttaacccgtcctggttgtccgtcatgataacgacctggtgcagttctgttgaacagcctcggccctga

SEQ ID NO: 389207 - DNA, 522 bp, Salmonella enterica
atgaaagtaaaaataatttccgggattgtactgatgacgctgtcatcgctttccatggcggcggttcacgcctctgccggtacctccgcgaacgacctttcccgcagtccgtttcaggcggacagggacagggcacgtatgcagccaggatacccggctccgacggtatctgccgctcagcaggacaggagtacaacgggcacgccaccttctgcgggtcagcctgcggctgtgtctcccggacagcaggctgttgccggggcatacaatccctggctgacgattaacctgcaggaaaatcatctgctgagtcaggatattgatgcctgggccaaatcacaggggatgcgcctgctctggaacagtaaccgggattacctcatttacagtgccattcacctgaccggaaaaacccgggatgaggtgctgaaccagctggggcagctgttccgctccgagaactatggcctggtggtcaaactctatgaaaaaaataacgtgctcgtcattgacggtcagtaa

SEQ ID NO: 389208 - DNA, 585 bp, Salmonella enterica
atgctgacggaaatcatgaaagagcacaggctgcataccggcacctggtgggttccgttgccgtccaccacgcatgcgcaacggacccgggcggtccgcagtctgctggagaggcagtgtcgtaccgtcacctatgatgtggtcagtgaaaattcagaccggccgggaaaaaaaactgagcttccggagggccgtgaattcagggggctgacagaacaccactcatcggcccgggagcctctggcgctgtatatccgtctgctgtatggcgacgggatattttattcccggaccggtgacgggatggtctggttactgattgtcagtgatggcgtgattgtgccgggcactgactgtctggtcagtccgctggtcttcgactccctgatggaggaccggaagttcagccagtacaaggccctgccggtcagggagctttctgacgactgtgcggacgagatactgacgcactatcaggccaaccagcagcgactgaaaaaacggcgttactttttttatggcgcactggtgtgtctcgggctggttctgctggccatcccggcggtattcattttgatggggtag

SEQ ID NO: 389209 - DNA, 741 bp, Salmonella enterica
gtgatacttgtggctgccgtcggcggcggcacctggtattacttccatgcgaaagcggtggagaaagaggaacaggcccgccgggcggcgctggtccttcagcagaagcggaccagtattcataacttttataccaccgtcctgaagggcgctgatgttcgcggttttcttgcactgtatacggaaatcctgcgcagccggcagccgatagaactggccggattccgggaggacagtttcaactgcaccacggagagctgtagtttttcctatctcgccgggcagaacaccgtgttcagcgtgcaggacaagtatttccggaacgtgccctatgccccctccttttcccaggaatcggtggattacaccggtattccgtcaggaatgagcagcaatccggttctggaggcgtttaaccggcaggaaaaaatcagtgagccggcctgtaatgacatcctgaactatgtgtacagctataactccctggtggaggccgggcagcgtttcaccatgaaggcactgccggcatcctccgtcagtgctgacgaggcgtcgctgccgggcaaccccgataaccacgggctgctggctggtaaatggcaggtgtcactgccggataactacgtcagcgtacacgcgttctggcagaacaggccgtattcctcttcctttatttttcagtcagtggccgggaaaaagggcatcctggatatcagtgggacattattatgcaaaaaataa

SEQ ID NO: 389210 - DNA, 522 bp, Salmonella enterica
atgcaaaaaataaacatcattcttccggcgttatttctggcctctttttatctgcaggcagcacaggaggtgccggccgtttccatacctcagcaggcaaccggcatggcgacaccggatgctccccccgttactgccggtcaggagcagatagtgcgggccctgcaggatgacatcgcgtttgaacaacagaaacgccagttaagtaacgagctggcgctggagaaactgcgcgcagagctgcagaaggttcgtggtgagaatgcgcctgcggtgacctcgatgccggtggcaccgccggtggccactccggttcacgatgaacccgttgctccggtatcccgggccgctccgccatcggtggtactgatttcacaggtagccggggtgtcccgggtgggggtatcggtcaacggacagctgcagtttgtcggacgccacgaaacgtttcctgccaacgggaaaaggtaccggctggtgccggcgaagaataatcagctgacggtccgggaagtgaagtga

SEQ ID NO: 389211 - DNA, 1029 bp, Salmonella enterica
ttggcaaaattcactaagaaacagcgtttttatctctaccagttctgtgcggacatgcttaaggctgagctgccgctgtatgactccgtcgtgaaactgcagacagaaggcagaaccctgctgggggccggctttgtgaaaaagctgcaggcatttctggacaaaatggccacaacggaatcggtggcgggggtgtttgaagggtttgtgccgcgggtggagctgggggtgatttactcctctgaaaaaagcggtgccctggctgagggattcctcagtatcgtggcgacgctgaagttcgagcagcaactgcgctcacagctgataaaagccgtcaccttcccgctgattatgctgtgtctcgccctggtggtgattggcgggtatgcggtcaaggtgtttccggcctttgagaaggtcatcccgaccagccggtggccgggcataacgcaggtgctgtacagctttgggaccgagctgtatcaggggctgtggatacacatcattgtggcctttgtggtggtggttattgtcatccggctggtgatgtacaacgtcacagggaagctgcgtaacaacatcctggaccgggtgctgcctttctccacctataaaaggatgtcggcctccctgtttctgagcagtctgtcagcgatgatgcgtaacaatattccgctcaatgagtcgctggatgttatccggctcaacgccaaccgctggatgaagagccacctggccatcatgcagaacaatatggcgctgggccagccctacgggaaagccatgaataccggtctgctgggggcgagtgaactgctgaacatcagtctgtattccagcctgccgtcattctacgacgtactactgtccgtatcggagagggccaggaaggatattgcggagaacatcgaatggctggccggcattctgcggtcgctggccacggtggtactgggaggctgtgtggtctgggtgtttggtgcgctgtatgccctgtcagacgcgatatcacagatgagttccttttaa

SEQ ID NO: 389212 - DNA, 1263 bp, Salmonella enterica
atgaagagagttaacacttcactgacaaagacagggattttattttctctggtgctgctgtcgccgggagtgatggcggcagagaatctgaactttaactacacccgggcgggtgcgctcagtctggatccgcggatgtcactgcaggcaagagcctgtcactcaaaaggtgacccgataaatattaatttccggctcaacggtctgagactcggtaccccgcatatcacgctggaaattaaaggaaagagttacagtaaaagttacagtgtgtttccggcaacaaagagtatggccggtaagtcgggtgccggtgatttcactgttcctttcagtataaaaaagaacggaacagccagcggaacaaatgtagtcacagtacatcatgacgccgttccggcacaatttggggaaaagttttgttttatgcaggcggtgggaggcaatatcgcggtcatggagtacggccccaacatgccggggtacagttataaacaggtttgcaggaataaacccgtaacacttgacccccggtttaactggggcggaaatcccaatgatggtacgccccggcctgattatattccagacagcataatacttgatcgtgtttttttcacaagctatacgccaggaaagcccgcgagtgatgaacagcaatggcaggatgttagcgggcccgtgtcagacaacggagacgtcgtttctgagctctatggttatgctctccccatcccccagatgacggatgaaggaaactttacttttaatctcagcaacaggaatatcacaacgctgaagctgtatattaaagttggtggacaggctgtgtattcctgggtatgggaaaaatcaaaagacaatccaaatatactgcgcctgacctatactaatcccgtccaggtgccgatgattagtcccggccctgccgacagtaacagtgacccgtatgccagaaatgatttttatacggggaatagtttttataaaggcacgctggcgtcggaaaactcactgaaccagaaatatacagattatataaaaaatattataccgttatcattgccgtcagacagtaacgggaacatcaatcttgttaataccgacagcctgtcatttatattgcagaacaatggcgatccggatgcatctcagagctttatgaagctcagtgtattcggtcagccactgcagttcgggcctctgaaagtaaacgataaggatgtcgccagcgccatgcagataagaaatgcctgttactga

SEQ ID NO: 389213 - DNA, 888 bp, Salmonella enterica
atggtgacggaaccgatatattaccgggtgtttttcctgatctgcctgctcacagggatgtgtgccggcagtttcatgaatgtggttatttaccgtctgccccggatactcttcagtacggacggtgaaacgcagatttcactggcctggccgccttcacactgtccggtatgccggagccggattaaattttatgacaatattccggtggtaagctggcttgtgttgcagggcaagtgccggaactgccggacgcgtattccggtcgtttacccgctgacggaggccgtgaccgggctgtggtttgccggggtgtacctgtgcctggcggggccggttaacaccctgttgacgttttccggtgctgcgggcctgctgccgcctctgacgctgttctgcctgttgtactgcatcacggttattgacttccgccattatctgataccggatgtgctgtcgctcgggctgttgtgggcaggtatggtgttttctgtctgtgacctgttgccggtggcgccctttcagtccgtggcgggttgtgtcctggcttatgcgcttatccggggcgttcagcggggataccatgctgtccgtggctatgaggggctgggcggcggtgatgccaaactctttgctgccgctgcggtctgggtcggtgtggctcaggtgccgtggctgattctgttctctgcggtggcgggggggatgctgtatggcatacgacggttttatcagcggtgtattctggtgccatccgggaggccggaggccggagcagaacgggaggtggatgacgctgacccggatatatgccgtcatgagttttatattccgtttggcccggctatcgcactggccacactggttctgtatttaacccggatataa

SEQ ID NO: 389214 - DNA, 171 bp, Salmonella enterica
atgaacagcatattcagaaagcatattatccgttttctcgttccgggaaagctgggcaccggttttttacttggtgccggctttatgctgtggctggcaattgaaagaaaaccggtatttgatgaatttgttttattcattattgatttttttaatctgatgcattcctga

SEQ ID NO: 389215 - DNA, 486 bp, Salmonella enterica
atgaacagactgacttcctgttccggtgtcgggcgtattctggctgccgcctgtctgcttattatcagtcataccgttccggcggcagactgttttgaatctgccggcaaagatgcaggcattgatccggatttactgcgggccatcgcctggcaggaatcccgtctgcagtacgatgtgattggtaaaaatccggtatccggttatggcatgggactgatgcagatagactcccagcatctggcttatatgaggaaacggggtattgaccgggagttactggtttcggatatctgcaccaatatatacaccggtgcgctgattctggcacaggcctttaataaatgggggcccacctgggaggccgtcggtgcctataatgccggctttgccgccacaccgaaacaacatttcaggcggatggtctatgccagaaaaatatataccgtgtaccggaaacttaaacacggtgaaaaccgtcattaa

SEQ ID NO: 389216 - DNA, 993 bp, Salmonella enterica
atgataaaaatgcgaaagatattatcgggtgctcttattctcagcagtggtattctgatgaccgggactgcccgggccgcaacagtaacggataataatgatgacggattcctggatgcatcagagaaagcggcgctggcggagtggttcacaccggaaaaagtatcggctggtttatctgtcggaacgttgagtggcagtgccaaagaaagggtttaccaggatgggcgcagagtcagccagctggactggaaatttaaaaatgcgcccgtcctgaaagggcgtattgactgggatttgtcgccgtgggtcagactcggtgcatcggggtgggtgacggcgggcagccacggggcaagtgatatggttgaccgggactggcaactcccggaccaggacagatatacagatatatctgaatccgcttcgaaacttcgttctgccagttcctgggatgtgaatgccacggtctgggggatgaataatgaccgctggcgtctggggattatggccggctggcagcagaccgattaccggtgggacgggcatggcggaaattacagttacgataacggaactgatgtgggaaagtttgacgacgaccagaaagttataaactacaaacagcagtttaaaatgccttatatcgggctgacgggcggtacccggttccgtaatgttgaaatgaacaccacgtttaaatacagccactgggtcagggcgtccgacacggatgaacactatttacgggatctcactatccgggacacaaatcgcgactcggatttttattccgtgtccgcagatatcggttattacatcacgccacaggcgaaggtctttattgaaggcgagtgggtgaaaataaccaatggcacagggaacaagacgcagacatatcatgataccggggacgtgttccatttcccggatgcctcaggcattgagagttcgtcttataacgtaaccgcgggactgaaatattacttctga

SEQ ID NO: 389217 - DNA, 498 bp, Salmonella enterica
atgcagaaccagaatgcacaacctgaagaacaacctgagtatgaatatgcgggattctggctgagaacaggcgcgtgcctggttgacagtctgtttttttcactgattttattgccggtaacgataacgttttacggcactgattatttactgagtgacagactattccgggggcctgtggatattgccatcaactggattgtgccggctgttctgaccgtcattctgtggcgcggttttcaggccacgcccggaaagatggcgctgagattacgggtactggatgctgaaagtggctgtcccgccagtaccgggcaatatatcggccgctatctgggctattttgtctcgacagtccccctggggctcggttttttctggattgccttcgaccgccgcaagcaggggtggcatgacaaacttgcaggaaccgttgtggtgaggtgtatccatacccctcccgtgaaattccgtgacaggtcgttgccgcgtcggtga

SEQ ID NO: 389218 - DNA, 603 bp, Salmonella enterica
atgtgtataaattatccggccagctatgaggccggcgatattgtttttacctgtatcggatctgcactattcggacaggtatcagccgcttcccggtgctggtgtaatcatgttggaatgattacgggacacaatggcgtggattacctggtggcggaaagccgggttcccttttccactgtcaccaccctgtcacgtttcattcagcgttctgccggaatgcgttatgcggtgaaacgacttaaaggaggcctgactgaggcgcagaagcatgatgtgctggttcaggtaaaaccccggccgcataaactttaccataccggattcagctacgattcttcccgacagttctgctcaaagtttgttttcgatatatgccatgaagcgctgtcagtccggggggggaagactgaaacgttcagggaactgttgtataacaagccggatgcgcgcctgattttctggaagtgctggtttctgggctccatttcctggagccgcaggacgattacaccggccagtctgtggcgtaatccggacctggagctgatttatcgcagtcagaagccggaccgtggtgattctccgttgatggttcgctga

SEQ ID NO: 389219 - DNA, 633 bp, Salmonella enterica
gtgacagcagatatcagttactggattgaaaaatactgttttacggaaaccagcgagccggtacgtctgacccgtcagtgggcggatgtgctgcgggagtgccggacacaacaggccgatcctcagggacgtctgcgtattgcgctggtcaacgtggattacgtgaccagttttgagctgcccttccggttactgttgctccgggcaccgcaactgattgcggaggtgagggaaaaccagaaactgcgtcagaaaaatgtgctctttaacggtaaacggtttggttgtgtttacagtctgaaaaccggtatcagcgatataccggatgaatttcagtatcgtctgtcacaccgtatccggcggattgtgtcagcagacagtacggaaaaaccttaccggcagattgcaaaagaggtgaaaatcccccgggaacgcctgaaagtggcgctgacagcgggtcttgaggtgaccgcgctggacgggcttttctggttcggctgccagcggcttgcggctgatgtgctgatactgagaaaagcggggatgcggatagccactgcggagaaaatggtatcagataacctgaccggaacaacgcgtgttataccggtatatcgttgcgacggaggctga

SEQ ID NO: 389220 - DNA, 1218 bp, Salmonella enterica
atggacgagccacaccaacagaagcataaagcgtctgccctgactcctgcaccagggataagtgatgagctgaattatgacatttgtggcataatatccggttgtttcactaaagatactattgtatcaacatctgaaggcccattttatttaggtgatttatgtgatattaacaaaaatcccggcgttattacgcaggagcgttcagtattaaagacaggtggtgtgagtgccggtggtatacaggatatcttcggtttgctcacagactgttcttatataaaggggggggcgaaaaacctggttttacgtatatcagaagactgtaagtcagaaatgaccgggttaacggatttacgtaaaggggatttggtggtctgtcagaacggtctttttgggtcacaggttccgaagtataatagtgaggttctggacgtttttgatgcgcaggagttaggtaagcatatcagtaatatggctaatgtgcagaattcagatctgtatttcgcagataaattccataataaatccggatatttttcgattaatatatataatgtcctgagtaaatttgatgcttttgtttttcgtgtgcctgaaaagatattaggagcatcgaaagaatatgttgctgcttatctgagaggttattttgacggtggtacacggtttcacttaaaccgagtttctgccccggcatcctgccgtgagttagcttcggatcttgtttatttattaaatctttttgaaataagtggtaagataacaaaaacactctccgggtttgaagtggttatttccgggaaagatgacattaatctattcagggaagagatcggatttctaaatgatattcatgatttttcaggagccagagcagaaccggttaattccgttattgattatgctaagttatgtaaagagtataatgccagagcgctggaaacgttaaaggattttttgacattacctgaaattctggccgaactgttaaaacaaccggataagtataaagaaaacttcatatcgctcgggctggaacagcaatttaacatgctgaaaatactttcacatacaggttgcagggtaactgaagttaaagaatatgctaaatatacagggcgtgatgaagtatttggtgttattaatgtggccgggaaccacacctggtgtgctaatggtattattgtatctgacagcactgccggtcagatataa

SEQ ID NO: 389221 - DNA, 132 bp, Salmonella enterica
atggaggacaaaactatgaaaaaagtaaaaattcgtgcgatcattaacaaaatcatgatgattaaaatttgcgcagccagagtcatttgccggcctggcggagataagtgtttcgtgcatttgcagggatag

SEQ ID NO: 389222 - DNA, 288 bp, Salmonella enterica
atgtcattaacaatcagggtattgatcgaaaaccacaatgaagctggaacggataaatcattaaaggcctgcccaggattaagcctgttggtccaggatgaatccacgttgatcttgttcaataccggtcatgatgacagcattatacaaaatgcgttgtcgatggagatcgatatgtgcagtgtctctgctatggtgatttcgcatggccattacgatcattgcggcggtgggccgtggcttcttgataatagacggatcatctgctatccagacatgacgcgctaa

SEQ ID NO: 389223 - DNA, 342 bp, Salmonella enterica
atggttgaaaatggtttatttaataataaaaatgagctttccgttaccctacggcgatttttattgcctgagagttcattatgcccaccacgttatataaaaacttcatctttgaagccgctcagagaatacctcacgagtctgaatggcatcagcggacactcgtttacggtgcgtcacgaaattaccgatgaagtcgatccgcataccggctggatcatgaatttcacggttctgaatgcggcgtttaaacctacttacgatcgtcttgatcaccattacctgaacgatattccaggcctgtctaatccaaccagcgaagccctggtaaaatggatttga

SEQ ID NO: 389224 - DNA, 921 bp, Salmonella enterica
gtgacgttcgtaccgctcaacccgatcccgttaaaagatcgaacctcgatgatcttcctccagtacggtcagatcgacgtgctggatggggcattcgtgctgatcgataaaacaggaatccgcacgcatattcctgttggttcggttgcctgcatcatgctggaaccgggaacgcgggtttcccatgcggctgtgcgtctggcatcgacggtaggaacgctgctggtatgggtgggcgaggcgggagtgcgggtctattcctccggacaacccggcggcgcacgagccgataagttgctttatcaggcaaagctggcgttagatgacgatctgcggctgaaggtggtgcgcaaaatgtatgaactgcgttttcgcgaaccgccgcccgcccgtcgctccgttgagcaactgcgcggtattgaaggtagccgtgtgcgggcgacctacgcgttgcttgcaaagcaatacggcgttaagtggaatggccgtaactacgatcctaaagactgggaaaaaggcgatgtggtaaatcgatgcatcagcgcagcgacatcatgtttgtatgggatttccgaggcggcggtgctggcggcgggttatgcgcctgcaatcggttttattcatagcggaaaaccgctgtcttttgtttatgacattgctgacattattaaatttgaatctgtcgtgccaaaggcatttgagatcgccgctcgtcatccggcggaacctgataaagaagtgcgcctggcctgccgtgatatttttcgcagttcgaagctgaccggaaaattgatcccactgatcgaagaggtgctcgctgccggtgaaattgaaccacctcagcctgcgccggatatgttgccgccagcaatacctgagccggaatctctgggtgacagcggacatcgggggcatggttaa

SEQ ID NO: 389225 - DNA, 432 bp, Salmonella enterica
atggcaaatcgtccggtctggatgaataatattccgggtgcggggggaatgagcgatgaacaggcccgggcgtatgttcagcagtggaacagtcaggatctgagtaagattgacgtcaatacaccaggctggatgcagtttgcggcatttgcttcagatccagaaaatcaggcggcattgggttctctgggactgctggcaaaagatgtcacgagacgaaaagtttttgcggcccctggcaaaaagtttttgtcggagttcatacaccccttgcgcgacgacaagccggtgctacagacagccctccgcgaaggatcactgagagatggacacccctgctgcggacagaatgaacacacccgacacggcggaacggcgtggcgccatcagaatgccggcaggtttatcgccggcatggtgaaagcggcgtga

SEQ ID NO: 389226 - DNA, 243 bp, Salmonella enterica
atgacacagaaaaaactagagctttttttttccagcccaatggaatatgaagaattaactatagaagttcaattagatagagagcgtatcattgagatcaatcaagataatgggttagaacatcttgaggcagaactatttggcactgacgaggcacatggatttatcgcaaagatgccacttgatgatcttattaacatactaattgaagcgagagatacacttaagaatccaaacaaataa

SEQ ID NO: 389227 - DNA, 639 bp, Salmonella enterica
gtgcctgtacctggtgtgcctgtcggtcctggtgataaagttaaacaggatgcggacaagaaaatcgcctccgggcttcagggagcggtagatgatgctgctgactggctggataaggcaacggcgtgctcgtttgggcgtgcctgttcttctgatgacacgaagcaaacagacggtcctaatgcgggtaagaacctgacggatgcggagaaagtcgagttaggtggtgcgggttcaggaactccagggggctggggaccggaggatgaagaaaatgcaagaaatagtgggaacagcaagccatcacaaaacggaagtaactttacggagtccgagataaacgatcgactcacagcggctaacaaaccgattaataaccaaggaatgtctgcggctgctagagcatgggaaaaacatgctggtagaccaggaggaacgtttgaacctttaactggcaatccggcgcagaaaaatgcggcagcggaaggttttatccgagatgtgctaaataatcctaatacagtacgtaatgagttatcgcgtggtggtgttgactaccgtttacctaatggacagggaattcgatttaacgctgatggttcatttaataccttactagatcctccggtgaaaaaatga

SEQ ID NO: 389228 - DNA, 219 bp, Salmonella enterica
atgaaccgtcctctattagaacttattaagttgatgtttattttttctgcaacttgctctattggaatggttgttagtatctggcttatcacacgaaatcccatcactctaactgtatatataaaatatggatgtattggtggtgcagttggggtttggatcggtgctggaatttggttgttattctatctgcaagtacgaagacactttcgtaagtag

SEQ ID NO: 389229 - DNA, 861 bp, Salmonella enterica
atgacggcctgtcgtaaagcgggtggagactgcggcgatattcaaaataaatatgctgtattaagcgcagagaaccgacagaaattacacattgatgtggccgcagatcctctgacggctctgtccggggaagataaatggaatattgagggcggactcagcgcggcgggccgacctggctggctgtatggttcactgactaatcaggaggtgaaggattacgtggctgaaggcaacagctacgacctgaactatctgaacagtaatacgtcgaagggtgacagggctctggctttcttcggagaaccggaaaattactggggtactgttgccggagcgggttcgttgttaacatcatctgcctcgctgaccgaaaaagtaattagtgccggattaagttatggcgccaatggtctggttcaactctcaacaggtaataccggtgataaatttgattatctcagcttcatgatgtcaggcttaaccggggcaggtactgccgggaaaggatattacgctaaccagttgttgggagccggtaatgcttacatgaccagccagattgaaggccaggacagtaccgcatcggtaatgggcagcatggcaggtacaggaattggttataatgcaggggcagcaatcacaaatagatttgaatctcagtacatcaaaaaccaattgggaatggatgccagcaaaaatgctttaaaatactctgaatcgtcttttggtccagggtatttgcttaaaggtggcgaaatgagctccgttccagggattgctggcggatccgttggttcgttaatgtcggaaggtgcaagtagtggagttcagcaagaagttaatggaggtggtaaatga

SEQ ID NO: 389230 - DNA, 480 bp, Salmonella enterica
atgttgaatgataaaatcattttctggtgggatgaaaatagtaatttatttattcctattggtggaaaaatacgtaattcctctgatggaggggtattagggtatggagcacgtgagatttcaggatggttgtctaatgacattcaatatggtattcattctgttgatatctgggtcaaaaatctaactgagtttgcatcaggaaaaacaactgatggcaactttggcataggtaatgcccattgggtgatggttacgcatgataaagtatttattgggtgtgagcatgtggaagagcaacaggtacttttaaccatcgagcaaacattatatgtactggagcagtatcgtttattcctagaaggatcttatacaaaagatttcccgccagaaccaattgatgttgagtatctagcagaaggcagagatgctatcacacagtatgaatctctagacggggcatattgtttgccatattaa

SEQ ID NO: 389231 - DNA, 12072 bp, Salmonella enterica
atgaacagactgcgttatcgcgtaatattcagtaaggccagggccatgctgatggtggtaccggatacggcccgtgccggtcgggccgccaccgatggccgttcactgaaacgttcattcccctccgctggcgcgttccccgccagactgtcgctgtctgtactgtccttcgtcattctgctggccagtggtctggcgtctgtatctgcagaagcccggagcgtgatccaccgggatacttcagcgccgggaaaccagcagcccaatattctgaccaccgcaaacggcctgccgcagattgatatccagacgcccggtagcggcggggtttcagtgaacaggtattcgcagtttgatgtggataaccgcggtgccatactcaacaactcccacaaacctgtcccgacacagcagggaggctgggtaaccggaaacccgcatctggcccgcggggaagcaaaagtcattgtcaatgaagtgaactcacgtaatcccagcctgctcaacggttatgtcgaagttgccgggaaacgcgcacaggtagtgatagcgaatccggctggtatcacctgcagcggatgcggttttgtcaatgcaaacaaagccacgctgaccacaggcctggtacagatgcagaacaaccgcatcgccggatatgacgtttcccggggagaggtggtggttcagggtaaaggaatggatgcgcgggaggcaacctcaactgagattttcgcccgggcagtaaaacttaacgccgaaatccaggccggggaactgactcttgtggccggtcagaacaccatcactgaccgggagggtcgcactgtttctgccggcgccgtgacggcaaaggcggaagatggctcagcaaaaccgacttttgccctggattcctcagcgcttggtggcatgtacgcaaataaaatcacctttattggtaccgaaaaaggcatgggcgtcaatatggagggagacaccgcctccatgcccggcgacatcactcttgccgctgacggtaccatccggaataaaggcagtatcgcggcttccggcgcggtgaatatcacttccgctcacggtgatgtgataaaccagggcagactggaagcgcaacaggccatcagtatcacagccagcggacagctgcgcaacgccgcatcagggtatgtcacaacagaccacgatatacaggctgatgccggtcaggggctggaaaaccaggggcacatttatgctgccggcagtgccagggtacgaacgcccggccccgtcactcacagcggcagtctggttaccgggcagagcctgtctgtcaccgcagcaacgttttatgcaggccatgacagcctgctggctgccggtgctgaccgtcgcgggaacagaacgggtgagcataatctgaccctcgccaccacgggtgcactgactgaccatggtaacatcagcgcgacaggtaacgccgtgctgaaggggacttccgtcgcactggataacgccaccacagtggcgcgcaataccagcctgactgccacagccggtaaactcagcgccaccggcagtcagttgcaggcggatgacacgcttgctctcacctcgccttcttctgtcgtcagtgataaagcccgtctgcaggcccgacgtctgcaggtggagacaccggaactgtcggcttccggcggttcgctgatacagaccggtccggatgacctccggcttaatatcagccggaaagtgaacctcagtgggggtaccctgtcctctgtcggtcagaacctgacgcttaccacccccgtactggaggcaaaaaacagcaccctgtcgcataccggaaccgggcgttttctgctggatgctggcagtttcagtggggagcagagtgatatcctcagtaatggcaggctggcgctgttcagccagtcttcccgtctcggcggtgccttactgacggcagattctctgtcgttgtctgcggattcgcttgatatcacgaaaggtacgctgcgccagaccggaaaaggtacgctgaatataagaacgggcggcgtactggattaccatggcggcagtcttctttctgcgggcggcctggcgttacaggcagacacgctgaacggcacagaaggcaggcttgcggcgatgacggacgccgatatttccacccgtcacctgatgaatcagcgcggaaaaattcaggccggaaatagtctcaccctttctgcaaccgggctggacaataccgatggggtcatgacctccggacagaatatggttctgtcagacagcggtaccgtgagcaatgaccgggggaccgtcgctgccggtgacaccctgacgctttcggcatccgggctgaataactcagcgggcctgctgcagagtggtcgtgatatgacactggatacccacggtggggcgctggttaatcgtgacagcggaacatccggcattatcagcctgggcaatctgacgcttcgtgccggaatgctggataacaccgccggatggttcagcagtaacggctggctgaacgccacgaccggcgacatggataattcgcggggaacgtttggcgcgcagcagaacctcatcctgtcagcacaaaatctgacaagcgttacagggctgattcacggtggtgccggactgacgctgaccactcccggttctctgataaataccgacagcggcgacgccggaggtatcatcagcctggggagcctgtccatcgacagcggatatctgaacaatacggccggattcatccggtccacgcaggatatgacggtcagtaccggaacatctgaactcaccaacagggacagcggagagcatggcggcatattcagcgaaggacaactcaccctcaacacgggagccctagataaccgggacggggttcttaccggcagggctgatgtcaccgtcaccgcaggaagtaccgataacagcaacggcattctgggcagccagtccggcagtctgggccttcaggtgaatggcatacagaatgccggcgggctgcttcaggcgcagcgggatatccgtatcgacacccaccacctggcattacttaatacgactgacgaaccggtgccggccacaagccgtatcctgagtggcggaaatatcacactggacaccggcacgctggacaactcacggggccttattcagtccacgacggatacccggattaacaccggcaccgccagccttattaaccggaacagcacagagcatggcggcatactcagcggaggccggctcaccctcaccaccggagagctgaacaacaggaatggcacgattgtcgggcagacggatacgcaggtaacgtccggggaaagcgataaccgggatgggttacttgccagcgacgccggcagcctggtactgaagacacaggggctgcgcaatgatggcggacgccttctggcaggaaaaaaactgctggcagacacgcagggtaacccgctaagtaacaccgggggaacggtcttcggtaaaagtgtgctgacacttaacagcggcgaactggataacgccgcaggtcagattgcagccggttcagcccttgaagtcaacactcacgggcagcatctcattaaccggaacagcaccggtggcggtggtcttgtcagcggagggactctgacactggaggccggaaacacggataaccatctcgggcatattgccggcagaactgacatttcggtacgtaccgctgagctggataaccgggaaggtattctggtcagcgatgaaggggcgctgtcggtgctcgcgcgggaaaccctgaaccagggcggactgttgcagtctgcaggaaacctcaccctgaacacacaggaggccggactgtataacgccggcagtggcgcctcaggcggtatccgcagtgggggtatactgaaactggacagtggtctgctggataataccgcgggccttatctggtctgcgcagaatatcatgcttgacacgcatggccggacgctgaccagcctcaacagcggaaaaaatggcgggatagtcagccagaaagcactggtactgaacagcggtgagctgaataataccgccggacgtatacaggcaggaacagaccttaatcttgacgctcacggacagcgtgtcatcaatgcagacaccacagattcaggcggcattctcagtcagggtgagctgaccctgaatggcggtatcctggataacacacgcggtaccctcgccgcatcaggtactgcagacctcaccacgggggatgccgacaataccgacggacgcatactctctgaccagacactgtcgctgctatcggataccgtcaacaatttccgggggttgctgcagtctgccggcatgctgaccgtggatacacggcatcacgctttcatcaatactgacagcggaaagaccgggggtatcattgccggtggtgatattcatatcaccggaggccggtttgacggcgaccatggcgtactgaccggacagaatgcagacataaataccggaggtgaaaccttcagccaccggggcgggttgctggatgtggccggtgatttacgccttgataccggacaacttgataatcacggcggacgcatccgtgccctcggcagtcttgaagccaacactcacggacagtcactgataaatacggacagcggcactgacgggggtatcttcagtgccggccggctcaccctctccacaggtgccctgaacaatcaggcggggaccctcctcggtcagcagaataccgtcatcaccgcaggtgactctgataaccacaacggaacgctggcaagcctcaccggtgcgctgacgctgacgggtggcgaaacacagaacgtcggggggcttatccagtcagcgggtgacctctggctggagacacagaatgcccgacttaataacagcggcagaggcaacatccgtagcggaggtaagctgacgctgctcagcggcgaactggataaccagggcggactgatgtccggggaaagtctggtcacgatgaacacaggcaccctcaccaataccaggggcagcatcaccggtagccatgcactgaacctggcttccctggccctgacaaacacgggcgggctcattcgtgcagaaggttcactgaccatcagtacacagggccagtcactggtcaacacggattccggcacggcaggtggcattgtgtcactttcagcgctgacgataaccaccggcgggctgaataatcaggccggttttatcgcatccgatggaacggcctcactcactgcgggggcagtcagtaatcagaacggtctgctcgccggcaatggcgggctcactatcagcagccaggccctggataacacgcagggcacccttcagtcttcggctgacctgtctgccatcacccacggactgacattcacgaatgttcacggtacggtcagcgggggcggaaatacccggctcatcagtggtgcactggataacacatcgggaaatattcagggcggcacagcactgacgctggattcaggaagcgccaccctcagcaaccagcagggaaagctgatttcggcagggacgctctcgctgcatggaaatgtactggataatacggacggacagctgcagagcgccggaaatgccacccttaccctcacgcaggaactgaataactcacgggggctgctccggggcggtcagacgctgaacatcactgcgccggaggtgataaaccacgacacccgacagccggacaaaggcactgaagcgcagcagcttgtcattcaggccgaacgggcagacaattcgcagggcgcattgcgtgccgccattctgcttgaggctgaccttcacgcggtactgaataatgcaggcggactggtttcatcagaaggcaggctgaatatccatgacagtggcgacacaccgtcgcttgccatcagcaacgaagacggcaccctgatagccggctcacaggggcaaatccgcgcggcgtccctgcagggtaagggacaggtgttgtcacagggaagtctcagtctggcgctgtcagatacccttgataacacaggccggcttgccgcagacggcgacctgcggcttgataacgctcaggatgtaaacaacagcggagacatcaccgccggacagacactgacgctgcgggcgcagaatatccgcaaccagactgacggtactgtcagcgcactgaatacggacctcaccgcccgcgacacgtttgacaataccggcctggtggatggcgggctgacccgcattgtcgccgccacgctgaacaacaccggtaccggacgactctacggtgaccatgtggccattcaggcgggtacgctcagtaaccagaaaacagcagactacgccccggtcatcgccgcgcgggaacggctggatgcgggcaccggtaccgtcacaaatactgaccatgccctgatttacagtgcaggagacatggccttcggtggacatctcgacagtcagaaccacgccaccggcaccgggatacaactggacaaccacagcgcgcaaatcgatgccaccggcagtctctctctccatatgcagactgtggacaaccgtgacattcatctggcgctgagcccgcagcccgtggaggtatcgcgtgagcatcgtcacgagtttcagcttaacggcagcgctccccgctatgaggccggagacccgcgcatcactgcaaaaacgaacggacgggaacatcatctgaatacgccggaaggcgactccaaggattttaacgaattttactatgaccgggtgacggctgaaacgcaggttatccatcaggacccggcagaaatactggcggggaacagcctcaactggcacggacgtgagctgacaaaccaggacagccggatcgttgcaggtggaaacctgacggcaacaggacttgttaacaacctggaaagtcagggggaacggagcgtgacggataccgaccaggggactccgcatgaaggtcatggcagcatacggcataaaaaaccgggaaaacgcgggataggcggcaaaaagaaaagcagagtgaaaaccagtgcctacggaccgtatgtgaccaccaccacgctgcccctgcacctgatgcgttatgaaggaaacacggccccgacagaaaaccctccggcgctgcgcaacagacggtccgctgcggtcagtctgacggcgtcctccacgggcgtccctgcgcccggcagtgtactgccggatattcatcttaccccggatgcacatccattgctgtcgctctccccgccagtctcaccggagacaacagtcgtcacgcccgctggcaggcatatcccgggcatcagtaacacgctggttacgttgccgccgtcaccagagcggataccttcggtcatggtgtcgcaggcattgctcagcgccctgacgccggaacagagtacgcgcccgttcaccgtgcctgccgggcagcacttcacgctgacgctgcctccggcccccgggcacgatgccacggaaattcgcatggtggctccggatattcgcctgcctgacagcagtctgtttgatgtacaggcaaaaaaccatccgcactggctgattgaaaccgacagccggttcacacagaaaaagcagtggctggggacggactacatgcagcaggcactggcgacctcaccagaccggctgatgaaacgtatcggggatggctggtatgaacagagactggttcgtgagcaggttattgccctgaccggccagcgatatctgtatggttacagtaatgatgaggcccagctcagggcactgatgaacaacggcatcaccttcgcccgtgaatatcatctcacgcccggtattgctctcagtccggaacagatggccctgctgacgagtgatatggtctggctggttaatgaaaccgtcaccctgccggatggtacacaacagactgtgcaggttccgcagctgtatgtccgggcccgtccgggtgaccttgcgggggacggtacactgctgaccggtcgcagtgtgaccatcaacagccccgggcacgtcagtaacagtggtctgatagccggccgggacatcacccgggtcacggcgcagacgctgaccaacagcgggagcctgcagggggaaaaggttgatttacgcgcccgggagaatatcagcaataccgggggacggattattgccggcagtgcactctccctgctggcaggacatgatatcagcagcacaaccacgctccggagtgacggcgccggtacatggacggaccgtgtggcggggatttatgtgcaacgtcccggcggcagcctgacacttcaggcgctggggaatatcacgctgaccgccagtgacctggagaatgccggaaccggaggggcaacccggctgctcgccgggcaggacatccggtttgacacactgaccacctcccggacagaaaaccatgactgggggaaacatgaatatctgcatcagtcctggcagaacgacatcaccagtcacctcaccacgcagggtgacctgacgctggccgccggacaggatatccatgccacaggcaccggtgtcagtgcgggcggcacattgtctgcccgcgccggcagggatatccgtcttgatgcagggacctccacccgggatatcacagaaaacagccggcagaccagcggtggatttctctcaaaaagtagcgtggaaacccatgatgaaacgcatgaccgccaggccatcagcagcacgttcagcggtgacaccgtcagcctgcttgccgggaataatatccgtatcgacggcagcaatgtcgccgggacacaggatgtcagcctgcttgccggtaatgacctggatatcaccaccaccctggaatcacatcaggaaacccacctgaagaaagataaaaaatctggtctgatgggctccgggggtatcggcttcactattggcagccgttcacagaaatccacagccgaaggccagggagagactcaactgggaagtactgtgggcagtcagcgcggtgagcttacgctcagcgcgggacacaacaccaccgttcacggcagcgacctggttgcggggggtgatatttccctcagtggtcagaacgtgaacattaccgcagcgcaaaacagtcagaccaccctgcaaaaatttgaaagccaccagagcggactgaccgtcgcactcagcggagccgtgggggccgccctgaataccaccgtacagaatgtacaacaggcccggcaaactcaggacggtcgcctgcaggcactgggcggcgtgaaagccgcactgagtggtatccaggccgctcaggcacttgacctgaataacgcacaacaggcagcgcaacaggccggaagcggagataacgccccggcggcctttggcgtgacggcttccgttggcagtcagtcatcaaaatcagagcagaagaccgaatcacatacggtatccggcagcagccttaacgcaggccatgatatccgcatctcggccaccggtgatggtcaggggcccggcggagatatcctggttcagggtagtcaggcgaaggctgcccatgacatttacctggacgcacaacgtgaccttcagctactctcggcgctgaacacggaaacgctgagtggcaaaaacagcagccacggcggtagcgtgggcgtcggcattaacgtcggacagaacaccggtattaccgtgtcagccagtgtgaatacggcaaaaggccatgagaatggcaccaccctcacccgggcgaatacaacactcgatgcgggtcatcatgtcaccctgaacgccggccgggatgccacgctgaaaggcgctcaggtcagcggtgaaaaaatcacggcagatgtgacgcgtaatctcaccctgcagagtgagcaggacagtgaccgttacgattcgaaacaacagagtgccagtgccggagccagctacacctggggagccggaggcccttctgccagcgtcagcctcagccaggataaaattcacagtaacttcgacagcgtgaaagaccagaccgggctgtttgccgggaaggaagggtttgatgtcaccactggacagcacacacaactggacggcgcggttatcgccagtacggcagataaaacgaaaaaccggctggatacggggactctcggtttcagcgatattcacaatcaggcagacttcagcgcacagcaccagggtatcagtgccggtacgggcggctccaccggcagccagttgctgaccaatatggccacaaacacgctgtccggggtgaacaggtccgggcatgacagcagtaccacgcatgccgcagtgagtgatggcagcctcatcgtccgcaataacgcagaccagaagcaggatatcagcactctcagccgcgatacggaccatgcggcaaacggactgtcgccgatatttgacaaagagaaggtacagcgtcagttacagcaggcgcagatggtgagcgatatcagcagccaggtgctggatatttacaacacgaacgaggctatcattgccacacggcaggccactaaagacatgcaggatgcatctgcccgcgaaaaggccagaacgcaggcagaaaaggaactgacggctgagcagaagaaacatccgtcactgaagattgatgaagaaacgataacgaaacgtgcttaccagaacctgtataataaggcactggaaaagaacgaggcccgtgtgggtgacccgatgcgtcaggcagtcactgcctcagtggcagtactgagcggacttgccgggggtgacattaaggctgctctggcaaacggggcagcaccttacctggcgacagggctgaagctgattaccggacgagatgacccgtcagatgaacagatggcagtccggctgctgggtcatgcaattatcggtggcgtggtggcggagctgaacggagcaccagttgcaggcggtgcggctggcgcggtcaccggtgaagtggcggcgataacaatatcaaaactatactttggtaaaccgccatcagagctgaatgaatcagagcgtgaacaactgagcgggatgtcgacggtggcggcagcgctggcgggttcactggcatcagactcatcagcgggaactgttgcaggtgcgcaggccgggaagaacgcggttgagaataacctgctgggtggtggaacagaggacgggcaggtaaaagcggcgcaggaacatgcaaaaaatatcatgtcctgcagcactgctcctggtagtgcctcttgtcagaaagggctggcaatgcaggatgcgttgatggttgctttgccagccgggcttggtgggggaatgctggtagcggcaacaccggaattagcagccgcagctcaggttgctatcagagcatgtgctggtaatgttgtactgtgtctgaacaatgccgggatcatgacgtcggagaccatcgttccaggaggtgtgggggccggtggtgctataggtattggtaagacagcagcagaggccacggcggcgaaagctgaagctgttgcggccagtgcgaaaaataatccatcatggaaagctggtgagtatcttgatgattttaaaccttcatcgacaccgctagaactgataaaagagcaggccgggaaaggttcacaaactgcctatatcagaatggatcatatacttaatggagaagtgaaaactcttaaggatgggactaaagttggttctggtggacactatattcgtgatccaaatattaaaatagataaagtgacaggcgctcctgattcaactggtgtttcaaaaggctacatatcagtcagagactcagccacagggcagtgggttaataaaaaagcagaaacgacattctttcctgagcaatggtcaaaacggcagactgctcaagagattgaaagcgcatttaaaaattctgaaaggataccgaatacagaaatgtggagtgggaaatcatctagcggtgtgaagattcaaggctattatggcaaacccgatgggacaggtgcgactgcatggcctgtttatactgggaggaataaataa

SEQ ID NO: 389232 - DNA, 777 bp, Salmonella enterica
gtggcggggtttgatgctgacacccgctaccggggacggcaaaaaaatctcggcatgcagattagccatgtgctgtaccgtaacgaatcacagaaaaacacgctcagttatgacgttctgacgcgcgaaagccgccagttcattaacgacaccgaaacagacgtacaacgtacgaccaccagtgcctggcgtatcggattcacacatcgccactatatcggcaatgccaccctggatgcaggcatcagctggcagcgcggtacccgctggttcggtgcacagccggtcccgggggaggaatacggcgaagccaccgggctgagtaaaatcctcacatggaatgccggcctgacattacctttcacattcagcgaacagcattttcgtttcagcacgcaatatctgcgccagaccagcccaacaccactgacctccacggagcagttttctgtcggtaaccgctggacagtccggggatttgacggtgaacgaacgctgaatgccaacaacggtgcatattcccgtaatgaactggcatggcagacaccagtaccgcagcaggaactttatcttggcgttgattacggttccgtcagtggtaacggagtggaatacctgcccggacggcacctggccggtggcgtgctgggattgcggggcaacatcagtcagatccacctcagctacgacctgtttacaggccgcccgctgtcaaaaccggacgggtttaaaaccagcccgttaaccagcggcttttccctgagcttgctctattaa

SEQ ID NO: 389233 - DNA, 828 bp, Salmonella enterica
atgttgtctgcgatattatctctgtcagcaaaagcaacaacccgccaggcagaactgcatcagcaggctcaacagaaagctctgcaggagcaacttgtgcctgtggttcccgacatacgtctcgttcctgataacacagccgcaaaaactgcgtccgtatttccggatgagtctccctgttttcatatcgttcatgttgatatccagggacacgacagttttccccactgggttcccttttcttcattcacgcagaaagtactcaaccggtgcctgggcatcaacggtatcacacagcttgccgggatgattcaggaaaggctggcgtcatatggctgggccacctcccgtgtcctgatccccaatcaggatctcagtcagggtgaactacgcctgcagattgttccgggccgcgcaggtcgtgtccgcctgacgtctggcagtgacgattttattcaactgtggaattccatgcctgtccgccacggcaggttgcttgatttacgggatattgaacagggaatggagaacctgcagcgtccacagactgttgaggctgaaatggcgattgtgccggggagtacccctggtgaaagtgacattgttataacgcgccatcagtcccgcttctggcgaatcgggctggatatggatgattccgggcagcaggaaaccggacggtaccagggaacagcaacgttgtggctcgataatccactgtccctcagcgacaccttctttatttcaggtacccacgacctgaaatttgccggacgcaaaaactcccggagtctttccacttattacgccattcctttcggttactag

SEQ ID NO: 389234 - DNA, 1830 bp, Salmonella enterica
atgctgaaaaaagacggaaaagagtcggatatccggatcggcgacctgcccattattaaggattcagagatacaaaactttttgctccacgggactgtgggggccggtaagtcggaagtcattcgccggctggccaactatgcccgccagcgcggcgacatggtggtgatttacgatcgttccggtgagtttatcaaaagctattatgacccgtccattgataaaattctcaatccccgggattcacgctgtgccgcgtgggatttatggcgggaatgcctgaccctgccggattttgataatgcggcgaatacccttatcccgatgggaacgaaggaggaccctttctggcagggttccggccggaccatttttgcggaagcggcgtacctgatgcgtaacgacagcgatcgtagctacagcaagctggtcgacacgttgctctccatcaaaattgaaaaactgcggacgtttctgaaagattccccggcggccaacctggtggaagaaaaaatcgagaaaacggccatttccatccgggctgtgctgaccaactacgtaaaagccgtccgctatctgcaggggatcgagcgtaatggtgagccgttcaccatccgtgactggatgcgtggtgtccgggaagaccagaaaaacggctggctgtttatctcatcgaatgccgacacgcatgcgtccctgaagccggtgatctccatgtggctgtccattgccatccgggggctgctggcgatgggagagagccgtaaccgccgtgtgtggtttttctgtgatgaaattccgacgctgcacaagctgcccgacctggttgaaatcgtcccggaggcccgtaaattcgggggctgttacgtctttggtattcagtccagtacgcagatggaagacatctatggggagaaagcggcggcaactctgctggatgtgatgaacacccgggcctttttccgctctcccagctataagattgccgattatgtcgcacatgagatcggtgaaaaagagatcctgaaagccagtgagcagtattcctacggtgccgatcccgttcgtgacggggtgtcgaccggcaaggagatggagcgggtcacgctggtcagctactccgatattcagtcactgcccgatctgacctgttatgtgacgttgcccggaccctatccggcagtgaaactggccctgaaatatcaggaacggcccaaagtggcaccggagtttattccgcgtgaaatgaatccggaagcggaagcccgtctgagtgccgttctggccgcgagagaggccgagggacgacagatggccagtctgtttgaaccggatgcagaaaaggttgcaccggcagccgcagaaagacaggctgaacagccgcaacagccgcaacagccgcaacagccgcaacagccgcaacagccgcaacagccgcaacagccgcaacagccgcaacagccgcaacagccgcaacagccgcaacagccgcaacagccgcaacagccgcaacagccgcaacagctgcaacagccgcaacagccacagtccactgttgccggcgataaaaaatcagcaacggctggtaccgccgtgaatacgcccgcaggtggggtcgggcaggaactgaaaatgaagccggaagacgatgagcagccactgccgcccggcattaatgagtccggtgaggtggttgatatggcagcgtatgaggcctggcaggctgagcaggaactgaatacccaacagcagatgcagcggcgggaagaagtgaacatcaacgttcaccgggaccggggggaggatgtggagccgggggatgatttctga

SEQ ID NO: 389235 - DNA, 1968 bp, Salmonella enterica
atgatgagcattgcacaggttcggtcggcgggaagtgccgccggttattacaccgataaagataattattatgtgctgggcagcatggaggaacactgggccggaaaaggcgcagagcagctcggtctgcagggtgccgtggataaggatgtgtttacccgggtgctggaaggcagactgcccggcggggctgatctgagccggcagcaggacggtaccaacaaacaccgtcccggctacgacctgacgttctcggcccccaagagtgtgtccctgatggccatgctggggggcgacaagcgccttatcgatgcgcacaaccgcgcggtgacggaagcggtccgtcaggtcgaatccctggcctcgacgcgggtgatgaccgacgggcagtcagagatcgtactgaccggaaatctggtggtggcactgtttaaccatgataccagccgcgaccaggagccacagattcatacgcacgccgtggtggtcaatgccacccggcacgacggagagtggaaaacactcagcagcgataaggtgggaaaaaccggatttattgagaacgtttacgccagccaggtcgccttcgggaaaatctatcgggcattactgaaagatgacgtcgagtcgctggggtataaaaccgaagtggtcgggaaacacggtatgtgggagatgactggcgtgccagtggaagccttttccagccgtacgcagaccatccgggaaacggtgggtgatgatgcgtcgcttaaatcccgggatgtggcggcgctcgatacgcgtaaatccaaacagaaggtcgatccgcaagttagaatggcagagtggatgcagaccctgaaagggaccgggtttgatatcagcgcatatcgtgaggcagccgacagacgggctgaagcccttccggtacggtctgaatcattaccgcaggacggcccggatgttcagcaggcggtgacgcaggccattgccggattaagtgaacgaaaagtgcagtttacgtacacggacgtgctggccagaacggtcggcatactgccgccggaaaatggtgtgattgaccgggcacgtgccggcatcgatgcggccatcagccgtgagcagcttatccctctggaccgggaaaaagggctgttcacctccggtattcatgtgctcgatgaactgtcggtccgggcactcagcagtgacatcatgaagcagagccgggtgaccgtgcatccggaaaaaagcgttccccgcacgggggcttacagcgatgcggtgagcgtgctggcgcaggaccggccgtcactggccatcgtcagcggtcagggcggtgctgccgggcagcgggcgcgggtggcagagcttacgatgatggcccgggagcaggggcgtgaggtgcagattatcgccgctgaccgtcgctcacagatgaacctgaagcaggatgaacgtctgtccggcgagctgataaccgggcgtcgtcagctgcgggagggcatgacattcacgccgggcagtaccgttatcgtggaccagggggaaaagttgtccctgaaggagacgttaaccctgctggacggcgcggcacgtcataacgtccaggtgctggtcactgacagtggccagcgtaccggtaccggcagcgcgctgatggccatgaaagatgccggggtgaacacgtaccgctggcagggcggccagcagaccccggcgaccgttatcagcgagccggaccggaatgtccgttatgcccggctggcagaagattttgtggccgccgtgacagccggggaagagagcgtggcacaggtcagcggcccccgcgaacaggccaccctgacggggatgatacgcagtgagctgaagacgcagggaatactcggacagcaggacaccacgatgaccgccctgtctccggtaacaataaccctgtttaaatatccagataaaaacattccatctgggtcaaatgagtga

SEQ ID NO: 389236 - DNA, 2127 bp, Salmonella enterica
atgacaggcaagcgtgataaaggtttcatatacgcccccttttgccgtgcagattatgacctgcacgctggctttagttctgagcagaaagaagcgctaagtacaagtcataaacgctcccgtaactatggcaggtccggttccctctcttccctgctcacccctctgctggatatcgccaacaacagtggcaccggctgtagacttacccggactgtaattatggcgatgcttactgaaatgcagaatgtaggacaaccctgctggaactggcggaaagaccagtggatttccctgtttgataaatatcgtcgcggtaaaccacttatgatggcatttgcatatcatctcggtccattcacgtcgccgcttcagatccctcatgaagacactctgtcgctttacgccagtgccatctacggcaacgcgattttccgggaccagctgaaccgcctgtcggaagcactgatatcactgggctattcccctcagcacctgcggcatgccgtttcctcccccttgggtctgctgatgctactcaatgataatcccaggcttgaagagatgaccacagaacttctctggcaagctcagcagtaccacgacaagcgcgtatcaagacacgtagggaaaatttctcatgggcttgccgcacttggcattattgcaaagccggtacgaatgcgtaactacaccgaatggcatgagaagccggtcgaaaatatcagccctgaatgggtcgcatggtgcagacgctggcgtgagacatctgtgcttcgtcccagaacccgtgaaaacctgtacagctttattcttcgctgcggcctctggctggcaaaggagcatcccgaggtgaaggttccgacagactggtctattgagacatgtgccagttttatcgctgctgtggggcggatgaaagtggatgagctgtctctggggactgaacatggactgcggaagtccaaacgctccggagagcccatgatgccacattcacgtgcacattttatctattcgctgcgacgatttatgagcgatttcgaactctggggatggggacgccttaatttcagccccgcccgtcaccttttcacgccggataccccactttttcgccgtggtgtaaatccgagagtgatagatgatcccgtctggctcaaactcatctgggccagtctgaacctgcgccatgaagacctgctcagtgaaattcactatcccctttccatgcttcaggcaatggctgttatctggacccatgcaggtttgcgacagaataaactcctgcgcctgactacggaatgcgtcacgcctcagtcagaagacattatcagggaggatggtagtgtcgttcctgcaggaacactatgttatctaaatgttccggcaggaaagacatcgaaagcatttgttaaacccgtctctgtcattgtaaaaaaatatgtagacatatggttgaacgtccgccccgtggatcaggcaaaactgaatgatgatcgcaccggagaaaaagttcgttatctcttccagtatcgcggcaagccagcaggcagcgatgtgattaaccggacggtcatcccagtcctctgtgccagagcggggctgccggttgaagacagcggaggcaccataaccagccaccgtggacgggcttcagccctgactgcgcttgccagcgtaccacagggcatgtcgctgtatgaactgatgcagtggtcaggtcattcatcaccacagtcaaccctgcattacattcgcatccgccctacacagctggcagcgtcatttgtgaaggccgatcggatagcccatatgataagcgtactggtcgatcacgatccggaagcggtctcgcccactgggctggcaacctattatgaccttggtgcgtccttctgcatgaatccattctggagcagttgcccgcacagaatggcctgcattggttgcgattttaatctgctgaaagacagtgcgcgcggactgatgctggagagtaaaacatctatcaggcgttatctcgaagaggtcccactcacacctgatgggaaagccattgtagagcaggatattaaaaaagtagaacaggctcttgcaaaattaaccggtaagtccggaggataa

SEQ ID NO: 389237 - DNA, 1005 bp, Salmonella enterica
atgctcaccactttattctgtactcccgccagttcacaggcagaacgatggttggggttattatccgatctcggcaggtcaccggcgacaattcatgcctaccgcggcgcacttactcacttctttcacttctgctgccagcgggaactgccccccgagcaggcaagctttgaagatatcgctgcgtacattcgcccccagttacccggcatgcctcagcctgcagccagtgcaacgcttcagcttcgcctttctgctatccgtctgtggtttgactatctgatttacatgggggtaattagccggaaccctttaccgcgagcaggcacaccccacatgcctttagcaggacacggtatggtccagcgaataacacgactgccacaaattccggatgacagccagtggtatcatctcttgggttatatatcagactgttcattgcgcgatcgcctgatgctagcgctggcgtatcatggtgcgctaagacgcactgaggtgacaacaataaccatagaggatatcgatcctgcccacaggcttatacggattcgcgccgaaaacactaaaggcaaacgcgaacgggtggtctgctacggcccggcgattacgccggtactggcagcacatctcaggaacctgaggcaaacgggtattactggtggagcactgttccgttcgttttctgacagaaattatggctcaccgctttcatactggagctggagtaaaacggttcgcgagtggtcagacaggaccagcatgccgtttctgaccacgcacacctttcgtcacctgcgactgacacatcttgcccgggcgggatggaagctgcatgagatagcaacctatgctggtcatcgtgatctacgcaccacgcagatatatatccatctttcaggcactgatcttgcggccagaatggcgatgactgttgcggagactgaccgaaaaatcgcagctatcatgtttggcccggagagcgagaatgacaggcaagcgtga

SEQ ID NO: 389238 - DNA, 192 bp, Salmonella enterica
atgaaacttgcaccggaaacccgcgagatcctgcgacagtacaaagcgcttattaatgcccgccgccgcgagaatgggcagtcggcgcttcggacagaacaggtgatcgacgaaatatgttactacatgacctgtcagagcgctgtttacctttgcggccagtttatacgacaggacggatacggccagtaa

SEQ ID NO: 389239 - DNA, 282 bp, Salmonella enterica
atgcttcgcaccgggccagctgcgctgtctctgcccggccccttcggggcagcgggtttccatcccaggctgtcgcaacgtcaacggcaggcttgctgcgaccgttccggtcacgccgccctttttacgcgccgtatcctgcgctttctgcaccccggcaaactgacgccgggctgtaaggcgcaacgccgtttcgcgcccgcgctttccgtcgttgcggcgggttcctgctcattccttgcctggttttttcacccttttgagtcctttcgccggggctga

SEQ ID NO: 389240 - DNA, 2034 bp, Salmonella enterica
atgtcagtaaccgagtctaaagcaaaaaaggttaaaaaagccagccccaaagcgtcaacgcgtaaagctgatgctcagtcagacgtcctggttgccgtactggacagtgcccctgtcagttacaccgcatggtcccgcctgtttatcggggatctcaactgccgtcttatcccgcacacgccggaagaaatcaggggttatgccgacagtattttcgcggtcgggcaaatccataacatcgtggtcgtggaatgtgatgatggtcggctggaagtggtatgcggcggtgggcgtaccaaagccatcggtttgctggttgaagaagggaaggtcgaccccgatcacgagtggatctcctgcaaagtggttccccgcgaactggcgagggctatctccctgactgaaaacggcagacacaagacaatgcaccctgccgagcagatcgccggattccgttctctggcagaagaagggaaaacaccagcgcaaatcggggacctgctgggctacggtgtgaagcacgtccagcgcatgctcaggctcgcaggactggctccggttcttcttcaggcactggcagaggacaaaataaccaccgaacactgtcaggcgctggcgctggaagataatcccgaccgtcaggtgcaggtgtatgaggctgcgtgtcgtcagagttggaacaataaaccggaagtgcgtgtgatacgtaatctgatcaccgacagccaggtttccaccctcaacaacagcaagtacgcatttgtaggggaaaaggcattctccggcgatgaaatccgcgctgacctgttcagtgacgaacaggggtgttttgtggacaaactggcgctggatacagccctgctggaaaaactccaggtggttgcggagtgcctgaaagaggccgaaggctgggcatgggccaccggacgcctggacgcggtcagttctcacggcgaggacagcgcggtctatcgcattcaggatgagcctgacgcagtttacacggagcaggaacagcagcgcatggatgaattgcagagcgagtatgacgagaatcagaccgccagcgatgacaccgacgcgatggagtcagagatggaggccatcgaatgcgcggcacagctccgggcatggacgccggaaatgcgcgcacagtccggcgtggtggtggcatggcatcagggtgacatctgtgtccagcgcggggtgatcctgcgtgagcagtctgaaacggaagacgaacctgctcaggttcctgtatatgagcgccagcccgaacccgttgacgaaatcagtctgcctctgctgacgaagatgtcctctgaacgtacgctggcccttcaggctgcgctggtacagaagccagagaaaacggtagctctgatggtctggcgtctgtgttcctgcgttttcgataactgcaccacgacccgtcatccgttcgtgatgcgtcttgaggtgcatcacaaccgtctggtcagtgaagccccgtccggtgaagagggaaaagcgtggcagtcccttatgcaggaaaaagcccgtctggaggcgctgttgccggaaggctggaaaaaggatttcaccaccttttttacccttgacggaaagacgctgatgtccctgatggtcttctgtacggcctgttctgtcgatggtgtgcagaccagaacgatgggacataccacacgcagtgatcttgatggtgttgaacgtgctgttgatttcagtctgcatgaatggtggcagccgacgaagaacaatttcttcgactacctgaaaaagccacagattgttcaaatcctcagtgagaacggtttgagcggggccgccagcgatgcgctgaaaatgaagaaatctgacgcagcggacctggctgaaaccatgatggcccgtcactgtcctcagtgggtgcctgtctggatgcgcgcccctgatgcaaaaacgccggatgctgaagcagaaaataactcttctgatgctaccgccactgacgtcccgcctgtggctcacaacaacattccagatgcagcctga

SEQ ID NO: 389241 - DNA, 213 bp, Salmonella enterica
atgcctagacaacatcaggatagcctcttagatgccgcaaggcaaggagaagaaggccatgaaactgccgcgaaacaccctgctcgggtgcgtattgatagtgtgtatcacactactgatattcacttacctgacccgaaaatcgctatgcgaaatccggtacagggacacgaacagggaggtggcggcttttatggcttacgaatccgctaa

SEQ ID NO: 389242 - DNA, 405 bp, Salmonella enterica
atgaacacacaaaacgtcagcatcaaaatcgccgctcaaaaatcatccgaacgatggggttcagacccaaaagcgcgtctggactgtgttatcgcagaacagcgttcgtacctggctcagctgtgccaggtctggaatcttcagttgagccagaaagacgaggccgagcaagtcctgcgccttctcagtctgatgagtgacaacgttcacaaggaaggcgtgttgtgctgggaacgttcatatccgctggtttcgttctatgtcgtacagccgtggttgcaggctaaagatcatgccatccgcttatacggcgttatcggacgtgaggcgtgggaagtcgcgcgaaaagacctttgcaacaacattaattttgctcaggccatgatgcgcctggaagaacgttaa

SEQ ID NO: 389243 - DNA, 264 bp, Salmonella enterica
atgtcacaactgagttttgttgatgtttttaatatggccagagagggggccagtagtaaaaagagtatccgggacgcgcagccggataacgaatcatatccccctgttcagcggctgatgagtgcgcagtacagccgcagccgattcatcagcgtgtttaaatccacggggcgacatctggggcgctgggaggtgttcagtgattttctgtcgctcgctgccagtgaactggatatggcccggttgacatcctccccgccctaa

SEQ ID NO: 389244 - DNA, 1149 bp, Salmonella enterica
atgaggcgctttgctggcgcatgtcgtttcgttttcaatcgtgcgttggctcgccaaaatgagaaccatgaggcgggaaataagtatattccctacaccaaaatggcttcatggctcattgagtggaaatccgtacctgaaacacaatggctgaaagaatcaccctctcagcctttgcaacaggctttaaaagatctcgagcgagcctataaaaacttcttccagaagcggacatcattcccacggtttaaaaagcgtgatcaaagtgattcattccgctacccgcaaggggtaaagctcgatcaggaacataaccgtatatcattgccaaaactgggctggatacgttaccgcaacagccgagaagtcattggcgaagtgaaaaacgtcaccgtcagccagtcatgcgggaagtggtacgtcagtattcagacggaatatgaagtatcggaacctcaacatgaatcaacatcaatggttggtctggatgctggcgtggcaaagctcgctacgctgtcagatggcaccgtttttgagcctgtaaacagctttaaaaccaatcagaagaaactcgccagactccagcgtgaaatgagccgtaaggtgaagttcagcaacaactggcagaagcagaaacgtaaaatacagcgactgcattcccgtatcgcaaacatccgcagggactaccttcataaagtcacaacgacaatcagcaaaaaccacgcaatgatagtcattgaggatttgaaggtgaaaaacctgtcaaagtccgcaacgggtacgcttagccagccggggcgcaatgtccggtcaaaatcaggtttaaaccgttcgatactggaccagggctggtatgaaatgcgccgtcagcttgagtataagcagttctggcgtggcggtcaggtactggcggttccgccagcgtacacaagccagcgttgcgcgtgctgcggtcatacagcgaaagaaaatcgccagtcacaaagtaaattcaggtgtcaggcgtgtggatatacagcgaacgccgatgtaaacggggctcgtaacattttagcggcgggacacgccgtgcttgcctgtggagggatggtgcagtcaggccacccgatgaagcaggaacccaccgaggcgagccaggcttcggtctga

SEQ ID NO: 389245 - DNA, 366 bp, Salmonella enterica
atgccgggcgtcagggacactatccgccgggaaggtattgccaccatcagtgaccccgccagtggtgcggcgggaatgctgattgcttatgcggagtgtctgcttgaagcagatatcaatccttcctggcacatgttcggcagttgcatcgatattgatcctgtggcggctgatatggcttttatccagttgtcactgctgggtattgcagcggaagtggtgacgggtaacacactcactatgcagtttaaccgggtgcggtatacgccagtgtattacttcaacgactttgaaaaacgtctgacggacctgaaccgacacagggttatgctggcatttatgcgtggactatcggatgccgcgtaa

SEQ ID NO: 389246 - DNA, 456 bp, Salmonella enterica
gtgaggaaaactctgattactggactactggcgataacgttttctgttaatgcgcgggactgttttgaaatggcgggcagggattataggatcgagccggatctgttacgggcgatttcgttccgtgagtcgtcatggcgtgataatgcgctcaacgttgtatcacagagcgaatatgctgtcggcaagatgcaaatacactcacaaaatttttcgcatctggctcagttcgggatcactccccggcaactttatactgacagttgcctgaacatttacactggcgcttactaccttgccattgcttttaaacgctggggatactcatggcgggctgtaggggcttataatgcaggatttcgtgaaacggaagtacaggagaaaaagcgccagcaatatgcaaaagaaattcaggcaattaatgttgccatcaaaaaaaatgcgccaccagagtga

SEQ ID NO: 389247 - DNA, 450 bp, Salmonella enterica; identical to SEQ ID NO: 77319

SEQ ID NO: 389248 - DNA, 234 bp, Salmonella enterica
atgaaagagccaaaatctaatatcagaaagctaattgacattggtggattaattggcaaaaaagtgaatattagctgtagtctggatgaagccattgatgaactattaatggagagtgcactcaagagtgggaggagtaaaaaaagagaagctgaattaagactggaggatcatttacgcaggttttctctcgtacctgctgaagaacagtatattgaaaaaaaagtggattaa

SEQ ID NO: 389249 - DNA, 360 bp, Salmonella enterica
atgaatttatccttatcaaaaggcggcctccccgcgtctgtaaaaaaccgtacatggcagtactgccagatggcatggcgtggtgtgaccagtaaaaaagcgctgtcccgtctggccgcgctgtctccgctgctgttactcggtgtgggacagatggccaatgcaaccgacctgctggccgggggcaaggatgatgtgaaagccaccttcggtgccgactcattcgtcatgatgtgtatcatcatcgccgaactgattgtcggtgtggcgatgtatatccgcaccaagaacctgttgatcctgctgggcttggttgtggttatcgtcttcactaccgtcggtcttaccttcatcaactga

SEQ ID NO: 389250 - DNA, 267 bp, Salmonella enterica
atgggcggtagcgtgtccgggcagcatacacaggaaagagtgatggcagacgtactggaccagttgcaggagcaggaagacctgattcacaggctgcacattcaggcggtcagacaacagttaagtgttaaaggtgaaagccttacccggtgtgaatgttgtggaaaccgtattcaggaacggcgccagaaagcgatacctggcgtgcgtacctgcactgagtgtcagcgggtactggaaattcgggaaaaaaattatcagaggtga

SEQ ID NO: 389251 - DNA, 615 bp, Salmonella enterica
atgaaaaaaatcacacttttgctggcaggcagtgccctgctgttatccggttgtgccggtgtcaaaagcagtttcgactgcgatgccacaacgtctgatacctgtatgaccatgacgaaggctaatcaactggctcgggacaaggcggcaaaacaggcgggaaagccggctgcgggcggactgccttccctggttaatttaccggccacctctgctgtaggggttccgtctgcatcccgttccgccgtcagtcccccttccggcacgcggaccgtcagcaccacgccccccgtatctgcaggcacgtccgcaggtgtaaacacaaacacgacaacgtcaacactgacgccccgtccggttgccggaacggcggtcacaaccactccgtcatcagtggcttaccgtccggtcgtctctgtggtcacaccgacaccgtcatgccagaacgtgcgttgtgacaatcccggatctgtgcacccacaacgcagccaggaccagatagccacggtctggattgcgccctgggtggacagcgataacgccttccatcagcccggtcgggtgtcatttgtggtcagtcctgccgactgggttcttccggtcagggtaaattaa

SEQ ID NO: 389252 - DNA, 558 bp, Salmonella enterica
atggtaatggcagtaacgaaaattattgatgtccaatttatacttggcgagaagcagactgtctatggtaatcatgacaaaccggtgaatatactcgatttagtaatagttatttcgtggcatctgacgaatcctgattttcacccaaaaacccaaggttatcttaatttaatgaaactggatgatacatttcagttatctctgaatcctggcaatattaatcttcttgagaacgtctcttcacaagatatcctggagacaaactggttgaatactgagtggtccacggatttcattttaaagaagtggtgggatgaaagcgcgattgctaacttcaaagaggaacatagtgatcttatcaaaagaacaacaactgataatgatattatgacccatattctgatagcggaagtcaaccataaagattttgccagtatgtcaaatatttttgttcgtttagtgaatgatattccggctcggagcaaaacgttttctattgattattcatttggggcaggtacagaaagaaaatcagaatcaaaaacgtttattttgtag

SEQ ID NO: 389253 - DNA, 384 bp, Salmonella enterica
atgcctgacgatctgtttatgaaagaagctatgcaccgggctgtattactgacagacagactgaatccaggaaaagctatcgagtggtgtcgggaaaaagataacttacagttgctgttgtatatgaaaaaacgtacaggagacttgattcacagtaaagccagtccccgggaaataagtgaattctggaaagaatgtaccatgtcaccgaagatggtcggatttatttattgcctggagacagggggggatttgttgtgtcgccagggactgcggggagatctttacagtattccggtattgcacaaggtaatttgtgattttattgccggatatcttcgtccagagaggaaaaaatgtctgaaaacgtattgcggtaattaa

SEQ ID NO: 389254 - DNA, 564 bp, Salmonella enterica
atgaaaagtactgtatgtaattttatattgttggtgagtattgcaggtgttacgattatggacagttacgatacagtaaatagcaacacggaattatggtcacccatttgcagaattgtctcaacagaagaggtctgccagaattccaggagcgtttccggtattcttgcggggaaggaaagagatattattgttcaacagatgccgtttactttacttctgtccggctgtcagggaaaaactctgttcatttcggtgctggcgtcgtacccccaggatgatccttattatgcatattttgacggaagtcgggaggttgaatatcaggtatcgttatccggaaaagccggtactgtctcttatggtgattcagatagtgcaggtatcagcgaagcgctggttttactggacgggagtgaatatggtcgggcaattaagcctgacagtaatcactatatcctggctgtcactacattcctgatgcgtaaaaataatttaccggcaactcccggtttgtataaagcatcatactcctggcgtatttcttacatgccaccagggtag

SEQ ID NO: 389255 - DNA, 603 bp, Salmonella enterica
atgaaaatcaattcgtgttttctctgcgtgtttttgcttagtgttccggtggagagcgtgacagtcatggcagctgatctctctcccgtcagtggtaacggaaaagttaacctctctatgagtctggaagtgccaacctgtaaagttagtgtggagaataccgttcagtcattcactgtctcctcaggtgttgctaacaaaattatgacattaccgaatgcttttactgttgaaaactgtaagggtgactcacttgattttaaggtgacgttttcgaatccggtacctgtcgattattggtgggggccagcaggttatgcggggctcctctgcaatgtcggtagtgattgtacagcctatgaggatgagaattctcccgttgttttctatattattattccagacggaaccaaaggtatttcagggtatttcggacgggttccggatagtagtacaggtcaaacggtgaccatcacgcctgacttgaatcattatacattcaatgctaatacagtgatacctatagtgagtcttgcaaacgccatgcagcgccaccctggtcgtatttctggttcttatacctatatattttcttttaaatag

SEQ ID NO: 389256 - DNA, 612 bp, Salmonella enterica
atgaatattaacatttttctcctggtgacgttactgacgggaggcatgttggggaataccattggggtcatggctgctgatcgtggttcgattccgggggggagcgggaatgtggatattaatgtcagcagagtctccagaacctgtagtgtcgcagtctccggaaataatcagaatttgggtactgtttctttgctctaccctgataatcctggtagtacttatctcaagggcgtgaccgtttttgatctccagggatgtcagaatatggtattaacgttaactatgcaggccgaatctacagtagccactgggcttagccccctgtcccggtatcatgggctatttcctaattatggttcttatgacggtaatttttatgaagtggctctcagtggaaatggaatatccggtgggagaactgatggtgagtttacgcatcttgttccactagacggtggtccggcagatccgcctattttgattaagccggtcgtagacaattatcaactggaggccaccacggtttataatctgtgggtcatcgatttacttggtactaatcctggcacttataagacctggtatacctacaactttacctacgtataa

SEQ ID NO: 389257 - DNA, 606 bp, Salmonella enterica
atggagataaaatatattcccgtgatgatgttactaaccgggctggctggcagcagtgtggttatggcagatacatcaggagcttcgataactaatggtaatggaagtatttcattattgcttcccgtcaccagtggaacctgcagtattgcggtcactgataatattcagaattttgtgctgacttctgacatctttgctgattcgaacaaggcaaaggttatcgccacaaaagataccacattcacccttacagggtgtaagaatgagcagataaatgtatcaattaaagcaaataatgacacgattgataataccctaggcgcactggggccaacaggtaattgtggaaataatgtatgtccaaccattatggggtaccggatcagattaagcagcgcaacagataatgttatttcaggtggtgcgtcgattttgggatacaacaatataatttcattgatgggggatccaatgaaggtaagtcctgataacgacaattgtattattaaagccactactcttctttatttgtatgcccttccggcgtctgatgacaatggcccatggaaaacatcctatacctataactttacgtatgcataa

SEQ ID NO: 389258 - DNA, 651 bp, Salmonella enterica
atgaacagaaagatagctggcatggtgcggctcctgttaccagtattcctgctgacaggcctgtcggtcaatatacaggcggtggctgctgctgatacagaggttgtacccgccggacgtagtaacggagcaatgaccatgagtggactggttcagacaggaacgtgcagtctgtctgccgataataccaccatgaattttaagcccatggacgtaaattatatacagaccatgggtagtggtagcactgttgatagttttgatactgtattaaatcttaataactgtatgggaaataatttaaagataactctctcatctcctaatcaactaggggggagcggcaactatgcatatttatataataatagcgcacctggttatacagggttattttatacagttcagataacggtagactcaggattttgtctaccaaatcccattaggggggacacttgttcttccagttcagtaatggctccattagatggtagaatgagttcagtagttatttctccttactaccagccggacagtaatagttatcgaatgaaactgactactactataatgagtcctttgaccaaggattccatcccggttggcacctatgttggttattattcctataacgtaacctatcagtaa

SEQ ID NO: 389259 - DNA, 630 bp, Salmonella enterica
atgaaatttataaaatatatgttgattatggccagcctggtacctggcgcaggcattatggctgcaaccccagctgttccagctgtcggaggcaatccaacaggtacagttaagattaacggggttatccgtacctctacctgttctattggctctcccagtacgacggatgtggtatttaatatcagtaaagccgatattagtgctgcggcacctggagatctccttaccaaagctcttccagttactattcatgtcagcagttgtaataatacggcgttgggtatgactgttacggcgagtgtttctgatgcatcctctccaacccatggtgcctttggtagctggcgggaccctgacccgcaggatcctaaccatgcactatattatctcgttagcctgaaggatgacccggtggttagtggtggcgatacagctactgatcctggttatcatatccttaaggttaatggtactgcttcgccagttattataaaagatactagcggttcaggagagtttgatctgagtctggtgactaaggtggcgcgtagtcaatatactttctcaccagataagctgaagagtgtgttacatactgcttattactacaccttcacctacgtataa

SEQ ID NO: 389260 - DNA, 186 bp, Salmonella enterica
gtggccgccagagaacaggttgttcctgtctctgaacttactgccgccatgaagcaaattaaagaactccagcgcctgctcgacaagaaaacgatggaaaatgaactccttaaagaagccgttgaatatgggcgtacaaaaaagcggatagcgcacacgcccttattgcccggggatggggaataa

SEQ ID NO: 389261 - DNA, 627 bp, Salmonella enterica
atgaaactttcaaaatatgcgttgattgtggccggcctggtatctagcgcaagcgttatggctgaaacaacaacagctgctccagctgtcggaggcaatccaacaggtacagttaatattaacggggttatccgtacctctacctgttctattggctctcccagtacgacggatgtgggatttaatatcagtaaagccgatattagcgctgtggcttctggcggtttcattgccaaagatcttactccagttactattcatgtcagcagttgtaaggatacggcgttgggtatgactgttaaggcggctagtcctgatgcatccgctaaaacacatggtctttttgataaatcacaggaccctgacaatgcactatattatctcgttggcctgaaggatagcgcggtggttagtggtggcgatacgactactgtttctggttatcatatcgttcaggttgatggtaataatcctgcaggtaatgcaatttctatcaaagatacaagcggttcaggagattttgatctgaatctgcagactatggtggcgcgtaacggtgctacctcaccagataatctggtgagcgcgttagctaccacttatacctacaccttcacctacgcataa

SEQ ID NO: 389262 - DNA, 636 bp, Salmonella enterica
atggtgacttgctgcgcgaaaaatcgggtacccagaaataaattatcggaagcagaaagacagccgattctggaaatatgcaattcccctgagtttgcatctttgtcgccaaatgtgattgtgccaatgctggtggataaaggtgtttatattgccgctgaatcaacctcttatcatgtactaaaatcagcaaatcaactaacgagaagttcctgtgaatgtcagtataagcggcctgatgtgcttaaggctgttgcaccgaaccaggtctggagttgggacatcagttacctgccgtcctgggtcaggggtcagcatttttacctctatatgatcattgatatttatagccgtaaaattatcgccgctgaggtattaacgagtgaaacgggggaacacgcagcagaactgctacaacgtgcggtgtggagcgaaaaatgctcatccagtaaccaggtacttcattctgacaacgaaagcccaatgcgcagctatacgttacaggcaaaaatgtatgcccccggcgtactgagttcatactttcgcccccgggtcagcaatataatccgtattcagaatcgttgtttcgcacactcaagtattgcccctggtggccagagagcggctttcacataa

SEQ ID NO: 389263 - DNA, 132 bp, Salmonella enterica
atgcctgcacatgcagtaccgattgatgtgaaagaaaagggagtgatgtggcttttacctccctatagctggtccgtcagacatattgcacaaaaattggctctgagttcttccgttgttgcaaaatggtga

SEQ ID NO: 389264 - DNA, 330 bp, Salmonella enterica
atggtgaaattgcaacagctacagcgttttgaggacgggaaaaaatggtcaatggcgaccactgaccgccccgcccattcgcccttgtactggagctggcgcacaagttcactccagctcgcgtcggctatcgcactggacagcgacgggttgcggatcatgttcttcaccttgagggattcaacgcaaacaacttggttttcgttaatcagtttgcgggtggccttgtgtaaggcatccattcggcaatcggcaattttcgcgtggagtcgggccacctttaagctggctttggcgcggttctttgagcctttggcttttttgctttag

SEQ ID NO: 389265 - DNA, 198 bp, Salmonella enterica
atgaatatggtatatctgggtatcgatctggctaaaaatgcttttcagctttgtgagctaaaccaggccgatatgccagtttattcaaaatgcactggtcagaaaggattactccagacggtggcaaatattccggcctgcctggtgtcgaagcgtccacgggggcattttactggcagcgtgagtttgaaaaactga

SEQ ID NO: 389266 - DNA, 498 bp, Salmonella enterica
atgttaagagcaacaaaagtacgcatctatccgacaccagaacagactgaatatctcaatgctcagtttggtgcggttcgttttgcgtacaacaaagctctgcatatcaagaaacacgcttaccagcgacacggcgttaatttaaatccacgtaaagacctcaagccactgcttgcagtggcgaagaaatcccgtagatatggatggcttaaagaatatgattcgattgcgttgcagcaggcagtgattaatctcgacgtggctttttccaatttctttaatccgaaattaaaagctcgtttccctgcattcaaacgtaaacatggcaaacaatcgagctatcattgtgttggggtgaaagtgctggatggtgcagtcaaaatccctaaaatatcagcgattgaagcacgattgcatcgtgaaattactggctcgttaaaaagcatcacaataacccgcagcgcaacgggggaagtattacgccttgctactctgtga

SEQ ID NO: 389267 - DNA, 576 bp, Salmonella enterica
atgaaacgttcagaattagagacggatgcaagtttcatactggcgtccatgaatggaagggattatgaaattccaaccaataaaatgattatgagtataatttttggtaggttaaagtacgtttattttcttcagattatctttgttgttctgtcctttttaatttataaagaaccaggagatttagattatcaatttaaaaaaataatctatcttagcttgctttcttgtgtaacaatggctttttttagccttgtttttatcgcggctacatacagtaatgtgtgtatgtttctgacgttaggagatgatgtaaggcgagattcaattttattgaaaatagttaagaataaaattctattttatacacgtctattgcttattgtgaattctctagttggctgtgttttgctgtgggcaggtgagccttttgtcgcaggactaggattttcatggtttgcaacttttattgttagtatgttgtttttacagggatcattatcccgatatatgactcccgcagtagtcagtagtctgtcaaaagtgaaagagttgctttctgcctcgccaaaataa

SEQ ID NO: 389268 - DNA, 2895 bp, Salmonella enterica
atgtccgtggaaacgatttataccgtggcgggtggggcgtggttccaggatacgctgaatggcgtcgccgctttttttaacagccgggcaggggatgcgctgattgcgatggccactgccgtctcggtggctgtgggggcagcaacctatatccggacccataatctgatggacctgatgaagtgggtggcgttctacgttattgtcattggcgtcatgattggtgataaaacgcatgttcaggtggtggatctgtctgaacctgccgccatttatcaggtggataatgtcccgaccgggctggctgcgccggcaagtatcattacccgtgttggggcagggatgtcgcaggcttacgattacatttttgcccgcccggatgcgctgacttacagcaaaaccgggatgcttttcggggcgcaactggcggcaggcagcacagactttcggttctcggagccggaaatccagcgtatgttcacggattatgtccacaactgtgtggtcggcgatatcatgctgaacaacaagtacaccgtcggggacctgatgaactcgcctgacccgtatgcacttattttcagccgtcccagcccgctgcgcggcctgtacgataaaaaccgtaattttctgacctgtgaacaggctgccacaaaaattaacaccgactccagtgatatcagcggagccaatccggtgccgttcctgcagcaggtgctgaatatgacccacgggttcacaaaccaggtgtttgggccgacaaacgggaacagaacggcgctgttcaccgaaatgttgggtgacagttacagctattttcacggcacgtccctgacctccaccgaaattatccgcaagaacgtgataatgaatggcctgcgcagcggactggagagcttttctgcccagaacggggatacggcggggctggtgaacgtggccacacagacctcgatggccaaaatgcgcctctcgcaggcaaccagcgcctcagtggccgccaatacattaccggttatgtactcggtgctgctgggtatgaccatcgccctgttcccactacttgttgcgatggctctggtgagttccctgtcctggaccattattaagggctacgtctacaccatcgcctgtctgcagatgtggccgctgctgttctccatcctgaatcatgcaatgaatttttacctgcagggaaaactcaacggtacgccggtgacgctggccacgtttgaccaggtgcagaacacctactcggacatcgggaccacggcggggtggctggcactgtccatcccgttcatcgcttacggaatggtaagagggctggggcaggtggtgtcgcaggcagggaactatctcgggcagacgctgcagtcagcctccacacagtcgtcctcgcaggctgtcgacggcaactggtcctataacaatatgacgaccgggaacgtgcagggtaacaagtgggataccaactacagtcatcgtgaaggacatatgaccagtcagttggatagcggggcgacgaagacactgacgtcttccgggcagtcggtttacaacaccacagaggcgatttcaaagctgccggttgatattgcactgggtaaaaccgcatccagcagctggcaacagcaacagcgtgacgccatgagtgaggcgcagagcctcagcaatagcctgtcgcagacttccagtctggccacctcgcagatgagccagtggagccagcagcggggcaacagcgacaccaccgtggctggcagcgacgcctcaacaggcagcaacctgaccaaagcgctgaacaccattcagtcaattgggtcgcgatatgcaagggatgaaaatgtcagtcttgcggaagcagtgcgggcagcggccatcaagagtcaggatatgagcgctggcgcaggaggaagtgcgcaagtctcatttgatacagatcgccatattctcgggaagattggtggactggcaacagggttgaaaggttctgctgaagggcatctcaagacggagtataccggtagaagcggctcctcacatggcaccagttccgatctgactcaacagggcgggaccagcaaagggttcagtgcccaagagcttaaggattttcgcgatgcgatggacgtggtggcgtccagccgcgtgaccgacagcggcagtcatacggacaatgcgtctgcttcgctggcgaaccagttgtcgtccaccttctccagcctgaaaagccaggcgtcgcagtacaatgatgcggtcacccgcagccacgagtactcacagctggccagctatgcagaaaataacagtgccagcattaaccagaactactcgcaggagttcgtcgggtatgtcaccagtcaacgtccgggtgaggctgaccaactgctctctgatgcggccagcccggaagtgcgtgccgagcgcgacagactggcgcaggcatttgtggaagaccgcatgaagccgcacttgctgcaggagtttgagcagaacaggggccgtaccagcgaggggatgggaagtgtgggggctccctctggtggtggtaatctgcagagtgaatatgatgcgcaacagacacaaatggaaaaccgggccaacgctggcggcgtgaggcagcagggtgacgtcagtggagatgtagccgacagacgccgtcacgctgaatctcaggtcaatgatgaaaaaaatactgtaatctcttccggcaatacaccgaaggaagaatacaaccgcttgcagagtgagcatgaacagggtaataaaaactttagtgatgctaaggcagctgaggaagacagacaaaaatgggatggtggtagtggcaaagggctagaagatttaaataatataaaggatgatttacagaaacggataagtaagccataa

SEQ ID NO: 389269 - DNA, 612 bp, Salmonella enterica
atgctaattactgtattacggaccgccatcctgatggcggcgatactgtccggctgtttgcacgccgggacactggatgatatccgtgctcttgaagccggaaaaacggggcgcagcgcccctgcaatggacgctctcagcctgccggataacaggacaacaccgacaacagaccgtgccgctcaggatacgtcacctgtctggtatacgctgagtgacgggcggaaagttaacctgcaggactggaaagtggtgctgttcatgcagtcgacctgtccgtactgccgccagtttgcgccggtgctgaaagccttttctcagaagacgggctttgatgtctttcccatcagccttgacgggaagggtgatgccgaatttcctgatgtgcttcccgccacgcctgatgtgatggtggaatattttcagagcggcctgccggtggccacgccaaccacctttctgaccaacgtcaacacgatggaaacctggccgctgctgcagggggccgcagaggctggtgagtttcgcagccggctcgatgaggtgctgcgtatggcactggatcggcagtcagggaaaagaattccactcaacgcgcagggacaacgatga

SEQ ID NO: 389270 - DNA, 135 bp, Salmonella enterica
atgacggaggtagctttctggatccacgccgttcagtttgcacctcccgataagactgtacagcaacgctccgcgctcaccaccatggtcgaaaccgaagaacaggaagtttttgcgacccaggctgagggatga

SEQ ID NO: 389271 - DNA, 228 bp, Salmonella enterica
atgttagatgctcttaaccagcgttacagacataaaaaatcagttacgttgatactggataactactcaatccataaaagtaagaaggtaaaaatatggctggaagaacatcgcaatttcaatctgttatttttacctgcctattcaccatggctgaacaaaatcgaactcctctggctggtgctacacgaaaacgtgatccgaaatcatcagtgccagtttatgtag

SEQ ID NO: 389272 - DNA, 1797 bp, Salmonella enterica
atgaaaagtctgattttgcgggcggctttcgatcgccctgagaaagtgtaccgcgcgcctttcctgttcacgcctctggccctgattgtctgcactggtgttcaggcggctgtcgtgccctctgtgcccggtgcagggacgctgggaaaccagttgcgccaggagtcagtgcgcacgccggcggcaccggtcagtgcgccactggtactgcctgaagaagggcaggcccgtcgcgcgctgtcggcggataatcataccacggttagcgtgaagcgggtggtgttcaccggaaatcctccgggactgagggggctgagtgaggctgacctgcagcgtgagctggccgtcgacctgaaccgcccacagacctttgccgggctggaggccatggcacaaaaaatcaccaccctgtaccaccatcatgggttgctggttgcccgggcggtcctgccgccacagacgatgacagatggcgtgctcaccatccggattatacccgggcgttatgacagtatgcatatcagcaatacctcttctgtcattacccctgtcgctgagcggctggccggtactgtcacgcctcagggtgacgtggtgacccgtgagcaactggagcgtgaagccctgttgctgggcgaaattccgggagtgaatgcccgggtgtccatgacgaccggcagtctgcagggcaccaccacgccggaaattaccctgaccccgggtcagcggttcgggggctacatcgggctggataaccagggagacccgacgaccggacgcagccgggtgatgctgggaggctatgcaaataatctgttgggcctgggcgaccagttgcgggttgacctgctggatgcttacgaaaaaagtgacctgtttaacggctcactggactacagcctgctggcgggcggcgggtatggcacacgcgtcggcgtcagctacagccacctgaactaccactacaacctgagcggactgggcttcaatggctattcggataactgggggctgtatgtcacccagccgtggatacgtacctcccgggcgcgggtggatgttcgcctgaatgccgggcagcagttcctgacagataaatatccggacgtttttgcggccgacagcaccccgcgtgggcgtaagcgggtgaatattggtagcgctgccattaccggctctgtcgcggacctgcccggtggtctgaccggttttggctttgtcgggaccaccgggaatgtcgggttgcgcagtgagttctcccgttatatttccggtgatgcggattcaggtggtcagtttgcgcgttttaattaccagattaaccatgaccagcaggtctggggcccgttctcggtatatgccggggtgaatggtcagctggcgaataacaatctggacgcgtcacagaagtttctgatgggcgggccgtcggcggtacgtgcctgtgatatcggggacggggcagtggaccagggtgtggtggggacggcagaggtccgcagccgctggtccctgcctgcgccggcgtggctgggtcacgccccggacctgacggtggccaccttttatgaccagggctggggtgagcagtggcgtaataacgacaacggtcgtggcggacgccttgctgacagcaacaacctgaacctggccggagctggtctgtatgccacagtggcggacgcggggagctatgccctgacccttacctgggcacaccggaccggtaacgcagacccgaacgcggtgcatgatgaccacgaccgtttctgggtgtcggcggtaaaaacgttctga

SEQ ID NO: 389273 - DNA, 7695 bp, Salmonella enterica
atgaacagaatatataaacttaaattcgacaaacgccggaatgaactggtgattgtcagtgaaattacggcgggtgccggtaaggaaaagagcacgggtcatatcgcagacctgtcggcacttcccccgttcagaaaactgccggggaggttaacgcctgtggcgctgctgaccgggctgatttcggggctgttgccggcgatggtactggcggctgacctgcccactggcgggcagatagtgggtggccaggggagtatcagcacgtccggcagccagatgaccattcatcagcagacgcagaacatggccaccaactggcacagttttgatattggtaaaaacaacaccgtgcagttcgtgcagcccgacagcagctcggtggcgctgaaccgggtgacgggggccagcgggtcgcagattatggggaccctgaaagccaacggccgggtgttcatcctcaacccgaacggtgtgctgttcgggaaaggcgcaagggtgaacgttggcggcctggtggcctctacgaaacacctcagcaccgcggactttatgaaggggcagtacacgctgagtggcagcggcaatcctggcgcacaggtggtgaaccagggcagcctgacgacgtcgaagggcggctacatcgtgctggccggggagcgggtcagcaacagcgggaccgtcaccacgccgtccgggaaaacggtgctggcagccggtaaaacggtgaccctgcagctggataacggcggtctgacgtcggtgtcggtgaacggcagcgtggtgaatgccctggtggagaaccgggggctgatatcagccactgacgggcaggtgtacctgacggcgaagggacaggacatgctgctgaagacggtggtgaacaacagcggcaccgttgaggcaaaagggctggcgagccggggcggcgagatagtgctgaacggcggcgacagtggggtggtaagccagtccggtctgttgctggcagacagtcagaccggccagggtggaaaaatcacgctggagggacagaacatccacctggaaggtcgcagcctgacctcggcgaccgggaaagcgggtggcggtgaggtgtacgcgggcggcggctggcaggggaaggacagcggcatcagaaacgcctcaaaggtggtgatggacaaagcggccacggttgacgtgtccgccaccgaaaatggcaatggcggtacggccgtactgtggtctgaggattacacgaacttccgggggacggtcctcgcgaaaggcggcgcccggtcaggtaacggcgggaaggtggaaacgtcgtctcatcagaatcttcaggcatccggtgacgtggatgcgtcggcacgcgccgggcgtggcggagagtggctgctggacccgacggacgtgaacatcgtggggacgggttcagaaacgggtattgactccgccatcgcggacgggacggacatcttcaccccgacggcggcgggggcgcagattctcaacaccagtatcgtgagtcagctgaacgccgggacgaacgtgaccatcaaaaccagcggcgtggatacggacgggaagtcggggaacatcacggtcaatgcggacatcgtcaaaaacgccggcacggacgcgacgctgacgttgctggcggataacaatatctggacgaaggatcgcgtcagcatgggggcctcgaccgggaagctgaacctgaacctgctggcgggtaacacgacaaacaatgcctccgtcagtctcggtcagttcatcaatatctcgctcaacgggggcgactttctggcgggcgcggcgaatgcagagaatggtatctcactaacgtacaggaacaatggcaaaattcagggggggaatgtgaccctgaacgtctcccggggcctgagtgggtatgcctggaacgccagggcggacaatgacctgacggtgaacgggccggtgagcgcctcgacgggctggggcgtgacgctgggcctgagtgctggcgggaaggtcgcgataaactcaccgggcagtatcagtctgcaggcaagcgagacggacaacggcggcgggcacgtacttatcagcggagacaagggcgtcagtctcaatgctgcgaatgggaacattaatctgaaggcggctgataattctgcgaaccatgtaaatatcaccagcacctcaggtgatatttctatgagtgccaggggaactcttggcctgaccgttactgatatttcttcaacaggaggaaacatcagtctgatgagcgataacaccagcggaacgtcattttctttcactaaaaccaacattaccagcagcggaggtgcggtgacactttctgctctgagtaatacgcatggcgaagggcttctgatgtcgaactcttcagtatcagcaaaaaatgacattagtggtaatttttcgcaacgcgtcgaaattaagcaaggcacccttacttctgaagatggaaatatcactattgcccggggtatcagtatcaacaacgccacgggaacgaatcttcttaatacaaatgtaacggccgtaaatggcaccattaacctgaatggtacaagtgtgagtggggtggcgctcaacctgaacaatgtcactctgaatgccactgccgccaccatcaaaggtgacagttcgtcgtccggaacgggtttcagcttaacgaatatgtcgtttgccggggcgctggcggatttaattaatgtcaccctgagctctgcgggctcggcggcaggggttgttaacaccctcgacagcagtgtggtgaatgatgccaaccgggataatctgctggcaaaacgcatcgagaacatgacctcggtggatatgggcggaaaggcgttatttgacgacagcacagaagtcaaaaagggctggacaggggattacaccctggcagacctgccggctcatggctggatattcagcaataccagcgtgaaggcgggcggacaggttgcgctcaccggcgtgggtttcagtaacaccacgatggatatcacctccggggggctgaacatcacccagagcgccccgctgctgctgacgaatactacgataaatgtgagcggtggcgtgctgcttcactcggacggtaacctgagcctgaccgggagtaccctgaatgaaatatcgtcgggtgatgaagacgtgaatctgtttgccgggcagaacatgacccttggcggggcagtgattaatgccagtgccggaaagctgaatattacccttcaggcgggagagaaggattccgccatggtgtatctgaaggaccggaccacgctgaacagcaacgggggaaatatcaccatcgaaaggggcaataatacggctactaacccgaacgccatggcagtgaagataaacaacgccgtgctgaacgccggagccacggatgccacgcagccatccggcgacattctcatcagtaccctgaacccgaacgtcaacctgagccagtcacagtacaataacacggtgcgtaacgccggggtggcgctggagctcagcggtaacgcgtcgctgaccgggcgagacctggtgctgaatgccacgcaggaaggggggaatgcgaaaaatctgccggtcttcctgaacaacgccaccctgacggcgacccgcgatatcacgctgaaggggacttcgctgcctgttatcacgaacacgacggcggaggacggcacggtcacgacgaacacgagctcgcctgctgcggcagccattgagctgcgtggtcagggtaacgtgctgacggcgggcggtaatattgccatcgagaatcaggccagtggcggtaacaacggcatttacctgaatggctcagcgacaggcaaaacacagctgacggcgaatggcacgattacactgaacggtagctccgtcagcggcagtggtgttcaggtgacgaatgccatcctgaatgcgtcgcgggcgaacattaccggcagcagcaactcaggtactggcttcagcctgactaacagcacgcttgccggtgccctggcggacctggttaacgtgagtctgagttctgcggggtcaggtgccggagtgatgaacgtactcgacagcagtattgtgactacagctaaccgcgataacctgctggagaagaagattgaaaacatgacgaccctggagatgggcgggagtgcaatatttgacgacagcacgaagacggacaaaggctggaaacataattatacctcaacagatacccccaacggcgggtgggtatttaacaacacgacggtaaatgccggcggtgatgtcgacctgaaaggtgcggcctttaccaacgcgacggtgacggtgagcaacggcaacctgacgctggacaataatggtccggcaccactgaccggaacgacgataacggtcagtaacggtgcagtgagcgtacacgccggtgcgggtaacattgacctgagtcacggcaatatcagcgcgaacggggatatcaccctgaaggcggatgcaggctccattgctgtttcgggcgcaaacgccacggcaaaagcgaatatcacctcggctacgggaaatatttccattaacactaaagacgcaccaaaaaatatcgggctggttgtgaataacgtgacgttcagtgctgatagcaatatcagtatcgatgctgtcgccggtctggctggcgcacagatcagaggagcaaatttcaccgcaactaaagggcatattaatctcaacggctctgccagccggggaggatttgatggttcgaatgctgaatttggcggtatgctcctttacggcgatctgctttttaaagcgggaactggtaccacaattaatgccactcatgcttctcatgcagccgcgtattctccaccggtagcactggtttttgagggcgctaatataacgtttgacggtggagctgaaattgatgcccgtggctcgtacgccggcattgttgtatcttcatctgctttttataagccaactaagatacaggtgtttgtcaaaaatggagatgtgaatattaatgccacgctggatggcctggctgtgagtggccctaccggtgggtggggggcatcggcatcgggagccattacttttaataacgggtacgaagtggtttcattctacctggatgttgataaaggctcaaatgttacgattaacgctgattcttctgccaataagtctggtccgtttgcagcctttgctgcagcaacaccggaggcgactgcagcaggctcgcatcataatggttttgtttttagtggtggcgggaatatttctgtcagtgcagtatccgactcagcggatgcggttaacctgcgtttatttaataacgaaaacctcacggggaatttagcgattaccgggacaagtgagtccggtgtcggggtaaattttgatgaatatttgtccaccaaagtcagtaatgccactattaccgggagtagtgtatctggcgtgggggtacaaatgacggcgaagaacgggagtgcggatctgaatggcaacagcgtatccggttcaacggcgacaggtaaaggcggggttatactgtccggcagtaatgtgaccattaccaacggtacgctgaccggaaacgccactgacggcaacggctccggaatttcaatggttggaggaagcagcttcatccttgacggtgcaactgtaggtggcaatgccgttgatggctctggtatttcagttaacggcacgcttaccgtaaataacgggacgacggtggatggtcatgcccgggggcgcgggaacggggtggtggtttccggcgacctcaccaccgacagcggtaatggcatcacgatttcaggcatagcatcttccggtgacggagttaaggtcgatggtgacaccaggctgacagcggcaactcttacaggacatacggacagcggagtcggggtgaacattgccggcaacctgaccacggacaatgtcacgcaggtgagtggccaggctgccagcggaacaggtgtcaatcttggcgcggctctcagcggcgcaacggttgaggggcactccgacactggtacgggtgtgcagttggcggatgacgcggtggtgacaggggccgtgctgaaggggagttccacctccggtgacggcgtggctgtcacggggaatgtgatgctggatgataccagtgccgcggccctgaaggcctcttcgacgaacggttcagggctgaagcttgcggataatgcaaatgtcagcattcagactatcacccgggtcactcagaccaaaaaggacgcagatggtaatccggtactgggtacagacggcaagccggtaacggagaccgtcaccacacaggctccggtcaccacgccggtgacgctgacgggaacctcagagcacggcacggggattgccaccgagggtaatgtgagtatcagcgggattgtactgaacggcagaacaactgcagatacgggaacgggggtgagtctgggcggtaacctgacgatagcggatgacatctcaggagtgacggcaggtgcgaccggtaacgggacggcgcttgtcgtgaacaatgccagcattcactcagacggttataccgacagcgggaaggactttgtcatcaatgcttctgtgtcagggaacggcacagccattaaaacccggggcagcagtcaactggatgaggtggtgctcaacggtgaggccacggggggcggcacggcagtcgagctgggcggtcaggtgtcgggggcgaacatcacgggcacgtcagacagtggcacggcggtacgggtgactgacggggctggcgttgatgacactgtagtgaaaggccattcggacagcggtacggggttgcaggtgagcggcaacgcatccctgaacaactccgggctgagcggtaccacgcagaccggaaccggggccgcggtggcgggcagcctgacagcggataacgcttcgcaggtgaccggccaggccacgcagagtggcggtactggtgtcacggtggacggtacggtgaccggcggtacggtgaccggggaagcaaccagcggagacgcggtccgtattgcggatggttctcagcttaccggcgcagacatcaaagggactgccgtcaccggcacaggcattaagacgcagggtaatgtcaccctggaaggtggtactcacctggcgggcgggtctgagcagggagtcgcactggatgtgtccggtatgctgaaccatgacccggattcttcggtgacaacgacgcctgataacaccggaaacgtcattggtcacgagaatatccacgaagtcatcccggtcgtaccacctgtaccggatggggacgacaacagccagccagaccaccttccggatggcgacgtcgataaaccagctgtggacaacccatcagtaccgtctgagcctgtgtatgaacatgaacacagcaagtcacatgatgcgtcactcatcaggcgggctgaggtaagcagtcagcgcagggaggaggtaaacgcgcaggtcacgcagcggagccagccagcacggggcgatttccactctgcaggcacaccgccggttccggtggacggatatgagccggctgcacagccggtggatatcagcctgtgtgacggcaacgactgccagtcagagtcactggataccggaaaaccggtgaaggggaatgtgacgccttccggcagataa

SEQ ID NO: 389274 - DNA, 2022 bp, Salmonella enterica
atgacttcccggacttcagaggctgaaaatacgaccaccggaacacatgaccggggggagattgtcggtgtagccgtcggccaccatgctcagccggataattttaatctggagcagtttgagtatctggtaacacagcctgacaccgaacaggccgcccggatgctgctttttttgctggagcagctcgacaggaattacggccagtggggaccgcggttttcggcgtactcgccgggtacggcgctggaagggctgaatcctgttctgtgtacccggattgccggggccgtgaccacgcttttttcccgcccggactttacggtcagcgaggagggttacgtacaactgatgaacctgcaccgttggctggcgctggtttttgccgtcagcctctacaggcatgctgaccacatcatccgcaatatcaacgcggcgggcggcggcgtggttgatccgctgacgctcaacggccacaacctgcctctgttctgcctgtgctatttcccggactcgcagatagccctgcagccggacgtactgtggcagtacgaccgccggacggtggcccggctctttctggcgcttatcagcgggcgggctttaccgacgcctgcggcgcacggcaagcgggaacagttgctggcctggttaccggaccggcttgcggagctggactccctggacttcttaccgactgcggtgctgcatgatgtgtatatgcactgctcttatgcggaccttgcggaaaagcaccggataaaacgcagcctgaacgaccttatccggcgttcactgctggcgggtgattttgctgatatcgcagtggaggatagtcggggacagacggccactgaccacccggatattcagggaccacccaaaaaaccggttatgctggttgtgctggagtggttcaccagccagcacagcgtgtaccggacccactcccgggcgctggccgccctgcgcgggcgtttcaccgtccatgcggtggggctgaccacagcggtggatacggtgagccggcaaatctttgatgtcttccacggggtggacaccgcgtctgccctgcaggacgcctgggccattgccggggagctgcgtccggacgtggtgctgtacgccggaataggcatgtttcccttcacaatttatctgagcaatctgcgcctggccccgctgcagctggtcggtcttggtcacggggcctcgacgttctgcggacagataaacggctttgtgattgaggatgacctggtcggggaagagcgttgcttcagcgaaacggttatccgggttcccgctgattctatgccttttgtgcccccggccggtatccgccgcgtgccggtcacacgcacgccgtttctcacccgccagcaggcgcagtggcgcgagccgctgccggtccgggtggcggtgtgcgcctccatcatgaaaattaacccgaattttctggcgacgctcgccgaaatacagcgccgcagccgggtggccatccggtactgcttttacatgggttttgcgcagggcctgacgctggactacctgcgggacgccatccatgctgtgctgccaggggctgaggtgaatgcccacatgccggtacaggcgtatcagaccgccctgaacagctgcgagctgttcgttagtccattcccttacgggaatatgaacggcgtggtggatgcggtacgccagggactgccgggcgtgtgcctgaccggaccggaggtgcacagccatattgacgggggacttttccgccgcctggggctcccggaagagctgactgccacaggctatgaggcgtacatccggaccgtcctgcgtctggtggaagagcatgactggcgcgagatgctgcagcaccagttgctggacaacgacgtggagcaggtcctgttccaggggcatccggaggagtttgccgccgtcatcagcgatgtgtggcagcagttccggccctttgtggcggcttctgacagggggcgtaagtcccgcaggaaggcctcatga

SEQ ID NO: 389275 - DNA, 486 bp, Salmonella enterica
atgaaacacctgccttttttccaccccggaaattttgatgataacggtctgctgaaggccccggtgtttttctgggtcgggctggttgtgctgatgcgggcctggtggctgacaggactgatgtccatgatggtaccggcaggcaacatacaggccggttttctctggccggatatccggcttcagttcgtcacgctggccgcaggcattcctggtatggcgatgctgtttatttacccgttgcggggcctgttgccccgcctgtcccgggctaactacgcgctgatactggctgcgattgtggtgatggcggtgacggacctgacggggctaatgattgcgccccccgggggatgggatgcgggatggttctttctgtgtctggatatggcgggcggggtgatgctatggcctgaccggtggttgcgggcggtgttttttaacccgccccgtcagcaacacggcgcgatacgtaacgggaggtga

SEQ ID NO: 389276 - DNA, 384 bp, Salmonella enterica
atgtcagaaagtcttttcattcaggaagtcaggcaccgcgccggcctcctgaccgggagttttaatccgggcagggccatcagatgggtcagtaatcccggtaatcatcagcgcttattttgcctgctggaagagacccgtcagtacctgtctggtgacagtacgccacaggaagtgagtgcgttctgggacggtctggatgcgtcaccggagataaacgtgtttatttcctgcctggttccggaggcgcaggtgctgagagcacggggcagaaagggtgatatctacagtattccggtgctccactgtgtggtgcgccattttatccagcattatctgcgatgcacgccggaaataacgcctgaaatagcgatggacgtgtag

SEQ ID NO: 389277 - DNA, 516 bp, Salmonella enterica
atgacagggaaactgtacagcagcgacaagcataacacgactgacgggaatgcgcctgccgggaagaaaaaagtgaaacagagtaaccacaatgtttacatcatacccgccagtatggcggcctgggccgatgagcctttatatctggtggtggcccgctggggactgcagcagaaaaagtggataaaccgcaatgacatcgccgcggcgtttcatatgccgggccggcgggcgtcatttcagctgtcttatatttcgcgcaaaaaagagcgggtggtctgccggactcgctacatgcaggttgaaggaggagggagtcagcggatggagatttttatcgacagtattctgtcgggcctggaggagggcccgacacatgcatctccgcgcaggcgaaatgtcccggctaaacagaccggtcctacgtctcgcggagtgggcagcggtatggccggcaacaccggattatgggagcaactgcttaaaggatgccgggagggtcgcgatgatgaatga

SEQ ID NO: 389278 - DNA, 762 bp, Salmonella enterica
atgatgaatgagtccccggttatcttctgccgggaatgggctgtgacggtggctctgacggcatatctggcaccggcatattcccgtccggtcacggcggtgtacggcgtgtcacaactggtctgtctgttagaggagcacccgcacaccccggtggtgctggggctgcgtccacatgaacatgtggcggacctgtaccggctgcaaccgttgttagccggtcgggcagtactgtttgtgggacgctgcttttactggacggactacagcctggcggaatggctggggctggagcagtatgagttctgttcatgggacaccatccaggacccgttctcgcggcgaatggagttgaggcgcttcagacaacagcagcctgcaggtgaaaatgacgataacgtggcggtcccgggcgctgatatttttattccgtctctctctgccatgactgagaaacagatactggagagggccaaccggtggctgtacggggagctgtcagcctgtggtctgaccggaaatgaaatccgggtgctgtcactcatggctgagggggagaaaggggatatgccgtcccgggtgcgtagtctgtataaaaataacgggctgtacaggctcgggatgacaaaacatctgataaatctgtaccggggagtaaagatccgtccggaactgcagaccgggctgccattgcaggctgaggaaagtggcacatccggaacagcaaatatcctcccgttcaggcaggaggctggatggtga

SEQ ID NO: 389279 - DNA, 1236 bp, Salmonella enterica
atggtgaaccggaatcctccggcaggcagccgcaaaattccgctggggacggatgtgctgacggcggcccggcagcgcattgctgacactttcgaccagtttgaccgtctctgtctgtcgttttccggcggcaaggactcgacggtgatgctgcacctggtggcggaggaagcgcgtaagcgaggtcgtaaattcagcattctgtttatcgactgggaggtacagtacaacgccaccctcgcccatgtggcagccatgcgggtgcggtacagtgactgtactgaagcgttcttccacatctgcctgccgatgaccacggtgaacggggtctcagctgttcagccggaatggacggcctgggagccgggagtggcgtgggtccgccagccgccgacagattctgttactgatccggcatactttccgttttaccgcagcggaatgacctttgaaagctttgttccggcgtttaacacctggtttgcacagggcgtaagagcagcaaccctggtgggaatacgggcggatgaatcgctcaatcgctttcttgccatcagctcccggcgcaagctgcggctgtcgccggaccggccctggaccaccctgcagccgggcggggactgctggagcgtgtatccgctttacgactggcatgtcacggatatctggcgttttcatgccgtgaccggcctgccgtataacccggtgtatgacctgatgttccgggcgggagtcagcctggcggccatgcgtatctgcgaaccgtttggcccggagcagcgcaaggggctgtggctctatcacgttctggaaccggagacatgggcccgtgcctgtgaacgggtgagcggggccgccagtggtgcaaagtatgtccgcagtgggcggcagtattttggtcggcagaggccggaaaaaccggcccaccatacctggcagagttatgcctgctttctgctggacagtctgccacagccggtagccgaacactaccggaccaaaattgcggtgtacctgcactggtaccaggaacgggagtggccgcagggaataccggatgagcaggacggtgacacgggcgggcgggatattccgtcctggcggcgtatctgtaaggtcattctgcgaaatgattactggtgtcgggggctgtcattcagcccaaccaaaaaccataactaccggaactatatggcgcggctgaagcgtcagcgggaggaatgggggctgatatga

SEQ ID NO: 389280 - DNA, 633 bp, Salmonella enterica
atgaacaaaataatggaggaatgtctgcagcgtctggaaacggtgctcagggagatggatgagacggcccggacacaggcgctgaacactatccgccagcgcctgcatgccctgagcccgtttcgcgatgagcctgtggactgcgtgctgtggctgccggccgtaaaggtgcgtgcgaatgattataacccaaatgtgatggccccggcggagcaacgcctgcttcacacgtcgctgctgacagaggggtacacccagccggtggtagtggtgcaggccgggcggggctacagcgtggtggacggctaccaccggatgcaactgggtaaacacaaaccacgcctgcgggagcggcttaagggttatctgccggtggtgctggttcacgagactggcggaggtgatgccgagcgtcgggctgccaccgtacggcataaccgggcaaggggccagcatgcagtgaccgcgatgtcggacctggtgcgtgacctggcccgtctgggctgggaagacgggcggatagcaacagagctggggatggatgcggatgaagtgctgcgtctgaagcaaatcagcggtctggcggaaatgttcggagatggtacgttttcagaggcatggaccgtggaatag

SEQ ID NO: 389281 - DNA, 327 bp, Salmonella enterica
atgaaagacggtatttatacggtggtgtttgagagtattcagcaatcgatgggggagggtgttgtggtggtcagtaacggccggttacacggcggtgatattgccttcactatccggggggtaatgaaacgaccagtgatggaactggaggtacattattacaatcgggagattccgtcggtgcttgggatggaggaggattactggctggagatgagttactgcgatgccggagaaggacgctatgatttctctggtcatgtgaaagggcatccggaacgaatgctgaaggcctgtgcggtatttctgacgcctttgctcaaatga

SEQ ID NO: 389282 - DNA, 384 bp, Salmonella enterica
gtgaaatacattaaaataatcctccccacaactttcgttctgttattatcaatacagtcatatgccactccccccgtaggttgtgctgctaaaaaacaggaagtggaaaatcagataacctatgcccacgagcataacaatactcatcagattgccggtctgcaaaaagcgcttcgtgaaatagaagaacactgtactgacccgcaattactgagacaacgtcagttaaaaattgctgaaaaagaacaaaaggtggctgaacgccaggcagaactggaacaagctaaagaaaccggaaatccccaaaaaatagcgcagaaacagaaaaaactggatcatgcccgggaagaacttcaggatgctcagcttatgttgtataagtaa

SEQ ID NO: 389283 - DNA, 1104 bp, Salmonella enterica
atgataaatacagctactcaggatggagctgaagctacagtctctgcgattaaaaacacttactggatggtttgtctcggtttattgcccgtcagaattatccagggatttatctattggggcggggggagccggcggtttatttatgcccctgataagctcaacccggatgctccacactggatggcatataagtttcagacagctatgccgggtgccttactgggcctggagcatgttatttcctttatgctccagcacttctggttgctgtatgcgggtgtcatactgtttagcgctgcagaactgattgcgggtctttttcttatgctgggtttgtttacccgtatttctgcattattgtctgtgcttttttccgtgctcctgatgttgatgtttggctggcagggagccacctgcattgatgaatggactatggctgcgtgtaatctggccatggggacgacgatttttctttgcggttcgcatgtgtatgccctcgataatatcctgttgaagaagaagcctcatctgacagatagccgggtatttaagtggtgctgcggttcacttcccttgccgctaagttcagaggcttataaaaaactggcgttagggctgctggcatttgttgtgatatttgacgtgggaacttacagttattaccggggctcagttgtaacaccttatcatcatggccctgtcagtccaacgacacaccatattacccttacggacggcaaactactgccagatgggcgaatcagtgtgcatgcttatctcgatgcaggaacgcctgaggctcctgaacatatcatggaggcctggcttaaaaccggtagtggtgaaacgcttgttcactggaatacgacaatgctgtcggcactcccgcaagacagtttccggaatgattatgattataatcagttcgccactggtcattatggaatacaggctatagtgggctcagctgcaacgataactcttccggctggcgaattgagcggcggtctggacagtctgccagatgaggctcttacactgactttcatggatatggaaggacatacatttatcacatcgttaagtcgtgtgagcgggtaa

SEQ ID NO: 389284 - DNA, 753 bp, Salmonella enterica
gtgattgccgcagacgggcgcagtggtcagtttctgtcagaaagcacgcacctggcaggtcaggtgatgttgcgctcgcagatgaccgctgacaccgtgttaccggtgcagggcacgatcattgttgaccgggcggagcgactgtcgctgaaagaaacggtactgctgcaggagaaagcgctcagcaccggtgcgcagctgatttttatggatacggagaaccggcagggaacggggaatgctttgtccgtactgaaagaggcggatattccacagtaccggttttacagcacgacgctgccggaagtgctggccggtctgacggcaggccagcgggaggccacacagacggtactggagaacaccgaccgctttatggccattcagggtggcgaaacgccggactttcgcaatgtcctgttcctgaccgatgagagctcaatggtgggtggccgatatcgtcagagtggtccccgtccgcaaaaccggcagccgggaatggtggcagttgttccgtctggtctcacagtggcactgcgatgtggttatcaccgaccgcgccggtcgtattgttgtgcggtggagctggacgaccgttctcatcaggctccgaagcgccagcggcaagacctgttactggcggaaatcctgaagcaggtgggtatcccgctgctgtgtggcgataacgatcagctgctggcagagcgcgtcagggagcatctgtgcgcacgacgtccggagggtacagcatga

SEQ ID NO: 389285 - DNA, 417 bp, Salmonella enterica
atgaatccaggtaaatccgttgcagcacatcacgtcagcccggtactgaacctgtctgccctgcagcgggatgtcatccggatggtcgcgtttctggcgatggtgggggaccacctcgccacagcctttcagctggatgtgcccttgctgaacatggccgggcgctgtgtatttcctctttttgcactggtcagcgggtacaatctggcgggtaaatccataaagcaacgcagcctgaatcgtctgtggctgatggcactcctggcccagccgggctactggctggcctttcgggaggcagggcttgtctggtggcaattcaatattctgttcacctttgctgtcgtcatgcaggtgtcccgcttcctgcaggtggccacggtgcttaatagtgctgccgctttaccgccctggtag

SEQ ID NO: 389286 - DNA, 156 bp, Salmonella enterica
atgatgctatctggtgtgcttctgatgctggcggtgcgcttctgtgccaactggctggtaccggcctccggacgacgcctgcaggccggtcgctggtttgtaccagcgtatgccctccacctgctgtgtatcggttttatggtcaatgttctctga

SEQ ID NO: 389287 - DNA, 408 bp, Salmonella enterica
atgctgctgaccgactacattgacagcgtgtacggaacgacccggggaaaccgggcgcgctttctgaaggacaacccggatatccttccccaggagctgagccgctggcttaaggcaggcctgaaaatcagacctgagaccggtgaaatctacaagcccgtatcacgccatgtcaggataccgtcggcggtggctgccggagctggcgtctttctctctgacggcctgcgtgaacgtgtcacgacactggccaccgcacagaacgtgacatctgagaacatgctgaatgccctggtggagcgcgaggaactgtgccgtaaactgtcccttcagacagataatggtgacgccgtgccggaacaacagattgccggcattgtcagccggtacttttcagcgctgtcttag

SEQ ID NO: 389288 - DNA, 462 bp, Salmonella enterica
gtgctggtccgggaactgacggaatctggcctgctgtcattccacaccggtaatgttgccgagagccgccggctgaacattccccgcaccgcgtattactggtatggcggttttgtcgcaaagcgggtggccatgatgctgggctgctacgatatctacctgtggaacgaaatgatgcgaccggacagcgacgtagtctttgtgggtgatgcgcgcaacgtcgtcgcctgctatttcatctgccagcagatgtgccgcctgctgaaagctgtgaggctgaactggcctaagcaacagggggcgtggggaagccgggctgaactggatgaggctgcgcaccggtacacacagcggctggcagaggggataatggataacggtatttttatcggtggcgacgagcagaactcttaccgactgtacgattatgcggaaaaacattacgcctgggccaggcgctga

SEQ ID NO: 389289 - DNA, 822 bp, Salmonella enterica
atgtttaatagtatttgtacttttggtggtatagataagtgctactcagttatcgatttccaaaaattacctgagaaagaaatagagaaattaaggcattcactggtatgccctggttgccgtgaacaggcattctacagaaaaaaaagtgttgatggtaaacaggcctgctttgggtcccggtactgcacttgcagggaaaacacgcgctcaccgcaacgacaaagggaagtcagaaatgccactgaagttaatcagataatcgcagagtcagatacaataaaaataagctttgattttgacagtacttcttcagcaggcaaagaaccatctggtgtcagcgggagacaggatgtcactggggcggggcaaaataaagttcataccataaagtcggaacaaaaacgagttgcgacagtatcacttcaaaaaattctgcacagcttaatcaggggatcagggttggcgacgtctgatacgatcatcccgtttggcgactttaaatataaagctaaaaacttatttgtgaaatttcctgatgctgaacccatgactaaaaatgcactcaggttttactggggaacgctgtataactcgaataatgatattgaatggcttaatcctgctgaatgcagggatgttggaataccattaggcggcctgcgtgatgccattcttgaaaaattcagtatttcagattctgaaagtctcgaaggggcagcaatcatttttgcaggtcgttgtcactggaataaagataaaactaaaaggataataaatatatatgacagtgaacgtatattcatttctttagctgattaa

SEQ ID NO: 389290 - DNA, 636 bp, Salmonella enterica
atgaatacccaggaacagcaaggagaaggaaacgcagaaaaatcgggccacctggcttggtgtgccctggtggcgcttgcgctggccagacaaagaggtgatgtgttatcacctacgcaggaaaacctttttctcacccgctggctggctaccgcactgaagcaacggcgtttttcgcgagatgttactcctgatatagagtggcttctgaaacaggggcgccagctgggtgtcagtgcgaagctggccagcaaactgaactacctctggcgatcttgcacaggcgaactgtctgagcagaacgacctgttccggctgacgtatgctttggagacagcaaaggatatgcactggaactaccgcctgctgggcgatcgggaatggtccggccggtatgccgtggctttgaataccggcgtcaacggcatttatctttcacggaccaacctcgatgtagcttttgacgatgatggcagacagacaaatccgctgacagcgcgtctgacggggaacgtagcgggggtgatgaagctgtttgatcgctgtggctggcaggcagatcctgaaggggatgcctgccagccacacctgtttactttgatagccagacagggagagccagggagggatgtttag

SEQ ID NO: 389291 - DNA, 264 bp, Salmonella enterica
atgctggagttacttaaatggttaagcccggacaggtatgagtcatttttggataatggacatgatccccgctttagaattctatgtacaaaagaagggttatacagctttgtccgcccaacaaaaatattagactcgttagatattggtcagaaccgacagttgctcaagctacttaaaaacctgaaaaagaacaaagcgtatagactgatggacaggaaaaaactggtagccataatcgggcaggattatctacgccgttaa

SEQ ID NO: 389292 - DNA, 738 bp, Salmonella enterica
atgaacctggaagactacatctcagaagagcgtctgaaaatctatgaaagcattctgaagcttaaaaaagaagaaacaatagaagcgtataactggaacaaagcattaagcagcgccatgcaccccctcatgcactgccttgaggttactctaaggaacagtattgactatagcatacgtcataccccacctcctggagcagctccggcaggtgcgccggcactgtatcggacagacaaaaactggatttttgacctgtttcgttacctgggcgataaacaattcatcaggcagaataagcgctataaattcgattcgaacgggaaaatacagtatctggcaaatggctttccggcgtataaaacgacaacctgggaagagaagactatcaggaaggtatccaaacgtatcgccgatgctggtaagcaggtaacagctgagcgtgttatatcagggctcgattttggcttttggacaaacttactgacaagctcatatgaagacccacgcatcaggacattactatggccaaatcttttgaccgaggtgtttccaggtgctcccgcgggcactaagcggcatgtacttgagaataaattcaaccagataagggagctacggaacaggctctctcatcacgaggctatctggaagttcccctcgtactggaaaaccagattacaacaatcccgtgtttggtctaaatgcatcgctcattttgttgtcaaaaaactatga

SEQ ID NO: 389293 - DNA, 576 bp, Salmonella enterica
atgtcacaatattcttgtctcaaaatcatcagcactaaagccaaaaagatggcgcgtgccagttctgtactcacgcacagtcaggcgttagaaatcatcgccaggcagtcaaaattttcaaactatcatgaacttaccagggtagcaaaatacgcaccgctggaacctcgtttgttgatggctgcatttggtgattctgatttcgcggatgtaatccataactactacgatacttatactgatggtccttatgctgcatttgaaatggcagtagagcatgaactttcaggtgagattgcctccacaaatgcagggggcttcactgtggaagacctgactgtgacagaaacgcattatgatgaagataaaggcattttaaacttgaaggtctctttcttctatcaaggggagcagttgtcagatcatgtctactcaggttctgaatttgaagtcgatgccaacataggtttgttatggcgtgatgaaaaatggagcttcattgatgaggattttgaaattaccaatgtagtatctgatactgaacaggctgaatactacgacgctgaagatatctaa

SEQ ID NO: 389294 - DNA, 219 bp, Salmonella enterica
atgctcagcgtaacgatttctatcgtgagatttcgctcggctaacatcccccccttaagatatgaagcaaatgataaggtaagcctgtgccgtaaacaagcttaccacttacttttagatatcttcagcgtcgtagtattcagcctgttcagtatcagatactacattggtaatttcaaaatcctcatcaatgaagctccatttttcatcacgccataa

SEQ ID NO: 389295 - DNA, 759 bp, Salmonella enterica
atgcatcgggaaggcaaaccgaaggggggcttctggctgaaccactgcacggtggacgggaaacacggcatcatcatggacacgcatgtaacaccgggcaacgtgcacaacagccagccggagcggttcggactggagacagtggcagcaggcgtggatgcagggtacttcacggcagtggtgtgtcatctgacgcaggagatgggtatcgcactgataccggggtaccggaggccgagtaaaggatcgaatgattaccagaaaaagcagttccggtatgacgcacagaaggatgtgtatgtgtgtccggcaggagaggaactgaactacggcacaacggaccgtaacgggtactggcactaccggtgggacaaagcggtgtgtgcgatctgcccgtgtcgggctaaatgcacaacaagctggcagatgcagaagacgataacgcgacacgtatgggaagaggcgaaggagaaggcaaacgtgctgcggctgacgccctggggcaaaaaggcgtacgcgcggcgaaaggagacagtggagcggagcttcgcggatgcgaaacagcatcatggacaccgttacgcacggttccgtggtcagatgaaggtgcagatgcagtgcctgcttgcggcgacagcgcagaatctgaagaaaatggcgctgctggcgctattttactggctgttacatgcagtgaaagggctggcaggaaggttgagtacgccgggaagccggcagaaacatatcacagagtggtaa

SEQ ID NO: 389296 - DNA, 207 bp, Salmonella enterica
atggcaaacggtcgggggctctacaccggcagcacgcacctgaaagccgatgtaaacccgcgtaaagccgtgaacgaacagcgcccgaaaggggtcagcgagtattttgacgagttgaatgctgccgtggaggccgacaggaaacagcacgcaaaaaaagccgctgcccggcgtaaaaaagacgccagaaaacgcagccgtcggtaa

SEQ ID NO: 389297 - DNA, 399 bp, Salmonella enterica
atgttcagagaaccttccccacagcagtaccagtttgaaaccatcacccttgacgaactcgtcccagaagaccatctggtgcgtaaaatagacgctgccattgattttgaatttatccgcgatgcggtcgctcacctctactgccccgataacggcagacctgccattgacccagtgcacctgattaagatgatgctcccgggctatctcttcggcatcccgtcagagcgcaaactggtgaaaggaatccaggtcaacgtcgtttaccgttggttcctgcgcatggggctgactgagaaagcgccctatgcctccacctcagccagaaccgtatccgtcgctttaacaacagcgatgtctttcagacaatttttgaccatatcgtggaacaggctctga

SEQ ID NO: 389298 - DNA, 1011 bp, Salmonella enterica
atgtttcagttaggtatcgatgtcagcaagaacaccctggatttatgcctgctgcgggaaggtgtaaaaggcagggtcaaaacccgcaggcttaaaaacgatgtcaatgcagccagttcagtgatcacctggctcggtaaacaacaatgtgcccctgctgatgttcatatcatcatggaagccactggagtttatcatgaaccgcttgcatacggcctttacaaggccggagctaaagtttcgctcgccaatccacaccgcagcagagaatttgcacgtggcatggatattctgacaaaaaacgaccaaattgatgcttatatgctcgcctgctatggcgcacttaaagagccggaaccgtgggttcctccgcctgaaagcattcgttatctcagcgcccttctgcgtcgacgggatgcgcttgtcactgaccgcagccgcgaaaaaaacagactggaaaaatgccgggcaactgacattccgccagtgattgctgagtctatcgaaaatgtgcttcgaaacctgagtgcagagattgaacgcctggacgaattgctcctgactcacctcaaccagcatcctgagttaaaaaaggattttgacctgctgacatcgataaaatccgtgggttttcagttaggtctgaacatgctggttatcctgcggggtcatcgtttcgacacagccgggcagtttgcggcgtttctgggcgtggtacccgttgaaaaatcctccggcacctcaatcagaggtaaacctaaattatccaaaaacggcccaccggaaatacgggcgaaactgtatctggcttcaatgtgtggccttagatttaacccggtcatgaaggcgatgtatgagcggttatgcctgagtggcaaggcaaagatgtgtgccataggcgcactgatgcgaaagctcgttcacttgtgctatggcgtactaaaaacacaaaagccgtttgatgctgagcatctgtcttcagatgcgcgtagcgcatgtaaggcggcataa

SEQ ID NO: 389299 - DNA, 156 bp, Salmonella enterica
atgctgccaaacgaaggtcactgccttagggcgaaggtcaggctctccccgcttcatgtgatggtagctaaccagcacatctctattacatacaaggcgaagggttggacaagcccgacgggcacgtcagcctgtcacattgaagtatgctgttga

SEQ ID NO: 389300 - DNA, 588 bp, Salmonella enterica
atggaacaggacgcgcttcgttcaaaaaacaggctaaaagaattcgccgcgcttcatgaccatagaattgctggttggtatgtagaaaatgcttctggtgcatctctgaaccgtcctgagttaactcgtatgctttcagatatggaaccaggggacgtcattttgatagagcaggtggaccggttatcccgtctgaatgacgctggctgggagattcttagaaaagaaatatcagataaacagttatctgttgtcagtctggatcttccaaccagtcatatggccctgaccaacgctgtcagcgatgacttcacacgaagtatgctgaaggccgtaaatgggatgatgctggacatgctggccgctattgccagaaaagactacgaagaccgtcgacgccgtcaggcagaaggcataactaaggcaaaaattgaagggaaataccggggcagggtggctgatgcgcagaaacatgaattgatacgcactctgcgcctggtcaacggaaaatctctgcgagaaacagctcgtctggcaggggtatcgaaaatgaccgtcatccgagtctgtcacaatagggaagagtag

SEQ ID NO: 389301 - DNA, 336 bp, Salmonella enterica
atgattactcattcaccattcactattgccgataactatgctcttttgggtagttttcgcgtacctggcgttcagggtaaattcgaagtgcgttcaaataatacccgcgagaagcgtccgatgctcatcgtggtgcatgaaaactggcagcaagcaacccgtcgcgaccgtgttgcgccgctggttgttattcagtttgaagaagatggcagtaagaaatgcatcgaacagaaagaaaccgagctatcaaaatcggtgaatctggctgatttcagtcgccgcgcgatagcattttttcaatggaatgagcacggcaatctggcatgtcaccactga

SEQ ID NO: 389302 - DNA, 447 bp, Salmonella enterica
atgcttgagtttgctcaggaagcccctgagggctttcctgatcgtattccgcaggttatcagtgcatttgtcggcgatgattatacggcagtaaaactgtcccagcacgtatatcagctaatcatggcacattatggtgtcgttgtaagcgatacgcagcagacccctggcggcatgtatatctggttctatatggctctggggaatgacgtactgattaacgttatgaaaatccatggggaaaaactggagtatcagttaaatgccgctggtaagcctgaagcttattgtggcgaaatcgacctactggaacaggctggcgatactatctggggtggcccagatgaagtggttgctgagataaatctggagcgtttgggctttaagccgacgcacaaggatatacagcatatcgttttggccgctcgcctcaatactaatccatag

SEQ ID NO: 389303 - DNA, 387 bp, Salmonella enterica
ttgggagtcaatacgaagctggccaacaaactgaactacctctggcgatcctgcaccgacgaattgtctgagcaaaacgacctgttccggctgacgtatgccctggaaaccgtgaaagacatgagctggaattaccgcctgttgagcgatcgggaatggcccggccggaatgctgtggcgctcagtgcaggcgtgaacggcatttatctctcacgggccaacctcgatgttgcttttgacgacagcggccgacagataaatccgctgacagcgcgtctgacagggaacgtagcgggggtgatgaagctgtttaatcgctgtggctggctggctggctggctggcagagcctgagtctggacttccctgcctcaccagtattcgctga

SEQ ID NO: 389304 - DNA, 306 bp, Salmonella enterica
atgcaacctgatatcaacgtggctcgtctcgcccgtgaacacggtattaatgacaatctgctgtttaactggcgccaccagtataaacagggaaaactgaatcgtgtggataacctgccagccgaactgctaccggtaagtatcgtgccacccccggtcgctccagcccctatgacagcaccatcgccttctgatgtaccctgttgcgaagtggcgctacccggaggaacgataaaactacacggaactgtgaccccagcgctgttgcaagtactacttagtgagttgaaaggcggttcccgatga

SEQ ID NO: 389305 - DNA, 1557 bp, Salmonella enterica
atggacaatgcactccccgacgacatcgaacaactgaaggccctgctggtcgcacagcaggcggttatcgttcgtctgtccggtgaaataaccggctacgcccgcgagatggactcactcagggcgctggtcgccaaactgcagagaatgctgttcggccgcagcagcgagaaaaatcgcgaaaagatagaaaaaaagatcgcgcaggctgaaaagcgtattactgagcttcagaacaaacttggtgaagcgcagtcgcaacttacttcaatgaccagagacggggtaccaaaagcatcagactctcctggtcgcaaagcgcttccgtcaacactccctcgtgacagacaaattatctccccaccagaaaccgaatgtcccgtctgcagcggtaaactgaaaccgctgggggaaagcatatctgaacaactggatatcatcaacaccgccttcagggtaatcgaaacggtccgcccaaaactggcctgcagccggtgtgactgcatcgtgcaggccgcgctgccaccgaaacccatcgggcgcagttacgccagcccggctctgctggcccgcattatcatggcgaagttcgcagagcacctgccgctgtatcggcagtcggaaatctacgccagacagggcgtggagctgagccgcaatacgatggggcgctgggttgatatcatgggagagcaacttcgtccactgtatgatgaactgaaccactatgtgctgatgccgggtaaagtgcatgccgacgacacaccggtgaatgtactggagcccggtcagggtaaaacccgaaccgggcggctgtgggtctatgttcgtgacgatcgcaacgccggctcaaccatgccggcagcagtgtggttctcatactcacccgaccgcaaaggtatccacccacagcgacatctggcggactacagcggtatcctgcaggccgatgcgtacgcgggttataacgccctctatgaaagtgggcgagtaaccgaagcggcctgcatggcgcatgcccgacgcaagatccatgatgtacatgttagtcatccaacgacagtaacaacagaagcactcagtcgtatcggtgcgctgtatgctatcgagtcagagatccgcggcagcccggcagaagagcgactggcggtcagaaaagccagaagcgttccgttgatgcagtcgctgtacgactggatacaacagcagatgtgcacgctgtcacgccactcggatacagcgaaggcgttcacctatctgctgaagcaatgggatgccctgaacgaatactgccgcaatggctgggtggagctcgacaataacctgtgtgaaaacgccctccgggtggttgcgctggggcggcgtaactacatgttcttcggctctgatggtggtggcgacagtgcagcagtgatgtacagcctgatcggaagctgcaaactaaacggcattgagccggaaacgtggctacgtcacgtgatcagcgtcatcaacacctggcctgccaaccgcgtgaaagaactgttgccctggaacgtcactctctctgtaaactaa

SEQ ID NO: 389306 - DNA, 327 bp, Salmonella enterica
atgaagaagaaaaacagcacacccaccccccacgatgccacgttcaggcagttcctgacgcaaccggatattgcccgggattttatggagttgcatttgcccgcagaactgcgcgcagtctgcgatctcagcacactgaagctggaatccggctcgttcgttgaggatgatctccgccagtatttcagcgacgttctctacagcctgaaaaccaccgcaggtgacgggtacatacatgtcctcgtggaacatttatgcaaagaaaatgattatgtgaagttcatagacggaaatgtagtttcttcgccccatcgattgttttattaa

SEQ ID NO: 389307 - DNA, 657 bp, Salmonella enterica
atggctttccgcctgatacgctatgcggtggccgccatgcagcgccacctggaggcagggcataaaaaactgccactggtaataccggtgctgttctatacgggtaaacgcagcccgtatccgtactccacccggtggctggatgagtttgacgatccagtgctggcaggcaaactctacagcagcgctttcccgctggtagacgttaccgtcattccggatgatgaaatcgctggccatcgcagtatggccgcactaactttactacaaaagcatattcatcagcgggacctggcagaactggttgaccggctggctcccattttgctggccggatatctgtcttcatcgcaggtaatatcgctggtacactatatagtgcaggcaggcgaaacagctgacgccgaagcctttgtacgcgaactggcacagcgtgtgccgcaacacggagacgcacttatgaccatcgcacaacagctcgaacaaaagggcatcgaaaagggtatccagcagggtatccagttaggtgaacaacgtggtattgaaaaaggcaaactcgaagtagcccgtaccatgctgcagaacggtatcgaccgcagtaccgtcatgaaaatgacaggtctgtctgaagacgacctggcgcagatccgccactaa

SEQ ID NO: 389308 - DNA, 321 bp, Salmonella enterica
atgaacgataaagagatattgcagaccgaatttctgcggagtatgaacgaaaaaattaaggcagaacttcttgatattctccctgcagatcatgcaacaacgaaagctgttcgctcctcccccactggttgtatcaccaccgaaacaatggatctcgttataaaatcattaaccccatccatgcttcgtcgggtaaaacgagaaattactgcatggcttgacgatgaactcagctacctcgactgccagtgggatgaacgatacgcgagcactcaaaaacgacgattattcagcatactttctggcgaaggaagaaactaa

SEQ ID NO: 389309 - DNA, 783 bp, Salmonella enterica
atgaaactgagcgttggcgatataaatatttctgaatccggttacgcatccacgaccgctgaagttgagaccggaacactccctcttttcccttcaatatgcacgatgcatgtttctgttccgctggtggaaggcaaaacactggagcagtacaaagacgaacttctggcaaaagcacgcgaacgaatcgtcagcatgtatcaggagattgtgtgtggtgggcagaatgctgaaagtttgttgaatatgttggacggtaaaattaaaccgacagaaataagtcaaaaaatgctgtatgacatcagtatgctacatgccgatctggaaaagcacgtcaccagtatcgggaaacaactgagtgatagtcaggatactggtgcgctgaatgcgatttatgctgtcggtaaaaaagccgctgaggatttaccgggaaagtctggtgatgaagagctttggggcatgggattcaggattgaagatcgggaaggagggctggtggtatgtgatgaaaatggtgggagtgaaccgaccatctggcatcgcgacaaaataatagaaagggccatcagtatgttgagaagcggaaaccggaatatgttaaagcgcctggggcgcgccatgggactgcttcaggtggccgcagatattgagtccggtaaccagctttgcggttcagcgcgtcgtgagcatgtgctgaaggattttaataatccgccctttaagaaggtacctgatgactggatacctccgggtgttgaatatcttaaagggcggttatattag

SEQ ID NO: 389310 - DNA, 183 bp, Salmonella enterica
atgaaatttactgacctgacaaaggaactggctgctgccggatgtgaactcaaaaggcataacggaggaagccatcagatatggtggtctccagtaaccgggaaaacatttccggttccgcatcccaaaaagaatttacctcccggcactgtcaggtccattaaaaaaatggcggggatctaa

SEQ ID NO: 389311 - DNA, 303 bp, Salmonella enterica
atgctggtgtgtgagtatatctggatgcagatgcataacaggctcagggcaagccggaagcgcattactgacgacatgacgggaaacttgatcaccctggtgggtataatgacgtggaacaccgcacaactgatgggcgggaaagactatgtggaaatttttgccccctcgtatgcagcacaaaaaattggggttaaagccagcgcatggagccggaattataaaaaacactggctgtttatgtacgataagtgcgaagaactggatagccaggcgctggaaaaattgatgcaaaaaaattaa

SEQ ID NO: 389312 - DNA, 132 bp, Salmonella enterica
atgcagatggtttcaccggtaccgagtattcgctctgtggtgaaattatcctggcgacccggagaggccagtgctttcagttttaaaaagttcttcaacctgtcggagggagtcatggcttcatccggctga

SEQ ID NO: 389313 - DNA, 462 bp, Salmonella enterica
atggcgggacctgccgcaggaggcaaaacgcaaggcaggcggctggataaagtgggtacaagcgcagggaatatccatcgcaagtgccggaaaatttctgacaagcaccggactgaccccctttggtacagatcgcctgaaacaaccaggagaaagaggtgcccctattacaaatacgcagattcggacatggcgggacctgtcgcaggaggcaaaacgcaaggcaggcggctggataaagtgggtacaagcgcagggaatacccatcgcaagtgccggaaactttctgacaagcaccgggctgaccccctttggtacagatcgcctgaaacaaccaggagaaagaggtacccctattacaaatacgcagattcggacatggcgggacctgtcgcaggaggcaagactcgaggcaggcggctggatgaagtgggcgcaggatctgggaatagacatcggtag

SEQ ID NO: 389314 - DNA, 1170 bp, Salmonella enterica
atgaagtgggcgcaggatctgggaatagacatcggtagcgcctgcatttgtctgtcaaacacaggactgaagcccaaagggatagtaaggctgcaagtccccgcagagaggggatcccccatcacacagacgcaacttctgacatggtttaacatgtcgccagaggagcactgtgcggcaggcgggtgggccacatgggcgcaaacgcaggggatatcctacataagcgccagaaagtatctggcaccgatagacagcgagataccatccagtggcacatcgcgtccgcaaccgtccgcaaccgtcacgagtgacagtccacgggcatcaacatccgcagccacagatgatgagataaccgtcagcgtgagtaccccaccggcgagcagcagggaaaaacgatcgtttccctcgactaaagaggatatctcagccccgccggcaaaacagattaaggaagaggaagatgacgttacctggcgaacacaccagataaacaataacctgcccattctgcaacactggcgtgacccgacaatatcggttatggcccaggcggaaggcaggattgaaaccctgcaggttacacggtgggggcctctttttaacctgttatcccggcagaccaaagccagaattaatcaggatatccgctggtttctgcaaaataaaggaaagcatgatgcgcgaatgaatgccatgatgttcgtcgctattccccttgatgacagcgacggttacagggggcgtacagtctacgcgcgaaccgatctggcggcgtttaccgtactgggcccctactccggccgcctgctggacagtgaaaaggtacggtgtgaatacgaaaaagaatatgggaaggaagccggtaattattattttgccacgcgaagccaggaacgcctggtgtccgcctggccggaaggaaatatcctcagcctgattaacagtccggcattcacccaccggacagcggagacagaagcaagacagaacgtcagcacggtgattgtcgggaagaatatcaacttttacgtcaccacacgcgacatcagcgccggggaagaactgtggtttgattacggaccagactaccggcattttgagtcaggtgaagcgctacgttcagcgcaggttaaggaggagccgtcttctccagaggaaggatag

SEQ ID NO: 389315 - DNA, 495 bp, Salmonella enterica
atggaacaaaaaacattatccgcagaaccccgcagatcattttcaaatgagtttaaacttcaaatggttaaactggcttcacaaccaggagcctctgttgcccgtattgcccgggaacacgatatcaatgataacctgctgttcaaatggctcaggctctggcagaacgaagggcgtatatcgcggcgtcttccggtaacaacctcttctggcgctggcgttgaattattacctgttgagataacgccggatgagcagaaagagcctatggcggctcttactccgcttttatccactccttcacaagtgacaccattaaaatcctgtgggctgatgctgatggtctgtgcctgttcaccaaacgcctggagaaaggccagtttatctggcctgcggtgcgtgacggcaaggtatccattacccgctcgcaactggcaatgctcctcgataagctggactggcgtcagccaaaaacatcccgtcttaacgcactga

SEQ ID NO: 389316 - DNA, 315 bp, Salmonella enterica
atgatgtgcccacatcatggcaggctctgtcatgataaagatccttcgcaagcagacccgatcacccgcacagtaataaccgcaataaataatatgcttatcgacctgatggctgcaatgtcgcataaagactggttgagccgtcgtcaacaacaatatcatatcttctgcggggtttccgtcacacagatccggaaactccaggtttcggatcttcacgaaccgcaccggcgcgctgcggccacaaaacacaatatgtgccattcagtcagcgacatattcagctatatgttgtgctttacccagtccccgtga

SEQ ID NO: 389317 - DNA, 696 bp, Salmonella enterica
atggaagacaagaaatacagttgtgaatatattgaaagaaataaagctgtgtccggatgttttgctatgttcatgctgtttgtcggaataacctttatcccattttttttaaaagatggtgcggaacttatggctaaggggctactattcccaataatcgttactcttgaatttatatttattgttcctctctattatatcttttttcgtaaaagagaggggttgggccttggcagcttccggtttaaaacgttttttatactgtttctgctcattcttcttattcagtatctgctcccctatatttccggagtaaatgaaactgaaagttggtccgagtcccagatggctctcggaggctatattttctggataaatgccattttgctaatcttcattgctcctgtctatgaagaaataattttccgtggatgcctgtttaatataacttatttttggtttgggaataatgtttttggtaccgctgttattgtttctatgatgttttcagttgtccatttgcagtatactgaaataagaacatttatcgttttatttctggtgtctctaacattatcggcggcacgagttaaaagccgtgggcttctgatgccagtgcttcttcatatattgatgaatgcggtggttaccggtatacagtatgcggcttacatgcttcctgcctcatccggttaa

SEQ ID NO: 389318 - DNA, 291 bp, Salmonella enterica
atgcgtaatcttaaagagaatgagtattcttttatctacggcgggggtcaagacggaggaaattccggagtatccaaggaaacgattggcggagctataggtggggccattggtgggacatacggaggtatccctggagctgccataggtacaatcatgggggcatctattgctaatggctcccgaggtacaggtagtgttggcccttcaggtattccatggggtggctccaatggtggtggggtaatgtggggcagtagcagcagctcctctgcaaatgacggaagttga

SEQ ID NO: 389319 - DNA, 2097 bp, Salmonella enterica
atgagtaacgggaatgtcagacgaatgataaatcagcttgatatgcgctggcgacgtcgggttccggttattcaccagacggaaacctcggagtgtggactggcctgtctggcaatgatatgcggacattttggcaagaatattgacctgatatcccttcgacggaagtttaatctttcttcccgtggggcaaaccttgcgggaataaatagtatagcggaacagttggggatggtaacccgggcactttcgctggagctggatgaacttggtgcgctcaaaacgccgtgtattctccactgggatttcagccattttgttgtactggtcagcgtaaagcgtaaccgttatgtactgcatgatccggccagaggcagaagaaatgtcggactggaggaaatgacccggtattttaccggagttgcgcttgaggtctggccaggcagtgaattttctgcggagaccacgcagaatcgaatccatctacgctcacttattaactgtatttatggtattaaaagtacactggcgaaaatcttctgtctgtcagttgttattgaagctatcaatctcataatgcctgtgggtactcaactggttatggatcatgcgattccggcgggggacagagggttactgacgctcatttctgccggccttatgttctttatactgctcagggcggccacgggtatgctccgtgcatggtcctcgctggttatgggcacactcatcaatgttcaatggcagtcgggtctgtttaaccatctgctcaggctaccgctggcatattttgaacgtcgcaaattaggtgatatccagtcgcgttttggttcccttgatactctgagagccaccttcaccaccagtgtggtgggggccattatggacagtattatggttgtgggtgttttcgtgatgatgctgttatacggtgggtatcttacatggatagttctcgggtttaccacggtttatgttctggttcgcctggtgacatacagctattaccggcaaatatcggaggaaacgctggtcaggggggccagagccagttcctattttatggaaaccctgtatggcattgccactgtaaaaattcagggcatggctgaacggcggggaacgcactggcttaaccttaaaattgatgccatcaattcaggcattaagttaaccaaaatggatttattctttggcgggataaatacttttgttgcagcctgtgaccaggtggcgattttatggctgggtaccagccttgtgatcgataatcagatgacaatagggatgtttgtggcgtttggttctttccgtgggcagttttcggatcgggttgcctctctgaccaactttcttctgcaactgagaatggtgagtctgcataacgagcgtattgctgatatcgcactgcatgaaaaggaagagaagaaacctgagcttgatattgttgctgatatgagcccggtctctctggaaaccactgatttaagttaccggtatgacagccagtcagcgccggtgttcagtggtctgtatctgtcagtgactcccggagaaagtgtggccataaccggtacatccggtgcaggaaaaaccacgttaatgaaagtattatgtgggttgtttgagccagatacgggaaaagtactggtgaatggtacggatatacggcaactggggataaacaattatcaccggatgattgcctgcgtgatgcaggatgaccgattattttcaggatctatcagagagaatatttgtgggttctctgaagagatggacgaaacctggatgatcgagtgtgccagggccagttatattcatgatgtgataattaaaatgcctatgggatatgaaaccctcattggtgaactgggggaagggctttccggagggcaaaaacaacgtatatttatagccagggctctgtaccgtagaccatgcatattatttatggatgaggccaccagttcacttgatactgacagtgagcgtttcgtcaatgtggctataaagaatatgaatatcacaaggattattattgcgcacagagaaacaacgttaagaacagttgacagagtaattctaatttaa

SEQ ID NO: 389320 - DNA, 1203 bp, Salmonella enterica
gtgggggaggatgtcaagctgggaagcattgcgtttatcacggcatttctgacgttcgttatcgctggtacctatagccgtcgtgtcaatgtcagtggtgaggtcacgacctggccgagagccgtcaatatatactccggtgtgcaggggtttatagtcaggcagtttgtgcatgaaggtcagtcgataaaaaaaggtgatccgatttaccagattgacgtcagtaaaagcacacgcagtggcgttgttaccgataatcagcgaagggatattgaaaatcagctggttcgcgtggataacatcatttcccgtctggcggaaagtaaaaaaataacgctgaatacgctggaaaagcaacgtctgcaatacagcgatgcgttccgtctctcatcagatattatacggcaggcagcggaagggataaaaataatgaagaacaacatggagaattacagaaactatcagtcaaaagggctgattactcaagatcagttaactaaccaggtggcattatattatcaacaacaaaataaccttctcagcctgagcggacaaaatgaacagaatgccctgcagataaccagtctggagagccagatccagactcaggctgcggattttgataaccgtatctatcagatggaactgcaacggtacgagttgcagaaagagctggttgatactgatgtggggggagaaatcattattcgtgcgttgtctgacgggaaagttgactccctgagtgtcactgtcgggcaaatggttaatgccggagacagtctcctgcaggttatccctgaaaatatcgaaaactactaccttattatctgggtccctaatgatgctgttccttatatttcggcaggagataaagtgaacattcgttatgaagcctttcctgcagaaaaatttggtcagttctctgctacggtgaaaaccatatccagaacgccagcctcaacgcaggaaatgctgacctacaagggggcgcctcaaaatacgctgggcatctctgttccctggtataaagtcatcgttaaacctgaaaaacagattatttcttatgacgggaaatctatccctcttgagaatggaatgaaagctgaaagcacattattcctggaaaaaaggcgtatttaccagtggatgctttctcctttctatgacatgaaacacagtgcaacagggccgatcgatgagtaa

SEQ ID NO: 389321 - DNA, 1326 bp, Salmonella enterica
atggcgtcttcgagacaaaaattcaccttcgaacgattacgtagatttgaactaactgaaggaaaatcgcaagagtttctttgggattcagacgtaacaatgctggcctgccgtgcaactaaagggacaaaagcatttatcttccagagtgtgtttctggggaaaactttgcgcatgacgattggcaagattagcgactggaaaatcgatgatgcacgtactgaagcacgaagacttcagatgcttattgatacaggggtcgatccccgcattgctaaggcagagaaaattgctgccgtagaatctcaacaggctgaatcacgcagagggaaagttatgttctctactgcctgggaagaatatctcaaagaactaaaaacgggcatcagcgccaaaactaaacgcccttactcaccacgctaccttgcagaccatatcaggctttctgatcgtgggggaaagactagaaagataggtggtggtgtaactatttccgcaccattagcatgtttccttgatttacctttatcagaaatttccccagaactcattactgagtggctgacaagggagagacaaccccgcccaacggtcacagccaattcataccgcatccttcgaacatttttgaagtgggtcgaggaccacaagcagtttcagggtattattcctgtcaatctcacccaagaccgtcatatcagaaaaatggtgccagtatcttccagtaaagcagatgactgccttcagaaagagcaacttaagagctggttcactgaggtaagacggttaagcaatcctgtgatttcaacctatctccaggttcttttgcttacgggtgcacggcgagaggaaatagcatctctacgttggaccgatattgattttaaatggtccagcatgcgaatcaaggataaggttgagggcgaacgcatcattcctctcaccccttatgtttctggtctattaaacgcactggcagaagcctcaaattctgacgtaaataaggaggattgggttttcagaagtaacagcaaaactggcaaaattgtcgagccccgcaaagcccataaccaggcactaacccgggctggtttgccacacattagtattcatggcctacgccgtagtttcggtactctgtcagaatgggtggaagtaccaacaggtattgttgcgcagattatgggccataaacctagtgctatagctgaaaagcactatcgccgccgtccgttagatttactgagaaaatggcatgcaaaaattgagagctggatcttagaacaggcaaatactctcaaaaaaaatgatgttgacatgcgttga

SEQ ID NO: 389322 - DNA, 441 bp, Salmonella enterica
gtgacaaacccagcaactgcatccatagaaactacgcaagcggctatcaaagctcgctggggttttgattcaagaaaaacagacctatcctttaacgattctatttccatggaacaggtcgtcgagcatctcacagaaacatattctgcttttcacaaggctttcgcatgcgccaaagctaaaatattacaccttaaacaaagaatgcaaaatgctactttacataattttatcgcgcgtctgatgccatgcaaaaatcaggtatcaagggctcaccgtagtacggcaaaatcaacaaaaaattcgtcatcatcagattcaagtgatggtagtgaccccgaccctgaaactcttctttcagatttcatcactccccttactaattcaataatacccaaagctttctttgcacacatctcaatcactgaggtggcaaaatga

SEQ ID NO: 389323 - DNA, 225 bp, Salmonella enterica
atgagcacattcgaactcctagatacagcccaatcacagctcatttcaacagctgagttagctagaatcattagctacaaatctcaaaccattcgtaaatggctttgtcaggataaattacctgagggactacctcgtccaaaacaaatcaatggtcgccattattggttacgtaatgaaatcgcagattatatagcgacattttcggtacgaagtagtctgtaa

SEQ ID NO: 389324 - DNA, 762 bp, Salmonella enterica
atggcaaaaaaagcaacatctctaagtatcagcgaggaatcgctcaatattgctgacaggctcggctccgctataaatagatctcgttccgctgtttttgattatgcggtaaaggcgttgtatcccttagctagccgaatcagctatcacagtaacgaggtaaaaaatcttgaagaattgtttttgaatcaatcagtgaatatacatttgcaatccgttcgtgggacaccagaaattactcgtgaggaattttttttagcgggctgggagagccacgtcaaaagcccgcttgacatactggcatttgaacattatcgacataacaccagtgatggggctatgggtaaaattgagaaaaaaagcatagaggagcaacttaaagatatggttgatgctaacagggtgaaaggagcaattcacatcaaaactgatcgtatcattgataaaagaagtcctaatgtcaaaggatacgaaaaaactatcctcattaatgatacttcgtggcatggttatttttttgaccttaaccaaataatcatcttgcctatttctgacctaatcatttttggtatcaaggaggttttaaaacgtagggccatttgtttcaacgccccttacatttgttggataaacatttaccacactaatgacatggccgtaatggttccaatcattcgcgtgacggatgtaccagagcacaggaggaaagaaaagataattttcattgtaaaccctttcgcggaaaggccaaaaactaattaa

SEQ ID NO: 389325 - DNA, 555 bp, Salmonella enterica
gtgaaatttttccactatcaactgtgccagaatgcacaagaagcaagcgcaataaagaagcaccctacatttttagagataattaaagagtttgctattccagaggagaatgtggcaattgagatcgctggagccaaccgtcgaatattaaaagaactcataaacgagatggggaaaggagacacactcattctgaccgacttaaacaaccttggggggactatcaatgacatgctgaataccttgttctcttgtttcatcaaagacatcaatatctactgctatcacccttacagcagaattgaaccttcagcggaaagttgcatgtcttttctgatttcggtccagacactgattgatatccagaaccttaaagcaacaagaagcaaacatagaacattaaaaaaaccgctaggccggaaagagggaagcaagcacaaactaagtatctacacactaaaattaaaaggctacaaacaggcacaggtagccaaactattgaacattagcctgtcgacggttaaacgacactggagtaacggaattatcggttag

SEQ ID NO: 389326 - DNA, 225 bp, Salmonella enterica
gtgatttacactacgaatgttatcgaatcggtacatcgccagttcaggagactgaccaaaaccaaaggtgcattcccgaatgaaaacagcctgctgaagctgctttatctgggtctgatgaatacacaggagaaatggataatgcccatccagagctggaatttgacattgtcgcagttagccatttattttgacgggcgactgaataatgtgatgacgctgtag

SEQ ID NO: 389327 - DNA, 828 bp, Salmonella enterica
gtgctggccatctgccatgaaccccggttcgccagtctgccgccgtcgcaaatcgttccggcgctggctgatgagaaacgctatatcgccagcgaatcgacgttctaccgggtgctgcggcggtcgggtgaaaccacgcacggtggtcggcagaaggccccgcggagtaagccgctgtcgacctggaaggcgacagcccccaggcaggtgtggtcatgggatatcacctggctgaagtcgctgacaacgggtcactggttctacctgtatctgatagaagacgtgttcagccgcaagatcgtgggttatgaagtgcacctggtggaaagcggtgaatatgcggcagagctgctgaagcggagcgtgctgagcgagcgctgctggcaggagccgctggtgctgcatgcggataacggtgcgccaatgaagtctcaggtgctgcaggtgaagctggcggagctgaagataacgccgtcgcacagtcgacctcgggtgagcaatgacaacgcgcatgttgagtcgctgttcaggacgctgaaatacgtgccgtcatggccggagaagggcttcgcaacgctggaagacgcccgagcctgggtggaaagcttcgtcggctggtacaacgaggaacaccgacacagcggcatccgctacgtcacgccaggtcagcggcacagaggtgaagatcatgagttgcttgcacaacggaaatcggtgtatgaagcggcaaaaatgcagaatccgcatcgctggtccggtgcaacgcgcaactggaataggcaggatgaagtctggctaaatcctgaacgggaaacgctggccgcatga

SEQ ID NO: 389328 - DNA, 483 bp, Salmonella enterica
atgaacatctattcacctgagcgtaaagcggctgtgatcgccaaaatgttgccgccgcatagtttgtcgataaacgaggtagcccggcaggaaggtattccagccaacacgctttatggctggcgctctcaggctggcattgcgacccggaacgctgactctggccttaaacctccggagcaatggtctcaggaagcacgttttgctgtactggttgaaacagcaccactttctgcccatgctgtggctgaatactgtcgccgtaaaggcctttatcctgagcaaattcagcagtggaaggacgagttaatgcagcccagtcagcgagaagaaaaagccgagatcaaacgattaaaaaaagaaaaccaacaacttaaccgcgaaattgcccgtaaggataaagcgctcgccgaagccgctgcgctgttgctcctggaaaaaaagctgaaggcgttgttcgacgaagaaaacgaggccgaatga

SEQ ID NO: 389329 - DNA, 252 bp, Salmonella enterica
atgacaggttggaagctgcgcctctggagaaaggggatgtgctggtcacgcgaaaaagctgcgcgcgagttcggcgtaactttgcggacatggcacgcgtgggaaaatgcggaacaggtggatgtcacagtctggcgaaccacccaggcactttctgtcctcgacctgttaccgctcatgcatcggatgcacaaaactgacatcatcactcgtctggaaaatgaactggggaaaacggcagtggaagtatga

SEQ ID NO: 389330 - DNA, 210 bp, Salmonella enterica
atgactattgctgaacgtcttgagcagaaaggccgcgaggaaggacgcaaggaaggtctccaggaagggcgccaggaagggcgtcaggagggcgctgctgaaaaagcacaggctattgcacgacagctccggaatatgggaatgacgccggagcagattaaacaggcgaccgggctttccgacgctgaactgaaaaaggttattcactaa

SEQ ID NO: 389331 - DNA, 225 bp, Salmonella enterica
atgtatagtatttatgtcccacaggccacggagattactgatggacagtcatccgatggttcgagttccgcgtacctgaataatactcatcctttgactattaagcccaacagtgacggttatctgattgccagttcgattgaactgctaagtacaggaaaatctgtttcaaatctgggctctgccgtcagcggtggttttgattatacctttacctaccagtaa

SEQ ID NO: 389332 - DNA, 189 bp, Salmonella enterica
atgctccttgttatcaacccggatatgggtgaggtaagtcaggcacatatcttcgtcgccacgctcggtacctcagactacacctatgacggtactgagcgtaacaaaatagaagcagactgtcatgtgtcggacataaccgccatttttatgacagaaatggcaaataaaaataccggttacaagtaa

SEQ ID NO: 389333 - DNA, 126 bp, Salmonella enterica
atgcagcagaatatggtactgcagggatttaaaatccacgaacgccagcagcagatgaaggaagagccggataagctgaccggctggcaggcgattaaggattataccgtggactggccagaataa

SEQ ID NO: 389334 - DNA, 483 bp, Salmonella enterica
atgctggagcactacaggtggcgggtatacgaaccgtttgcgttttacctgagcgatgataacagcgatgttattgaggtgccggctggtttcgttaccgacttcgccagcgtgccgcgtatcttctggacaatcctcccgtcagacggcaaatacgccaaagccgccattatttacgattacctttacgataatgcgctacgcacaaagaaagaaaccgacaaaatcttcctcgacgggatgacggtgctcggcgtgcctaagtggagtcccgtcgcgcatcatggcgaacaggacatcacagcgccgccttgccagggcgataagcgcctggttgtgtcgctttccctggctcattttgcgtgtgtagtaagccctggatatcgggtctggttgacaggaacagcattaccccgtctcgagggacgctccccgcgtatggatgagccggagcgtcgggttaccggcgccagacctgcatag

SEQ ID NO: 389335 - DNA, 1005 bp, Salmonella enterica
atgaccggatccagcgattacgaatccgttcaggtctttatcggcgttgatgtcggtaaagatacacatcacgctgttgccgttaatcgttcaggtaagcgcctgttcgataaggcattacccaacgacgaaaacaaactcaggtcgctgatatctgacctgaaacaacatggtcagatactgctggttgttgaccagcctgctaccatcggtgcattacccgtcgccgttgcccgctcagaaggcgtccttgtcggatacctccccgggctgtcaatgcgccgcatcgccgacttacacgccggtgaagccaaaactgatgctcgtgacgcagccatcattgctgaagttggctgcgaactctccatgatctgtggcttcgatgatgatcttgccgcacaagcaacgcaggccagcaaccgtatccgcggcctgttgacccagatacatccggcactggaacgtgttctcggcccatggctggatcattcggccgtgctcgatctgctccagcgatatccctcgcccgaaaaacttgcttcccagggtgagaaaagactggcaagccagctctgcaagctcgcgccccgtctgggaaaacgccttgctgcagacatcacccaggcactggcagagcaaaccgtcgttgttcccggcacaaatgccgctgttgttgttctgccacgcctggcactccagctcatcacgctgcgtaagcagagagacgaggtggctatggaagtagaacagcgggtccttactcaccctctttacccggtcctgaccagcatgcccggagtcggcgtcaggaccgctgccagactcctcacagaggttgcttgtcgcgccttcgcctcgacagcacatcttgcagcctatgcaggtctggcgccggtaacccgacgctccggctcatccatacgcggggagcgtccctcgagacggggtaatgctgttcctgtcaaccagacccgatatccagggcttactacacacgcaaaatga

SEQ ID NO: 389336 - DNA, 2343 bp, Salmonella enterica
atgaatatatcatcaagcagaattaatttttccactattcctacccaggttaaaaatttagttaaaactatccgtgaacgtacgaaaaactggttctcctcagaaataaccagtgttaaaaacacgcatatatctttaaatgaaaaattaaaaatcggaaggacctcgccaattgagatagcgttaccacacaaaataaaagaattttttcagccgaaagataaaagcaccttagacaaaacattggttactgttaaaaatattacagacacaaataacacatgtaagaaaaatatttcagaagaaaatacctcaaaaattaccacagcattcatgcgtaagcatattgcaaatcaatcatatgattataattacagagtgacagatgcaggtctgctccccggtggagtctctgtatcagccaataacagtccgactgtttctgaagccagaacaccaccagtatcccccaccccctcacttcaggctacgccggccccgtcatcacctgccggctgggctactaaactcaaggatgcaattttacgacagcaggctggcggaacactcacaacaaaagaaaaagatttttcaggcgcaaatctttctgaaattaaattaaacgattttttacctccagattttaaaggagcgaataatcagattatcattaatggtttcgatttttcaaatgcaaatctctcgcttactgacttttccgacataaacttcgaagaatgcaaattcaccaattcaaatatatttaatgcaatacttaaaaacacaaaatttagtaacctggatttaagcgatacgaatcgccatattgaaataaattattcaaactcattctctttctctaatgtaacattaaagaatgccattattaaacctggtgtaaacctttcaggtgttatttcaaatgaaccagataactcccccccagaactggagagctatatacgacttggtgatttctggctagatactcccactttctgggatgagtatttcttagatacttatttaaaccatgaacacaatgaaggcaggggtatgctgacgaccatcgacagcctgtccgataattacattaaggaaaaagtgcaggcgatggagaagcttgtcaggtcactggaaagtgccagatacctaaggaatgctgagctccggccggttgtaagttcactggtgagtattctggaccgccctccctacacgcaaagtgcgcttatcagcgagtggcttgggtcggttcaggcgagttttttagcccactactgcaaaacctataatgagactcctcttccggttccgggtgaatactttcaacagtacacattgcctgctttgctgaattcgtttgaaaaggacaacgcagccatgaccactcacagtgctttttttaatcaggtgattttacactccatgacaggcgcggactgcactgatgacacccgccagaaagctgctgcgctttatgaacagtatcttgctcacccggcggtgtctccccacatcaataacgggctcttcggcaattatgacggcagcccggactggacaacccgcgctgcagataatttcctgctgctttcttcccggactccggacacggcgatgatgctctcctctgacacgctactgacgatgttaaatcccactcctgacacttcatgggaccacttttatctattgaaaggcggagagaatatcccttcctcacaaatctctccgggtgaattattccgccatgactttaaagtgttttcccccgcttataacaaagaggcccagacgcgaaactttggcaaactgattgacactattctcagccctgaagaacacagcgagcttaaccagcagtttattgaagcaacgaatcagaaacattccactgtaaaatttgtcgatgatgcctcagtctcacgtctgaatgctgtttttgatcccctgctccctgaaggaagactcagtccgacacactatcagcacatcctcagtgcttattatcttaatggcgcctccccacaggagcaggcgaaaaccctgttctgtctcagtaccacattcgcacgctattcctccagcgctattttcggtacagagaataactccccaccagtcctgagaggctatgcggaggcgctgatgcagaaagcctgggaactgtctccggagatatttccgtcttcaggaaaatttatcgactggtccaaccgtcttcatggtctccatggtgcctttacctgttccagcgtggtggcaggtgatatgcaaacacatgccagagagcatttcccggatgtactgtcatccattcagccactggcctgggggtaa

SEQ ID NO: 389337 - DNA, 426 bp, Salmonella enterica
atgccgacggaggtgaatctggacccggttaacaaaaattcgctacccctcagccaatggatagagggtaagaactttgatactgtgttttcgaattgtaaggataaaaccctgcagatgagtgtgcaggcttcaaattcaacttatagtgggggtgcctatgcgaattttgattcaggagatcctgaccacattttttattatgatattcagccgccacaggatgcagagattacagggggaggtacgaccttacattctacaagaatatttgctcttgataatacccttcctgtgcttattaagcccggtagcgataattataccatgtcgtcaaaagttgacttgatacacttcgggagcaacgcggctaacctcggttctgcagtaagtggcagctttacttataatattacctaccagtaa

SEQ ID NO: 389338 - DNA, 240 bp, Salmonella enterica
atgaagagtgagcgtggcaggttcgccatgctggcacatacctggttagcgctggaccccgtcttcctcgatactgaaacgaccggacttgatgccggcgcgcaggcgctggaaatcggtctggtgaatgcccgcggtgagaggatatttgagacccgcctgaaacccactgtcggcatcgatccggcagcagctgcagcaccatatcggccggcgcccactggttattttcaatgctga

SEQ ID NO: 389339 - DNA, 699 bp, Salmonella enterica
atgcagagcagaaccgtttaccactggcagagccgacgtgatgctcgggcgataaccctgcgtattcgggaaatagcggaaacccggatacgctacggttgcccgcgtattcatattcagttgtgccgggagggatggtctgttaaccataagaaaacccaccggatttattgccaggaaggcctgaacctgcgcagaaaacgcctccgcagacgtgtcagtgcagcaggctgtcagcagcgtctggtcctgacacatgtcgatcagtgccggagtatggattttgtgtcagctaatctgtttaacgggcggcgttttcgggcgctgactgtagtggataattttagtcaggaatgcctggcgctccatgccgaaaaattgttaaaaggcggggatgtggtcagaataatggaggcattgcgggtaccagtacgtatccagacggataacggcagtgagtttatctcaaaaagtctggataaatgggcatatgaacacggcgtcacaatggacttcccgcgccccggaaagccgacagttaacccgtttattggatcatttaacagcagtctgcgggatgaatacctgaacattcactggttcctgtcactggaaggtacgcaggaaaaacccgacaactggcgggagcagttacgcgctgctgtaagaatgaaaagcgatcattgtaaaacagtctga

SEQ ID NO: 389340 - DNA, 159 bp, Salmonella enterica
atgcgaagctatttaggtcagaattcacgtagcgtatcctgttcttctctgctcccttcccttttcggttcgatcctgtttacccaagcattctccaaaaaactgttatactctcagcaaccctttccctgtctggcttctgtgtggatccaagtctaa

SEQ ID NO: 389341 - DNA, 996 bp, Salmonella enterica
atgcgcaaagaggcccaacaaacccacgataaaaaccatgcgcgacggcttatcactatgctgatgctgcatcagggaatgaccgtcactgacgttgccagattactctgtgccacccgttcatcagttagtcgatggataaactggtttactttacatagtgttgaaggactaaaaagcctcagacccggacgtgctccacgctggccggtcgctgatatccttcagctcttgccactattggtacagcgttccccgaaggattttcgctggctgcgctcacgctggagcacggagcttctggcactcgtcatcaaccgactttttgatgtgacgctgcaccgctccaccctgcaccgatatctgaggcaggcagatatggtctggcgcagggcagcgccaacgctgaaaatcaaagatccgcactatgaagaaaaacggcttgtcattgagcaggcgctggctcaggagcagactgcacatcctgtgttttatcaggatgaagtcgacatcgacctgaacccaaaaattggcgctgactggatgcccgaagggcaacagaaacgcatcgccacgccgggacagaaccagaagcattatctggcaggcgcactgcattcaggtacgggacgggttcactacgtcagtggcagcagcaagagttctgatttatttatccgtctgttagaaacgttacgccgtacatacaggcaggcgaaaatcatcacactggtggcggataactacatcatccataaaagccgcaaagtggaacgctggctggaagaaaacccgaagttctggttgctgttcctgccgacgtattcgccgtggctgaatccgatagagcgactgtggttgtcgttacacgaaaccataacgagaaatcatcagtgtcggtacatgtggcagttactgaaacaggtagcacaatttatgaatgccgctttaccgtttcccggcaatcaacagggtctgactaaagtggagcggtaa

SEQ ID NO: 389342 - DNA, 372 bp, Salmonella enterica
atgagtcaggactatcttgcccgtatcgccgcgctggaagatgcgcttcgccagaaagacagtcagctcagtctcgttgccgagactgagtcgttcctgcgttcggcgctggcccgcgccgaagagaaaatcgagaacgaagaacgcgaaacagagcatctgcgggctcagatagaaaaactgcggcgaatgctgttcggtacccgctccgcaaaacttcgccgacaggttgaagacgcagaagccctgctgaaacagcaggaacagcaaagcgcccgttgcaactggcgggataacgtccgcagattcctcgccagcttcgccagtcgcgccaccgccgtcctctgcctgaacaccttccccgcgaaatga

SEQ ID NO: 389343 - DNA, 528 bp, Salmonella enterica
atgaacaggctggagcccgccgaaacctgctgtccggactgcggcagcgatatggtatacctcagcgaagtcagcgctgaacaactggaactggtttccggcgccctgaaagtgatccgcacggtcagggtgaaaaaggcctgtacccgatgcgactgcatcgttgaagcccctgcgccatcacgtcccatcgatcgcggtatcgcagggccggggctgctggcacgggtgttaagcgggaaatactgcgaacatctgccgctgtatcgtcagactgaaatttttgcccgtcagggtgtggatcttagtcgtgcgctgctctcgaactgggtggatgcctgttgccggttaatggcaccgctggatgaagccctttaccactacgtgatggactgccgcaaactgcataaggacgatactccagtgccggtaatggcaccgggcagaaagaagacgaaaaccgggcgcatctggacgtacgttcgcgatgatcggaacgcggggtcgtcagacccgcccgcagcgtag

SEQ ID NO: 389344 - DNA, 738 bp, Salmonella enterica
atgatcggaacgcggggtcgtcagacccgcccgcagcgtagttcgccttctcaccgggccggcaggggaagcatcctcaacaccatcttcgtcattaccatgtcgttctgcaggctgatgctttcgcaggttacgacaggttgttcagcgcagagcgtgaaggggaggccgttaaccgaagccgcatgccgggcccacgcgtggcgaaaaatccacgacgtctatataagcacgcagacagcgacggcagaggaagtcctgaaacgtatcggtgaactgtacgcggtggaagaggaaatacgcggccttccggcaacagagcggctggcagccaggcgcaccagaagtaagctggtgctgatatccctgcatgactggttggtggataaaagggcgacgctgtcgaagaaatcccggccgggtgaggcgttcgcttatgtgctcaatcagtgggatgcgctgtgctattactgcgatgatggtcttgcagagcctgataacaatgccgctgaacgcgcgctgcgagccgtctgccctggcaagaaaaactacatcttcttcggtagcgatcacggtggcgagcgtggtgcactactgtatggtctgatcggtacatgcagactgaatggtatcgatccggaagcttaccttcgccatatcctgagggtgctactggagtggccgttgaacaaagtggccgaactcctgccatggaatgtagctctcaccaataaatag

SEQ ID NO: 389345 - DNA, 267 bp, Salmonella enterica
atgctcgccggcgcgctgcttatctggcaggttcgggactcattgcggccagccctgtttactgtctggttgttactggtcgccctgcttaatgcccggcatggtgatgtgatgacgctctccggcgtactgctgacgttgactgtgctgttttgcgtgcgcgggctgataccggctctcggacgacgcctgcaggccggacggtggtttgcaccagcgtatgccctccatctgctgtgtattggttttctggtcagtgttctctga

SEQ ID NO: 389346 - DNA, 354 bp, Salmonella enterica
atggggcttttcctgattaactttaataatcagtacgactccaaccagatcaatgacacggttaccacacgcggtaaaacacgtcatatcgggctggaaactcaggcgcgttacgatctcggaacgctgaccccaacgctcgacaatgtctccgtctatgcgagctatgcgcttgtaaacgcggagatccgcgaaaaaggcgacacctacgacaaccaggtgccgttctcaccgaaacacaaaggcactttatggataagtacaggcccttttgacgaagcaaacgtcggcccgcttaatgacaggcaaccagagataaccgcatataaagcgatttgcttatttttcatgtga

SEQ ID NO: 389347 - DNA, 216 bp, Salmonella enterica
gtggtgcacgccctaaaacttgcggcaggatatgatgatatctcagtcgtggctaggggaatggagcagatgctgaacaccccgggagaggtggatctgcaccggctgatgcgcttcctggggataaaggaaaaggagttaccgccggtcagcgtggtgcagcacaacctgagcagttatgagcaactgctgcgtggcaagggaggtctgcagtga

SEQ ID NO: 389348 - DNA, 1299 bp, Salmonella enterica
gtgacgctcaatacttctcaggtcagttactacatggctcagcgtaagaaaggtgtaacccagcatatattggctatgaaggccggtatctctgtccgttccggccgccagctcgaaaaagatcagtggtcaaaagccggtgctcgtcactggcggacacgcaaagatcctcttgaagccgtatgggacagcatgcttgttcccctgctgaaggagagacccgcactgatgccgacgactctgctggagatgctgcaggataaatatcccggtcagtaccccaacattctccgtaggacaatgcaacggcgggtccgcgaatggaagctgcagtatggtgcagagcaggaggtcatgttccgccagcaacataagcctagcctgcgtggcctgtcggactttaccgaactgaaaggtgtagttgtcaccatcgctggtaagttgttggcacataagctgtatcacttccgcctggaatggagccaccggagctggatgcaagtcgtgctgggtggtgaaagcttctctgccctggctgaaggcctgcaggaagctctcggacaactgggcggcgtacctgtagagcacaaaacagacagtctgcgggcggcatggaaacaacagggtgaagacgggcaccgcgaactgacggagcgttatgctgctctctgccggcactacggcatgcagggtgtgcacaacaatgccggccggggccacgaaaatggttcagttgaaagcgcccatggccatctgaaaaggcgtatccgtcaggcgctgatactgcggggcagtaacaacttcagcaccctggaagaataccaagacttcatcactcagcaagttatgcggcacaaccgcaacaatcaggatctggtaaaagaagagcgttcacatctgaagccgctgccgcttcgtcgcagcgccaactacgacgaactgacggtgagggtcagtagcagcagtaccatcaatgtgaggcacgtcgtctacagtgtgccctcccggcttgttggccagctgttacggatccgcttatgggacgatcgtctgagctgttatgtgggtagcaacgaggtcatgagctgcccccgtgtcaggtctgaaaaaggaaagacgcggacccggcgtatcgacttccggcacgtaatcgacagtctggcgaaaaagcccggcgcattctgtcatgccacactgcgaaatgacatcctgccggacgatgaatggcggaggctctggcgtcacctgtgtaaccatctggagcccgacatggcaggcaggctgtggtgcacgccctaa

SEQ ID NO: 389349 - DNA, 669 bp, Salmonella enterica
atgcaaaaacgtaagttccttacccccgaagaggtcagccgcctgctcacgaccagcctcgacggccctaatcctgaacgtaaccactgcctcattctgatgaccttcctccacggctaccgggccaccgaggtgctgcgtctgcgcctgtccgacatcgacctccacgggaggcaagtcaacgtctcccgtatcaagaatagcttctccaccatccatccgttgattatccgcgaggtcagggccctccgggcgtggctgagggtgcgcaaaaaatgggcgggggaggataacgactggctgtttatctcgcggaccggaaatcccctgtcgcggcagcaactgtacaacattctgaccgatgtcagccggaaaggagggttgtccgtgaacgcccatccgcacatgttacgtcacgcctgcgggtatgccctggcggacaagggggcagacacccggctgattcaggattacttgggacaccggaatatccggcacacggtgcgctacacggcgagcaatgctgcacggttcggggagatatggcgaggcaggacgggtaaaaaagggcaacagaatggaccaaaatgtaaaccactctatgtggaacataatatacacaaatttatacaggaaataacaaattattccttttgttttttgatataa

SEQ ID NO: 389350 - DNA, 258 bp, Salmonella enterica
gtggcggactgtaattatgaacgggaatgcgtctgtgagaacggatacatctcccggaacttgcgcacctcggtgacatccccctctatcaggctgtcgcctgctggtcactgttattggaggaagtcctcccggcagaagtatattctggaagcgacactggcggggcggactgtgaagtcgatggcggaagtactgggcattgatgaccaggcggtatttgcggcgcgaacggcactgataacgaagatgggctga

SEQ ID NO: 389351 - DNA, 1152 bp, Salmonella enterica
ttgaatttaaaattaaggttctgcttcatttttatcatgattattttcagcaaatgcacatgcttcatggtatgttggaaccatgatttccgggggttcttttcacctcatctgaggttgttaaaacacgtaaataaaatagctttatattgtctaattgtgctgtttgaactcatacctatttcatgttatgctggacaaatcagatatttatggtcatctacaggaactgggacatcaggggatatacaatatcagggaaccatgattgatactctatcgaccaaaatgaattggtactcagggaatatgcgagtagaatatgttggatcttgtgatagcagcgctgtaggtacttatacctattatcgatatgaagataaatggttaagtgtgccaactagcatatctctgaatggaattcagatacctatttcagtaaatgttgataatttttcatatttacaaaaatcgggtgctgatgttatttataaacagagaacaaataattatacatggactggtcgaggtgcctgtgggcaagttggaggtagctatcctattaatgactctctttctgttacaatcgttttatcgggattgaacatttctggcttaaagagtggtacttatactggtttaatcccaattaaatacgtaagaagtgagtatttttctagtgtgtcgtatgctgaaataacaccttttaatgatagtttagcaattaagtatcttactacaattgcttcaattccttatactattactataacaaatagctgtaaaattaatgctactcaaatatatttcaatcatggttccctaccaataagcgatgctgatggcaatacaaaaaactcttcactaaacataatatgtgacgatacggcaagaataaagatgaatatggcgtcgcgcactacgccttcttctacttcctactctgatggtgtgggcgttgggcttgggtatggatgggatactgtgcttaaatttggtaatgggttgttaacagatacttcattagaagccacagttctcattcctcgggaagggaaaaatataccaataacatcaacgcttagaaaaacagcacgctcagcatcaggccccttggatggctctgctgttgtaaggatagagatgcaatga

SEQ ID NO: 389352 - DNA, 177 bp, Salmonella enterica
atgaacaataaaatcaaaattgaattatgtgatgaggccagaaatatccttactgaaaaggaagaaaaaatcattctttccttattgcagggcaatagagtgacggatatcgctatggcagcatgtcgggatatacgcacaatatctactcaaaaaaagctgcttataaaaaactga

SEQ ID NO: 389353 - DNA, 618 bp, Salmonella enterica
atgctgtcggcgctgttgttggccgggagtatgctctctgttgcaggttgtaatgacacgggaaaaatcgaaaaggagtatacaaaaatcatgggttcacaggtcgtggttgtggatgtgcagaaggtgtaccgggagtccgcggtggcggataaggcgcgcgctcaccaggaacaggtacgtgtcagtctgcagaaagggctggaagagatagatgccgtatacggtaccaagggaagccatccatcttcccagatcctgcaggaaggtgcgcagcgtctggaactgcaatttaaggctgaagaacaagctgcgaatcaggttgtggcacaggtactggccacaaccacccaggcctggtctgaagaacatcccgataaggttgtgattgcgcgtaacctggttctgggcgcgggcaagaatgcagatatcacaggcgatattctggaaaaaatgaaaacagtaacgccggtgtttgcagaagtaccaacagttaccgtaaaagcaccacaaacagataaaaaagctgtcgagcctgtctcaaagaaaaccagacaatctgcggcctcccgcaaaaccggaaaggacgaaaaaacagcgagggcagttactcattaa

SEQ ID NO: 389354 - DNA, 1830 bp, Salmonella enterica
atgatttctcgcccgaatcagaatcagcataaccttctggtgcgcactgatgcaaaaggctggaacactgaaaatagcgtgattaacacagcgaataatagcgggaaagcggttctgcttaacggtgcaaatgcgctgtttgttaacgacggcaaaattaatgttacgggtaataacggtgtggccgtttatgccgaattcgggagtaacaccgccgttaacaacggcactatcactcttggtgaggcaggcaatccggatgccgcgaccggtatggtggggatgttactgggtgctaacactgctgcagattctgtgatggagaacaacgggaccatccagattaatgccaataactcctttgcattcagcaaggaaggaaataatggccgcatcattaacaacggtatcgtgagcattgccgacggggtgaccggttcgggcatcatcaaacagccggggttagcagacagcatcgaaagtggcgtgaatgtggattacacccgtccggatatgccaaccggtaaacccggagtcaacgttattgaaggttacaccatcggcaccacggccagtgggcatgccagtaagctttctgccagcaatgcgttgctgaaagacgtgaccgttaacaccggctttgctgcggggaccgctgaccgttcggtgacctttgacaacgtggtgaccggtaaaaacattcagggcgccgggaacatccgctctgaaagcatcgtctggaatgcccagggcaagcttaacgataaaggtaacgtcgacgttaccatgaccaaaaacaactacgcggatgtggccggtgatggcaacgtgaccagtgtggcaaatgccctggataaggcatacaccaacaacgccctgttcagcagcctgaacgtgaaaaccgcccaggagctcagtcaggccctgcgccaagtgtccggttcacaggccacgacggccttcaacgatgcccgtgtcctgagttcacgctttgaccgtctggcggccgatgcgaagattatgggtaatggcctggcctttaatgccatgtcacggaacgaccagcgtgcggagctcgggaacaaggtgcgttacgacatgtttgccctgaatgacagccagaacattgagctgggctacggtattgcccgcctgaacggcagcggcacctcccaggcaggggataacggtctgaccgggggctggagccagttcctcagcctgaaacacaggctgaactttggtgaggactacagctggagcaacagcctgcgctatgaccgccatgagctgaaaagcaaccgtctgatccgttacggcgatgtgaataaggtggcttcagcacaaaaccgtcagcagtatatggaataccgtacggaaggcagcaagcatattccgctggcagacggcctgaacctgacgccatccctggggctgaagctgcgtcataccgtgaatggcgccctgactgagcgcggtgcaggggatttcaacctaggcctgaacagtagcatggaaaccgcagttgattccgttgtgggtctgaagctggattatatcggtaaggatggctggggggcttcggcgaagctggaaggagggccgaacctgagctacaccaagagccagcgcaccggcatgctgcagggtgccaaaggcgttagctttaacctggatgacggccagaaaggcggcggtctgaacagggtggctgaagtgagcgtgaactacagcaaggataacaaatccctgtcagccagtgccttccagtggcaagaggacggtattcaggataaagggttcatgctgaactataacgtgtcgttctga

SEQ ID NO: 389355 - DNA, 1530 bp, Salmonella enterica
atgtttactgaagaagaaatccgcgccattgagctttatttcaaatatggtaagaagcttgcccctgtcgtacgcgagctgggctacccttcgaaaagaaatctgcggcgttggatccgctcatgggaagcaggtggtggcgcaaaagaatccattcgtcataagcaccgttactcagatgagcaaaaacaggttgccattgaacattatcttaaccacggctgctgcctggcgtttaccagcaggaccctgggttatccctgcaccgatgtgctcgctcgctgggttaatgaactttatcccgacagacgacgtatatttaccagtaagaccaatccggttgcgccctttgaaccagaagtcaaacgtcaggctgtcatggcactctgtacacgacaagtatcagccagggaaatcgccaggcgtattggtgtcagtcgtgcggtattgtataaatggaaagatgaaattatcggcaacagtgcttaccagactatgcgtaaacataacgaaccttccctggaggcagaacgcgatgcgttgcgggaggaagtcgcccgactgaatcaggaaatacgccgccagcagatggagctggatattctgaaaaaggcagaggaaatcataaaaaaagacccgggcatcagtatcagtcacctgaacaacagagaaaaaacaaagatcgctgatgccctgagacaaacatatctcctgacagaattactgcatgttctgggccttgcccgtagcagttatttttatcatcgggctgcactgaaagccggtgataaatacgccacgatacgtacgatgctgacagatatctttaacagtaactaccagtgttatggttatcgtcgcctgcatgcgatgctcaaacatgaggggctacggctatcagaaaaagttgtacgcagacttatggtggaggaacagcttgtcgtcagccgtaaccgtcgtcgccgctacagctcatattgcggagaaatcggaccagccccggataaccttattgccagagattttaaggcggagcaacctaatcagaaatggctgacggatatcacggagttccagcttcctgcaggcaaagtttggctatcaccggtagtggactgcttcgatggaaaagttgtgagctggtctctcagtacacgtcccgacgctgaactggtcaacacaatgctggataacgctgtcgaaacgttaaatgctggagaacgaccggtgatacacagtgacagaggtgggcattatcgctggccaggctggctggaaagagtgaatgcagcaggtcttattcgctcaatgtcccgtaaaggatgttcacctgataatgccgcatgcgaaggctttttcggcagactgaaaacggaaatgtattatgggcgtaaatggtcaggcatcacgcctgaaaagttcatgcagcatgtggatgcttacatcagatggtataacgagcggcgtataaaattatcgctgggtgaagtcagccccgaaatgtaccgccaacaatgtgggctggcataa

SEQ ID NO: 389356 - DNA, 357 bp, Salmonella enterica
gtgacaggcaggttatctcccccgacaggaaccgaatgcccggtttgcagtggcaaactgaaaccgctgggggaaagcatctctgaacaactggatattatcaacaccgcgttcagggtaatcgaagctgtccgtccaaaaatggcctgcagccggtgcgactgtatcgtacaggccctactgccatcaaagctcattgagcgcagttacgccagcccgggtctgctggcgcgaattaccatggcgaagttcgcagagtacccgccgctgcataggcagtcggaaatctacgccaggcaaggcgtggagctgagccgcaatacgatggggcgctgggttgatgtcaacgacgggtaa

SEQ ID NO: 389357 - DNA, 225 bp, Salmonella enterica
atggcgctggttgctaaacttcagagaatgctgttcggccgcagtagcgagaaaaatcgcgagaagatagaaaagaagataacgcaggcagaaaagcgtataaccgagctccggaacagacctggcgaagcacagtcgcaactcacatcaatggccgaagatgcgggggtcaaaaacatcagccactcccacccgcaaagcgcttccggtaacactctcccgtga

SEQ ID NO: 389358 - DNA, 960 bp, Salmonella enterica
atggacaatcaaatacagttctatgcaaaaaatgaattgaaaccgacatcagacgaactcaaaagtgttgtcgcaggtttaactgaagccgctaatcatctatacaaccaacgccaggaagcagcaattgaagctgtcatggcaatgaccgatgcggtgacatatctacacacccagaccatacagggtgagctgctttacaagaaagagcaaaaagaggtgacggaaacagtcgcatcgattattcgccggatcggaaacttaaacgacgagatgatgcaggttcaaaaacgaatctcggacctggaggtcaagataaagaaacaggatgtggatgctcaagaactccagcggcatttggccgacttatcacgcaatttggataaaatggaacgagagcggcgcgaacaccaacgacaacttgatgaactcaatgaccgttcagctggtcgcatcatactgtcgattctttgtcttggtcttgatcgcgccattctgggtatcaagtcattgatcgatcaagacgccgcacgcatccatattctgcaggacgaaatgaacagatatagcgatgcactgggaaacggcgaaaatcagctaagagtcgccaaagacgtgcaaatgacgctatccgaggagcaaaagcgtaacgagaacaacatcaaagatctgcaaaaacaggtggacaaacttcatctggaggaaaaaaacgttcgcactaaactggctgcgatcactcaggttgcaggtttctatggcaagctgaaagcggtttgcgcaggtgtccgtgaaaacattatctgggtccaggatatcattgaagaactcaacgatgaccagccccggattgtcgatatcgacgcatcaggtctggagttggttccattgaggactgcgctggccaaactggacggcctgctaagtactgacagaatgctggaagcctttcaacagaaatga

SEQ ID NO: 389359 - DNA, 1785 bp, Salmonella enterica
atggatagctctgaaaacgaaatcggatacatcgttgttatcgaaaaaaaagaatatgacctcgccaaaatccctccttttaacgaccctctcgtccaacgagaaaaacagtcggtgttgagtcaactaagccttaatgacatcacccagaacctcaatctttccgtggaactattttatgtagcctatcatggcgtcgctggcgcaaaaggggggatgctgcaggcggaaatcgccaaattacaaagtcggctggcaatgttatgtaatgaatgcattatcactatggaaacgtttcagttcgaaacacaatttattattgggctgcttcaacaatgttaccgttggttaatgaaaggtcaggaaaagcaggcattcaaaaaattggcgcattgcaaagaatcctcaaacgccatgtcaataaaggccaaatcgctggctgaccagtttaaagcattgcagattgattccaccaaggctaaatcaaacaccattatggaggaagccagtgagaatgaccggttactggccgcgcagaaagccgaacgggaaaccattgccaaacaaaaagcagaggaaaccaatcaacaggcgctattagaagaaattgccaccacccaagcgctgtatgaagacgctaaaagtcgggaggctaaggagtcaaccaaagcgctggtgctgggtatcgtcagtgcggttactggcgcaattggcacaggccttggggcttactctgcagcaaaaaacccagtaggcaccattctgaacaaagcgggaacgtccattgacggtaatacgcaaatcaaagccgcccagatcagcatggacaacgccaaacagaaatcggaagaggctcagaaaaaatatcttgaggcaagagacaagcagacagctcagcaggacatcatcagcaggctgaaaggtgagcttgatgatctgaataccgcgctggttaatctggaaaaagacagtacagccaaacaggaggatgtcactgcactgcggaaaaaacgcgacgataaaaaaacggagcatgacactgcagtggtgaaactgcccgagctgaccagagccgccaatgtgctggaaaaagacgcgaaagatagcagtgaagcctatgctacagctggagcctctctggccaatcttgctgcttcaaccagcaagatggccgaaacggctgcatcgacagaggccgctgtacgggaagaaagaattaatctgctcaacaagcagcttgagctacagaaggaaaaacgagcatcgctggttgcactagcggaatatgcagaaagcctgaaaaacctcaaaatcgagcaaggtaacgctaccctttcggtcaattcactgcatagcgcgatagacgctttgggcaaagtcattggcacgttaaccaacgccagtctgttttgggagcaaatgacaaaatattgcgaccagatgaccagtagcggatttcagcaggatctggatgacctaaaggatctggatctcgaaatcaggctggaggagtatcgagatccacatttcatgaaatcgttcttcctctacctgtgccaatgggttgcagtaaacggcctatcaggcgattaccttaaggccgctgacgaggcacagaagaaagccatccaatatctaaaggagtccccgacaattcaggaagccatacgcaaagcgccagaactggccaaaaatcttgcccttattgtggaaaacgatctgctggcgtcccgtaaccagactatagagctggaacaacaacgcgctctcctctctgctcaataa

SEQ ID NO: 389360 - DNA, 243 bp, Salmonella enterica
atgcgccgtcagcttgattacaagcagctccggcgcggcggtcaggttctgccggcatataccagtcagcgttgcgcctgctgtggtcatacagcgaaaaagaaccgcctgtcacaaagtcgattcgagtgccttgaatgcggatataccgagaacgccgatatcaacggcgcgcgtaacattttagcggcaggacatgccgtgcttgccagtggagggatggcgcagtcaggccgtcgttga

SEQ ID NO: 389361 - DNA, 132 bp, Salmonella enterica
atgaattacgataaaataacaaaaattaccgctgagtgtatagacagctatatgatacaagctattaatgtagatttcaaaggagttgccgaaatgtttcataatgccgcatggaggggctttgtggtttga

SEQ ID NO: 389362 - DNA, 234 bp, Salmonella enterica
gtgagagtcgttaagctgacgccaaaagcggaggatgatctggaggccatctggcattatggccggcagcattttggcgaagcgcaggctgataaatatactgataatctgtcagcgatatttcagctccagggtgatagccatatcgggattcaccgtccggaaatgggtaggggatactgctgcatcaggtattgcagcctcccgggtcattatgcgctgacgtataaataa

SEQ ID NO: 389363 - DNA, 450 bp, Salmonella enterica
gtgacgtccacctgcagtgtttcggtgccgacggaggtgaatctggacccgattgacaaaaattcgctatccaacaccgacaactttatagaaagtaagaactttgatactgtgttttcgaactgtaaggataaaaccctgcagatgagtgtgcaggcatcttcttccgatatcaaggagagggggaattttgattcaggggatcctcaaaacatattttattatgaaattcagccgcccaaggatgcagagattacagggggaggtgcgaccttttcttctggaagattatttgctcttgataatacccagcctgtgcttattaagcccggcagcgataattataccatgtcgtcaaaagttaacttgtcccactacgtgggccgcagcgtggcttacgttggttctgcattaagtggcagctttacttataatatcacctaccagtaa

SEQ ID NO: 389364 - DNA, 588 bp, Salmonella enterica
gtgaaaaagagtatggcaggtcagggtgtggctggggcgttactgctgacagggctgatggtgagtgcgggcgcaatggcggcctccggcgacccggtaaccggtggttcgggtaccgtgaccatcaatgttccgatagtgacgtccacctgcagtgtttcggtgccgacggaggtgaattttgactcgattaacataaattcgctgccctccggcagctttatagcaagtaaaaactttgatacggtgttttcgaactgtaaggataaaaccctgcagatgagtgtgcagggtaaacctagtgacgataggggggcctgggcgaattttgattcaggggatcctgaccacgtatttatttatgatattcagccgcccgggggggcagagattacagggggaggtacgaccatcggttatacaagggtatttgctcttgataatacccgtcctgtgcttatcaagcccggcagcgataattataccatgtcgtcaaaagttgatttgtcacggtggacgagtatgtccttggctaacgttggttctgcaataagagccagctttacttataatatcacctaccagtaa

SEQ ID NO: 389365 - DNA, 579 bp, Salmonella enterica
gtgaaaaagagtatggcaggtcagggtgtggctggggcattactgctggcagggctgatggtaagtgcgggcgcaatggcggcctccggcgacccggtaaccggtggttcgggtaccgtgaccatcaatgttccgatagtgacgtccacctgcagtgtttcggtgccgacggaggtgaatctggacccggttaacataaattcgctaccctccggcacctctatagagggtaagaactttgatacggtgttttcgaactgtaaggataaaaccctgcagatgagtgtgcaggcttcacatccattttctgcgggtgtctttgcgtattttgattcaggggatcctgaccacgtattttattattatattcagccgccacaggatgcagagattacggtgggggcgtggacgaacggagtatttgagcttgataatacccgtcctgtgcttatcaagccaggcagcgataattataccatgtcgtcaaaagttggcttggtatacagaccgggcaacagcatggctaacgttggttctgcattaagtgccagctttacttataatatcacctaccagtaa

SEQ ID NO: 389366 - DNA, 288 bp, Salmonella enterica
atgcaaaacgttacgcttattggtatcgatctcggcaagcattccttccacgttcattgccaggataaatcaggtaaggccctgctacgtaaaaaactctcccgctcaaaattgatggagtctctagcgggatcgccatcagcaacggttgtaatggaagcctgtgccggtgcgcatttcatggctcgccggattgcagctttcgggggtcagtacaaaccgaggcccactgtatgcctaatcaccttcggtatggcctcttaccgtgcaatttgcaaggaggagtaa

SEQ ID NO: 389367 - DNA, 159 bp, Salmonella enterica
atgaaactgccgcgagagtcccttatctggtgcgtattaatcgtgtgtttaacgctgttgatattcacatatcttacccggcgcctgtgcgagatcaggttaaaggacggaaacagagaggtcgcagcaagcctggcttacgaatccaacggtaagtag

SEQ ID NO: 389368 - DNA, 285 bp, Salmonella enterica
atggcagttaaaggcatcagattttcagaaattaaagcgaaagcgctcgcaaaccctgaagtcaaaaaggcttacgaggaagaaacgcaggaagaagagcttcgcgcagttctggtcgaaatgaaatccaaatcagggttgaccagcacagaaattgctgctcgcatgggtgtcagtcagccagcagtaagtcgacttgagagaaacgtatcaagtgcaagcctctcaactttgcagcgttacgcagctgcatgcggaatgcacattaaattgtctctgagttaa

SEQ ID NO: 389369 - DNA, 321 bp, Salmonella enterica
atgtacgaactaattttccaccccgacgctgaaagcgaaatttatgaactcgagcctgttatgcaggcaaaagctcttaaaggacttgaaaagctggaagtaaaaggaccagagctaaggtatccggatacagatatcattgatggtggattgttcgagttacgagttggccgcaaagatataaccagaacattttttgcttacgccaaaggacgcaggatctacatattaaggacgttcatcaagaaaacccctaagacgccaaaagcggagatatcgcttgctaagtcaagatgggaggagttgaaagatggcagttaa

SEQ ID NO: 389370 - DNA, 648 bp, Salmonella enterica
atggccgaggttattaaccgccatcctgggcgagtgcgttttattcgaaacttacctgatgctgagcgagaggtactgactgctatggttgttcgtcggcgccaattgatcaccatgctaactgctgagcgaaatcggcttcatccctctcaccctcaaagccgaaaaagcatctcaacaatcattgatgcattgaaggatgaacttaagcgcatcaacaaaagtatggaagcccacatcagcacacatttcaaaacactggctgagatccttggtggagtaaaaggtattggcgcagcaactatagcgacattgctggctgaggctccggaactgggtcacctttcacgcagagaaattagcgcacttatcggtctggctccatttaacagagactcaggcaacatgcgcggccgccgaacaatttttggcggaagagccaatgttcgctcagcgttatacatggccacagtcgtagcaactgctcacaatccggtaattaagcaattctacggtcgtcttgtcgattcagggaaagttaaaaaagtcgcattggtcgcttgtatgaggaaattactaacgattctgaatgcaatgctcagaaaggaggaagaatgggatcctaaataccattcggtcaattcataa

SEQ ID NO: 389371 - DNA, 741 bp, Salmonella enterica
gtgagatacaccgatccgctgaatggctggaaaacctccacggagctggtggaagaccacgcctcacagatacgttacgggcgcaatctgctgaaaatggacgcgttcggctgtaccagccgaggtcaggcgtaccgtaccggactgtgggtcatcaccacggatctgctggagacgcagacggtggatttttctgtcggtgcggaagggctgcgccatacgtcggacgatattattgaggtctgtgacaacgatgacgccgggaggacggtcggtggtcgtatcactgacctggatattgccacgcgcacgctgacgcttgaccgggaaatcacccttcaggacaacggtaccgccatgctgaatattgtcgggcctgacggtaagccgttcagtgcggagatacagtcgcagcccgtacttgaccgggtgacggtcagtcttctgcctgatggtattgcgctttacagcgtgtggggactgaaacagccctccctgaaacgccgccttttccgttgcgtgcgtattaaggagaatgacgacggcacatacgccatcactgccttgcagcacgttccggaaaaagaggccattgtggacagcggggcgcactttgaggtgcagtccggcaccgtgaatggcgttatcccgcctgccgtcatgcaccttgccgtggataaaggcacagcgactggggatttcctctttctggataaaggacgggattcagccggggcatga

SEQ ID NO: 389372 - DNA, 306 bp, Salmonella enterica
atgctggtggcgcagggggggcagatattcctgaatgaggtactcacgaagtccctcagtattaacggacgatttatagtaacgtttgacggaataatgacggcaaccggcgcgcatgtcatgggtaaaattgatgcggattcaggcacgttaaataacgtcaccgtaaatgaaaactacacaatactggggacggtggatgcagggaacgtcccgggcgatgtttattttcgttcgctgttttatctggataaggtggtgtacaacgccgtccatcctgcgagatggcgcagggatacagcttaa

SEQ ID NO: 389373 - DNA, 177 bp, Salmonella enterica
atgagtaaattcaccacccccgcgactctggagatgctggagctctacagatggcgcgtgtacgagccatttgagttttacctgagcgacgataacagcgatgttattgaggttcctattaggcaacaattacccctcccgcatcgtgacaattactctggcctgtttgtaatctga

SEQ ID NO: 389374 - DNA, 219 bp, Salmonella enterica
atgctgaaggttcgtcagtgggatgacagactgagttgttacgttggcagcgatgaagtcatgagctgtcagcgggtccggacaccgaaagataaccagctgcggctggagccgggagagccggatctccagaagctgctcagctggctgggcgtgaaagataaacgccctctgccggacgggaaactggttcagtacagcctggttatgacaacctga

SEQ ID NO: 389375 - DNA, 276 bp, Salmonella enterica
atggaagtaatccccgctcaactcgctaaaaatcagtttggtgatctgcttatgaaagttcagcgtgagccggtagagattagtaagcatggtaagcgtgtagctgtggtcatttctcctgaagagtatgatcagtttacacagcttaagttacagagtttaaaggccattttggctgaatctattgcacaagctgatcgtggcgagctacacagcattgatgatgtgtttgctccctttatggttgatgaacttgaaggtaaagcccagggatga

SEQ ID NO: 389376 - DNA, 294 bp, Salmonella enterica
atgagcattaaatttaccaggaaggccagagagcatattcgtggcataaaactgtattccttacgccggtggggagttaacgtagcagaggcttacgctaattccttgcgtgtgactatgacagatattcttgatcggcacccatcccccggacgtgatcgtagtgaggatcttcatgttggtgtgcggagtttccctattgagagccatattatctattaccgcgaagttacggctggtattgaggtgctggcagtattacatcagacacaagatccacataaccacctttaa

SEQ ID NO: 389377 - DNA, 1437 bp, Salmonella enterica
atggctcattttttcataactcaggaggtcagtttggttaaacgtattgaaaatgaaaactccgaaaataatgataatgtattaaaacggggcctaaaatctcgccatatgctgatgatatcaataggaggtactattgggactggattatttattggagcagggcaggttattcatgaagctggtccattaggggctgttttagcttttatttttggtggcatcgtaatgtatcttgctttactatgcttagctgagcttgctgttgctataccagtagcaggatcatttcaggtctatgccaataccttcatttcaccagcagttggttttactgttggatggatgtactggattacatgggttatttgtattgcttctaactttactgcggcggcaatgattacccatatatggtttcctgctatacctatatgggaatggtgtcttatctttatagtgttcactggtgttattaattctatatcagttaaaatttatggggaaatggagttctggtttgccggaattaaaatagtagctattattatttttattgtttctggtgttggacttatgttaggctattttggtcatgaaggggcagttggttttgaaaatttttcaacagattccggtatatttcctaatggatatatcgctttatactttacattaattactgttgttttttcttttcagggagcagagcttgttggtattgctgctggcgaatgtgagaaccctgaaaaaaacattccacgtgtaattaaaggtgttgttttcagaatcgttattttctatgttctggcaatagttgttcttggagcaacgataccatatcaacaggctggggtactggatagtccttttgcttacgtatttagccgaattggtattcctgttgctaaggttattatgtcagtagtggttttgacatcagctttatctgcaagtaattctgcattatatgtttgttccagaatgttatggtccatgtcaaattcagggcaggctcctgtatggttaggtaaagtgagtaaaagtggagttccttttagaggattagtgttaagccttttatttactgctatatcattgttaaccagtttctatgcagcagacacagtctatttgtggcttgtttcaagcgttggtatgacagggtgtattgcatggatagtaatatcatggtgtcagattaattttaggaaaaaatatgtcaataatggtggtgatcttaaaaaattaatattcagaacaccattatatccttttatcccttggcttagtataatattaaatatactaattattatcagtcttgctttcatgagtgatcagcgaattgttttgtatacggggctccccggactgttgataatatatggtatttactggatattttttaagaaaaagaatagtactctggagtag

SEQ ID NO: 389378 - DNA, 1065 bp, Salmonella enterica
gtgatttcataccctgatgctgctgatttagatgtcagtatattgaataaatttaatgagtttgtattcaataactacggtgactgggctgaagattctaattacatactgaatacatttgaatttgaaagagaagttatagagtggtttgccaaacttttgaatatagatataaataaatgttgggggtatgttaccaatggaggaaccgaaggaaatatgtatggttgccttctgggaagggagtgttttccaaatggaaagttatattattcaaaacaaacccactattcagtggcaaaaattgtaaatatgttaagaattgaaggtaaagtaataaaagaacaacctaatggtgagattgattatgatgatttgattcaaaaaataaaagagaataatgatcctcatccaattatctttgcaaatattggtacaacagtcactgctgctgttgatgatattaaaatcatacagaaaaaaatgactgaagctggttatgaacgtgaggattattatatccattcagatgctgctttaagtgggatgattattccattttgtgatgatcctcaaccttttgacttcgcagatggagctgattcagttactatttcagggcataaagtaattggcactaaaataccatgtggtgttgttttagctaaaaaagaaaatgttgccatgattacacatgaaattgagtatattgcagctcatgataagactattacagggtcccggaatgggcatactcctcttatgatgtggctgggaataaaacaatatacttatgaccaacataaagcccgtataaagtattgtatagataatgctcagtatgcagtagataaatttaatgagtatggaattaaagcgtggagaaataagaattctacaactgtagtatttcctaaaccgtctgtggagataattaataaatggttgttgtcaacggagggagaacgctctcaccttgttatatgtggtcatcataaagataaaaatcagattaatattgttattgatgatatagttactgatcttagaaaaagatttaaataa

SEQ ID NO: 389379 - DNA, 1257 bp, Salmonella enterica
atgataaagctaaaatctatcagaggtatgaaagatattttacctgctgagacacctttatggcagtggtgtgaagataaaataaaaaaagtaacggaacgttatgggtataatgaaattagattacctgtacttgaacccttgtcactgtttgttcgggcggtaggtcagtcaacggatattgtctcaaaagaaatgtatgactttgttgataagagtggagagcatataacactcagacctgaaggtacgagtggatgtgtgcggtctattattgaacacaacttatgttataaaaatcaacaaaggttatggtacttaggaccaatgtttcgttatgaaaggcctcaaaaaggaagactgaggcaatttacgcaatttggtgttgagtcattcggtatgagtggtcccgatattgatgttgagttaatacttctggtcaaagacttgtttaaagaattagaaatactggattatgtcacattacagataaattcattaggaacatcgtcagaacgaagtgagcacaggaaaatattggtagagtattttaatgataataaagaacagctagatgatgatagttgtaatagactattgacaaatccgctgagaattcttgatagtaaaaatcctgaaatgcaaggtattattgaaaatgcacctcaactactggattttttatcgggagaatctaaacagcatttcgaagagttatgtagtatcctgtcttcattagacatcaaatatgagataaatccaaggttagtgaggggacttgattattatacgagaacggtttttgaatgggttaccaattcattaggttcacagggaacagtttgtggtggtggtcgctatgacggacttgttgagctatttgataaaaaaagtcttccagcagcgggttttgctatgggattagaaagactgttattattaatacaaactataaatggagatattaagtttaacaaaacaccagatatagttgttacttctgaggatacaggaagtagtcatgtaatgatttctaatattttaagaaatgagtttcctgaattaaagataatagctgactgtagtaagtccaggataaagaaacaacatgaaaatgcggtaggcagtggttgtaaatatataatcacattacaaaaagatgatatgatgaatctttgggacttagaaaaacataaaagattcagtttaactatagaggatgttatttcatatattaaaaaatttttatttatttaa

SEQ ID NO: 389380 - DNA, 840 bp, Salmonella enterica
atgtttggttgttatcttggaagagaaattttccctgatggtacgttgtattactcaaaagacacacattattcagtagcaaaaattgtaaaattacttcgtattaaatcatgtctggttgactcacaagcaaatggtgaaattgactatgatgatttaatgaaaaaaatcattgcagacagagaatcagcaccaattatttttgctaacattggtaccactgtgcgtggtgcaattgatgacattagtattattcagcaaaggatggctgatgctggttttaatcgtgatgattattatattcatgctgatgcggcactaagcgggatgattttaccttttgttgatgatccccaagcgtttacttttgctgatggtatcgattctattggtgtatcaggtcacaaaatgattggttctccgatcccatgtgggatcgccatcgcaaagaaaaagaatgtagaccgtatttctgtcgaaattgattacattgcagcgcatgataagacgataacaggatccagaaatgggatcacaccattaatgatgtgggaggctataaaagggcattcattcgatgaatggaagcgcaggattacacatagcttatccctggctcaatatgcagttgaaaggttcaaaaaaggagggattcctgcttggcgtaacaagaactcgattacggttgttttcccaagaccatctgaatccgtctggcaaaagcattgtctggctatttcgggtgatgttgctcatttaatcgctacagcacataacttcaatacagataaaattgatgctttgattgatgatgttatagcagataaaaaagttagctaa

SEQ ID NO: 389381 - DNA, 435 bp, Salmonella enterica
atgacagtcagcagcacgatttccgtttattgtcgcgatggtatgttccgttccgtttactgccatctgcacggtgagccgtcctggaacggcagaatcctgcatacccactatgccaccggtcagcaggcggaagccctgattacacatggtgatatccgttgtctcggtccccgctgtgacaagcctgccgggcatactctacagcatccggcgaaaggggtgacgtcatattacggacgtgacagcaatctgctgatggacagtgaggcacgtgaataccgttccctgacagaggctctggccacagaaagtacgccagaggtgcgttttcattatttgttcatcgatggctactggaaggtgatgtaccgctcgccggaaggctggaagatgaaatcgctcgcgcttgcactgcgtcgctgtcaggaatga

SEQ ID NO: 389382 - DNA, 249 bp, Salmonella enterica
atggcaatggctgattatgtaaagcagcagagcgaagagtgtctgcagaaggataaaaaagtatgtcgtcagacccgcgtcacacggcggcagatgacaccggatgaaattgaccccaaaatcctggcgccgggttgtcatattgtcagatgctgcagcaagcagcagcgggtacatgttcccgccatgcgttcaggcgagtgggggcatttactccgcgcacttgaaatgaaacgtgcctggaactga

SEQ ID NO: 389383 - DNA, 1206 bp, Salmonella enterica
atgctaatcctgaaagcctacaaattcagactggaaccaacgcctgaacagtcgcagcgtttgcggcagttatgtggttgcgcccgttttgtctggaatttaggtcttgcggagacaaagcgcatccctggctcaggcgaaaagttaccttcggctttcgagttgaacaggatgcttacggtgtggaaaaaaatgccggaacacatctttttacaggatgcttataccgacaatctgcaacaaaagttgaaagacctgcatgctgcatggaaacgttgctttgataaaaagctcgcagctaaggccccggtatggaaacgaaaaaatgagggcagagactcaatccgttttgtgaactttgagaaatattgccgtcttgaaaatcgcagagtgaagctaccgtcaggtcctgggtggataaaattccggcaatctcaacgtgtgaacggtaaaatcaaaaatgcgacaatcagtcagttagcgggacagtggtatatctcgtttcaggttgaagttaaaacggcagaacccaatcacacaagcacaacgatagtcggtctggacgcaggagtaacaaaactcgccacgctttcagacggtacggtataccaaccagtcaacagttttaaagcaagtcagcgcaagctggcaacactccagcggcagttaagccgtaaagtcaaattcagcagtaactggcagaaacaaaagcgaaaagtccagcgtctgcactcgcacatagccaatatccggcgcgactaccttcataaagttaccagtgaaatcagcaaaaaccacgcgatgatagtcattgaggatttgaaggtgagtaacatgtcgaaatcggcaaaaggtacagcagaacagcacggacgaaacgtcaaagccaaatcaggtctgaaccgttcgatactggagcagggctggtatgaaatgcgccgccagcttgagtacaaacagctctggcgtggcggtcaggtgcttgcggttccgccagcatacacaagccagcgttgcgcgtgctgtggtcataccgcgaaagaaaatcgcctgtcacaaagtaaatttgtgtgtcaggcatgcggatatacagcgaacgctgatgtaaatggcgctcgtaacattttagcggcggggcacgtcgttcttgcctgtggagggatggtgcagtcaggccgcccgtctgaaacaggaaccagacgctga

SEQ ID NO: 389384 - DNA, 312 bp, Salmonella enterica
atgagtgtgcaggcttcaagtattctacctgatgggacggggagaggtgggtattttgattcaggggatcctgaccacgtatttttttatgatattcagctgcccagggatgcagagattacagagggaggttcgggcatcggttcttcaagagtatttgctcttgataatacccgtcctgtgcttatcaagcccggcagcgataattataccatgtcatcaaaagttgacttggtatacacctcgtcagacacggctaacgttggttctgcattaagtggcagctttacttataatatcacctaccagtaa

SEQ ID NO: 389385 - DNA, 453 bp, Salmonella enterica
gtgacgtccacctgcagtgtttcggtgccgacggaggtgaattttgaccccacggacaaaagttcactagccggagggccgcgtattgtaaacacgaaggagatggatatcacactcagtcactgtaatggtaaaaccctgctgatgaatacgcgtggtcacgctgtttctccgagtgataatacagacggatactttagttccggagatccggataatgcgctgatgtataatatttatgtcccaatatccgcggggattactggtgggcgcgtactctcaggttcgtattggctcccggacctgaataatacttatcctttgactattaagcccaacagtgacagtcatcagattgccagtttgattaaactgctaagtacaggaaaatctgtttcaaatctgggttctgccgtcagcggtggttttgattatacctttacctaccagtaa

SEQ ID NO: 389386 - DNA, 591 bp, Salmonella enterica
gtgaaaaagagtatggcaggtcagggtgtggcaggggcgttactgctggcagggctgatggtgagtgcgggcgcaatggcggcctccggcgacccggtaaccggtggttcgggcaccgtgaccatcaatgttccgatagtgacgtccacctgcagtgtttcggtgccgacggaggtgaattttgaccccacggacaaaagttcactaattggagggccgcgtattgtaaacacgaaggagatggatatcacactcagtcactgtaatggtaaaaccctgctgatgaatacgcgtggtcacgctgtttctccgagtgataatacagacggatactttagttccggagatccggataatgcgctgatgtatgatatttatgtcccacggtccgcggagattactggtgggcacgcactctcaggttcgtattggctcccggacctgagtaatacttatcctttgactattaagcccaacagtgacagttatcagattgccagtttgattaaactgataagtgcagcaagtaattctacaaatgtgggttctgccgtcagcggtggttttgattatacctttacctaccagtaa

SEQ ID NO: 389387 - DNA, 291 bp, Salmonella enterica
atgacctttaatgttgaatttgacgaaagggcgtttaaggaatggaataagctcgaaaagacgatccgcgagcaattcaaaaagaagctaaaaaagcttcagcaaaacccttatgtggaatcagcccgactgcatggtgatctggcaggctgctttaaaataaagctgagagcatctggttttcgtttgatttacaaggttatcgatgacgagattgttatatgggtggtcgctgtaggtaaacgggaagacgaaaaagcctatgaaacggcccgtgagcggcttttataa

SEQ ID NO: 389388 - DNA, 255 bp, Salmonella enterica
atgagcacaattcagatccgcgttgatgacgagctgaaaaaagaggcctatcaggcctttgaaaaactgaatctgtcgccttcagacgcacttcgtctgttcctgcggtatgtcgctgagaacgaaaaactcccctttgctgaagtctcagtgatggtgagcgatgatgatgaagacgctgatattctggcagtcgttcgggagagactgaaaaatccggccagacggatcagggttaacgttgatgacctttaa

SEQ ID NO: 389389 - DNA, 267 bp, Salmonella enterica
atgcaacaggcgatcgacagggccagggaagaggggattgaatttgcgctccctgccatcaatccaaagacgctgcgacacagttttgccatgcatctgtttttcaaccacgtaccgccgaaagtcgtccaggcccatatggggcatgaacgctatgaaagcacggaggtgtatctgaaggtttttgcgctggatgtagcgccacagctgggtgtcacattttcgctggatcaccgtgattacagccatcttctgacacgaaaatag

SEQ ID NO: 389390 - DNA, 246 bp, Salmonella enterica
atgctgatgctacatcgaggcaagcgtatcagcggtgtcgccagaacactctgttgcacccgttcttccattgggcgatggattaactggtttatgttgtatgacgctgaaggtctgatatcctgcgaccaggccgggaacgtctctggtccttcggacaaatttgtgcataaactacttgcgccgttctgtcagcaaacattactgatgaatcattatatttattttaagggagattcatcgtga

SEQ ID NO: 389391 - DNA, 702 bp, Salmonella enterica
atgtacatttttcaggttttaaaatttcagctcaacattaacattcacgggctgaacggcccatcgccactgcatggctgtactcattgccagcctgcctgtctccccgggattcatctgtcacctggtctgggctcatatcctgccgtgtccctgtccgaagcacaccagcaacgcgaagataatcaccggatgctgatgcagaatattaacccggtacaacaaagggcgactgaacagggtttactgtcgcctgaaaacatttttaagaccatggcgctcgactggcataaaaacaaccgaaaatggccacagaatactgctgaccatctgcttgccagcatgaacaatcatattttcccggtgattggtcatctgtcagtgacggaacttaaaccgcgtcatttcattgacctgctgaaaggcattgaggcaaaaggtctgctggaagtcgcgtcccgcacccggcagcatctgtgtaacatcatgcgccatgccgtacatcaggggtttattgacagtaacccggcggcaaaccttggcggggtgacgatacctcccgttaaacgccactatcccgccctgccgccggaaagactgccggaactgctggagcgcattgacggttatcagaaggggcatgaactcacccataagcgcgttttattttccgggagcggggccccgagatatcaccggtaa

SEQ ID NO: 389392 - DNA, 528 bp, Salmonella enterica
atgacctgtggcaaaaatgccgttgtgatacgccagccaggcatccgcccctgccgacttccagatttccagccccttctgtgccgctttcagcgagttttcccagcgctgcgcaaaaatgggccaggacttaaacacatagcgtacctgcgggttcgctttcatcaccgcctccagctcaggggcttcctgagagcagactatgcactggtaatcaaacagctccaccagaaccaccttcgcgtctgccgggccgtatgtcggattatcccggtcattaaccagcgcatcctgactggccaggactgccgccgttatgtttttaacctgttcatcctgttgctgagcctgcagcctctggctgacctgcaccagaatatccggatgtgccagcagataatctgccgcaatctccccgatacgggcctcctgctccggcgtgaagacactgacgggctggtcgtttttttccggggcgggcgcggtggccatcgcctgcccggacaaaaaagccagccccagaactga

SEQ ID NO: 389393 - DNA, 603 bp, Salmonella enterica
gtgaaaaagagtatggcaggtcagggtgtggcaggggcattactgctggcagggctgatggtgagtgcgggcgcaatggcggcctccggcgacccggtaaccggaggttcgggtaccgtgaccatcaatgttccgatagtgacgtccacctgcagtgtttcggtgccgacggaggtgaattttgatcccacggacaaaagttcactaattggagggccgcgtattgtaaacacgaaggagatggatatcactctcagtcactgtaatggtaaaaccctgctgatgaatacgcgtggtcacactgtttatccgagtgatcatatagacggatactttagttccggagatccggataatgcgctgatgtataggatttatgtcccacggtccgcggagattactggtgggaaggcatcctcaggtctagcttcaggtcagtattggctcccgtacatgaataatacttatcctttggctattaagcccaacagtgacagttatcagattgccagttttattgcactgctaagtacaggaaaatctgtttcaaatgtgggttctgccgtcagcggtggttttgattatacctttacctaccagtaa

SEQ ID NO: 389394 - DNA, 522 bp, Salmonella enterica
atgaggcttttcagccactgggttattttcatgaggtgcgccagagacttcccgctggttgatgtcaccgtcatcgatgatgatgagataatgcaccaccgccggatgaccgccctgaccctgctgatgaaacatatccgccagcgggacatgatggaactgctggacagactgccacgggtgatggtggaatggatttcacccgaacaggtgcgtgttctgataaactatataataaatgcaggcgaagcgcctgctcctgaatttatgcgggcgctggcacagcgtctgccgcaacacgaggatgaactgatgaccatcgcacaacagcttgaacagattggcatcgagaagggcttgcagcaggggctccagttaggcaggcaggaaggccgtaatgaaggcaagcttgaaggcaaactcgaagttgcccgtagcctgctgaaaatggggatgcctcatgaatccgttcttgaagcaaccggtctcacagaggaagatctggcgcagatcagccattaa

SEQ ID NO: 389395 - DNA, 426 bp, Salmonella enterica
atgcataaaatcgacagaccagctctggttcagcacttccggcgtggccagcggcgagggattacgcaccggcagctgttgtttacccttacggcgaaaattcagcttcagcaggcaataaatacggcggagccttttgtggttccacgaacatccctgccgtcgcagaacctgataaagcttcgaaaaaccgtatcgcgggtatcgttcagctaccgcctgcaatgcggaaatagcagcttcgtcacgcgtggtattcggacggtaatgataaaccgttctgctctggttcagactccggcagccctgacggatactgtggagaacgtggccgaacctaaccgttataaactgtcggcggatgagctgacgatgaatcgtctggatgacaaagtatcgtccagcgtgtggcagttcgtccgctga

SEQ ID NO: 389396 - DNA, 444 bp, Salmonella enterica
gtgacgtccacctgcagtgtttcggtgccgacggaagtgaatctggacccgattaacaaaaattcgttgcccaacatgggcttggtagaaagtaaaaactttgatactgtgttttcgaactgtgaggataaaaccctgcagatgagtgtgcagactgcaaattcaatgggggctgggatttgggcgtattttgattcaggggatcctgaccacgcattttattataatattcagccgccacaggatgcagagattatgggggggggtacgaccgcctcttttagagtatttgctattgataatacccttcctgtgcttattaagcccggcagcgataattataccatgtcgtcaacagttaacttgtacaggtgggtaggcggtatggctaacgttggttctgcagtaagtggcagctttacttataatatcacctaccagtaa

SEQ ID NO: 389397 - DNA, 327 bp, Salmonella enterica
atgttaaccgcttcgcctgatttggctaaacaatttgaaattgtcattttaatgtctgtttttgcttcgttacttccttatatgtatgcaattatatcactgccaattatcatggcatctaagaaaatgaataaaagtaaggagtttatgttttattgtgttcttacagttattgccatgatttattgtatatttgcattattaggatcaggttcgggatctattttttggggagtggtcattatgtcaattactattccattatattcatttgtagcagttaagaaaagtaagaaagggcaagatgtactgtttcttaaagattga

SEQ ID NO: 389398 - DNA, 195 bp, Salmonella enterica
atgccggatatgaaagatatcgtcaccgacgacagggtaaaaaatgcccttaaatcagacgcggtaaccaccgcggtgaaaacgcagattaaatccacactggaccagcagattgatgctgcggttgatactgcgctggtggatttgccgggcgtggagcaggccccgacaggagcgggtcagtgtcagccatga

SEQ ID NO: 389399 - DNA, 456 bp, Salmonella enterica
atggcggcctccggcgacccggtaaccggtggttcgggtaccgtgaccatcaatgttccgatagtgacgtccacctgcagtgtttcggtgccgacggaggtgaatctggacccgcttgacaaaaattcgttgccctacgggggcttggtagcaagtaagaactttgatacggtgttttcgaactgtaaggataaaaccctgcagatgagtgtgcagactgcaaattcaatgggggctgggatttgggcgtattttgattcaggggatcctgaccacgcattttattataatattcagccgccacaggatgcagagattatgggggggggtacgaccgcctcttttagagtatttgatcttgataatatcaatcctgtgcttattaagcccggcagcgataattataccatgtcgtcaaaagttaacttgttacagggggctaggcggcatggctaa

SEQ ID NO: 389400 - DNA, 177 bp, Salmonella enterica
atgttaatcgagtcaaaattcacctccgtcggcaccgaaacactgcaggtggacgtcactatcggaacattgatggtcacggtacccgaaccaccggttaccgggtcgccggaggccgccattgcgcccacactcaccatcagccctgtcagcagtagcgcccctgccacaccctga

SEQ ID NO: 389401 - DNA, 246 bp, Salmonella enterica; identical to SEQ ID NO: 389390

SEQ ID NO: 389402 - DNA, 300 bp, Salmonella enterica
atgcatacccatcagcatgatgtttccgccctcgatgccaggtatacaaaggaactcgccgatgcgaaagctgagaatgatgctttgcagcgctgccttgctgctggtggccgggtacgcgacaaaggacgctgtacagtgcctgccacaaccgccagccctggcagcatgggtgatgcaggcatcgtcgaactctccccgggggctggacagaacgttcccgatatccgggccggaattatcagcgaccaggaaaaactgaagtatttgcaggagtacatccagcaacagtacagataa

SEQ ID NO: 389403 - DNA, 237 bp, Salmonella enterica
atgtataacttttttgttccaaagagtgcggagattactggtggacaaggggcatcatccacaacctcgcattggcaagtgagtctggataatactcatccattgacaattaagccagacagtgacagctatattattccttctcagattatactggtcgaagcctctagggcaaatattacaaatctgggtaccactgtcagcggtggttttgattatacctttacctaccagtaa

SEQ ID NO: 389404 - DNA, 225 bp, Salmonella enterica
ttggacctactgaatcgtatttttaatgatagtatggctgacgaacaaatttttctgcaacaacaacttttggcgcgagatatttgtaccagtttgattagcgtcgtgccggaattattgacggacgaactgtatgcgcaagccgttgcctttgataatagcaacaaaccgaaacctttctcatggcagtttgaattcgatgtgttttatcatcagaaaaaataa

SEQ ID NO: 389405 - DNA, 1425 bp, Salmonella enterica
atggattatattaatcgatggcttggctctgaactgctgatgttttgtattctaccgtgggggtatgccgctgcggtggcattactgctgatcctgatgttttccaaaaaacgcagccgacagattttgctgtgggtattactaccacagtgggcagtcgtggtattgctgttactcacgttgcagtacacccagttgttgagccaaacaggcacggtatggatgttgatgctcctgttgctgattctgagttgggcgggcttgctgcccgcgctgctgctgggaacctggctgcgcaagccgtggcccgcatggctactgtgccatattgtgttcattggggtgctgtgcccggtgatgccggagctatggtgtgctattagccatcaatggcaacagcaaaatattgcgcagttgctcaggcaggttcaggcaggcgacttgggtcagttagagagcattcatgataacagtatgttggaacagacactggttcaggcggtaaaagcgccaggcatatcagaaaaaaacttgcgcgctctgactgcacgtgtggcatcgccttttagtgtttcgcgggaagatggctatttcgtcaatgcgccattttttgcagcttttgagagtggcaatatcactgcggtgcgtatttttagcgagcagctcacgggcgactctcagcaggcgcaggcaaatcgcaccatcgtacggcagcaaaatccgttggaatatctccccacgccccgttttaagcctgagggatttcgccagactttttttgagatggccgacgttctactacgggtcatgcccgatctcctcaccgatgaagcctattcgggggcgatacagcttcaggataaagagactctggcctttttctggcagcggcgtgaagcgcaaaatccgctgtatcgcgcatattatttcttgttgcaggggcaaactaaagcgctgcttgcccagataaaactgacgccgcaggtgctgggacagtcggtctatccgaataaaaatctgctggcgtcgctgtttagtgatgcggatggcgagacgctgcgtgcgttggtgaaagggcagatgctgaactggcagcacatccctcaggataagttgacggacggctggaatttcctgatttcacgcacattgcatacagcctcgaaagaggacgcgctgccgccggatattctggcggggatactgcaaagtatgcaacagcaacatacggcgttgccggaagcccttattgtagccagccttgattaccaggatgaaatacatagcctgatgactgcctaccggatggcttggttggactgtaacaagcttaacgcaatgatcgataaggtgtatccaccagaagatacgcggcgtaccaatgtgcgtataaaattggcacagcagtgcgccgatttagactga

SEQ ID NO: 389406 - DNA, 2220 bp, Salmonella enterica
atgagcgctatctccctgatccaaccggatcgcgaccttttctcctggccgcagtactgggccgcctgctttgggccggcgccgtttttgccgatgtcacgtgaagagatggatcaacttggctgggatagctgcgacattattctggtaaccggagacgcctacgtcgaccatccgagcttcggcatggcgatttgcggtcgtatgctggaagcgcagggcttccgcgtggggatcatcgcccagccggactggaacagcaaagacgactttatgcgtctgggaaaaccgaacctgttcttcggcgtcaccgctggcaacatggactcgatgatcaaccgttacaccgccgatcgtaagctgcgccacgatgacgcctacaccccggataacgtcgcgggcaaacgcccggaccgcgccacgctggtctatacccagcgttgcaaagaagcatggaaagacgtcccggtgatcctcggcggcattgaggccagtctgcgtcgtaccgcgcattacgactactggtctgatactgtgcgtcgttcagtgttagtcgattccaaagccgacatgctgatgtttggcaacggcgagcgtccgctggtggaagtggcgcaccgtttggcaatgggcgaaaccatcgatcagattcgcgacgtgcgtaacactgcgattatggttaaagaagctctgcctggctggagcggcgtcgactccactcgtctggacacgccgggtaaaatcgatccaattccccatccctatggcgaggatctgccgtgcgcggataacaagccggtcgcgccgaaaaagcaggaagctaaggcgattaccgtgcagccgccgcgtccgaagccgtgggaaaaaacctatatcctgctgccatcctttgaaaaggtgaaaggcgacaaggtgctgtacgcccatgcgtcgcgtattctgcatcacgaaactaaccctggctgcgcgcgggcgctgatgcaaaaacacggcgaccgctatgtctggatcaacccgcccgccataccgctctccactgaagagatggatagcgtgtttgcgctgccgtatcagcgcgtgccgcacccggcttacggcaatgcccgtattccggcctatgagatgatccgcttttcgatcaatatcatgcgtggctgctttggcggctgctctttctgctcgatcactgaacatgaagggcgcatcattcagagccgctcggaagactctatcatcaacgagatcgaagcgatccgcgacacggtgccggggtttaccggcgtgatctccgatctgggcggtcctaccgcgaacatgtatatgctgcgctgtaagtcgccgcgtgcggagcagacctgtcgtcgcctgtcgtgcgtctatccggatatctgtccgcatatggatactgaccatacgccgacgatcaatctttatcgccgcgcccgtgagctgaaaggcattaagaaaatcttaattgcctccggcgtgcgctacgacatcgccgtagaagatcctcgctacattaaagagctggcgagccatcatgtgggcggctatctgaagattgccccggagcatactgaagaaggtccgctgtcgaaaatgatgaagccgggtatgggcagctacgatcgctttaaagagttatttgacctttactctaaacaggccggaaaagagcagtatctgatcccgtattttatctccgcacatccgggcacgcgggacgaggatatggtgaatcttgcgctgtggctcaagcgccaccgcttccgtttggatcaggtgcagaacttctacccgtcgccgttggcgaattcgaccaccatgtattacaccggcaaaaacccgctgggtaaaattggttataagagtgaagatgtggtggtgccgaagggagacaggcaacgtcgcctgcataaggcactgctgcgttatcacgatccggcgaactggccgctgattcgccaggcgctggaagcgatggggaaaaagcatttgattggcggtcgccgtgagtgtctggtgcctgcgccgaccattgaagagatgcgcgaagcgcgtcgccagaaccgcaacacgcgcccggcgttgaccaagcatacgccggtggaacatcagcggcagacgcctgcgggagcaaagaaagcaccggttgcgccatctcgtcctgtgaatgcaggtgcgaaaaagcgcgctaaaacgtcagcaggtcgttaa

SEQ ID NO: 389407 - DNA, 231 bp, Salmonella enterica
atgaataaaaccataatattaatttcgctaacattgtgtcttagcggctgttccaacaacgcaaaaattgaacagctggatcaaaatattcaggcattaaatagcaaaattaatcaacttcaacaggatattaatgcgctgcgcccggaaattcaggcagcaaaagacgaagcggcaagagcaaattaccggatagacgatcgtaacagcccattctcaccaagattataa

SEQ ID NO: 389408 - DNA, 252 bp, Salmonella enterica
atgaaacggaaaaatttaacaccaatactcatcaccattatgctaagtggttgcgacaatcatgaaaaaatcgataggctagctcgcgatattcagacattgcaggccagagttgcacaggtggaacaggatattaatgcgctacgcccagaggttatcgcggcaagcacggcggcggcacaagccaatttgcgccttgatgctgtctgcatgcagcctggtagcccttgttaccatccgccacgtttatag

SEQ ID NO: 389409 - DNA, 735 bp, Salmonella enterica
atgtatcgttcactttgcccaatctgccgtgtaaaccggctaatgacgcctcacgaagtgtgcgacgtctgttttaataagataaagaggcgctgggttcattcccgtcaattctgggagaacgatttaggagagagcgaagcacaacggcgcggccagagagaaaccagtgtaacgcaagagcaacataaacataacgttgattttcgcatcaacagcgaaatagaacgctggaaaatccgcacatcccccaagttaaccgccgtcagcgtagccatagacattattgatggcacgggcgaggcaataatggattgcggcgcagaaagtgaattagcctggcatttacagcggcttaatttcgtcagcgattgtatcgaccggcttaatgacgatctttttctcccggcaagccgagagcagctcaacaactgtaagaaaatggccttcgatttctggcgtcagaaagaccctgatggcaatctgcgtgaaatatctcaatatatccgtcatgtcactgacgataaacaccgtgcaaaatgggatgctaaaacgctattaggcatgatggcttcagacgtagacgatctggattttatgtggacacaatttattgaaagcgctgtggcctgcgtagaagatgagttcagcactgcaacatggatgatgttatttgataaacacttttcggctgagatccagcaatgggccatatcaacagaagagtcgtggtga

SEQ ID NO: 389410 - DNA, 144 bp, Salmonella enterica
atgaacaacctcctgattttaaatagcaataatattctctctaccgggtttatcgtcgatttacgcagtaatgcaaatgtcactacaagacggcagcctgctggcgcaaatgcgcgcggtaatcacccgcatagaaaggagtaa

SEQ ID NO: 389411 - DNA, 318 bp, Salmonella enterica
atgcctggatgtataagtgcctgttcgtgcgttgccagcccaacgcctcccgagcctaagggcccccctaagcctaagtggatagagttaaaaggttattgtgttacatgtactcatgagtctgatattcgcccgccttctgaaagggaagacaaacgacagagaaaagtgcaggcgattgagctttattggttgcggcgtctcctggacgacttgggaatacaagaaggtacttctcaagacccgacagtaaaacccactaactgtgggttgccatttttcccggtagatcatggagaacgagaaaccgatgtctga

SEQ ID NO: 389412 - DNA, 468 bp, Salmonella enterica
atgtttgatttttctgcggaaataaaatcatttcattcgttaggcaatgtgctgttaaatacaaatatatctgtctatcttgctgaaatgtatgctgaccattgtgttgagtacaaagagtatcttctacctgatgcgagtaagagatttgcctatgtattggatgatactttgactatatcaaccgaatctgatggaaatatattttccatcggatgtaatcgaaattacaaaggattatacaaaaacttattatatgccggtcaagaaattggtgagataaaaaaactcacttatcggcaaagaatatttaatggttccattattatagacgaggactttggttttctatttatattaccctcaccatttgatgagatagctgacagtatagatagcattccatccgatttgaaattgaatgaaatatatataggcgattattcgttttgggatccatgtaaataa

SEQ ID NO: 389413 - DNA, 294 bp, Salmonella enterica
atgagtattgaatatcatctaatagttaacagttcattgcgagatgaagtttttaaggaaatcaaagcttcatttggagatagtgatttatattgtctgaaacatttttctgataatgttattggtttctctataaatggttcctcatccgattggggagctgattttgaaataaccaaaacagagaaggatttatttatcgcgatccattctggtaattataagaaaatactatcagtcatagaaaacagactcattaataatcatatatccttcgagcttgaggaagaataa

SEQ ID NO: 389414 - DNA, 258 bp, Salmonella enterica
atgaatgcctccggggccagcgtccgccacatcaacagcgaaacctgcatgaccacgtactattcacagcaccccagcctgcacctcaagggcgactggctggccgaaacaggctttgagaccgggcgcggcgtgacggtgaagatttcacagggatgtattgtgctgatggcggataataacgaggtgcaggagctgcgcgagcagctttatcaggctaaacagggggttaagggaatgaaggatgtgctggtttag

SEQ ID NO: 389415 - DNA, 258 bp, Salmonella enterica
atgaaaaagacccgttataccgaagaacaaattgtatttgccctgaaacaggctgaaactggcacccgcgtcggggaagtctgcagaaagatgggaatttctgaagccacattttacaactggaagaaaaaatttgccgggccgggcgtgacggagctgcggcgtctgcggcaactggaggatgagaatcagcgtccggcggggatgctggttgctgatgcagagcagaaccgtttaccactggcagagccgtcgtga

SEQ ID NO: 389416 - DNA, 753 bp, Salmonella enterica
atgcagagcagaaccgtttaccactggcagagccgtcgtgacgatcgggcgataaccctgcgtatccgggaaatagcggaaacccggatacgctacggttgcccgcgtattcatattcagttgcgccgggagggatggcctgttaaccacaagaaaacccaccggatttattgtccggaaggcctgaatctgcgcagaaaacgcccccgcagacatgtcagtgcagcacgccgtcagcagcgcctggtcctgacgcatgtcgatcagtgctggagtatggattttgtgccagataatctgtttaacgggcggcgttttcgggcgctgactgtagtggataattttagtcgggaatgcctggcgatccatgccggaaaatcgttaaaaggcgaggatgtggccagaataatggaggcactgcgggtgccggataagcggctgccggtacgaatccagacggataacggcagcgagtttatctcaaaaagtctggataaatgggcgtatgaacacggcgtcacaatggacttctcgcgctccggaaagccgacagataacccgtttattgaatcatttaacggcagtctgcgggatgaatgcctgaacaatcactggttcctgtcactggaagatgcgcaggaaaaactcggcaactggcgcagggaatacaatcatgagagaacgcattcatcattaaatgacatgactccggctgaatttatccgaagtctccggaaagacgaagatctctga

SEQ ID NO: 389417 - DNA, 966 bp, Salmonella enterica
atgagatctgttaaggtatatgaggaaacctggccgttgcatacgcctttcgttattgcgcgcggtagccgaagcgaagcgcatgttgtcgttgtcgaactggaagaagagggcgtaaaaggcatcggggaatgtacgccatatccacgttatggtgaaagtgatgcctcggtcatggcgcaaatcatgagtattgtgcctcagttggaaaacgggctgactcgcgaagcattgcagaaactgttgccggcaggcgcggcgcgcaacgcggtggatagtgccttatgggatttgcaggcccgccagcggcagcaaagccttgccgggctgctcggcgtgacgctgtccccggtttttactaccgcgcaaacggtagtgataggcacgccggaacagatggcagccagtgcggcggcactatgggaaaaaggggcgacgttgctgaaaatcaaactcgatgctcgtctgattagcgaacgtatggtggcgatccgcgcggcggtgccggaggcgacgctcattgtggacgccaatgaatcgtggcgtccggaggggctggcggcgcgttgtcagttactggcggatctgaatgtcgcgatgctggagcagccgctgcccgcgcaggatgacgccgccctggaaaattttattcatccgttgcccatctgtgcagatgagagctgccatactcgcagtagtctgaaagccctgacggggcgctacgatatgattaacattaagctggataaaaccggcggtctgaccgaggcgctggcgctggcaacggaggcgcgggagcaaggattcggcctgatgctgggctgtatgctctgtacatcaagagcgattagcgccgcgctgccgcttatgccgcaggtgagcttcgccgatcttgatggcccaacatggctggcggttgatgttgagcccgcgctacgctttacgacgggtcaactccatctttag

SEQ ID NO: 389418 - DNA, 489 bp, Salmonella enterica
atgctcaaaactaaaattgtgctgttatcagcactggtttcctgcgccctgatttcaggatgcaatgatgagaaaaaatcgagtgtctccattgagtttatgcactcttcggtggagcaagagcgtcaggccgttatcagtcaacttattacccgcttcgaaaaagaaaatcctggcattactgtaaaacaagtccctgttgaagaagatgcctataacaccaaagtgattacgctggcgcgaagcggctcgttgcctgaggttattgagaccagccacgattacgccaaagtgatggataaagaacaactgattgatcgtaatgccgtgacaaatgttattcagcatctgggcgagaacactttttatgacggcgtgctgcgtattgttcgcactgaagatggcgcagcatggacaggcgttccggtcagcgcctggattggcggtatctggtatcgcaaagatgtgctggcgaaagccgggctgtaa

SEQ ID NO: 389419 - DNA, 1683 bp, Salmonella enterica
gtgaatcaaaaaattgagaaatacctgtcagaagtctatggaaacacatttacgccacagcattacgaggcgctgaattcacgtatcgaaaaagcacgtttattaatttcaaaacagcgtaaaatgcactgggacgaaagggatgttgtgctcataacttatgctgatcaatttcatagcgatacatcaaagccattgccaacatttaatcaatttcagcgacaatggttggcaaccattttttcccatctccatttattgcctttttatccgtggtcttcggatgatggtttttcagtcgtagattatcatcaggttgcgcctgaaacgggcgagtggggggatatcagggagcttagccagagcagtcaacttatgtttgactttgtttgtaatcatatctcggcaaaaagtgagtggtttaaccactatttgcgacaaacgccaggctttgaaaaattttttattgccgtagcaccatcaaccgatcttagcgcggtaacccgaccacgcgccttaccgctgcttacaccatttactctgcaagacaattctgttcattacctatggactactttcagcgatgaccagattgatctcaattatcgttgcccggaagtattgctggcaatggtcgatgtgctgctgacttatttagagaagggggctgattatattcgtctggacgcggtagggtttatgtggaaagtgccgggaacttcctgtattcatcttccacagacgcacctgctgattaagctatttcgcgccattacagaggtcgtcgcgccgggtacggtcattatcaccgaaaccaatgtgccgcataaagacaatattgcgtacctggggaacggcgaggatgaagcacatatggtctatcaattttcgttgccgccgctggtgcttcatgctgtacacggtcaggatgtccgcgcgctgtgctcatgggcgcaatccctgacgcttccttcagaaaataccacctggttcaattttctggcgtctcatgacggcattggacttaatccattgcgcggccttctgccggaagatgagatcctgaagttggtagaggacttacagcaagaaggcgcgttagttaactggaaaaataacccggacggtagccgtagcccttatgaaataaacgtaacgtatatggatgcgcttagtgaacgtgactgtactgacgagcaacgtcttgccaggtttattctggctcatgccattttactctcttttccaggcgtgccagcaatatatatacaaagtattctaggttcccgtaatgattatgacggtgtggaaaagttgggatataaccgggcgattaacagaaagaaataccagcgcacggaaattgaagccgaattaaaggatgagaccacattaagacattgcgtctatcatgctttatccagacttatcgctattcggcgtaacaataaagcatttcatccagaaagcaaatttttcattaaaaacatatcaccttgcgttatgcaaatagagcgagtggcaaaaacgggagaatccgttgtcgctttgtttaatgttagcgataacattagcactgttactagtaaaaagttttacggtactgatttaattagtgaaacgaatctcactggcgagatattaatgctacacccctggcaggtactgtggattaaaaaataa

SEQ ID NO: 389420 - DNA, 663 bp, Salmonella enterica
gtgcgccgggctggtggtgtaggagagcgtgccctgggcgtgggcgccgtggctgcgcaccgcctgcagggcagctttcatattgcgcgggtcgttcatggcatcgaagacgcggaacacgtccatgccgtttttcaccgcgcgttcgacaaaacgctccaccacgtcatcggcgtagtggcgataaccgagcaggttctggccgcgcagcagcatctgcagcggggttttgggcatggcttttttgagttcacgcaggcgaacccacgggtcttcgccgaggaaacggatgcaggcgtcaaaggtcgcaccgccccagcactccagcgacccgtagcccacgtcatcaagctgggcggcaatcggcagcatatcgtcaaggcgcaggcgggtggcgaaaagggactggtgggcgtcgcgcaggacgacatcggtaatggcaatggtcatggattcctccgtaaattaagggttaaggcggcgatggtggtggatagcggcggcaatcaccggcttgcggcgggtgaagtcgtccacgacgggaacggcgcgcggtgcgggcgcggcgacgggttccgggaagaagcgagtaatcacggcagacatgccgcgaatagcaaagatgagcaggaacagaaagctcagtacgaaccccatccctaa

SEQ ID NO: 389421 - DNA, 180 bp, Salmonella enterica; identical to SEQ ID NO: 389068

SEQ ID NO: 389422 - DNA, 414 bp, Salmonella enterica
atgagcgaagcacttaaaattctgaacaacatccgtactcttcgtgcgcaggcaagagaatgtactctggaaacgcttgaagaaatgctggaaaaattagaagttgtcgttaatgagcgtcgtgaagaagaaagcgctgctgctgctgaagtggaagaacgcactcgtaagctgcaacagtaccgtgaaatgttaattgccgacggcattgacccgaatgaactgctgaatagcatggctgcagctaaatccggcaccaaagctaaacgcgcagctcgtccggctaaatatagctatgttgacgaaaacggtgaaactaaaacctggactggccagggtcgtacaccggctgtaatcaaaaaagcaatggaagaacaaggtaagcaactggaagatttcctgatcaaggaataa

SEQ ID NO: 389423 - DNA, 618 bp, Salmonella enterica
atggcacagctatatttctactattcggcaatgaatgcgggtaagtcgactgcactgctgcaatcttcatacaattatcaggaacgcgggatgcgtaccgtcgtatatacggcggaaatcgacgatcgtttcggcgcaggcaaagtcagctctcgtatcggtttgtcgtcgccggcaaaattgtttaaccaaaatacatccttgtttgaagagattcgtgccgagagcgcgcggcagacaatacattgcgtgttagtcgacgaaagccagtttttgactcgccagcaggtttatcaattatccgaggttgtcgacaaattagatattcccgtactttgctatgggctacgaacagactttcgtggggagctctttgtcggcagccaatacttgctggcatggtcagataagctggtggaattaaaaactatctgtttctgcggtcgtaaagccagtatggttctgcgacttgatcaggacggcaggccttataacgaaggcgaacaggtggttattggcgggaatgaacgctacgtttcagtttgccgtaagcattataaggacgcgctggaggagggctcactgacggcgattcaggagcgtcatcggcacatatga

SEQ ID NO: 389424 - DNA, 2679 bp, Salmonella enterica
atggctgttactaatgtcgctgaacttaacgcactcgtagagcgtgtaaaaaaagcccagcgtgaatatgccagtttcactcaagaacaggtcgacaaaatcttccgcgccgccgctctggcagccgctgatgcccgcattccgctggccaaaatggccgtcgccgaatccggtatgggtatcgtggaagacaaagtgattaaaaaccacttcgcttctgaatatatttacaatgcctataaagatgaaaaaacctgcggcgtgctgtctgaagacgacaccttcggtactatcactattgctgaaccaattggtatcatctgcggtatcgtcccgacaactaacccaacttcaaccgctatctttaagtctctgattagcctgaagacccgtaacgccatcatcttctctccgcatccgcgtgctaaagaagcgactaacaaagccgctgatatcgtactgcaggccgctatcgctgccggcgcgccgaaagatctgattggctggatcgatcaaccttccgtagaactgtctaatgcgctgatgcaccacccggatatcaacctgatccttgcgaccggtggtccaggcatggttaaagcagcatacagctccggtaaacctgctatcggcgtaggcgcaggcaacactccggttgtcattgatgaaaccgctgatatcaaacgcgctgtggcgtctgttctgatgtctaaaaccttcgataacggcgtaatctgtgcttctgaacagtctgttgtcgttgttgattccgtctatgatgccgttcgcgaacgtttcgccagccacggcggctacatgctgcagggccaggagctgaaagcggttcaaaacgttatcctgaaaaatggcgctctgaacgccgctatcgttggtcagccagcctacaaaatcgctgaactggcaggcttctccgtaccagaaaccaccaagattctgatcggtgaagttacggtcgttgatgaaagcgaaccgttcgcacacgaaaaactgtctccgactctggcgatgtatcgtgcgaaagatttcgaagaagcggtagaaaaagcagaaaaactggtcgctatgggcggtatcggtcacacctcctgcctgtacactgaccaggataaccagccagaacgcgttgcttacttcggtcagatgatgaaaaccgcgcgtatcctgatcaacaccccggcctctcagggtggtatcggtgatctgtacaacttcaaactcgcaccttccctgacgttgggttgtggttcctggggtggtaactccatctctgaaaacgttggtccgaaacacctgatcaacaagaaaaccgttgctaagcgagctgaaaacatgttgtggcacaaacttccgaaatctatctacttccgccgtggctctctgcccatcgcgctggatgaagtgattactgatggccacaaacgtgcgctcatcgtgactgaccgcttcctgttcaacaacggctacgcagaccagatcacctctgtgctgaaagcggctggcgttgaaaccgaagtcttcttcgaagttgaagccgacccgacgctttccgttgttcgcaaaggcgctgagctggcgaactccttcaaaccagacgtaatcatcgcgctaggcggtggttccccgatggacgccgcgaaaatcatgtgggtcatgtacgaacatccggaaactcacttcgaagaactggcgctgcgctttatggacatccgtaaacgtatctacaagttcccgaaaatgggcgtgaaagcgaaaatgatcgccgtcaccaccacttccggtaccggttctgaagtcacaccgtttgcggttgtgaccgacgatgcaaccggtcagaaatatccgctggctgactacgccctgaccccggatatggcgattgtcgatgccaacctggtgatggatatgccgaagtccctgtgtgcgttcggtggtctggatgcggtaactcacgccctggaagcttacgtttccgtactggcttctgagttctctgacggtcaggctctgcaggctctgaaactgctgaaagaaaacctgccggcgtcttaccacgaagggtctaaaaacccggttgcgcgtgaacgtgttcacagtgcagcgactatcgccggtatcgcgtttgccaacgccttcctcggtgtatgtcactccatggcgcacaaactgggctctcagttccacattccgcacggtctggcgaacgccctgctgatttgtaacgttatccgctacaacgcgaatgacaacccgaccaagcagaccgctttcagccagtacgatcgtccgcaggcacgccgccgttacgctgaaattgctgaccacctgggcctgagcgcgccgggcgaccgtaccgccgctaagattgaaaaactgctggcatggctggaaagcattaaagctgagctgggtattcctaagtctatccgtgaagcaggcgtacaggaagctgacttcctggcacacgttgacaaactgtctgaagatgccttcgatgaccagtgcaccggcgctaacccgcgttatccgctgatctccgaactgaaacagattctgctggatacctactacggtcgtgatttcaccgaaggtgaagttgcagcgaagaaagacgtcgttgcagcaccgaaagcagagaagaaagcgaaaaaatccgcttaa

SEQ ID NO: 389425 - DNA, 648 bp, Salmonella enterica
gtgattcaaccgctttttgattttcctgtttactttaagttctttatcgggctctttgcgctggttaacccggtggggattatccccgttttcatcagcatgaccagctaccagacggccacggcgcgtaataaaactaacctcaccgcgaatctgtcggtcgcgattatcttgtggagttccttattcctcggcgatggcatcctgcagctgtttggtatttctattgattcgttcagaattgcgggcggtatcctggttgtcaccattgcaatgtcgatgatcagcgggaagctgggggaagataaacaaaacaagcaagaaaagtcagagacggccatacgcgagagcattggcgttgtgccgttagcgctgccgttaatggcggggccaggggcgattagctccactatcgtctgggggacgcgttatcacagtatcgcgcatttgcttggtttttcagttgccattgcgctttttgcgctttgctgctggggcgtgttccgtatggcgccgtggctggttcgtttgctggggcaaaccggtatcaacgttattacccgaatcatggggttgttgttaatggcgcttggcatcgaatttattgtcacaggaataaaaggcattttccccggcttgctcaactaa

SEQ ID NO: 389426 - DNA, 1632 bp, Salmonella enterica
atgtctaacatcacgaaaaaaagtttgattgcagcgggaatactcactgcgctcatcgccgccagcgccgcgactgcggcagacgtgcccgccggcgttcagttagccgacaagcaaacgttggtacgtaataatggatcagaagtgcagtctctcgacccgcataaaattgaaggcgtgccggaatcgaacgtcagccgtgacctctttgaaggcttattaattagtgatgtcgaggggcatccttcaccgggcgtcgcggaaaaatgggaaaataaagattttaaagtctggacattccatctacgtgaaaatgcgaaatggtcagatggtacgcccgtcaccgcccatgatttcgtttatagctggcaacgcctggccgatcctaatacggcatcgccgtacgccagctatctgcaatacggtcatatcgctaatatcgatgacattatcgccggtaaaaaacccgccaccgatctgggggtaaaagcgcttgatgatcacacctttgaagtgaccttaagtgagccggtgccttatttctacaaattgttggtccacccttcagtgtctcctgtaccgaaatcagcggtcgaaaaatttggcgataaatggacgcaaccggccaatattgtcactaacggcgcttataagttaaaaaactgggtggtgaacgaacgtatcgtgctggagcgtaacccgcaatactgggataacgccaaaaccgtcatcaatcaggtaacttatttgcctatctcttcggaggtgacggatgtcaaccgctaccgcagcggcgagatcgatatgacttataacaatatgccgatcgaattattccagaaactgaaaaaagagatcccgaatgaagtccgcgtagacccttatttgtgtacctattattacgaaattaataatcaaaaagcgccgtttaacgatgtccgcgtgcgtaccgcgctgaaactggcgttagatcgcgacattattgttaataaggttaaaaatcagggcgatttacccgcttatagctacacgccgccgtataccgatggcgcaaaactggtagagcctgagtggttcaaatggtcccagcaaaagcgtaatgaagaagcgaagaaattgttggctgaagccggctttacggcggataagcccttaacattcgacctgctgtataacacctccgatctgcataaaaaactggccattgccgtggcgtctatctggaagaaaaatctgggtgtcaatgtgaatctggagaatcaggaatggaaaaccttcctggacacccgtcatcagggcacctttgatgtcgccagagccgggtggtgcgcagattataatgaaccgacctcgttcctgaataccatgttgtccgacagttcaaataataccgcgcattataagagcccggcgtttgataagctgattgccgacacgctgaaagtagcggacgatacgcagcgcagcgaactctacgctaaagcggagcagcagttagataaagactcggctattgtgccggtgtattactacgttaacgcgcgcctggtgaaaccctgggtgggcgggtataccggtaaagacccgctggataatatttatgtgaaaaacttatatattatcaaacattaa

SEQ ID NO: 389427 - DNA, 921 bp, Salmonella enterica
atgttgaaatttattttacgccgctgtctggaagcgattccgacgctgtttattcttattaccatctctttctttatgatgcgcctcgcgccgggtagcccttttaccggcgagcgcgcattgccgccggaagtgctggccaatattgaagcaaaatatcatctgaacgatcccatcatgacgcagtacttcagctacctgaagcagctggcgcatggcgattttggaccatcgtttaaatacaaagattacacggtcaacgatctggttgccgccagcttccccgtttcggcgaaacttggcgccgccgcttttttactggcggtcattattggtgtcagcgctggcgtgattgccgcgctaaagcaaaatacgcgatgggattatacggtgatgggatttgccatgaccggcgtcgttatccccagttttgtggtagcgccgctactggtgatggtctttgcgataaccttgcaatggctgcctggcggcggctggaacggcggggcgttaaaatttatgatcctgccgatggtcgcgctttcactggcctatattgccagcatcgctcgtattacgcgcggctcaatgattgaagttctgcattcgaactttattcgtaccgcgcgggcaaaaggattaccgatgcgcagaatcatcttccgccatgcgttaaaacctgcgctgctgccggttttatcctatatggggccagcctttgtcggcattattaccggctcaatggtgattgaaactatttatggcttaccgggcattgggcagcttttcgttaatggcgcgctcaaccgcgattactcgctggtgttaagtttgaccattttagtcggggcgctgaccatattgtttaacgccattgtcgatgtgctctatgccgttatcgacccgaaaattcgctattga

SEQ ID NO: 389428 - DNA, 909 bp, Salmonella enterica
atgatgttaagtaagaaaaacagcgagacgctggaaaatttcagtgaaaagctggaggtggaaggccgcagcctttggcaagatgcccgtcggcgctttatgcataaccgtgcggcggtggccagtcttattgtcctgtttctgatagccctattcgtgacagtggcgcctatgctgtcgcaatttacctatttcgataccgactggggcatgatgtccagcgcgccggatatggcgtccggccactatttcggcactgactcttccgggcgcgatctgttggtgcgcgttgccatcggcgggcgtatctcattgatggtcgggattgccgccgcgctggtggcggtcattgtcggaacgctgtatggctcgctgtccggctatctgggcggcaaaattgattctgtgatgatgcgtttgttggagatcctcaactcgttcccgtttatgttctttgtgattttgctggtgacgttttttgggcagaacattctgttgattttcgtcgccatcggcatggtctcctggcttgatatggcgcgtatcgtgcgtggtcaaaccctaagtcttaaacgtaaagagttcatcgaagccgcgcaggtgggtggtgtgtcgaccgccagcattgtgatccgccatattgtgcctaacgtcctgggcgtagtggtagtgtatgcatcgttgctggtgcccagcatgattctgtttgagtctttcctcagtttcctggggcttgggacgcaggaaccgttaagcagttggggagcgttgttgagcgatggcgcaaattcaatggaagtctcaccgtggctgctgctgtttccggctggctttctcgtggtgacgttattctgttttaactttattggcgatggcctgcgtgatgccctcgacccgaaagatcgttaa

SEQ ID NO: 389429 - DNA, 1008 bp, Salmonella enterica
atgagcttatcagaaaccgcaactcaggcgccgcaatcggcgaatgtactgctggaggtaaacgatcttcgtgttacgttcgctacgcctgatggtgatgtgacggcggtcaacgatctgaactttacgcttcgcgccggagaaacgttaggtattgttggcgagtctggatcggggaaatcgcaaacggcgttcgcattaatgggactgctggcgacgaatggtcgaatcggcggttccgcgacctttaacggacgtgaaattcttaatctacctgagcgcgaactgaatacgctgcgcgcagaacagatttcgatgatttttcaggacccgatgacctcgctaaatccttatatgcgcgttggggagcagttaatggaagtcctgatgctgcataaagggatgagcaaagcggaagcttttgaagagtccgtcagaatgctggatgccgtaaaaatgccggaagcgcgcaaacggatgaaaatgtacccgcacgaattttccggcggaatgcgtcaacgtgtgatgattgcgatggcgctgttgtgcaggccgaaactgcttattgccgatgagcctaccaccgcgcttgatgttaccgtacaggcgcagattatgaccttgcttaatgagctaaagcgcgaatttaataccgccattatcatgattacccacgatctgggtgtggtcgcgggtatttgcgataaggtcctggtaatgtatgccgggcgtaccatggaatacggtaaggcgcgcgatgtcttttatcagcccgttcatccgtattcgataggcctgcttaatgcggtgccgcgtctggatagcgagggggcggaaatgctgacgattccgggcaatcctcccaatttattgcgtttgcctaaagggtgtccgttccagccgcgttgtcctcatgcgatggagatctgcaataatgcgccgccacttgaagcgttcagtcctggtcgcttgcgcgcctgttttaaaccggtggaggaactgctatga

SEQ ID NO: 389430 - DNA, 1005 bp, Salmonella enterica
atgaatgctgtgattgaacaacgtaaagttcttctcgaaatcgccgatctgaaagtacattttgatatcaaagaagggaagcagtggttctggcaaccgccgaaaaccctgaaagcggtggacggcgttacgctacgcctgtatgaaggcgaaacgctgggcgtggtgggcgaatccggctgcggcaagtcgacgtttgcgcgcgccattattggtctggtgaaggcgacagacggtaaagtcgcctggctgggaaaagatctgttgggcatgaaagcggatgagtggcgcgaagtgcgcagcgatatccagatgattttccaggacccgctggcgtcactcaacccgcgaatgacgattggcgaaattatcgctgaaccgctgcgcacttatcatcctaagctttcgcgccaggacgtgcgtgaccgcgtgaaagccatgatgctgaaagtggggctgctgccgaatctcatcaaccgttatccccatgaattttccggggggcagtgccagcgcatcggtatcgcccgggcgttgatcctggaacctaagctcattatttgcgatgagccggtgtcggcgctggacgtttctattcaggcgcaggtagtgaatttgctccagcagttacagcgagagatggggctgtcgttgatttttattgcgcacgacctggcggtcgtaaagcacatatccgatcgtgtcctggtgatgtatctcggtcatgcagtagaattgggcacctatgatgaggtgtaccataatccactgcatccttataccaaagcgctgatgtcggcggtaccgattcccgatcccgatctggagcgaaataagaagatacaattgctggagggcgaattaccttcgcccattaacccgccttccggctgcgtgttccgtacacgctgtccgctagccgggccagaatgcgcgcaaacgcgaccggtgctggaagggagttttcgccatgccgtttcctgccttaaagtagacccgttataa

SEQ ID NO: 389431 - DNA, 837 bp, Salmonella enterica
gtgtcactttctttgtcgtcggttcgccgtcgtctttatcataatctgttcgatttgactacgcgctcaggtcgccgttttgaagggttatgcgcgctgtttgcgctgcttagcgtactggtcatttttgttgaatcaggcgtaggaacggaatatcacctgacatttgatgaatggcatatttttgtctggctggagctctgcgttaccctgatatttaccggtgaatacttgctcagactgtttagctggcccgacccgacaaaatacgtttttagtttttggggatttattgatctggtgacgattttgccgctgtacgtcatgtggctgtggccggaaattagcctgaactatatgtttgcctggcgtgctatgcgagcgattcgcgtgctgcgtattcttaaactgctacgctttatgccatctctgcgcgtattctggagcgccattattagcgcgcgtcatcagcttattctgttctattcatttattgcgatcgtgatgattattttcggtgccctgatgtatcttattgaaggaccgaaatatggcttcacgacgcttaatgcctcggtgtattgggcgatagtgacagtcacaaccgtggggtacggtgatattacgccgcatacgccgctgggacgtattgtcgcgtcggtgcttattttgattggttattcggtgattgcgattcccacaggactgattaccacgcacatgagcagcgcgtttcaaaaacgtcactggcagcgaaaatgtccgcagtgccagcaaagccagcatgaacatagcgcgcaatattgtaaccgatgcggaagtaagctaccggattaa

SEQ ID NO: 389432 - DNA, 330 bp, Salmonella enterica
atggaaatggatctgaacaatcgcctgactgaagacgaaacgcttgagcaggcttacgatatttttcttgagctggcggcggataatcttgatccggctgatatcattctgttcaatttgcaattcgaggagcgcggtggcgcggagttgtttgatcccgctgaagactggcaagagcacgtcgattttgacctgaatccagacttttttgccgaggtggtgattggcctggcggataccgaagacggcgaaattaacgacatttttgcccgcgttctgctgtgccgggaaaaggaccacaagctgtgccatattctctggcgcgaataa

SEQ ID NO: 389433 - DNA, 1461 bp, Salmonella enterica
atgacaaccttctacaccgtggtgagttggctggtcattttgggatactgggttctcattgccggcgtcacattacgtattctaatgaaacggcgcgcagttccctccgcaatggcctggttattaatcatctatatccttccgctggtcgggatcatcgcctatttgtccgtgggcgaattgcatttaggcaaacgtcgcgccgagcgtgcccgcgccatgtggccgtctaccgccaaatggttgaatgacctcaaagcctgcaaacacattttcgcgcaagaaaacagtagcgtcgcatcgtccttgtttaagctgtgcgaacgacgtcaggggattgcgggcgtcaaaggcaaccagttgcaattgcttaccgactccgatgatgtcatgcaggcgcttattcgcgatatccaactggcgcggcataatatcgaaatggtgttttacatctggcagccaggcggcatggcggatcaggtcgctgaatcgttaatggccgccgcccgccgtggcatccactgccggcttatgctggattccgcgggtagcgtcgctttcttccgcagcccctgggcggccatgatgcgtaacgctggcattgaagtcgtagaggcgctgaaggtgaatctgatgcgcgtctttttacgccgtatggatcttcgccagcaccgtaaaatggtgatgattgacaattacatcgcctataccggcagtatgaatatggtggacccgcgttttttcaaacaggatgccggcgttgggcaatgggtcgatttgatggcgcggatggagggccccgtggcgacagcaatggggattgtttactcctgcgattgggaaatcgagacgggtaaacgcattctgcctcccccgccggacgtgaatattatgccgtttgagcaggccagcgggcataccattcataccattgcttccggtcctggttttccggaggatctcattcaccaggcactattaaccgccacctatgctgcgcgcgaatatttaattatgaccactccatatttcgtccccagcgacgatctgctgcacgccatttgtaccgctgcgcagcgcggcgtggatgtcagtattatcctgccccgtaaaaatgattcactgctcgtcggctgggccagccgcgcctttttcagcgagttactggcggcgggcgtgaaaatctatcagttcgaaggcgggctgttacataccaaaagcgtgctggtcgatggcgaactgagcctggtcggtaccgtgaatctcgacatgcgtagcctgtggcttaatttcgagattacgctggtcattgatgatacgggtttcggcgccgatctggctgcggtacaggacgattatatttcgcgctcccgcctgttagatgcgcgtttgtgggtaaaacgtccgttatggcagcgtattaccgagcgattattttacttctttagtccattgctgtaa

SEQ ID NO: 389434 - DNA, 174 bp, Salmonella enterica
atgaagcgtagtagaacggaagtggggcgctggcgaatgctacgtcaggcgagccgccgtaaagcgcgttggcttgaagggcaatcacgccgtaatatgcgtatccataccatcaggaaatgcatctttaatcgtcagcgtaattcattactctttgcgattcacggtgtgtga

SEQ ID NO: 389435 - DNA, 297 bp, Salmonella enterica
gtgctgtatgttatttacgctcaggataatgccaactcgcttgaaaaacgcctctcggtacggcccgcgcatctggcgcgcctgcaacttctgcatgatgaagggcgattattaactgccgggccgatgcccgcagtggacagtaacgatcctggggtagccggatttaccgggtcaacggtgattgctgaatttgaatctttagaagcggcgcaatcctgggctgatgcggacccctacgtcgcagcgggcgtctatgcgcaggtttcggtcaaaccatataagaagatcttttga

SEQ ID NO: 389436 - DNA, 729 bp, Salmonella enterica
atgacccttgatttacctcgtcgctttccctggccgacactcctttccgtaggcattcatggtgctgtagtggcaggtttgctctatacctcggtacatcaggttattgaattgcctgcgccagcgcagcctatcacggtgacaatggtttcacccgctgacctggagccgccccaggcggttcagccgccgccggagccagtggttgaacccgaaccggagccagagccgatccctgaaccgcctaaagaagcgcccgtggtgattgagaaacccaaacctaagccaaaacccaagccaaaaccgaaaccggaaccggtgaaaaaggttgaagagcagccgaagcgcgaagtcaaaccggccgagccgcgtcctgcctcaccgtttgaaaatagcgccccggcgcggccaacaagcagcaccgcgtcggcgaccagcaagccggcggtgagcgtgcccactgggcctcgcgctctgagccgtaaccagccgcagtatccggcgcgagcacaggcgttacgtattgaaggccgcgtaaaggtgaagtttgacgtgacctctgctgggcgagtggaaaatgtacagattctatccgcgcagccagccaatatgtttgagcgtgaagttaagaatgcgatgcgaaaatggcgctatgaagcaggcaagccgggttccgggctggtggtcaatattattttccgtctgaacggtacggcgcagattgagtaa

SEQ ID NO: 389437 - DNA, 402 bp, Salmonella enterica
atgacaacaatggataatactcctcagggcgagctggttttacgtacattggccatgcctgccgataccaatgcgaacggcgatatttttggcggctggctgatgtcgcaaatggatattggcggcgcgatactggccaaagagatcgcgcacggtcgggttgtaaccgtacgcgtggaaggaatgacatttctgcgccccgtcgcggttggcgatgtcgtatgctgctacgcgcgctgcgttaaacgcggcacgacgtctattagcatcaatattgaagtctgggtgaaaaaagtcgcgtcagaaccgattggacagcgctacaaggccaccgaggcgctgtttatttatgttgccgtcgatccggacggtaaaccccgcccgctcccggttcagggttaa

SEQ ID NO: 389438 - DNA, 540 bp, Salmonella enterica; identical to SEQ ID NO: 368401

SEQ ID NO: 389439 - DNA, 744 bp, Salmonella enterica
atgtctatcacggcgaagtccgtttaccgtgacgccggaaattttttccgaaatcaatttattactatcttgctggtttcgttgctgtgcgcatttatcacggtggtcttaggtcatgccttttcacccagcgatgcgcaaatcgcgcaactcagtgaaggagaacatctggcaggcagcgctggcctgtttgagctggtacaaaatatgacgccggagcagcagcagatcctgttgcgcgcctctgccgcctcgacgttttccgggcttatcggcaatgctattctggctggcggtatcatcctgatgattcagttagtttcagcgggacatcgggttagcgcgctgcgcgctatcggcgccagcgcccctgcattgcctaaactgtttattctcatttttctgactaccctgttagtgcaaatcggtataatgctgattgtcgttccggggattattatggccattgtgctggcgcttgcgccagtgatgttggttgaagagaaaatgggcgtgtttgccgcaatgcgcagcagtatgcgtttagcctgggctaacatgagactggtcgcgcctgcggtgataggctggttactggctaaaacattgctattgctgttcgcgcccagcttcgctgtactgaccccaaatgtaggcgctgtactggcgaatacgttgagcaatctgatttccgcagtattgcttatctacttattccgcctgtatatgttgattcgccaataa

SEQ ID NO: 389440 - DNA, 639 bp, Salmonella enterica
atgaaaaaatttacagtggcggcactggcgttaacaactcttctctcaggcagcgcgttcgcgcacgaagccggagaattctttatgcgtgcaggtccggcaaccgtcagacctacagaaggggcgggtggtacgctggggcatttaaacgggtttgatgtgagtaataacacgcaactcggcctgacattcacttacatggcgacggacaatatcggggttgaattgctggcggccacgccgttccgccataaggtgggtacgggcgcgacgggcgatatcgccacggtccacctgttaccgccaacgttaatggcgcagtggtacttcggcgattccagcagcaaagtgcgtccttatgtcggcgtaggggtgaactacaccaccttcttcgataacggctttaacgataatggtaaaaatgccgggctgtccgatctgagctttaaggattcctggggcgcggcagggcaagttggggtagattacctgattaaccgcgactggttaattggcgcctctgtctggtacatggatattgatactaccgccaattataaaatgggcggcgttcagcatcatgacagcgtgcgtctggacccatgggtatttatgttctcggcaggctatcgtttctaa

SEQ ID NO: 389441 - DNA, 879 bp, Salmonella enterica
atgtttcgacacgtaaaacaacttcaatatacagtgcgagtgagcgaacctaatcctggattagctaacctgctgctggaacagtttggcggcccgcagggcgaactggcggccgcctgccgctacttcacgcaaggtttaagcgatgatgatgccggtcgtagagagatgttaatggacatcgccaccgaggagctgagtcatctggaaattatcggctcactggtaggaatgcttaataaaggcgctaaaggcgagctggcggaaggcaccgaaaacgaagcggaactttatcgctcgctgacgcagaatggtaatgacagccatatcacctctctgctgtatggcggcggccctgcgttgacaaactccggcggcgtaccgtggaccgcggcttatattgatactatcggcgaagtcacagccgatctacgctcaaacatcgcggcagaggcgcgagcgaagatcatttatgaacgcctgattaatctgaccgacgatcctggcgtaaaagacacgctcagtttcttaatgacccgtgaagtcgcgcaccagctctcttttgaaaaggcgctgtattcgattcgtaacaacttcccgccgggtaaattaccgccagtagaacagtataccgacgtgtactacaacatgtcgcaaggcgacgatccgcgaggtagctggaatagcgatgagaacttcaactatgtcgcagaaccgatgcctgctgttgatggcggcgatggcctggcgacagtgaaattgccgcgcgagcagctggcgctgctcaaagcgatggcagaaagaacgaaatcggaccccaccgttgatcctctcactggcgcagaactaggctgcggcgaaccgaaagaagacaagtga

SEQ ID NO: 389442 - DNA, 507 bp, Salmonella enterica
atgaattatactgaacattatcatgactggcttcgtgacgcccatgccatggaaaaacaggcagaatcgatgcttgaatctatggccagccgtattgaaaattatccggatataaaagccagaattgaacaacatattagtgaaaccaaacatcaaattaccatgctcgaagaagtattggaccgtaatggcatttctcgttcggtgttgaaagactccatgagtaaaatggcagcaatggggcaatctatcggtggcatgttcccttccgatgaaattgtcaaaggctcaattagcggttatgttttcgagcagttcgaaattgcttgttatacctccctgctggcggcggcaaaaaaagctggcgacactgcctcaattccgacgattgaagccattctgaaagaagaaatgcaaatggctgactggcttatcaaacatattccgcagacaacggaacaatttttactgcgatctgaagcagatggcgttgaagccaaaaaataa

SEQ ID NO: 389443 - DNA, 504 bp, Salmonella enterica
atgaatattaaaaccgttgaagacctttttatccatctactttcagatacctatagtgcagaaaaacaattaaccaaggctctttctaaactagccagagccacgtccaatgaaaaattaagccaggcctttcaatctcatcttgaagaaacccagggtcagattgaacgtattgatcagatcgtcgaatctgaatctggcattaaactgaaaagaatgaaatgcgtcgctatggaagggctgattgaagaagccaatgaagtcatcgaaagtacggagaaaaacgaagtacgcgatgcagcgcttatcgccgcggcgcaaaaagtcgagcattacgaaatcgccaactacggcacgcttgccaccctggccgagcagcttggctatagcaaagcattaaaactgctcaaagaaaccctcgacgaggaaaaacaaactgatttaaaacttaccgatttagcagtcagcaatgttaataaaagtgctgaacgcaaatcgaaataa

SEQ ID NO: 389444 - DNA, 183 bp, Salmonella enterica
atgtccgaacatcgtggtggttcaggaaatttcgccgagaatcgtgaaaaagcgtctgaagcgggccgcaaaggcggtcagcatagcggtgggaatttcaaaaacgatccgcaacgagcttctgaagccggtaaaaaaggtggtcagaatagtcacggcggacgtaaatccgataattcctga

SEQ ID NO: 389445 - DNA, 807 bp, Salmonella enterica
atggaacgctacgaaaatttatttgcacagctcaacgatcgccgggaaggcgcttttgtccccttcgtgaccctgggcgaccctggcattgaacagtcactgaaaattatcgacacactgattgacgctggcgccgacgctctggaactgggggttcccttctccgatccgctggccgatggccctactatccagaatgcgaacttacgcgccttcgccgctggcgtcacgccggctcagtgttttgaaatgctggcgctgattcgtgaaaaacacccgaccattccgattggcctgctaatgtacgcgaatctggtgttcaataacggcatagatgcgttctatgcccgttgtgaacaggttggcgtagattccgtgctggtcgcagatgtcccggttgaagaatcggcccccttccgccaggcggcgttacggcataatatcgcgccgatcttcatctgcccgccaaatgcggatgacgatcttctgcgccaggtcgcatcttacggccgcggttacacctacctgctttcgcgttcgggcgtcaccggcgcggaaaaccgtggcgcattgccgttgcatcatctcattgagaagcttaaagagtaccacgccgcgcctgcgttacagggcttcggtatctcctcgccggaacaggtgtctgcggccgtgcgtgccggggcggctggcgctatctccggctcagccattgtcaacattatcgagaaaaaccacgcgtctcccgaacagatgttggcggagctcaggtcctttgtctcagcgatgaaagccgccagccgcgcataa

SEQ ID NO: 389446 - DNA, 1194 bp, Salmonella enterica
atgacaacacttctcaacccctactttggtgaattcggcggcatgtatgtgccgcagatcctgatgcctgcgctgaaccagcttgaagaggccttcgtcagcgcgcaaaaagatcctgaatttcaggcgcaattcgccgatctgctaaaaaactacgcgggacgccccactgcgctgacgaaatgccagaacattaccgccggtacgcgtaccacgttgtatttaaagcgcgaagatttactgcacggcggcgcgcacaaaaccaatcaggtactgggtcaggcgctgctggccaaacggatggggaaaagcgagattatcgctgaaaccggcgccggtcagcacggcgtcgcctctgcgctcgccagcgccctgctgggtctgaaatgccgtatctatatgggcgccaaagacgttgagcgccagtcgccgaacgtcttccgtatgcgtctgatgggcgctgaggtcatcccggttcatagcggctccgctacgctaaaagatgcctgtaacgaggcgctgcgcgactggtccggtagttacgaaaccgcgcactatatgctcggcacggcggcaggaccgcatccctatcccaccatcgttcgcgagttccaacgcatgattggcgaagagacgaaagcgcaaatcctcgacaaagagggccgtctgccagatgccgttatcgcttgcgtcggtggcggctcaaacgctatcgggatgtttgcggattttattaatgataccagcgtcgggctaataggcgttgaacctggcggtcacggtattgaaaccggcgagcatggcgcgccgcttaaacatggtcgcgttggcatctatttcgggatgaaagcgccgatgatgcaaacagcggacgggcaaattgaagagtcctattccatttccgccgggctcgatttcccgtccgttgggccgcaacatgcgtacctgaacagcatcggacgcgcggattatgtctccattaccgatgatgaggcgctggaagccttcaaaacgttgtgccgccatgagggaattatcccggcgctggaatcctcccacgcgttggctcacgctctgaaaatgatgcgcgagcagccggaaaaagagcaactgctggtggttaatctctctggccgcggagataaagacatctttaccgtacacgatatcctgaaagcgcgaggggaaatctga

SEQ ID NO: 389447 - DNA, 1359 bp, Salmonella enterica
atgcaaaccgttttagcgaaaatcgtcgcagacaaggcgatttgggtagaagcccgcaaacagcaacagccgctggccagttttcaaaatgagatccagccaagtacacgccatttttatgatgcgctccagggcgcgcgtaccgcctttattctggagtgtaagaaagcatcgccatcaaaaggcgtgattcgcgatgatttcgatccggcgcgtattgccagtatttatcaacattacgcctcggcaatctcggtgctcaccgacgaaaaatattttcaggggagcttcgattttctgccggtcgttagccaaagcgcgccgcagccgattctgtgtaaggattttattatcgatccctatcagatctaccttgcccgttactatcaggccgatgcctgtttactgatgctctcggttctggatgacgaacagtatcgccaactctccgccgtcgcgcacagtctgaaaatgggcgtgctcacggaggtcagtaatgacgaagaacgggagcgcgcgatagcgttaggcgcaaaagtggtaggtatcaacaatcgcgatctgcgcgatctgtcgattgatttgaatcgcacccgccagctggcgccaaaactgggccacggcgtgactgtcatcagcgagtccgggattaacacctatggtcaggtacgcgaactgagccacttcgccaacggttttttaattggctcggcgttaatggcgcatgacgatcttaacgccgccgtccgtcgcgtgctgcttggcgagaataaagtctgcggcctgacccgcgcccaggacgctaaagctgcctgtgacgctggcgcaatatatggcgggttgatttttgtaccctcatctccgcgcgcggtgagcgttgagcaggcgcaagaagtgataagcgccgcgccattgcagtacgtcggcgttttccaggacgctgatatcgccgatgtttgccagaaagctgccgtcctgccgctttctgccgtacagctacatggcagcgaagaccaggcgtatgtcaacgcgctgcgcgaggcgttgcccaaacaggtgcaaatctggaaggcgctgagcgttagcgatgcccttcccgcacgcgattaccaccatgtcgataaatacattttcgacaatgggcaaggcggcagcgggcagcgcttcgactggtcactgctacaggggcaaccgctggataatgtgttactggcgggcgggctggcggccgataactgcgtccaggcggcgcaagtcggctgtgccggtctcgattttaattcaggtgtggagtcacagccgggcatcaaagatgctcgtcttctggcctcggtttttcagacactgcgcgcatattaa

SEQ ID NO: 389448 - DNA, 1596 bp, Salmonella enterica
atggctgatattctgctgctcgataacatcgactcgtttacctggaacctggcagatcagctacggaccaacggtcataacgtggtgatttaccgtaaccatattccggcgcagacccttatcgatcgcctggcgacaatgaaaaatccggtgctaatgctctcccccggtccgggcgttcccagcgaggcaggctgtatgccggagctgctgacccgactacgcggcaagttaccgatcatcggcatttgtctggggcatcaggcgattgtcgaagcttacggcggttatgtcggtcaggcgggagaaatcctgcatggcaaagcctccagcattgagcatgacggtcaggcgatgttcgccgggctggcgaatccgctaccggtcgcgcgttatcattcgctggtcggcagtaatgttcctgccgggctaaccattaacgcccatttcaacggcatggtgatggcggtacgtcatgatgcggatcgcgtttgcggttttcaatttcatcctgagtccatcctgacgacacagggcgcgcgtctactggagcaaacattagcctgggcgcagcaaaagctggagccgaccaacaccctacagccgattctggagaaactctatcaggcgcaaactctgacgcaacaagagagccatcagttgttttcggcggtcgtccacggcgaacttaagcctgaacagctcgccgccgcgctggtgagcatgaaaattcgcggcgagcatcccaatgaaattgccggcgccgccactgcgttgctggaaaatgccgccccgttcccgcgcccggagtatctgtttgcggatatcgttggtaccggcggcgatggcagtaacagtatcaatatctctaccgccagcgcctttgtcgcggcggcctgtggactgaaagtggcgaaacacggcaaccgcagcgtgtccagcaaatcggggtcatccgatctgctggcggcattcggtattaatctggatatgaacgccgataaatcacgtcaggcgttagatgaactgggcgtctgtttcctgttcgcgccgaaatatcacaccggattccgtcacgcgatgccggttcgccaacagttaaaaacgcgaaccctgttcaacgtactcggcccgctgatcaacccggcgcatccgccgctggcattgattggcgtctatagtccggaactggtgctgccgattgcggaaaccttaagggtactgggctatcagcgcgcggcggtagtacatagcggcggcatggatgaggtttcgctccatgcgccgacgattgtcgcggagctgcatgacggcgaaattaaaagctatcaacttacggcggaggattttggcctgacgccttaccatcaggatcagttggctggcggcacgccggaagaaaaccgtgacattctgacgcggttattacaaggtaaaggcgatgccgcgcatgaggccgccgtcgccgccaacgtggcgatgctgatgcgtctgcatggtcaggaagatctcaaagccaacgcgcaagccgtgcttgatgttctgcgcaacggcaccgcatatgacagagtcaccgcactggcggcaagagggtaa

SEQ ID NO: 389449 - DNA, 1563 bp, Salmonella enterica
atgcaaacaccaaaacccacgctcgaactgttgacctgcgatgccgcctaccgggaaaacccaacggcgctttttcaccaggtctgcggcgatcgcccggcaacgctgctgctggagtccgcagatatcgacagtaaagacgatttaaaaagcctgctgctggtagatagcgcgctgcgcattaccgctctaggtgacactgtcactattcaggcgttatctgataatggcgcctcgttattaccgctactggataccgccctgcccgctggcgtggagaacgaagtcctgcctgccggtcgcattctacgctttccgcccgtcagcccattattagatgaagacgcccgtttatgctctctgtcggtatttgatgcgttccgcctgttacagggagtggtgaacataccgacgcaagagcgggaggctatgtttttcggcggtctgtttgcctacgacctggtcgctggctttgaagcgctgccacaccttgaggctggcaataactgcccggactactgcttttatttagcggaaacgctaatggtgatagatcatcagaaaaaaagcacccgtattcaggccagtctgttcaccgccagtgaccgggaaaaacagcgcctgaacgcccgcctggcctaccttagccaacagttaacccagcctgcgccgccgttgccggtcacgccggtgccggacatgcgctgcgaatgcaatcaaagcgatgacgcgttcggcgcggtggtacgccagttgcaaaaagccatccgcgcgggggagatatttcaggtggtgccgtcgcgccgcttttcactgccctgcccgtcgccgttggctgcctactacgtgctgaaaaagagcaaccccagcccgtatatgttctttatgcaggataatgatttcacgcttttcggcgcgtcgccggaaagctcgctgaaatatgacgccaccagccgtcagattgaaatttaccccatcgcgggtacccgtccacgcggtcgccgcgccgatggtacgctggacagagatctcgacagccgtattgagctggacatgcgtaccgaccataaagagctttccgaacatctgatgctggtcgatctggcgcgcaatgacctggcgcgcatctgtacgccgggcagtcgctacgttgccgatctgacaaaagttgaccgctattcgtacgtgatgcatctggtttcccgggtggtgggcgaactgcgtcacgatctcgacgcgctgcacgcctatcgcgcctgcatgaacatgggcaccctgagcggcgcgccgaaagtacgcgccatgcagttgattgccgatgcggaaggacagcgccgcggcagctatggcggcgctgtcggttacttcaccgcccacggcgatctggacacctgtattgttatccgctccgcgctggtggagaacggtatcgccaccgtacaggcgggcgccggaatcgtgctggactctgttccgcagtctgaagccgatgaaacccgtaataaagcgcgcgccgtattgcgtgctatcgccaccgcgcatcatgcacaggagaccttctga

SEQ ID NO: 389450 - DNA, 870 bp, Salmonella enterica
ttgagcgacacgaattacgcagtgatttacgatctgcacagtcataccacggcgtccgatggactgttgacgccagaaacattagtacaccgtgcggtagagatgcgagtcggcacgctggcgattaccgatcatgacaccacagccgcgattcctgcggcaagagaagaaatttcacgttccgggttggccctgaatcttattcccggcgtggagatttcaacggtctgggagaatcatgagattcacattgtgggtctgaatattgatattgcgcacccggcaatgcgcgattttctggcgcagcagacacagcggcgtcaggcgcgtggtcggctcattgcggagcgtctggaaaaagcccatattcccggcgcgtgggaaggggcattgagactggccaatggcggcgcggtgacgcgcggccacttcgcccgctttctggtggagtgcggcaaagccgcgaccatggcggatgtttttaaaaaatatctcgcgcgtgggaaaaccggttacgttccgccgcagtggtgtacaatagaacaagctattgatgtcattcatcattctggcggtaaggcggtgttggcccatccgggacgctacgaccttagcgctaagtggctgaaaagattagtggcgcattttgccgaccatcacggcgacgcgatggaagtggcgcagtgccaacaatcgcccaatgaacgcacccaactggcgacgcttgcgcgtcagcatcatttatgggcatcgcttggatctgatttccatcagccctgcccgtggattgagttggggcgtaaactctggctgcccgctggcgttgaaggcgtatggcagacatgggaacagccgcaaatatcacagtga

SEQ ID NO: 389451 - DNA, 621 bp, Salmonella enterica
atgagccagtttttttatatccatccggataacccacagcaacggctgattaatcaggccgtcgacattgtgcgtaaaggcggtgttattgtttatccaaccgattccggctatgccctgggttgtaaaattgaagacaaaggcgcaatggagcgcatttgccgcatccgtcatctgccggacggccacaacttcacgctgatgtgccgcgatttgtccgagttgtcgacctactcctacgtcgacaacgtggcgtttcgtctgatgaaaaacaatacgccgggtaattacacctttatcctgaaggggacaaaagaggtgccgcgccgtctgttgcaggaaaagcgtaaaaccatcggcctgcgcgtaccgtcaaacccgattgcgctggcgttattggatacgctgggcgaaccgatgctctcgacgtcgttgatgctgcctggcagcgactttaccgagtcggacccggaggagattaaagatcggctggagaagcaggtggatctgatcatccacggcggttacctcggtcaacagcctaccacggtaatcgatttgaccaatgactccccggtggtgctgcgcgaaggcgtcggcgacgttacacctttcttataa

SEQ ID NO: 389452 - DNA, 876 bp, Salmonella enterica
atgagcgaaaagttacaaaaagtgctggcgcgcgctggccacggctctcgccgtgaaatcgaatccattattgaagcgggacgtgtcagcgttgacggtaaaatcgccacgcttggcgatcgtgttgaagtcactcccggtttgaaaatccgtatcgacggtcacctgatttcggtgaaagagtcggcggaacaaatttgtcgcgttctggcctattacaaaccagaaggtgaactgtgtacccgcaatgaccctgaagggcggccaaccgtttttgatcgcttaccgaaactgcgcggcgcgcggtggattgcggtaggacgtctggatgtcaacacctgcgggctattgttgtttaccaccgacggtgaactggcgaaccgcctgatgcaccctagtcgtgaagttgaacgtgaatatgccgtgcgcgtgttcggtcaggtggatgaatcgaaactgcgtgatttaagccgtggcgtacagttggaagatggtccggcggcatttaagaccattaaattcagcggcggcgaaggcattaaccagtggtataacgtaacgctgacggaagggcgcaaccgcgaagttcgccgactgtgggaagcggtaggcgttcaggtcagtcgtctgatccgcgttcgttacggcgatatcccgctgccgaaaggcctgccgcgcggcggctggactgagctcgacctcgcgcaaacgaactatctgcgtggtctggtagagctcccgccggaaacctcgtcgaaggttgccgtcgaaaaagaccgtcgtcgtatgaaagcgaaccagatccgtcgggcggtaaaacgccacagccagatagctggcggacgccgctccggtgggcgtaataacaacgggtaa

SEQ ID NO: 389453 - DNA, 591 bp, Salmonella enterica
atgagtgatgaacgctatcagcagcgccagcagaaggtaaaagatcgggttgacgcccgcgtcgcccaggcacaggaagagcgcggtattattatcgtgtttactggcaatggtaagggcaaaaccacggcggctttcgggactgccgcccgcgccgtaggacacggtaaaagcgtaggcgtggtgcaatttattaagggcacctggcccaacggcgagcgtaatctgctggaaccgcatggcgtcgaatttcaggtgatggcaacgggatttacctgggagacgcaaaatcgcgaggcagacaccgcagcatgtatggccgtttggcagcatgggaaaaggatgctggccgacccgctgcttgatatggtggtactggatgagctgacctatatggtggcgtatgactatttgccgctggaagaggtcataagcgcgctaaacgcgcgccctggtcaccagacggtgattattacaggtcgcggctgtcatcgggatattcttgatcttgcggataccgtcagcgaactgcgtccggttaaacatgcttttgacgcaggcgtaaaagcccagatgggaattgattattaa

SEQ ID NO: 389454 - DNA, 762 bp, Salmonella enterica
atgcattaccaaccgaaacaagatctattgcaaaaccgcattattctggtcactggcgccagcgatggcattgggcgggaagccgcgcttacgtatgcgcgttacggcgcaacggtgattctgctgggacgcaacgaagagaaactgcgtcgggtcgcgcagcacattgctgacgagcaacatgttcaaccacagtggtttacgctcgatctgctgacctgcaccgctgaagagtgccggcaagtggccgaccgcatcgccgcgcactatccccgcctggatggcgtcctgcacaatgccgggttactgggggaaatcggtccaatgagcgaacaagatccgcagatctggcaggatgtcatgcaggtaaacgttaacgccacctttatgctcacccaggcgctgttaccgttattattgaagtccgatgccggctcgctggtctttacgtcatcaagcgttggccgtcagggacgcgccaactggggcgcctatgccacctcgaagtttgctactgaaggaatgatgcaggtgctggcggacgaataccagaaccgttctctacgtgttaactgcattaacccgggcggcacgcgcaccggtatgcgcgccagcgcctttccgacggaagatccacagaaattaaaaacgcctgccgatattatgccgctttacctgtggcttatgggcgacgacagtcaccgtaaaaccggtatgacctttgacgcccaaccgggccgtaaaccaggaatcgcccaatga

SEQ ID NO: 389455 - DNA, 1119 bp, Salmonella enterica
atgaagagagactggcttcgatgcctgttgtacactgagcgcaagtcgcgttatttaatcaaggtgggagtcgtggaattgttgtctgaatatggcttatttttggcaaaaatcgtcactgttgtggtggccattgccgtcattgtgttgctgatcgtgaatgctacgcaacgcaaacgtcagcgcggcgagctgcgcgtgaccaatttgagcgagcagtatcaggagatgaaggatgaccttgctgcggcgttgatggatggccatcagcaaaaactgtggcataaagcgcagaaaaaaaagcataagcaggaggcgaaagccgccaaagcgaaagcgaagctgggggacattgcgacatcggacaaaccgcgcgtatgggtgatagatttcaaaggcagtatggacgctcacgaagttaatgcgttacgcgaagaggtcacggcggtgctggcagtggcgaaacccggcgatcgggcggttgtgcgtctggaaagccccggcggcgttgtgcatggctatggcctggcggcatcgcaattgcagcgcctgcgcgataaaaatattccgctgaccgtgacggtggataaagtcgcggcaagcggaggctacatgatggcctgcgtggcggaaaaaattattgcggcgccgttcgctattgtggggtcaattggtgttgtcgcgcaaattccgaactttaaccgctttctcaaaagtaaagacattgatattgaactgcataccgcagggcagtacaaacgtaccctgacattgttaggcgagaatacggaagaagggcggcagaagtttcgtgaagatctcaacgaaacgcaccatctgttcaaagagtttgtgcaacggatgcgtccggctctggacattgaacaggtcgccacgggcgaacactggtacggtcagcaggcgctggagaaggggctggttgatgagattaacaccagcgatgaggttattctcggcctgatggaagggcgcgaggtgctgaatgtgcgctatatgcagcgtaaaaagctgatcgatcgtgttaccggcagcgcggcggaaagcgcggatcggctgctgctgcgctggtggcagcgtggacaaaagccgttgatgtaa

SEQ ID NO: 389456 - DNA, 252 bp, Salmonella enterica; identical to SEQ ID NO: 368420

SEQ ID NO: 389457 - DNA, 2598 bp, Salmonella enterica
atgggtaaagctcttgtcatcgttgagtccccggcaaaagccaaaacgatcaacaagtatctgggtaatgactacgtggtgaaatccagcgtgggtcatatccgtgatttgccgaccagtggctcagcagctaaaaagagcgccgactctacctccaccaaaacggctaaaaagcccaaaaaggatgaacgtggcgctctcgtcaaccgtatgggggttgatccgtggcacaactgggatgcgcactatgaagtgctgcccggtaaagagaaggtcgtctctgaactgaaacagttggcggaaaaagccgaccacatctatctcgcaaccgaccttgaccgcgaaggggaagccattgcatggcacctgcgggaagtgatcggcggcgatgacgcgcgctacagtcgcgtagtctttaacgaaataaccaaaaatgccattcgccaggcgtttgaacagccgggcgagctgaatattaacagggtcaacgcccagcaagcgcgccgctttatggaccgcgtggtaggctatatggtctcgccgctgctgtggaaaaagatcgcccgtggtttgtcagcaggtcgcgttcagtctgtcgcggtccgtctggtcgttgagcgcgagcgcgagattaaagcgtttgttccggaagagttctgggaaattgacgctaatacgacgacgccgtctggcgaggcgctaccgctacaggtcacgcatcagaacgacaagccattccggccggtaaatcgcgagcagacgcttgccgccgtcagcttgttggaaaaagcgcgctatagcgtactggagcgtgaagacaaaccgaccagcagcaaacctggcgcgccgtttatcacctccacgctacaacaggcggccagcacccggctgggctttggcgtgaagaaaaccatgatgatggcgcagcgtctgtatgaggcgggctacatcacctatatgcgtacagactccaccaacctgagtcaggatgcggtcaacatggtgcgtggttatattggcgataatttcggcaagaaatacctgccggataacccgaaccagtacgccagcaaagaaaactctcaggaagcgcacgaagcgatccgtccttccgacgttgctgtcatggcggagtcgctgaaagacatggaggctgacgcgcagaagttgtatcaactaatttggcgtcagtttgtcgcctgtcagatgacgccagcgcaatatgactctactacgcttaccgttggcgcaggcgaattccgtctgaaagcgcgtgggcgtattttgcgctttgacggctggacaaaagtgatgccggcgctgcgtaaaggcgatgaagatcgcacattgcctgccgtgaataagggcgatgcgctgacgctagttgaattgacgcctgctcagcactttactaaaccgccagcccggtttagcgaggcttctctggttaaagagcttgagaagcgcggtattggtcgtccgtctacctatgcgtcgattatctcgaccattcaggatcgcggctatgttcgcgttgaaaaccgtcgtttctatgcggaaaaaatgggtgaaatcgtcaccgatcggctggaagaaaacttccgcgaattgatgaactacgattttaccgcgcagatggaagatagtctggatcaggttgcaaatcaccaggccgagtggaaagcggtactggataacttcttcagcgattttactcagcagctcgataaagccgagaaagatccggaagaaggggggatgcgccctaaccagatggtgctgaccagcatcgactgtccaacctgtggccgtaaaatgggaattcgtactgccagtacgggggttttccttggatgttcaggttatgcgctttcgccgaaagagcgttgtaaaacgaccattaacctggtgccggaaaatgaagttctgaacgtgctggaaggcgacgacgccgaaaccaacgccctgcgcgccaagcgtcgctgtcagaagtgtggtacggcgatggacagctatctgatcgatccgaagcgtaaattgcatgtgtgtggtaataacccgacctgtgacggctacgagattgaagaaggcgagttccgcatcaaagggtatgacggtccgatcgttgagtgtgagaaatgtggttccgaaatgcacctgaaaatggggcgttttggtaagtacatggcctgtactaacgacgaatgtaaaaacacccgtaagatcttgcgtaacggcgaagttgcgccgccgaaggaagatcctgttccattgccggaactgccgtgtgaaaaatcggacgcgtactttgtgctgcgcgatggcgccgcagggatattcctggcggccaacacgttcccgaaatcacgcgaaacgcgcgcgccattagtcgaggagctttaccggttccgcgatcgcctgccggaaaaactgcgttatctggcggatgcgccgcagcaggatccagaaggtaataaaaccgttgttcgctttagccgcaaaacaaaacagcagtacgttgcggcggaaaaagacgggaaggcgacgggatggtcagcgttcttcgtcgacggcaagtgggttgaaggcaagaaataa

SEQ ID NO: 389458 - DNA, 153 bp, Salmonella enterica
atgggccgagtaatccgtagccaacacataagccactttaaatatgaagggtatataaaaaagggccgcttacgcggcccgcttgactatagtgacgacaggcaggggttatttcttgccttcaacccacttgccgtcgacgaagaacgctga

SEQ ID NO: 389459 - DNA, 975 bp, Salmonella enterica
atgaaattgcagcagcttcgttacattgttgaagtggttaatcataaccttaacgtctcctctaccgctgaggggttgtatacttcccagccggggatcagcaagcaggttaggatgctggaagatgagcttggcatccagattttcgcccgcagcggtaagcatctgactcaggtgacgcccgcaggacaggagattattcgtattgcgcgtgaggtgctttccaaagtcgatgccattaagtcggtcgccggcgagcacacctggccggataaaggctcgctctatattgccactacccatactcaggcgcgttacgcattgccaggcgtgattaaaggcttcatcgagcgttatccgcgcgtttcgctgcatatgcaccaggggtcgccaacgcagattgcggaagcggtatcgaaagggaacgccgatttcgcgattgccacggaagcgctgcatttatatgacgatctggtgatgttgccatgctatcactggaaccgttcgatagtggtggcgccggatcatccattggcggcaacgtcttccgtaacgattgaagcgctggcgaagtatccgctggtgacgtataccttcggctttaccgggcgttccgaactggataccgcttttaatcgcgcagggttaacgccgcggatcgtctttactgcaaccgatgcggatgtgattaaaacgtatgtcaggttggggctgggcgttggcgtcattgccagcatggcggtcgatccgcttgccgatcctgatttagtgcggattgacgcgcacgatatttttagccacagcaccacaaaaattggttttcgccgtagtacttttttacgcagctatatgtacgattttatccagcgttttgcgccgcatctgacgcgtgatgtggtggatacggcggtggcgttgcgttctaatgaagaaattgaagcgatgtttcaggatataaagctgcctgaaaagtaa

SEQ ID NO: 389460 - DNA, 129 bp, Salmonella enterica
atgccttctgaaaaccaggaaccgcgccgcgaccctgagctcaaacgtaaagcatggctggcggtttttgtgggttctgcgttgttctgggtagtggtagcgcttgttatctggcattggtggggttaa

SEQ ID NO: 389461 - DNA, 2676 bp, Salmonella enterica
atgtcgtcaaccctacgagaagccagtaaggatacattgcaggccaaagataaaacgtatcattactacagtctgccgctggctgccaaatccctgggcgatatcgcccgtttgcccaaatcacttaaagtgttactggaaaacctgttgcgctggcaggacggcgaatctgtgactgatgaagatattcaggcgctggccggttggcttaaaaatgcccatgccgatcgtgaaattgcctggcggcccgcccgtgtcctgatgcaggactttaccggcgtgcctgccgttgtcgacctggcggcgatgcgtgaagccgttaaacgcctcggcggcgatacgtcgaaagtgaacccgttatcgccggttgatctggttattgaccactctgtgacggtcgatcatttcggcgatgacgatgcgtttgaagaaaacgtgcggctggaaatggaacgtaaccatgagcgttatatgttcctgaaatggggaaagcaagcattcagtcgtttcagcgtggtgccgcccggaaccggcatttgccatcaggttaacctggaatacctgggtaaagccgtctggagcgaattacaggacggggagtggattgcttacccggactcgctggtggggactgactcccatacgaccatgattaatggtctgggcgtattggggtggggcgtgggcggtattgaagcggaagcggcgatgcttggtcagcccgtgtcgatgcttatcccggatgtcgtcggctttaagttaaccggtaaacttcgggaggggatcactgccactgacctggtgctaaccgtcacgcaaatgctgcgtaagcatggcgtcgtgggtaaatttgttgaattttatggtgatggtctggattcgctgccgttggcggatcgcgcgaccatcgctaatatgtcgccggaatatggcgcaacctgtggtttcttccctattgacgccatcaccctggaatatatgcgattaagcggacgtagcgacgatctggtcgagctggttgaaacctacgcgaaggcgcagggaatgtggcgcaatcccggagacgaaccggtatttaccagtacgctggaactggatatgggcgatgtcgaggccagcctggccgggccgaaacgcccgcaggatcgcgtagcgttaggcgatgtgccgaaagcctttgccgccagcgccgagctggagctgaataccgcgcaaagagatcgccagccggttgactatacgatgaacggacagccatatcagcttccggatggcgctgtcgtcattgccgccatcacctcctgcacgaatacctcgaatcccagcgtgctgatggcggcgggattactcgcgaaaaaagcagtaacgctggggttgaagcgtcaaccgtgggtcaaggcttctctggcgccggggtcaaaagtggtatctgactatctggcgcaggccaaacttacgccttatctggatgagctcggttttaacctggtcggttatggctgtacgacctgtatcgggaactccggtccgttgccggagcctattgagaccgcgattaaaaaaggcgatctgacggtaggggccgtgctttccggtaaccgaaattttgaagggcgtatccatccgctggtgaaaacgaactggctggcgtcgccgccgctggtggtcgcgtatgcgctggccggaaacatgaatattaacctcgcgacagacccgctggggtatgatcgtaaaggcgatccggtatacctgaaggatatctggccttcggcgcaggaaattgcccgcgccgttgaactggtatcatcggatatgttccgtaaagagtatgcggaagtgtttgagggcacggaagaatggaaatcgattcaggttgaatcgtccgatacctacggctggcagtcggattcaacctatattcgcctgtcgcctttctttgatgaaatgcaggcccagcctgcgccagtcaaagatatccacggcgcgcgtatcctggcgatgctgggggattcggtgacgaccgaccatatttccccggccggcagtatcaagccggacagtcccgccggacgctatctgcaaaaccacggcgttgagcggaaggattttaactcttatggatcacggcgcggtaaccatgaagtgatgatgcgcggtacgttcgccaatattcgtattcgcaacgaaatgctgcccggcgtcgaaggtgggatgacgcggcatttgccgggtacggaagcgatgtcgatttatgatgccgcgatgctataccagcaggaaaaaacgccgctggcggtaattgccgggaaagagtatgggtcgggatcgagccgtgactgggcggcaaaaggtccgcggctgttaggtatccgcgtggtgatcgccgagtcgttcgaacgtatccaccgctcaaacctgattgggatggggatcctgccgctggagtttccacagggcgtaacgcgtaaaacgctgggactgaccggggaagaggtgattgatatcgcggatctgcaaaacctgcgccctggcgcgaccattccggttatgttaacgagagcggacggcagcaaagaaacggtgccttgtcgctgtcgcattgataccgccaccgagctgacttactaccagaatgacggcatattgcactatgtcattagaaatatgctgaactaa

SEQ ID NO: 389462 - DNA, 591 bp, Salmonella enterica
atgcagcttaaacgtgtggcagaagccaaactgccaaccccattgggtgactttctgatggtgggatttgaagaactggcaaccggacacgaccatgccgcgctggtttttggcgatatttcaggtaaaacgccggtcttggctcgcgttcattccgaatgtcttaccggggacgcgctttttagtctgcgctgtgattgtggttttcaactggaagccgcgctgacgcatattgcggaagaaggacgcggtattctgatttaccaccgtcaggaaggccgcaatatcggcctgcttaataaaattcgcgcttatgcgttacaggatcaaggctatgacacggtggaggccaatcatcagctcggctttgccgccgatgagcgtgatttcaccctgtgcgcggatatgttcaaattactcggcgtggatgaagttcgcctgctgaccaataatccgaagaaagtcgaaatactgaccgaggcgggaattaatatcgtggaacgcgttccgctcattgtgggtcgtaatccaaataatgagcattatctcgatactaaagcggccaaaatgggccacctgctaagcaagtaa

SEQ ID NO: 389463 - DNA, 765 bp, Salmonella enterica
atgctttcaattgcgaggcgcaccgcggcaggcgccgccctgttgcttatcatgccgcttgccgtatgggtatcaggctggcagtggcagccaggacatcaggtctggtggctaaaaacgctattctggataacggaaaccgtgaccaaaccctggggcgttatcacgcatgtgattctttgtggatggttcttatggtgcctgcgatttcgcctgcgcgccgccattatgctgtttgcgattctcggcggggcgattatcgtcgggcagggcgtgaagtcatgggtaaaggagcgcgtacaggagccgcggccatttgtggtctggcttgaaaaaacgcaccatattcccgtcgatgagttctacactttaaagcgtacagaacgcggacatttagtgaaagagcagttggccgggcaacagaacatccccgttttcctgcgtcagcactggcaaaaagagacgggctttgcgtttccctccggacacaccatgtttgcagcgagctgggcgcttttggccgtgggtctgttatggccgcgcagacggactttcaccatcgcgtttttgttagtctgggcgaccggcgtaatgggcagccgtttgcttctgggaatgcactggccgcgagatttagtggtcgccacgctcatctcctggctattagttaccctggcgacctggctggcgcagcgaatttgcgggccgcttatgccgcctcgtgaagaagcgcaagaaattgctgaacgcgagcaggaaagctga

SEQ ID NO: 389464 - DNA, 309 bp, Salmonella enterica
gtgaaatatttactcattttcttactggtattggcgatttttgttatttcggtgacgctaggcgcgcagaatgatcaacaggtgacgtttaactacctgctggcgcaaggggagtatcgtatctccacgttgcttgctgtgttgttcgccgtcggttttgcgattggctggctgatttgcggcctgttctggctgcgggtccgcgtttcccttgcccgcgctgaacgtaaaattaaacgactggaaaacaagctctcgccagcaaccgacgttgcggtccctgccgattcgtcggttgtaaaggaataa

SEQ ID NO: 389465 - DNA, 1170 bp, Salmonella enterica
atgttggagttgttatttctgctgttgcctgtagccgctgcctatgggtggtatatgggtcgcagaagtgcgcaacaaacaaaacaggatgaagctaaccgcctgtcgcgcgattatgtcgcaggggttaacttcctgctaagtaaccaacaagataaagcggtggatctgttcctcgatatgcttaaagaggataccggcaccgttgaggctcatctcactctcggtaatctgtttcgctctcgcggcgaagtcgatcgcgccattcgtattcatcaaacgctcatggaaagcgcttcattgacctatgaacagcgtttactggctgttcagcaactggggcgcgactatatggccgccggtttatatgaccgcgcggaagatatgtttaaccaacttaccgacgaaacggagtttcgcgtaggcgcgttacagcagctcttgcaaatctatcagctaaccagcgactggcaaaaggcgatcgaagtcgcagaacggctggtgaaactgggcaaagataaacagcgtatcgaaatcgcccacttttactgtgagttagcgttacagcagatgggcaacgacgacatggatcgcgcgatggcgttgctgaaaaaaggtgccgccgcagataaaaatagcgcccgggtgtctatcatgatggggcgcgtttatatggcgagaggggattacgccaaagcggtcgaaagcctgcaacgtgtgatcgttcaggataaagagttggtcagcgaaacgctggagatgctgcaaacctgttatcaacagctcggtaaaaatgccgagtgggcggagtttttacgtcgcgccgttgaggagaatactggtgctggcgctgagttaatgcttgccgatattctggaagcgcgtgaaggtagtgacgcagctcaagtctatatcacacgtcagctacagcgacatcctaccatgcgggtgttccataagctgatggattaccatctcaacgaggcggaagaagggcgagcgaaagaaagcctgatggtactgcgtgatatggttggcgagcaggtgcgcagtaaaccgcggtatcgttgtcagaaatgcggttttaccgcctataccttgtactggcactgtccgtcctgccgggcatggtcgaccattaaacctattcgcggacttgatgggcagtag

SEQ ID NO: 389466 - DNA, 738 bp, Salmonella enterica
atgacgtttactgcttcatcttcttcctgcgctattactgaatcgcctgtcgttgtggcgttggattaccatgaacgcgataaagccctggcgtttgtcgataaaatcgatcctcgcgattgtcgcttaaaagtgggcaaagagatgttcacgctgtttggtccacagctcgttcgggatctccagcaacgtgggtttgatgtctttcttgatctaaaatttcatgatattcccaacaccacggcccgggcagtcgccgcagcggcagacctgggcgtctggatggtaaacgttcacgcgtctggcggggcgagaatgatggccgcagcgcgcgacgcgctggcgccattcggtaaagatgcgccgttgctcattgccgtgaccgtgttgaccagtatggaaaccagcgatctgcgcgatctgggcgtgacgttgtcaccggcggaacatgcggagcggctggcgcgcctgacgcagcaatgcgggctggatggcgtggtctgttccgctcaggaagcggtcagatttaaacaggtctttggcgctgcatttaagctggtgacgccgggcattcggcccgcaggcagcgaggcaggcgaccagcgacgcattatgacgcccgaacaggcattatccgccggcgtcgactatatggtgattggccgcccggttacgcaatcggtagatccggcgcaaacgctgaaggatattaacgcgtcactgaaacgggaggcataa

SEQ ID NO: 389467 - DNA, 327 bp, Salmonella enterica
atgagcgattccaatagtcgtctggtttattcaacacagacggggcgcattgaagaacctaaaacggcgccggttcgtcccaaaggggatggtatcgttcgcattcagcgtcaaaccagtggccgtaagggtaaaggcgtatgtttgattaccggtattgagatgaatgatgcggaattaaccaaactggcggctgaactgaagaaaaaatgcggctgtggcggggcagtaaaagaagggattattgaaattcagggtgataaacgcgacttgataaaatcattgctggaagctaaaggaatgaaagtaaaattagctggcggctaa

SEQ ID NO: 389468 - DNA, 219 bp, Salmonella enterica; identical to SEQ ID NO: 368432

SEQ ID NO: 389469 - DNA, 723 bp, Salmonella enterica
atggtggttgataaaggccagatgagcgttgctgaactggcgaaaattaccggcgtatctgaagtcacgattcgtcaggatctgaataccctggaaaagcagagctatttacgccgtgcgcacggtttcgccgtttcgcttgagagcgatgacgtagagactcgcatgatgacgaactacacgctaaaacgccgactggcggagttcgccgcctcgctggtcagtccaggggaatccgtttttattgaaaatggcagcagcaatgcgctattggcccggacgctggcggaacaaaaagatgtcacgatcatcaccgtgagcagttatatcgcgcacctgctcaaagagaccccttgcgaagtcattctcctcggtggaatctatcagaaaaaaagtgaaagcatggtagggccgttgacgcgacagtttatccatcaagtgcatttcagcaaagcatttatcggtattgatggctggcaggctgataccggttttaccggacgcgacatgatgcgatcggatgtggttaacgctgttctggaaaaaggctcagaagcgattgtcctcaccgacagctccaaatttggctgtgtgcatccctatcccctgggcccgctctctcgcttccatcgtgtcattacggattccagaatttccgccagcgatcaaatgcagttagaacatgcagggctgctagtcaatgttattggctcatccatttaa

SEQ ID NO: 389470 - DNA, 180 bp, Salmonella enterica; identical to SEQ ID NO: 368434

SEQ ID NO: 389471 - DNA, 1983 bp, Salmonella enterica
atgatgaaacagattcaggaacaaacggcgctaagtccccttcactctcactggcgtctggctgataaccgcaacgtgctgtatctctccccgacaggtgaaacggatgcagaaaaaacggttgagctatcgccggaacaagccgggcgtatccgggaaataacggcgattacgtccagtctgctgataacgttgttgatagaaaaacaggttaccgctgtgcacctggtaggccgtaagattaataaccgtgaatgggctggcagcctggcaacctggcctgatacgcctgccgtctcgccaacgcaggcgcaggagctctcttttgccgagcaaatcgtatcagaagccaactcagtcattgcgatactggatagtcggggaaaaatctgtcgatttaatcggttatgcgaagagtacacgggcttaaaagagcaagatgtaattggtcaaagcgtctttaaattatttatgagtcgccgggaggcggttgcctcccggcactacattgagaatttttttcgcaatggcaatgcctatgaaatcgaacgctggataaagacccgtaaaggccaacgcctgttcttatttcgtaataaatttgtccataacggtagcggaaaaaacgaaattttcctgatctgcgcaggcacggatatcaccgaagagaggcgggctcaggagcgtttacgcatactggcgaatacagacaccgtcaccggcctgcccaatcgcaatgctatccatgaatttattaatcatgctattgcctcggctggcgagtcgcaggtgggtatcgtttatctcgatctggataacttcaagaaaattaatgacgcctatgggcatatgtttggcgatcagctcttacaggccgtttcgctggcgctgttgagttgtctggaggaagatcaattgctggccagactggggggagatgaattcattgtcctcgctgcccatacgtctcaggccgcgctggaagcagtagcctcacgaatccttacccggctgcggcaaccgtttcgcattggactcattgaagtttacacgggatgcgccattggcatttcgttggccccccggcacggacaggacagcgaaagtctcattcgcactgccgacaccgcaatgtataacgccaaagaaggcggccgcggtcagttctgcgttttttcgccggaaatgaatcagcgcgtatttgactatcactggctggatacaaacctgcgaaaagcgctggaaaacgaccagttacttattcactatcagcccaaaattacctggcgcggcgaagtacgtagcctggaagcgctggtacgctggcaatcgccggaacgcggattaattccgccgctggagttcatctcatacgccgaagagtcaggactcatcgtcccgctgggccgctgggtgattctggatgtagttcgccagattgcgaaatggcgcgataaggggattaacttgcgcgtagccgttaacttttcggcgcgacaactggccgaccagacgctttttactgcgcttaaacaggctttgtacgatctgaattttgagtattgcccgatcgatgtcgagctaacggaaagctgcctgatcgaaaacgacacgctggcgctatcggttatccagcaatttagtcagctcggcgcccagattcatctggatgattttggcacagggtattcttcgctttctcaactcgcccggttccctattgatgccgttaaactggatcaggctttcgtcagagatatccataagcaaccgctgtcgcaatctctggttagggcgattgtcgcggtggctcaggcgctaaatttacaagtgattgccgaaggtgtagaaaatgctaaagaagatgccttcctgacaaaaaacggcgtcaatgaacgacagggctttttattcgccaaacctatgcccgccgtttcttttgaacgctggtacaaacgttatcagacgaaaaaaatgcgttaa

SEQ ID NO: 389472 - DNA, 1935 bp, Salmonella enterica
atgtttcaggacaacccgctgctagcgcagcttaaacagcaactgcattcccagacgccgcgcgctgaaggggtcgtaaaagccacggaaaaaggctttggcttccttgaagttgacgcgcaaaaaagctatttcattcctccgccgcagatgaaaaaagtgatgcatggcgatcgtatcgtcgcggtcatccacacggaaaaagaacgggagtctgccgagccggaagaactgatcgaaccgttcctgacgcgctttgtgggaaaagttcagggtaaaaatgaccgcctgtccatcgtgccggatcatccgttgctgaaagacgcgattccctgccgcgccgcgcgcggcgttcagcatgagttcaaagaaggtgactgggcggttgctgaaatgcgccgccatccgcttaaaggcgaccgttcgttttacgccgatttaacgcagtatatcacctttgccgacgatcactttgttccctggtgggttacgcttgcccgccataacctggaaaaagaagcgccgaacggcgtagcgacggagatgcttgacgaagggctggagcgccaggatcttaccgcgctgaatttcgtcactatcgatagcgccagcactgaagatatggatgacgcgctttatgctgaggaattagcggacggcagactccagcttacggtggctatcgccgatcctaccgcctggattgccgaaggcagtaagctggataacgccgcgaaaattcgcgccttcaccaactacctgccgggcttcaatattcctatgctgccgcgtgagctgtctgacgatctgtgctcactgcgcgccaacgaagtgcgtccggcgctcgcctgtcgcatgataatcgccgcagacggcaccattgacgatgatatcgccttttttgcggccatcatcgaatcgaaggccaagctggcgtacgacaatgtctccgactggctggaaaataacggcacctggcagccggataacgaaggcattgcccagcagattcgtctgttgcaccgtatttgtctaagccgcagtgagtggcgtcatcatcatgcgttagtctttaaagaccgcccggattaccgctttgtgcttggcgaaaaaggcgaagtactagatattgtggcggaaccgcgccgtatcgctaaccgtatcgtagaagagtcgatgatcgccgctaacctttgcgccgcgcgcgtactgcgcgataagctcggtttcggtatttacaacgtacatacgggcttcgatcccgcgaatgccgacgcgctggccgcgctgctgaaaacgcatggtctgcatgtcgatgccgaagaggtgctgacgctggaaggcttctgtaaactgcgtcgcgaactggatgcgcaaccctccggtttccttgacagccgcattcgtcgcttccagtcttttgcggaaatcagcaccgagccggggccgcatttcggtcttggtcttgaggcttacgccacctggacttctcccatccgtaagtatggcgatatgattaaccatcgcctgctgaaagcggtcatcaagggggaagctattgcgcgtccgcaggaagatatcacccagcaaatggcggaacgccgtcgcctgaaccgtatggcggagcgcgatgtcggcgactggttatatgcacgcttccttaacgataaggcggggacaaatacccgtttcgcggcagaaattattgacgtcagccgcggtggtatgcgtgtgcgactggtcgataacggcgctatcgcctttatccctgccccgttcctgcacgccgttcgcgatgaactggtatgcagccaggaaaacggtacggtacagattaaaggtgagacggtttataaagtgacggatgtcattgatgtcactattgcggaagttcgcatggaaacccgcagcattattgcccgaccggcagcgtaa

SEQ ID NO: 389473 - DNA, 1134 bp, Salmonella enterica
atggaacaatgccgaaaagcgggtaaaagccactggtatcatgaaacacaatccactatgtcgtcacaaaccccgctttcgctgatgccggaagccgcgtatgttaacgatcgttttttactggatttaacggtagcagaaaccgcgttggtgccttttgaatcatggttaaagccagctcgccagttggcggatatcttatttccccgcacggttctcaacgaccggcttcatacgtttagcgcctatgaacgtatgagcaccgcgctgaccgccgctcaggtatttggggttcagcgtttgtgccgccattatgccgcacgtctggcgccgctacctggccctgacgcctcaagagagagcaatcaacggctggcgcaaattacgcaatacgctcgtcagcttgccggctccccctccgttatcaatacgcgagcccgcgaacagcttgcagaggtgggattaaccgcccgggataccgtactcatcaatcagatcattgggtttatcggttttcaggcgcgggtagcggcgatatttcaggcgttttgccgtctgcccgtgcgcgaactgcccggccaggagatgcagcgctttgccagggccgcgcggtttcaaaacccccagacgatatggcggcccgccgccagtctggtagaatatcctcccgcccataccaaaattcggcggcaatattcgtcttcacaatgccaaatgatggcgccggtactcatgcgcgatccgtcttcattcgcgttactcgaacgtatactgaccagcacattacacaccgcgtcgcccccttctttacttccacttatcacgctcctcacatcacgtatcaacggcagcgccgcctgctttaacgaacaggcaacccaacctggcgcgtggcgccgcgctgttatcacgttacgccaggaagacgacgatatcgctcgttgggagcttgagcctgcgctgacacaggcgatacaatggctcaccagagcgcccgatcgctttagcgccgcgcattttttcccgctactcaccaggggagtttcatcggagcaggccattaatatgttaggctggtgcggcgtgtgcggatggttaaatcgtttaaaaatcgcgttgggcgaaacctattaa

SEQ ID NO: 389474 - DNA, 789 bp, Salmonella enterica
atgggttttctttccggtaagcgcattctggtcactggcgtggccagtaaactgtccatcgcctacggtatcgcacaggcgatgcaccgcgaaggagctgaactggcgttcacctaccagaacgacaaactgaaaggccgcgtagaagaatttgctgcccagctgggttccagcatcgttttaccgtgtgatgtcgctgaagatgccagcattgacgctatgtttgcagagctgggtaacgtttggccgaaatttgacggtttcgtacactcgatcggtttcgcgcctggcgatcagctggacggcgattatgttaatgcggttacccgcgaaggctttaaaatcgctcacgatattagctcttacagttttgttgccatggcgaaagcctgccgcaccatgctgaatccgggttctgcgctgttgaccttgtcttatctgggagcggagcgcgccatcccgaactacaatgtcatgggtctggcgaaagcctctctggaagccaacgtgcgttatatggcaaacgctatgggaccggaaggggttcgcgtcaacgccatctctgcgggtccaatccgcacgctggcggcgtccggtattaaagacttccgtaaaatgctggcgcattgtgaagccgttacgccaattcgtcgtaccgtgaccattgaagatgtgggtaactcagcggcgtttctgtgttccgatctctcggcaggcatttctggcgaagtcgttcatgttgacggcgggttcagcattgcggcaatgaatgaactggaactgaagtaa

SEQ ID NO: 389475 - DNA, 1374 bp, Salmonella enterica
atgccgtttacatttcatatcggaaatcatagttgtcagatatcagaaaagtatttaagagatatcatcgataataaaagagagcatgttttttcaacgtatgagaaattcatagattttttcaggaatatattcaccaggcgaagtttaatttctgactatagagaaatatataatctactgtgccaaaaaaaagagcatcccgatattaaagggcctttctctccaggaccattttcgaagcgagatgaagactgtacacgatggcgcccccttcttggatatattaaacttattgatgcctccggacctgaaacaatagataaatacactgtagaggtattagcgtatcaagaaaatacgttactactaaaactgttttacgatggagtattagtgaccgagacggagtgttctgagcgttgcgtcgattttttaaaagaaacgatgtttaattataatactggggaaattacgcttgccgctttgggtaataatcacctgacgccgagcgaagctggtagtaatgggatctatgaggcttttgagcaacgtttgatagacttcctgaccacacccgccacggcgtctggtgatgagagcggcgctactgatcagacggatgcatcacaaccagcggcaatagaggcgtttattaactcgccggagtttcagaaaaatattcgcatgcgtgatattgaaaaaaataaaataggtagcggaagttatgggacagtctatcggttacatgaagaatttgttgttaagattccaattaatgagcggggaataaaagtggatgttaactctccggaacatcgtaattgtcatcctgatcgtgtcagtaagtatttgaacatggccaatggcgacaaggatttttctcgttcggcctccatgaatattaatggtaaagacgttacggttttagtttcaaaatatattcaaggtcgggagttcgatattgaagatgaagacaactatcgaatggcggaggagcttcttaaatcccggggggtttttatgcatgatataaatatcttaggtaatattctggttaaaggaggggttcttttctttgtggatggcgatcaaatcgtgctgtcacaagaatcccggcaacagcgaagcgtttctcttgcaacaaggcaactggaagagcaaattaaggcccatcacctgataaaattaaagcgggccgagaccgaaggaaatactgaagatgttgaatattataagtcacttattgcggatcttgatgcgttaatcggagaggaagaacagacacctgcgccaggaagacgttttaaactagccgcgcctgaggaagggactcttgtggctaaggtattaaagaatgaattaaaaaaatag

SEQ ID NO: 389476 - DNA, 708 bp, Salmonella enterica
atgcgctatttttttatggcagagccgataagggcaatggagggggatttactgggtgtcgaaattattacccattttgcatcgtcgcccgctcgtccgctacaccctgagtttgttatctcgtcatgggacaattcgcagaagcgccgttttctgcttgatctgttgcggacaatcgcggccaaacatggctggtttctacgccacggcctgttctgtatcgtaaatatcgatcggggtatggcgcagcttgtccttcaggacaaagatattcgcgcattactacacgccatgctatttgtggagctgcaggtcgctgaacatttttcatgtcaagataacgtcttagtcgatcctttaatacacgcgcttcataaacaacctaatccattatggctgggcgacctgggcgtagggaacgcaaccgctgcgccattagtttgcgggtgttttagcggtgtaaaacttgatcgcagcttttttgtctcacaaattgaaaaaatgacgtttccgctgctcgtcaaacatatccggcattattgtgacaagattgtggtgggtggccaggaaaacgcacgctatttgccggcgttaaaaacggcaggcatttgggcaacccagggcacgttatttccttccgttgcgttagaagaggttgaaacattgctgttgggcagtcgcatgaacaccctcagagaatcgaactga

SEQ ID NO: 389477 - DNA, 807 bp, Salmonella enterica
atggtggaaactctgcttgaagtgcgcaacctgagtaaaacctttcgctaccggacaggatggtttcgccgccagaccgtcgacgccgtgaaaccattaagctttacgcttcgtgagcgtcagactctggccattatcggcgaaaacggttccggcaaatccacgctggcaaagatgctggccggcatgattgaacccaccagcggcgagcttcttattgacgatcatcccctgcattacggcgactattcgtttcgaagccaacgtattcgaatgatttttcaggacccctcaacgtcactgaatccacgtcaacgtatttcacagatccttgacttccccctgcgccttaataccgatctggagccggaacagcggcgcaaacagattgtcgagacgatgcgtatggtggggctattgcccgatcacgtgagctactacccgcatatgctggcgccggggcagaaacagcgtctgggcctggcccgcgcgctgattttacgccctaaagtcattatcgcggacgaagcgctggcttcgcttgatatgtccatgcgctcgcagctcatcaatctgatgcttgaattgcaggaaaaacaaggcatctcctatatctatgtcacgcagcatatcggcatgatgaagcatattagcgatcaggtattagtgatgcatcagggggaagtggttgaacgcggcagcaccgccgatgtgctcgcctctccgctacatgagcttacccgccgtttaatcgcaggccattttggcgaggcgctgaccgctgacgcatggcgaaaggatcgctaa

SEQ ID NO: 389478 - DNA, 993 bp, Salmonella enterica
atgccgttactggatatccgcaatctcaccattgaatttaaaaccagcgaaggttgggtaaaagcggtcgatcgcgtcagtatgacattaagcgaaggcgaaattcgcggcctggtaggtgaatcgggttccggaaagagcttgattgctaaagctatttgcggcgtcgcgaaagacaactggcgagtcactgccgaccgtatgcgttttgatgatatcgatctgctgcgcctctcctctcgtgaacggcgtaagctggtcgggcataatgtgtcgatgatcttccaggagccgcagtcgtgccttgatccttccgaacgcgtcggccgccagttaatgcaaaatattcccgcctggacctataaaggccgctggtggcagcgtttaggctggcgtaaacggcgtgcaattgaattactgcaccgggtgggaattaaagatcataaagacgcgatgcgcagttttccctatgaactgaccgatggcgagtgtcagaaagttatgatcgctatcgcgctggcgaatcaaccgcgactcctgatcgctgatgaacccaccaactcaatggaaccaacgacgcaggcgcaaatttttcgcctgctgacccgactgaatcaaaacagtaataccaccattctgttgattagccacgacctgcaaatgctgagtcagtgggctgacaaaatcaacgttttatactgcggccagacggtagaaaccgcgccaagtaaagatctggtgacgacgccacatcatccttatacgcaggcgcttatccgcgcgattccggattttggcagcgcgatgccgcataaaagccgtctcaatacgctgccgggcgcgatcccgctactggagcagttaccgataggttgtcgtctggggccgcgctgcccttacgcgcaacgagaatgcattatcacgccacgcttaaccggcgcgaaaaatcatctctatgcctgtcattttccgctgaatatggagagagagtga

SEQ ID NO: 389479 - DNA, 891 bp, Salmonella enterica
atgccttacgatagcgtatacagcgaaaagcgcccgccaggcaccctgcgcactgcctggcgtaaattttatagcgacgcgcccgcgatggtgggtctgtatggatgcgccggtctggcgttgctgtgtatttttggcggctggatcgcgccctatggtatcgatcagcaatttttgggctatcagctactgccgccctcctggtcacgctatggcgaagtctccttttttctggggactgacgatctggggcgcgatgtgctgagccgcctgttaagcggcgcggcgcccacagtcggcggcgcgtttatcgtaacgctggcggctacgctatgtggattagtcctcggcgtagtggcaggcgcgacgcacggtttacgctctgccgtactgaaccatattctggacacgctgctttccatcccttcgctcttgctggcgattatcgtcgtggcatttgccggcccacatctgtcacacgcgatgtttgccgtctggctggccctgttgccgcgaatggtacgttccgtctatagcatggtgcatgatgaactggaaaaagagtacgtcattgccgcccgtctggatggcgcgacaacgctgaatattctgtggttcgccattttaccgaatattaccgccggtctggtcaccgaaattacccgggcgctgtcgatggcgattctggacatcgccgcgctgggatttttagatctcggcgcgcagcttccctctcctgaatggggcgccatgttgggggatgcgctggagttaatctatgtcgcgccgtggaccgttatgctacccggcgcggcgataacgctcagtgttttactggtaaacctgctcggagatgggattcgtcgtgcgattattgcgggggtggaataa

SEQ ID NO: 389480 - DNA, 966 bp, Salmonella enterica
atgattatcttcaccctgcgtcggttattgctgttgctggtgacgctattcttcctgacctttatcggctttagcctgagctattttacgccgcacgcgccgctacaaggcgcatcattatggaatgcctgggttttctggttcaacggtctgctgcactgggactttggcgtgtccagcattaacggccaactgatctccgaacagcttaaagaggtgtttcccgccacgatggagctgtgcattctcgcctttggttttgcgctaatggtcggcatcccggtcgggatgctggctggcgtgacgcgtagcaaatggccggatcgttttatcagcgcgctggcgctattaggtttctcaattccggttttctggctggcgcttctgctcacactgttcttttcgctcacgctggggtggctgccggtatccgggcgatttgacctgctttatgaagttaaaccggttaccggtttcgccatcattgacgcctggatttcagattcgccgtggcgcgatgaaatggtgatgagcgccatacgacatatggttttaccggtgctcacgctttccgtcgcgccgaccacagaagtgatccgcctgatgcgaatcagcactattgaggtctacgatcagaactacgttaaagcggcggccacgcgcggcttgtcgcgctttacgattttacgccgtcacgtgttgcataatgcgctgccgccggtcattccccgtcttggcctgcagttttcaaccatgttaacgctggcgatgattaccgaaatggttttcagctggccagggctgggacgatggttaattcacgccattcgtcagcaggactatgccgctatttccgctggcgtgatggtcattgggtcgctggttattgtggtcaatgtgatttccgatattttgggtgctatggctaaccctctgaaacataaggaatggtatgccttacgatag

SEQ ID NO: 389481 - DNA, 1650 bp, Salmonella enterica
atgcgcctggttttatcgtctctgatcgtgatagcgggtctactgagtagtcaggctacagctgcggctgcgcccgaacaaactgcgagtgcagatattcgcgatagcggctttgtgtattgtgttagcgggcaggtcaacacctttaatccgcaaaaagcgagcagcggcctcatcgtcgataccctggccgcccagttatatgatcgcctgttggatgtcgatccctatacttatcgtttagtcccagagctggcagaaagctgggaagtgctggataacggggcaacgtaccgttttcacctgcgccgcgacgtttcctttcaaaaaaccgcctggtttacgccgacccgaaaactcaatgctgatgatgtcgtctttacctttcagcggattttcgatcgtcgacatccgtggcataacatcaacggcagtaacttcccctactttgacagcctacagttcgccgacaatgtaaaaagcgtgcgtaagctggacaataacaccgttgagtttcgcctgacgcagccagacgcctcctttttatggcatctggccacacactacgcttccgtcatgtccgctgagtacgccgcgcagcttagccgaaaagatcgtcaggaactgctagaccgccaaccggtcggcaccgggcctttccagctttcggagtaccgtgccgggcagtttattcgtctccagcgccacgatggtttttggcgcggcaaaccgctgatgccgcaagtagtagtggatttaggctccggcggtaccgggcgtttatcaaaattactgaccggtgaatgcgatgttctggcctggcccgccgccagccagctaactattttacgcgacgatccgcgtttgcgcctgacgttgcgcccggggatgaatatcgcctatctggcctttaacaccgataagccgccgttgaataatcccgcagtgcgccatgcgctggccttatcgatcaacaaccagcgcctgatgcagtcgatttattacggcacggcagaaaccgcagcctccattttaccgagagcctcatgggcttacgataacgatgccaaaattacggagtacaatccggaaaaatcgcgcgaacagctaaaagcgctgggcattgagaatcttacgctgcatctctgggtgccgaccagttctcaggcctggaacccaagtccgctaaaaacggcggagcttattcaggcagatatggcgcaggttggcgtaaaagtggtcattgtgccggttgaaggtcgttttcaggaggcgcgcctgatggatatgaatcacgatctgaccttatccggctgggccacggacagcaacgatccggatagctttttcagaccgctgttaagctgtgcggccatcaattcgcaaaccaatttcgcccactggtgtaaccctgaatttgacagcgtgctgcgtaaagcactgtcgtcgcagcagttggcttcgcgcatagaagcgtatgaggaagcgcagaatatcctggagaaagagctgccgatactgccgctggcatcatcactacgcctgcaggcttaccgctacgatattaaagggctggtgttaagcccgttcggcaatgcgtcttttgccggcgtctcccgcgaaaaacacgaagaggtgaaaaaaccatga

SEQ ID NO: 389482 - DNA, 981 bp, Salmonella enterica
atggctgaatttaaagataacctgctcggcgaggcaaaccgttttcttgaagtactggaacaagtctcccggctcgcgccgctggataagccagtgctgattattggcgaacgcggtacgggtaaagaacttatcgccaatcgcctgcactatctctcttcacgctggcaggggccgcttatctcgcttaactgcgcggcgcttaacgaaaatctgctggactccgaactgtttggtcatgaagcgggcgcttttaccggggcgcaaaaacgtcatcccggtcgctttgaacgcgccgatggcggcacgctgtttttggatgaactggcgacagcgccgatgctggtacaggaaaagctgctgcgggtgattgaatatggcgagctagagcgcgtcggcggcagccagccgttacaggttaatgtgcgattagtatgcgccaccaatgccgatttacccgccatggtaaaggaaggaacatttcgtgccgatctgctcgacaggctggcttttgatgttgtacaactgccgccgctgcgcgaacgccagagcgatatcatgctgatggccgagcattttgctattcagatgtgtcgtgaactacgtctgcccttatttcccggttttaccgatcgggcaaaagaaacgttgttgcattacgcttggccgggtaatgtccgcgagctgaaaaacgtagtcgaacgttcagtgtatcgccacggcagcagtgaacatcctttggatgaaattgttatcgatccttttcaacgccatcccgccgaaccgcccgcgcccgccctgtcatcggcaaccgccacgcccgacctgccgctcaagttgcgggagtttcaactgcaacaggaaaaagcgctgctgcaacgtagcttacagcaggcgaaatttaaccagaaacgagccgccgatttgctggcgctcacctaccaccagtttcgcgccttgcttaaaaagcatcagctttag

SEQ ID NO: 389483 - DNA, 669 bp, Salmonella enterica
atgggtattttttctcgttttgccgacatcgtgaacgccaatatcaatgcgttgttggaaaaagcggaagatccgcagaagctggtgcgcctgatgattcaggagatggaagatacgctggtggaggttcgctcgaactccgcgcgtgctttagcggaaaagaaacagttatcccgtcgtattgaacaggccacgactcagcagaccgagtggcaggaaaaagcggaactggctctgcgcaaagataaagacgatctggcgcgcgccgcattgattgaaaaacaaaagctgaccgatttaattgctacgcttgaacaggaagtcacgctggtggatgacacgctggcgcgcatgaagaaagagattggcgagctggaaaacaaactcagcgaaacacgcgctcgccagcaggcgctgatgctgcgtcatcaggcggcaagttcttcccgcgatgtccgtcgtcagcttgacagcggcaaactggatgaagccatggcgcggtttgaatcctttgaacgtcgtatcgatcaaatggaagcggaagcggaaagccatcgttttggtaagcagcaatcgctggaccaacagtttgccaacctgaaagccgatgatgaaatcagcgagcagctggcgcagttgaaagccaaaatgaagcaagataatcaataa

SEQ ID NO: 389484 - DNA, 225 bp, Salmonella enterica
atgagcgcgctatttctggccatcccgttaaccatttttgtgttgtttgtgttaccgatttggctgtggctgcattacagcaaccgcgccggtcggggagaactgtcgcaaagcgagcagcaacgcttactgcaactcacagacgacgcgcaacgtatgcgcgagcgcattcaggcgctggaagacattcttgatgcagagcatccgaactggagagagcgctaa

SEQ ID NO: 389485 - DNA, 360 bp, Salmonella enterica
atgggtggaatcaatctcaataaaaaactatggcgtatgccgcaaaagggcatggtgcgtggcgtttgcgccgggatcgccgactaccttgatgtaccggtaaaactggtacgtattctggtcgtgctgtcgattttctttgggctggcgttttttaccgtagtggcctatatcgttctgtcttttgtactggaccctatgccggataatctggccgcaggcaaaccgcagccgaccagcggcgaactgctggataccgtagacagagagcttgccgcaggcgaaaagcgtttgcgagaaatggaacgctacgtcacgtcagatacgttcacactgcgtagtcgtttccgtcaactttaa

SEQ ID NO: 389486 - DNA, 231 bp, Salmonella enterica
atgaatactcgctggcaacgcgccgggcagaaggtgaagcccggcttcaaaatagcaggtaagctggttctgttgaccgcgttacgctacgggcctgccggcgtggcgggatgggcggtaaaatccgtcgcccgtcgtccgctaaaaatgttgctggcgtttgcgctggagccgttattgaatcgtgcggctgctaaaatagcaaaacgttacaggggaaatcgtacctga

SEQ ID NO: 389487 - DNA, 1683 bp, Salmonella enterica; identical to SEQ ID NO: 389419

SEQ ID NO: 389488 - DNA, 489 bp, Salmonella enterica; identical to SEQ ID NO: 389418

SEQ ID NO: 389489 - DNA, 1164 bp, Salmonella enterica
atgaactacagatttaacggcaaacaagctacgctggctttgggtgttttcccagacgtttcgctggcacttgcccgtaagcgcagagatgaagcaaggcaacttttagccgacggtgttgatcccagagtatctaaaagagcagcgccaacagaaccctcctcggcaacattccagacaatcgctttagagtggcataaaggctctataggtcatccctcatggaaagagattacccgcattaaaattttaagagaaatggaaaatcatattttcccatttatcggaaataaacctatcgattcattaaaaacaagtgatctgttgccattattggtgaggatgagtgatcagggaattggagcgacaacaggaagagtgaaaactactcttgcaagtgttttccggtacgctattcagcgtggaattgttgaatacaaccctacccatgatctaagaggagcaattgccagccccaaaataaagcatcgccctgcacttccgttagaacgattaccagaattaatatcaaaaattgatagttatacagggagaccgttaactaagttggcggtattattttcccttcatacttttgttcgctctagtgaactgagacacgcaagatgggaggaaattaattttgaaactgcaatgtggactattcctgctcaaagaaaaagaattgagggggtaaaatattcagaacgcggggcaaaaatgggtagtattcattatgttccattatctaatgaagctattgatgttctcgaagccattaaaaaaataagtggtgagtatgagcttattttccccggagatagtaacccttacaagccgatgagtgagaacacagttaataagtcattaaggattatggggtacgacacgcaggcggacatttgccttcatggatttagagcaatggcgtgctcagccctgacagaatcagggttatggtctagggatgcagtggaacggcaaatgagccatcaagaacgaaatgaagtgcgagcggcttatgttcacctggcacaacacatgcaagaacgccggagaatgatgcaatggtggtcacattatataatcagcaattgtgaaagttatattgcgccctatgaaattagtgaaaaaccattggcaatgcttaaggtagtaaaataa

SEQ ID NO: 389490 - DNA, 942 bp, Salmonella enterica
atgagcaaacataacgaaaaaaacatttggaaacgtaacggcttagctccattagaatattgctctatatcaagagcggcaaaaatacttgattgtgaaattgatgatatattccactggtgttatacaggaaaaattaacctctgcttaaattttcaaaaaatatattatttctacattccattcttaaaatctgatggtaatattttagagcaagttgaaactctcaatcttgaagctctgccatctgctgatggcataccatacattttctcagataaatttaagtcaggttatttttacatacctgaaaaatttcatttggtcgaaaccgaagaacattatttggtacaaacataccttaatggaatatggcctgtagatggaaatattttatctgcaataaatacgggattaatggattcaattgaactttctttgtttagtgaagaaaaccccgaatttaaatcagaaggggaaaggtttcaactcatttctccaattttgataaacaatcaattttctggaaaattaaagaactgcgtagagggtgatattaaatacttacagtatctttgcgagcacgctcctgacataaacgacaagcactatcagcttcaaattactggctactatattgaatatataaataaacatgctttatctggcacacacatgcctgtaataagcaaggataaagatacaagaacattaacctcatatcaaacaactgaaacaccgaaagtcaggactacagcaaagcaatcaacctacatagcatccctaatgaatgctttgggagtaacggaagaaatgatgagattttcatctattactcaaataaaagatcatctgagcagaaaagcaggccctgaaatggaactacctgaaatcactgatgatactttagatgactggcttcaaagggcaggtaaaaggtag

SEQ ID NO: 389491 - DNA, 1392 bp, Salmonella enterica
atgtatcaaatccttgatatcacagaaaaagaattagaaatattattggaaacagttgaagaccattttaatgattttaaaagtaaagatattgcaccaaataaattgcaagagacttttgttgcttttgcaaatgctgatggtgggaatatttatgtaggcatcgaagatgcaagagctgatcgtgagcgtatttcaggattcagcgaaccggaagatgctaatgcaatcattgcaacccttttagaaaatactcacccagtggttgaaaacgttgaaattgactatcttaaaacagccaagaatggtttaattttgcacattgacatacctaaaagccctaaagttcattatactgcatctggagattgttttttaagaaccaatgctcaaaaagtgaaaataaaaggtgagaggattacacaactatcttattctaagggtgctgaaccttatgagaaaagagctgttgatgttgtagaaacacaagatattttagatagcgagcattattctgactatctagcaagaataaaaacaacacaggcccccgaagtttttctccgcaaaaatagattattaacaaagaaagatggcacgttaattccgaatgtgggatgtgttttattattcgatgaagaaccacaagggagtttagatactcgatgtgctgtaaaagtctatcgccttcgaactacagaagcagaatataaaagggaacaattacaggaagatcctgttacaatcgatggacatcttgagagtgtcattgttaagacaattacaaaagtaaaagagtatgtagatggtgcatcgttcaaggatggtgatagccttgtaaaattgagttaccctgctgaagctttaaaagaaatattagtgaatgcagttattcaccgtgattatagtttaaatgatgatgtccacgtaaaagtttatgataatcgcattgaagttctaagtccggggcggttgcctgggtatatgacaatagaaaacttatacgaagaacgattttcgcgtaatccaaacttagtacgtttacttcatcgattaccgaacccagtaaatcatgacataggtgaaggtctcgatacggctaaaaatgaattaaagaaagcaggattagtagcacctgagttcgaagagaaaggtaataacttcattgtaactattaaacaccaaaccatcgcctctatagaggatgttatcatgaaatattttgatgacaatccaaatgggcatctgactaataaattagcacgtcaacttagtggtgaggatgatatgcagaaagtaaaaaaatccttacaaaagctacgcactgatgggaaaattaaacctctcgatccgaatgctcatgcttttagatttaaatatataaaagcctaa

SEQ ID NO: 389492 - DNA, 369 bp, Salmonella enterica
atgattactagtaaatacatagaatggttagcagtactaaccaactatgggatttacagaatgattagaatggaatttaatacatacgatgatggaacatactactttctctatattacagaggaagtacggatagaaactaatggtattaatggcttgcagatggaaacccgcgattggcgagtacgtgattcaggcgatccgttccagtacttaaccatcagaaaaagaaaggataagtactttaatgaagccattgtaaatccgtatactgaagtattaattatagcggcgataactacaacgacatcagtatgctggaggcggcaggcaccggcgttgcgatgggcaacgccgatgagacggtga

SEQ ID NO: 389493 - DNA, 165 bp, Salmonella enterica
atgatagaatttaaaccagaaattggaatgcgaacttatattgatgaacagttagaacaatttggttttcaatttaataatggcttaacaacacttgaaaatttaaagactgtttttgcattacaaagaaagataccaagtattaaaagaagaatagtaatctaa

SEQ ID NO: 389494 - DNA, 837 bp, Salmonella enterica
atgaattatcaggtaatagctctcgatctggacggtactttattaacacctggaaaaaaaatcctccctgaatcactcactgccttagaaaatgcccgaaaatctggtgcaaaagtcgtcattgttaccggaaggcattttgttgcaattcatcctttttatcaatcgcttaggttagacactcctgcaatatgttgcaatggtgcattattatacgattaccaagaaaagaaggtgcttgagtctgatcccctgcaagcagaacaagcttcacaactaatttcccttcttgatagttacaatgttcatagtctgatgtatgccgatgatgccatgttctaccaagaacctacggggcatattatccgtacagaaaattgggctaaatctctcccagagtcacaacgtccaatcttcaaacaagtaccctctcttagtgaagcatctcagaacgttgatgctatctggaaattcgcccttactgactctgatactgagaaactgcatagctttggtcaaattgtagaacgtgagcttggccttgcctgtgaatggtcctggcacgatcaagtagacatagcacaagccggaaacagtaagggtaaacgcttggcacaatgggcagaatcacaaggtttatcaatggaccaagttatagcctttggcgataatttcaacgatcttagtatgttgaagtctgctggtttgggtgttgctatgggtaacgctgttgatgaagtcaaagcctgtgctgatttggttataggtaataatgctgaagctggtatagctgatgtagttaatcagtacttttcagaagagaaaataacagcgtga

SEQ ID NO: 389495 - DNA, 156 bp, Salmonella enterica
atgactgcacgcgtgattgccctcgatttagacggaacgttattaaccccgcataaaaccttactcccctcctcgcttgacgcgctatcacgcgccaaggcgctggcgctggaaacacctgctatttgctgcaacggcacctatttgtataagtga

SEQ ID NO: 389496 - DNA, 2316 bp, Salmonella enterica
atgaacggttggcgtggtaaacgtggccgctggctgtggctggcgggcgcgccgctttttattttcctggcgttatgggcggcggataaactctggccgctgccgctcaatgaggtccatcctgcgcgggtcgtggtagcccatgacggtacgccgctgtggcgctttgccgacgccggggggatctggcgttatccggtgacgattgaagaggtctctccccgttacctggaggccttaatcaattacgaagatcgctggttctggcggcaccctggcgttaaccctttctccgtcgcgcgcgcggcatggcaggatcttaccgccgggcgcgttatttccggcggcagtacgctgactatgcaggtggcgagactgctggacccacattcgcgcacgttcggcggtaaaatccgccagctttggcgcgccctccagcttgaatggcatttgtccaagcgcgatatcctgacgctgtacctgaaccgcgcgccgttcggcggcacgctacagggtattggcgctgcaagctgggcctacttcggcaagccgcccgcgcgcctgagttacgctgacgcggcgctgctggccgtattgccgcaggcgccgagccggttacgccccgaccgctggcctgcgagagccgaagcggcacgaaataaagtgctggatcggatggcggcgcagggcgtctggcctgccgaaacggtacgcgagtcgcgtgaagagccggtctggctggcgccgcgtcaaatgccgcaactggcgccgctttttgcccgaatgatgttgagtaaaagccagaacgacaaaattgtgaccacgctggacgccgggttgcagcggcaactggaagatctggcgcgggcatggaaagggcggctgcctgcacgcagttcgttggcgatgatcgtcgtcgatcataccgatatgagcgtgcgcggctgggtaggatcggtagaccttaatgacgacagccgttttggtcatgtcgacatggtaacggcgatccgatcgccgggatcggtactcaaaccctttgtgtacggtctggcgctggatgacggcttgatccatcccgcatcattattacaggacgttccgcgccgcaccggagattaccgcccgggaaacttcgacagcggatttcacggcccggtcagcatgagcgacgcgctgatacgctcgctgaatctgcctgccgttcaggtgcttgaagcctatgggccgaaacgatttgcggcaaaactgcgtaacgtcggcttgccgctatatttgcctgctggcgcggcgcccaatctttcgctgattctgggcggcgcgggcgcgcggcttgacgagatggcggcggcatacagcgcgttcgctcgtcatgggaaagcggcgaaattacggttacagccggacgatccgctgtcggaaaggccattaatgtcgccgggagcggcgtggatcattcgacggattatggcggatgaagcgcaacccttgccggataacgcgctgccgcgcattgtgccgttggcgtggaaaaccggcaccagttacggctatcgcgatgcgtgggctattggcgttaacgcgcgctatatcatcggcatctggacaggcagacccgacggcacgcctgtggtggggcaatttggttttgccagcgcggtgccattgcttaaccaggtcaataatctgttactggcgcatacgggacgcctgccggaagatccgcgtccgcagacggtaagccgcggtgtcatttgctggccgggcggacagactctgcctgccggagacagcaactgtcgccgccgactggcgacatggctgctcgatgacagccagccgcccacgctgctgttacctgagcaggaagacatcaacggtattcgtttcccggtctggctggatgatatggggcggcgtgtcgctgccgactgtccgcaggcgcgtgcgcatacgtttatcgtctggccgcggccgctggagccgtggctgccgcctgcggaaagacgtagcgcccgcttgcccgcggcgtccgaccactgtccgccgctacagggcagtgatgccgcgccgttaatgctgtcaggagtgagggatggcgcggtgatcaggcaattgccaggccaggaaaacgtcacgctgcctgtctcgactaccggcggtaaaggacgtcgctggtggtttttaaatggcgaacctgttaatggcgaaaataatcgcctttctttattactcaatatcgctggacgttatcaacttgtggcaatggatgagtccggtcaggttgcagcggttaattttgaattaatacgttaa

SEQ ID NO: 389497 - DNA, 144 bp, Salmonella enterica
atgatcatgcccggcaaacgggggggattcattatgttagaatctattattaatctggtatcgagtggagcggtcgacagccacacgccacaaactgcgctagccgccgtgttgtgtgccgcgctggtgggactgttcagctaa

SEQ ID NO: 389498 - DNA, 1008 bp, Salmonella enterica
gtggcgactaaaatgtggatgatccgcggcgatggcggaaaattgtacgatgactttagggacaaacaggttgttgcaatcggctggtcgcagctcgctccctatgtaaaaccgggatgctcaagagagcagttgtttacccggtatcaggagcttgagccacagactaagccaggcacagttcgttccggtgcttcccaggtttggcgctttgtgaatgagatgcagaaaggtgactgggctatcacttattcaccttctaatcggacctatttaatagggaaaatcgcatcagattttgagtttcatgccgagtggcttgaagatggcatgggcattgcgcgtaaagtgaagtggaacgcggaagagattaagcgcgatagtctgagtgatgcaaccagaaacactcttggctctacgctgacggtttttcaggtgcctgattttgccgtgaatgaattagtgcagggtaaaaagcctgtctcagatgtcgtgccggaagtacctgtttcagatggagaggatgaggttgtttctaatcctctgcgcgacatggagatgatcgcctttgaaggcatcaaggatcgtatcaaccgtctcgactgggatgagatgcaaaatctggtcgcaggcgtgttacgcagcatgggatataaaactcaggtatcgcctgctggcgctgaccgtgggaaagatatcattgcttcccctgacggttttggcttcgaaaatccgcgcattattgttgaggtgaagcaccggagggaacagatgaacagccagcaaatccgtagctttatcggtggccgtcataaagatgatcgcgggctgtatgtcagcacaggtggattcagcaaggatgcacgctatgaggccgatcgttctacgatcccgttgacgctatggacgcttgacgatttggtacgtgcgttagtggaaaactatgagcaagtggatattgagactaagttattggtgccgcttaagaaaacgtatttgcctgcatga

SEQ ID NO: 389499 - DNA, 309 bp, Salmonella enterica
atgatgcaacttaatcttgccagagtgctgttacttggggacgaaattaatgggtatattcgttatgaaatattctcaaaagaaggagagcgtcctgactatccagaaaaaatagtggtttatcgtgaaaaggttttagaagcgaatggcgataaatattgggtcaaaacggatgaagtcatcaatctggatcatctaggattccaggagggtcaatttcaaatggcaatgacttatcacatgtgccctgcgcgagatatgttttcagcgatagatgaatgcaaaaaacattatcgtaaaacttgctaa

SEQ ID NO: 389500 - DNA, 507 bp, Salmonella enterica
atgctttggccacacggcgttttgttccgcgattctgaacaagccattcgtaaacaggtgattgaatcggacattattgaagcggtgattggcctagggccaaatcttttttacaactcctcaatggaatcatgcattattgttcttaataagaacaagtcacaggaaagagaaaaaagagtacttttcatagatgctaaaaatgaaattactagcatcaagtccaattatttcttgtcggaaaaaaatatagagaatatctgtgaatattttaagtcaagtgcaaataagtcaaaaaatttcgctttggttagtattgaagaaataacaaagaacaactttaatttatcgttgccattatacctccatgaaaacgtttttatggatagccacgacattgaagcctctatagatgcttggagagctgatcaagctaaatctaatagtcacttaaaaagcatcaagtatctatttgataatcttggtatcaagtggggggcaagatga

SEQ ID NO: 389501 - DNA, 1143 bp, Salmonella enterica
atgaagttgaatgaaatatgtactgagccaaagcttactagttcaaatcctcttaaggatggttatgatcgatatgtaggtttggaacacatcgattcgaactcactaacaatatctcgttggggggatattgctaaggataagcctagttttataaaagtttttaaaaaaggccatatcctattaggcaagagacgaccttatttacggaaggctgcaattgcacattttgatggtatatgttctggggatattattgttcttgaagctaatcaagctgtagtaaatccagaactgtttccatttctgattcattccaataagctttggtcacacgcaataaaaacttcttcgggttctttatcccctagaacaaaatttaaagatctagggcaagttgagttttctctccctgatctggatggtcaaaaaattctagcggatgatttgctaaatattcaaagaaacagagtattaatagagcagcaaatcgaagccacatcgcaacttatatcgtcgacacttcaagaaacatgtggaatgctaggtaagcgcactcctactgatagacttgatgagcgttgcccagaagattatatggttgtaaaacttaaagatgttctagttagggtgagtcgtccagtagaactatttgatcatcttgaatatggaactgtagttgctagaagggctttcggtggggttgaagcaagagaatcaattcttgggaaaaacattaaagtaaaaagtcagtttgaaataaaaagtggcgattttcttatatcaaaacgacaaatcgttcatggtggttgcggtgtggttccacagcacttgtcgggaagcattgtttcgaatgagtatgatgtatttaatacgacagattgcttagatatgagttttttttcttggctagttagaactccttgtttaagaaattatttttatatcagtagcgtcggggtacatattgaaaaaatgctcttcaaaacggaactatggcttaatatgcctataatcttaccaccgttggatgtacaaaaaacaatcgctatgacattaaatgaattggtttcttttagtcaaacacaattcggaaaaattgatcaccttgaagagattaagacacacctattgagcgaataa

SEQ ID NO: 389502 - DNA, 1644 bp, Salmonella enterica
atgcatgaacagatcataagtaagatcggttatatcattgataatgttaataactcggaaattattaaatatttagaccattctctttcaaatatatactcacttaaggagttttatcaatattcaaattcttatcaatccttaattcttaggatggttaacgaatcaggccggtccggtgaatatgtcaccccatcagctttggttcagattatggttgaaatgttatcacctacagatggaaaatcaatctacgatccggcatgcggtacctcaggtttattaatagaatcggcaaagtacattaagagaaatagtaaaaataaaaatccgaattactcaattatcggaaatgacacatcgtctttcgcctgtctgatatcaattgttaatctgttaattaataaagaatcaaattttgaaatcattctgaaagacagtttagagaagaataaacttaacgaaaaacacgactttgttttgaccaatccaccatttggccaacataaccgattggataacattcatattgatacgtgttacaaaggcccgaatctagactactactttttggaacatgttatcgactctctcaaagttgatggcaaagcagctataatattacctgaacgttttttacatgatttaaacaaagagtgtattgctctcaaagataagctttttctacgttataatttagaatgtattttatctatcccgtcaggtgcgttgctcccctacaccgccgtaaaactatgtatactctttattagtaattctggccctactgataaaatatatttttacgaattaaataaaggagaaaaatactcacgttccaacacaataaaaaaagatgattttattgtttttttacagttagcaaaaaaaagaaaaatcactgaacactcgtggtttatagatatacgtgatacaactataccttataatttgctcataaaagataaagagaaaaactcatataatttattttatgaatcattatctaacattgaagagacaataagtaataatgaacaattgctaagcgagttgtctttattaagagaaaaaatagcatctttagaaacgacagtaaaaatgtattctcataagaatacatttgagaaaattaaaataggcaacatcgcaaaaataaattccggaaagttattgcagaaaaacaaattattatctgaaggtccaattcctgtatatggtggaaacggaattattggatataatgatgaggctatggaatatggtgaaaacattgttattggtaaggttggtgctctttgtggcaatgttaggtatgttcaaggtgatatttgggtgacaaataactcattgattcttaaaaataagtcgcccaataaaattctaaccccctatcttgcaaaattattgtctactttaaacttaagaaagcttgcagttggtacggctcaacaatatttaaccacgacacaaataaaagacgttgaagttagtcttccacctttaacgactcagcatacattaaacatgtggcttgatgagttagacggtacgcttgaaaaatataacaagctgattgaaaaaataaaaaaagacaaacaagaacttaaagaaagtttgtataaaggtcttttgatacaataa

SEQ ID NO: 389503 - DNA, 339 bp, Salmonella enterica
atgtttaatcagggtaaatggctgcttatttgtatctttctgctatcaggatgttatgacaccacccccaatattcaggatttaaataaagcatttcttgaatatgaaactaatccactaaaaaataaatttgaaattacctcggcaacatttattaaagaaaacactaaaggtcatttgacttactatagcgtcagtggcgatgtagccactaaagaattattatattattatgacccaataatcaccggtacacaatcaatggatggacacgatgttaccgtggttatccccgtcacacccattggaacaacaacaaaaatgtttatgtatttttag

SEQ ID NO: 389504 - DNA, 156 bp, Salmonella enterica
atgcataaaaaaggttattgcttactcactattttgagtgggttttattttatcgactcgggaatatccatcattccctccttatacgtctggcgtaatgttgaaattgaatcaaaaactattattgactatcaatactccagtgaattgcggtga

SEQ ID NO: 389505 - DNA, 624 bp, Salmonella enterica
atgctgatgcttcggcaggtgcccccctttttgttttttaccggtaaaggcggtgtgggtaaaacatcgctggcctgcgctaccgcgattcatctgaccgcttccggcaagcgcgtattgctggtcagcaccgatccggcgtccaatgtcgcgcaggtatttgaacagaccatcggccaccagataaccccgattgcagcggttaacggactgtccgcgctggaggtcgatccgtccgccgccgctgcgaaataccgtgagcgcattgtcggcccggtgcgtggcattctgccggatgacatcgtggcgggtatcgaggagcagctttccggtgcctgcaccaccgaaattgccgcctttgatgaattcaccgcgctgttgaccaatcagcaactgcgcgatgagtacgaccatattgtgttcgacaccgcgccgaccgggcatacgctgcgaatgctgcaactgcccggcgcatggagcggctatcttgacaacagccaacacggcgcgtcctgtctcggaccgctggccgggctggaaaaacagcgcagccagtatcgcgccgccgtggacgcactggcgaatgcagaactgacgcgcatggtgctggtcgccagagcgtag

SEQ ID NO: 389506 - DNA, 237 bp, Salmonella enterica
atggctgggttcattgcttttggcgcgattattgccagcgtcatctgcggcttctcgatgggcgtctggttttctgcgctaatggtactgctgtgcgccgggtttatactttacgacacttctaacattattcaccattaccctaccgatcgccctgctggcgcggcattacatctgtttgcttctatcgcgaccatgttctggtatattttgcggatttttatgtcgcgtaattaa

SEQ ID NO: 389507 - DNA, 726 bp, Salmonella enterica
atgcgctgcgcttatcaggcctacagacgacaccacacgcgtaggccggataagacgttagtcgccatccggcacagacgacaccgcacgcgtaggccggataagacgttagtcgccatccggcacagacgacaccgcacacgtaggccggataagacgttagtcgccatccggcacagacgacaccacacgcgtaggccggataagacgttagtcgccatccggcgcagacgacaccgcacgcgtaggccggataagacgtcagtcgccatccggcacagacgacaccgcacacgtaggccggataagacgttagccgccatccggcacagacgacaccgcacacgtaggccggataagacgttagtcgccatccggcacagacgacaccacacgcgtaggccggataagacgttagtcgccatccggcgcagacgacaccgcacgcgtaggccggataagacgtcagtcgccatccggcacagacgacaccgcacacgtaggccggataagacgttagccgccatccggcacagacgacaccgcacacgtaggccggataagacgttagtcgccatccggcacagacatcataccgtcaacgccgccaccagtttctccagtgctggcgttgcctgctgctggtcatacacaatatacaaatccgccggaatacgatcctctaacggacggaacaccacacccggccagctcatttgcgcatag

SEQ ID NO: 389508 - DNA, 1734 bp, Salmonella enterica
atgcaaatcatgttaccaaaaaacaccttacatgataaagagcaagatgtgttttttgaaaaagtcacagccttaattggtgaaaatggtgcgggtaaatcctcagttctacaatctgtatttattaattgtttaacaaaaaaatatcttccagaaacaaaagttgtttgtttttcctcaggacaaaatgaaaaatactcaacgtatttctctgattatctttcccatgaaagacaggcaaacagaggacttaacttagattgctgctattacgacaaatcatggtctaagttactaatattcatatccacaatatgcaaaccagatggtattgttagaaattttttatatgaaaaaggctacattgatgtatcagatgataaaagtgatgacatatcaagcaagcttacattaactgtccgagtaaattcatcttacgttaaccgaataaaaatggcgttgtcgcaagaagagcaaggtattgaaaataccttaagatattcagcttatcacagaacgctggagagcttcataaataatattgttaatgctgattatgattttgagtctccacttgaagttcaagagatcttgctaacccattcaaatttcttcaatccatcatttgaagcagcagaagactccttttttgatcctatcattacatttttcactcaagcagccgataatgattactttataatgaaaaaatcattactgttggagtttaaaaataatatcgagttaaatgatattagcgacggagaatatcaagttctttttttatactctctacttgatctttttgatagtgccaatactttattcttattagatgaagtagactctcatttacattttaagaatattgagatcttatggcatcgactacataatatcaacggttatgcgataacgaccacacatctactggactcgattacagctaatgagaatagctttaaaaatttaaagatcgttgataaaggaaaaataaaagaagatgataaaattaaaactataatagatcgattatctatcttgaccagaattaaagacgtacagttcgaagtttgctgcaaactagaaaacattgtcttaatggatgattataatgactggactatattttatgccttggcaaagaaaaaaggtcttgatgtgtcaaagctagataaccttcatgccataaaacagtcctctggctatgataatttaagtcaaaagtttgcacaaccaaaactggagtggattgagtctcttttaaatataaattccgctaaaaaagtcaaaaggatattcatgatctgtgacaaagatgaggctccaattacatatcaaaaagatggcgttcaagttaacggaagcgaatactctaaaaaaataaccatgctgggaaacaaatataaactaaaaatatacctccttgcatggcaaagaagagaaataaaaaactatttattgtcttatacggcattgtctcatcatggacttattgggcaagtaaataatggagatcttccggctaactgttttttaaagggaaataattcaggagacaatcctgcaataagtcggcttaatgttaaaccttacataacaaaaataatagattctgatggcataggattggataaatcaaaactttatccatatatagatctaataccgcctaatgaaataagtaatgacatcgagaatatgtacaattttttggtggagaaattgaaatga

SEQ ID NO: 389509 - DNA, 174 bp, Salmonella enterica
atgtgtaagcttcctgttaaaacgaactattcatttttagagatcttgtatactatttgtggagatcgctattcgaaaaagtactattcactgggcatcaggttcttgccgttcttaaatccgtcggggctgaattttacggttaacttattggtttactcttttagagaataa

SEQ ID NO: 389510 - DNA, 147 bp, Salmonella enterica
atgtgcttcacctcaaaaaattgctacaaaaccggtaacttttcttgcgtgctgaagcagaaagatccagactccttgaaacgtttcagcgcgatttggtttttttttgataactcagattggcgctttttttctcataatggctga

SEQ ID NO: 389511 - DNA, 831 bp, Salmonella enterica
atgcctaaacagccacctattgcaaaagccgacctgcaaaaaacacagggagcacgcaccccgacggcagtgaaaaagaacaacgatgtgatcagctttatcaaccagccttccatgaaagaacaactggcggcggccctgccccgccacatgacagcggaacgcatgatccggatagccacaacggaaatccgaaaagttccggcgctgggtgactgtgacaccatgagttttgtcagcgccatcgttcagtgttcccagcttgggctggaacccggcggcgcgctcggtcatgcctatctgctgccgttcggaaacaaaaacgaaaagtcaggcaaaaaaaacgttcagttaattattggctaccggggaatgatcgaccttgcccgccgttccggacagattgccagcctttccgcacgcgtcgtccgcgaaggtgacgatttcagcttcgagtttggtctggaagagaagctggtacaccgtccgggtgagaacgaagatgcaccggttactcatgtctatgccgttgcccgccttaaagatggcggcacacagtttgaggtaatgacccgtaaacagatagagctggtacgggcacagagcaaagccggtaacaacggcccgtgggttactcactgggaggaaatggcaaaaaaaaccgccatacgccgcctgttcaaatacctgcctgtatccattgagatccagcgcgcggtatcaatggacgaaaaggagacgctgactatcgatccggctgatgcgtctgtcatcacaggtgagtacagcgtcgtcgaaaacgctggcgtggaagagaacgtgaccgcataa

SEQ ID NO: 389512 - DNA, 693 bp, Salmonella enterica
gtggacacggagaaaacaaagtctcttgatacaggaacggcttttcactgccgggtactggaaccagaggaattcagtaaacgcttcatcatcgctccggaatttaaccgccgtaccagcgcaggaaaagaagaagagaaaacctttctggaagagtgcgcccggacaggaagaaccgtgcttacggcagaagaaggccggaaaatcgaacttatgtaccagagtgtgatggcgttaccgctggggcagtggctggttgaaagcgccggatatgctgaatcatcagtctactgggaagatccggaaacaggaattttgtgtcggtgccgtccggacaaaatcatccctgaatttcactggatcatggatgtgaaaaccactgctgatatccagcggttcaggacagcttattacgattatcgctaccacgtacaggacgctttctacagcgacggttatcgggcgcagttcggcgagatacccaccttcgtcttccttgttgccagtacaaccgccgaatgtgggcgttacccggttgagattttcatgatgggtgaagacgcaaaactggcaggtcagcgggaatatcgtcgcaatctgcaaaccctggccgaatgccttaataacgatgaatggcctgccattaaaactttatcactgccccgctgggcgaaggagaatgcaaatgcctaa

SEQ ID NO: 389513 - DNA, 321 bp, Salmonella enterica
atgaacaaaatcactgtattacccgtagagcgagaccactacggttactggactcacccgctgtacgaacagttttgcgatggtcgtgaggttatctctccagacgagtttaatgcctggctggaggctaacggtttggaatggaaagtctcatacctggatgacgaggaaatagatcctgacgttgacggatgcgacatttcaacgtggcaaccagatccgccagcaggtaacggctggtttgtcggttccattcacgacaccgaagacggcgcggtctgtatctggttacgcaacgtgcaggacggtcattatgagtaa

SEQ ID NO: 389514 - DNA, 585 bp, Salmonella enterica
atgacgtttaaaatgagcgataccccgcagacaattaaaatttttaatcttcgttcagatacaaacgaatttattggtgcaggtgatgcatatatcccaccgcacacgggattatcggcaaattgtactgatatagcccctcctgatattccctccagttatattgaggtatttgactctgaaatccaaacgtggagtctgcatgaagaccaccgcggtgagacagtttacgacacaacaaccggcaatcaggtttatatctccgatcttggtccgctacctgaaaacgtcacatcagtttcaccaggtggtggatacaaaaaatgggatagtaaggctcaggtctgggtgaatgatgaagctgcggaggccgcagccagacttcgtgaagctgaaggaacgaaaaacagacgcctgcaaatagcgtctgaaaaaatcgcgccgttacaggatgcagtggatctggacggagcaaccgataaagaaaaagcttctcttctggcatggagaaagtaccgggtacaggtaaaccgtgttgatactttaaagcctgtctggccggagaaaccagccagtagtttataa

SEQ ID NO: 389515 - DNA, 1263 bp, Salmonella enterica
atgtcccttaccgacgcaaaaatccgcaccctcaagccttctgataaaccctttaaagtctccgattctcacggtctgtatctgctggtcaagccgggtggctcccgccactggtatctcaaataccgtattagcggtaaagaatcccgcattgcgctgggtgcctatccagccatctccctgtctgatgcgcgacagcaacgtgaaggtatccgtaaaatgctggcgctgaatatcaacccggtacagcagcgggctgctgaacgtggctcacgaacaccggagaaagtttttaaaaacgtggcgctggcgtggcataaaagtaacaggaaatggtcgcagaacaccgccgaccgtctgcttgccagcctgaacaatcacatctttccggtcatcgggaacctacctgtatcagaacttaaaccccgtcatttcattgacctgctgaaagggatcgaggaaaaaggtctgctggaggttgcgtcccgcacacggcagcacctgagtaacataatgcgccatgcggtctatcaggggttaatcgatactaacccggcagcaaaccttggcggcgtgaccacacctcctgtcagacggcactatcctgccctgccactggagcggctgcctgaactgcttgaacgtattgaggcatatcatcagggccgcgaacttacccggcttgccgtcctgctgatgctgcatgtgttcattcgctccagtgaactgcgtttcgcccgctggtcagagattgatttcacaaaccgggtctggacgatacccgcgacgcgagaacccattattggcgtgcgttattccgagcgcggggccaaaatgcgaatgccgcatatcgtccccctctcagaacatgtcatcgccattctgaaacagattaaagatatcaccggtaataatgaactggtcttccccggcgaccataacccgtataagccaatgtgtgaaaacacggtcaataaggcactgcgggtgatgggttacgacacgaaaaaggatatctgcggtcacggcttccgggcaatggcatgcagtgcgctgatggaatcgggtttatgggcaaaggacgcagtagaacgccagatgagtcatcaggagcgcaataccgtgcgcatggcttatattcataaggcagagcacctagaagcccgcaaagcgatgatgcagtggtggtcggattatctggaagcatgccgagaatcttatgcaccgccttatacaattggtaaaaataagtttatcccatag

SEQ ID NO: 389516 - DNA, 9492 bp, Salmonella enterica
atggataacttgcgcttctcttctgcgccgacagcagattccattgatgcatcgatcgctcaacactacccggactgcgaacctgtcgcggttatcggctacgcctgccattttcctgaatcgccggatggcgaaacgttctggcaaaatctgctggaaggtcgtgaatgcagccgacgctttacgcgcgaagagcttctggccgtcggtctggatgccgccatcattgacgatcctcattatgtcaatatcggtacggtgttagacaacgccgactgcttcgacgccaccctgtttggctattcgcgacaggaagcggagtcgatggacccgcagcagcgcctatttttgcaggcggtctggcatgcgctggaacatgccggttatgcccccggcgccgtcccccataagaccggcgttttcgcctcttcccggatgagtacctaccccggtcgcgaagcattgaacgtgacagaagtcgcgcaggtaaaaggtctgcaatctctgatgggcaatgataaagactatattgccacccgcgccgcgtacaaactcaacctgcacggcccggcgttatcggtacagaccgcctgctccagctcgctggttgccgtgcatctggcctgtgaaagcctgcgcgcaggcgaatccgatatggcggttgccggcggcgtggcgctctctttcccccagcaggcaggctaccgctaccagcccggaatgattttctctcctgatggtcactgtcgtccctttgacgcctcggctgagggcacctgggccggtaacggtctcggctgcgtggtgctgcgtcgcctgagagacgcgctgctgtcaggcgatccgattatctcggtgatcctctccagcgcggtcaacaacgacggcaacagaaaggtcggctataccgccccttccgtcgcagggcaacaggcagtcatcgaagaggcgttaatgctggcggccatcgacgacaggcaggtaggttacattgaaacccacggcaccggcacaccgctgggcgacgcgattgaaattgaagcgttacgcaacgtctatgcgcctcgcccgcaggatcagcgctgtgcgctcggttccgtgaaaagtaacatgggccatctggataccgcggcgggcattgccggactgctgaaaaccgttctggcagtcagtcgcgggcaaattcctcccttactgaattttcacacccccaacccggcgctgaaacttgaagagagcccctttaccataccggtgtcggcacaggcatggcaggacgaaatgcgctatgcgggcgtctcctcctttggtattggcggcaccaactgccatatgatcgtcgcctcgctgcccgacgcgctcaacgcgcgcctccccaatacggatagcggcagaaaaagtaccgcgctgctgctcagcgccgccagcgacagcgctttgcggcggctggcgacggattatgccggggcgctgagagagaatgcggatgccagctctctggccttcacagccctgcacgcgcgccgtctcgatctccccttccgcctggcggcgccattaaaccgtgaaaccgccgaggcgctcagcgcctgggccggtgagaaatcgggggcgctggtttacagcggccacggcgccagcggcaagcaggtgtggctgtttaccggccagggctcgcactggcgcactatgggtcaaacgatgtaccagcactcaacggcgtttgccgacacgctggatcgctgtttttccgcctgtagcgaaatgctcacgccgtcactgcgcgaagcgatgtttaaccccgattcggcgcagctggacaatatggcctgggcgcagccggcgattgtcgcgtttgaaatcgcgatggcggcgcactggcgtgctgaaggactgaagccagacttcgccattgggcattccgtcggtgaatttgccgctgccgttgtctgcggacactatacgattgaacaggtcatgccactggtttgtcggcgcggcgcgctaatgcagcagtgcgcaagcggcgcgatggtggcggtatttgccgacgaagacacgctgatgccgctggctcgccagtttgagctggatctcgccgccaacaacggtacgcaacatacggtattttccgggctggaagcccgtctcgcggtattttgcgccacgctctcgcagcatgacattaactatcgtcgcctgagcgtaaccggtgcggcgcactccgctttactggagccgatactcgatcggttccaggacgcctgcgcgggactgcacgcggagccggggcaaataccgattatttccacgctcaccgccgacgtcattgatgagtcaacgctcaaccaggcggattactggcgccgacacatgcgccagccggtgcgttttatccagagtattcaggtggcgcatcagctcggcgcccgcgtttttctggagatggggcccgatgcccagttggttgcttgcgggcagcgcgaataccgcgataacgcatactggatagccagcgcccggcgtaacaaagaggcgagcgatgtcctcaatcaggccctgctccagctttacgctgccggcgtcgccctaccgtgggccgacctgctggcgggcgatggacaacgtatcgctgcgccatgttatccgtttgatactgagcgttactggaaagagcgcgtctccccggcctgcgagcctgccgacgcagcgctgtctgccgggctggaggtggcgagtcgcgccgcgacagcgctcgatctccctcgcctggaagcgcttaaacagtgcgccacgcgactgcacgccatctacgtcgatcaactggtacaacgctgtaccggcgatgccattgagaacggcgtggacgccatgaccatcatgcgccgtggacgtctgctgccccgctaccagcagctactccagcgcctgctgaataactgcgtggtcgacggcgattaccgctgcaccgacgggcgatacgtccgcgcccgccccattgaacatcaacagcgggaatcactgctgacggaacttgccggttattgtgaaggttttcaggctattcccgacaccatcgcccgtgccggcgatcggttatatgaaatgatgagcggcgcggaagaaccggtggcgattatcttcccgcaaagcgcctccgacggcgtggaagtgctgtatcaggaattcagctttggccgctatttcaaccaaatcgccgccggggtattacgcggcattgtccagacgcgtcagccccgccagccgttgcgtattcttgaagttggcggcggaaccggcggcaccaccgcgtggctgctgccggaactcaacggcgttccggcactggagtaccatttcaccgatatctcggcgctgttcacccgtcgcgcccagcagaaattcgccgactatgattttgtgaagtatagcgagctggatctcgaaaaagaggcgcagtctcaaggtttccaggcacagtcttacgatcttatcgtggcagcgaacgtgattcatgccacccgccatattggccgcacgctcgataatctgcgccccctgctcaagccgggcgggcgcctgctgatgcgcgaaatcacccagccaatgcgtctgtttgacttcgttttcggcccgctggttcttccgctacaggatctcgacgcccgcgaaggtgagttattcctcaccaccgctcagtggcaacaacagtgccgccacgccggattcagcaaagtggcgtggctaccgcaggatggcagcccgaccgccgggatgagcgaacatatcattctcgccacgctgcccggtcaggcggttagcgccgtaacattcaccgcgccatcagaacccgtgttggggcaggcgctgacggataacggtgattatctcgccgactggtctgattgcgcaggtcagcccgaacggtttaacgcccgctggcaggaggcctggcgtctgctttcacagcgtcatggcgacgctctgcctgtggaaccgccccccgtcgccgccccggagtggctggggaaggttcgcttaagctggcaaaacgaagccttttcccgcggtcagatgcgcgttgaagcccgtcaccctgctggcgagtggctgccgctatcgcccgccgcgcctcttcctgcgccgcagacgcattatcaatggcgctggacgcccctcaacgtcgccagcattgaccatccgcttacctttagcttcagcgccggtacgcttgcgcgcagcgacgagctggcgcaatacggcatcattcacgatccgcacgcctcttcgcgactgatgattgttgaggagagcgaggatacgctggccttagcggagaaagtgatagcagcgctcaccgccagcgcagccggattgattgtggttactcgccgcgcgtggcgagtcgaggaaaatgaagcactctctgcatcccatcacgcgctatgggccttgcttcgcgtcgcggccaacgaacagccggaacggttgcttgccgccatcgatctcgccgaaaacaccccgaaggaaacgctgcatcaagggttgagcgcagtctcactatcacagcgctggctcgccgcacggggtgacaccctttggctcccttcactggcgcccaatacgggatgcgccgctgaattaccggcaaacgtgtttaccggcgatagccgctggcatctggtgaccggagcgtttggcggattaggccgccttgccgtgaattggctcagagaaaaaggggcgcgacgcatcgccctgctggcgccgcgcgtggatgagtcatggctacgcgacgtggagggcgggcagacgcgcgtctgccgttgtgatgtgggcgatgccgggcaactggccacggttcttgacgatctggcggccaacggcggcattgccggagcgattcatgccgctggcgtattggctgacgcgcccttgcaggagcttgatgaccaccagctggctgccgttttcgcggtaaaagcgcaggcggcaagccagctgttgcaaaccctgcgcaaccacgacggacgctatcttattctctactcttccgctgccgccaccctcggcgcgccgggtcagagcgcccatgcgctggcctgcggctacctggacgggctggcccagcagttttccacccttgatgcgccgaaaacgctctctgtcacctggggcgcatggggagaaagcggtcgggcggccacgccggaaatgctggcgacgctcgccagccgaggtatgggcgcgttaagcgatgccgaaggctgctggcacctggaacaggcggtgatgcgcggcgccccgtggcgactggcgatgcgcgtttttaccgacaaaatgcccccgttacaacaggctctgtttaacatcagcgccacagaaaaagccgcaacgccggtcattcctcctgctgatgacaacgcctttaacggcagcctgagcgatgaaacagcggtgatggcatggctgaaaaagcggattgcggttcagctaaggctgagcgatccggcgtcactgcatccaaaccaggatctgttgcaactcggcatggactcgctgctcttccttgaactcagtagcgatattcagcactacctgggcgtacgcatcaatgcggaacgggcgtggcaggatctgtctcctcatggactcacgcagcttatctgttctaagccagaggcgacgcctgccgcttcgcagccggaagtgttgcggcacgacgccgacgagcgttatgcgcccttccctttgacgcccattcagcacgcctactggctggggcgaacccacctcattggctatggcggcgtcgcctgtcacgtcctgtttgagtgggataaacgccacgatgagttcgatctcgccatactggagaaagcatggaaccagctcatcgcacgccacgatatgttgcgtatggtggttgatgccgacgggcagcagcgaatcctggcgacaacgccggagtatcacatcccgcgtgacgatctgcgcgcgctttccccggaagaacagcgcatcgcgctggaaaaacggcggcatgaactgagctatcgcgttttgcctgccgaccagtggcctctttttgagctggtggtcagcgaaatcgacgattgccattaccgtctgcatatgaacctcgaccttttgcagtttgatgtgcagagttttaaagtcatgatggacgacctggcgcaggtctggcgcggtgaaacgctggcgccgctcgctattaccttccgtgattatgtgatggctgaacaggcgcgccgacagacatcggcatggcacgatgcctgggattactggcaggaaaaactgccgcaactgcccttagcgccagagctgccggtggttgagacgcccccggaaacgccacacttcaccaccttcaaatcgacgatcggcaagacagaatggcaggccgtgaaacagcgctggcagcagcaaggcgtcacaccgtctgccgcgctgctcacgctgtttgccgccacccttgagcgctggagccgtaccacaacatttacgctgaacctgacgttcttcaatcgccagccgatccatccgcaaatcaaccagttgattggtgattttacctccgtcacgctggttgattttaacttctcagcgccggtgacgttgcaagagcagatgcaacagacccaacagcgcctctggcaaaacatggcgcacagtgaaatgaacggtgttgaggtgatccgtgagctgggccgcctgcgcggatcacaacgtcaaccgctgatgccggtagtgtttaccagtatgctggggatgacgctggaaggcatgactatcgatcaggcgatgagccatctgttcggcgaaccctgctatgtattcacgcaaacgccgcaggtctggctggatcatcaggtcatggagagcgacggcgagttgatgtttagctggtactgcatggacaacgtgctggaacccggcgctgccgaggcgatgtttaatgactattgcgccatcctgcaagccgtcatcgccgcccctgaaagcctgaagactctcgccagcggcatcgccgggcacattccccgccgacgctggccgctgaacgcgcaggcggactacgacctgcgggatattgagcaggcgacgctcgaataccccggcatccggcaggccagagcggaaataaccgaacagggcgcgttgacgctggatatcgtgatggccgacgatccgtcgccatcagcggcgatgcctgatgagcacgaacttacccaactggcgctaccgttgcctgaacaggcgcagcttgatgagctggaggcgacctggcgctggctggaggcgcgtgcgctacaggggatcgcggctacgctaaatcgtcacggcctgtttaccacgccggagatcgcccatcgctttagcgcaatagtacaggcgctgtccacgcaagcgtctcaccagcgtctgctgcgccagtggctacagtgtctgacggaaagagagtggttaatccgcgaaggtgaaagctggcgctgccgcattccgctcagcgagattcctgagcctcaggaagcgtgcccgcaaagccaatggagccaggcgctggcgcagtatctggaaacctgcatcgcccggcacgacgccctcttctccgggcagtgttctccgctggaattgctgttcaacgagcagcatcgcgttaccgacgcgctgtatcgcgacaaccccgccagcgcctgtctgaatcgctataccgcgcagattgccgccttgtgcagcgcagaacggattctggaggttggcgccggaaccgcagccactaccgcgccggtgctgaaggccacgcggaacacgcggcagtcgtaccacttcacggacgtctccgcgcagttcctcaatgacgccagagcccgtttccatgatgaatcgcaggtgtcttatgccttgttcgacatcaaccagccgctggatttcaccgcccacccggaggcgggttacgacctgatcgttgccgtcaatgtgctccacgacgccagccatgtcgtccagacgttgcgcagattaaaactgttgctgaaagccggcggacgtttgctgatcgttgaagcgacggagcgaaacagcgtattccagctggcgagcgtgggctttattgagggattaagcggataccgcgatttccgccgccgggatgagaaaccgatgctcacccgctccgcatggcaggaggttctcgttcaggccgggtttgcaaacgagctggcgtggcccgcgcaggaatcgtcgccgctgcgccagcatctgctggtggcgcgttcgcctggcgtaaatcgcccggataaaaaagccgtgagccgctatttacagcagcgctttggcaccggtctgcccattttacagatccggcaaagagaagcgttatttacgccgctgcatgccccgtctgatgcgccgactgagccagccaaacccacgccagttgccggggggaatccggcgctggaaaaacaggtggctgaactctggcaatcgctgctgtctcgccccgtggcaaggcatcacgactttttcgaactgggcggcgacagcctgatggcgacaaggatggtcgcgcagctaaaccggagagggattgccagggctaaccttcaggatctgttcagccattcgacgctgagcgacttctgcgcccatctacaggcggctacgtcaggagaggacaacccgatacccctttgccagggcgacggtgaggaaaccctgtttgtcttccacgcttcagacggcgatatcagcgcctggctgccgctcgctagcgcgttgaacaggcgcgttttcggcctgcaagcaaaatcgccgcagcgctttgccacgctcgaccagatgatcgatgagtatgtcgggtgcatccgtcgtcagcagcctcacggcccttatgtgctggcgggttggtcgtatggcgcgtttcttgcggcgggcgccgcacagcgcctgtacgccaaaagcgagcaggttcggatggtgttaatcgatcccgtgtgccgacaggatttctgttgcgaaaaccgggcggccctgctgcgcctgttagccgaaggacaaacgcctctggcactgcccgaacatttcgaccagcagacgcccgacagccagcttgccgactttatcagcctcgctaaaacggccggtatggtgtcgcaaaacctgacgctgcaagcggcagaaacgtggctcgacaacatcgcgcatctgctgcgtttactgactgagcatacgccgggcgaaagcgttccggtcccctgtctcatggtgtatgccgccgggagacccgcgcgctggacgccagcagaaaccgagtggcagggctggataaacaacgccgacgacgctgtgattgaagccagccactggcaaatcatgatggaagccccccacgttcagacttgtgcgcaacacattacgcgctggctttgcgcaacctcaacgcaaccggagaacacgttatga

SEQ ID NO: 389517 - DNA, 891 bp, Salmonella enterica
atgtcaaaaaaatatcagccattgcttataactcattatatgtcaacatgggtcactataacggaagcagttgagatcactaccaaagccataaaacaaaaaattactcctagcgatatttatcgtcatgccttgagtggcaacatcctactatcggtctatttccagtctcctgtgatacttaagaagatacaaacttttaatggaaaaataaaattcaggcagtttgagggagacctacttgataaactatgcatgcttgacagggacggttttatttatggtcaaaatttaagactctgtacagaagccagatatgtttgtcctgtgcaacaaattatagatacccccctgataggctatgaatatgttttgattcagcgcatactggcacgtgaacttaaattcccctccccaattgtgggggcaagaaaaactaaccatggtattatagtaagattttcagaggagctttttcaaattttcgaaacgatgagttggaaagaacgcgtagaaaaacaaatttccagactacctaaaaacacagcattagatgtcataaaaaaactaacagaagtgacgaccataaaatataatcacaatgggtgttttcctctttatacattaccgcctgatgcctgttttgttattcgccacaccgaagtcgaaagactaattaatttatacaaaaaaagggagagtcatcccatttcaccttcccgtatgacaacaccgttatcacgcctgttttggctggcctgcaagcacaatgatactatcagcccactgctgaatcatccctataagctcctttctatttttgaacaatgggcatcagacgatggcatcggggaaaaactggacgctgaaactgaatcgccacgggtttaa

SEQ ID NO: 389518 - DNA, 1617 bp, Salmonella enterica
atgcggctggcaatccggtgccttatacgacgttttcgcttaagcgcgacgccgcgtaaagctgactacccgtttaccaacagctacaccatgacgatgacgcagtctggtggcgcgacgcaagagtttgcctacagttcatcggttctttatggggcgaccggggcgaacggtacgttggccctttcgcttgacgaacctggcggagtcggggtgaaaagcgtggtgactgccagcctgtatgatacgccgacagtaacctcgtcgttgccggcagtgtttaccgttatcaccagcccgaacagcgacagggccaatatgtacggccatatgccggaaaccttcaccgccagcaacggcgcgaagtttacgcgcccgctgctgtatggcgaactctcatcgcagaatcatacgtcgagttacttcgaaaccaatgaaacctggtttacggtgaataattttaataccgggaattatggcgcgtgcccgataaatcagatggccacgcaggatgatctccagtcgctgtaccgcgatcaccccaaaggtaagatcacgaccgacattggattacccatcaagaaaaaatggtgggcaggcgacagcctggtaaaaaatcaatccatttactggcaatttaccgatctcaatacgggtaatggcggcaccacgttggaaactccggggaatttctattaccagctctgtctgacggaaccgcgacagatgaagattgcgttatctacggacgtgtggaacgcggataaatcggcggcggtggcgaaaacaggcgaggcgataccgatgacggtaacggtgactaacggcgccgggcagccgcaggcgggggcgacggttatgctgacgcgtgattactcttattcgcgtggcacggtggatagcaaatacattcaggccggtgtgattggcgagccggttgtgtccaaaggcgcgttatcagacatgaccctgacgccggtatcgcctgcgggtgcggcagtggtgtttaataaccagaggggaaccagcacgaaatggtatggcgtcaccggcgatgacggtaagttgcggttcacgttaaaccaggataaatcgctgggtttgagaacatccatcacggcgacgctttcggagctggctggcgagacggcgagcgtcgatgcgatctttacggtaccaaccagcccggatacgccgtatgcgtcatactggggccatatgccggataccgttgaggttaacggcgttacgctgcgccgcccattcctgaaaacagagatgtccaaaatgccgccaggcacctggccgcttaataatgaaacctgggcggcgaactatattgattatggtgaaacatccattcatgctacgacatcgctgccttatctttgcggctcgctggaaaacgccgcgacgctggacgatctgaaggcgctgaagaacatcattggcgacctgcactggcctacggctgcgccggcgtcgtcgtatacatatgactatgcatcgcaaacgatggttggcggtaagtattgctcatttaacgaaacgaccaatacggaaaactgtacgctttcaagtcaaggttttgcttatgcctcgtgccgggtgcagtag

SEQ ID NO: 389519 - DNA, 1224 bp, Salmonella enterica
atgcttataatttcatacattgtattatgcttattatttatagtttatctctatactctttccgtaagaattgagggaaaaataataaacgtaatggtcccatacctgataataacagtgcctacactgtacgtgtttgaaggtatatttgtatacctctcagaggtgcggaagtatacagtggaatatttgtttttctatacttgctatataacatacatagcatcatttgttatttcttatctttacacacaaagaaaacccatatacaacaaatcaaacacaaaaaataaaccaaggtatgtgtttacttcattgttattcaccttctttgcttttatcatttaccttccagtgttgatggagttcagagagtacatacttagcccaagaagaatatacgaattaaccagaacagggtatggtatatacttctatccttcattaatgttttctcttgtcgcttctatttgcgcgttctttacatacaaaaaatcaaagttattttgtatttccatagttttatttaactgtatacttattttcttgcatggtaacaaaggaccaatatttagtatatttatagcattcatcctttatctttcatatattgaaaataaaaaaattaaatttatgttcctggtgaaatcgtttgctgttatagcagtcattgtaacggcattctttgcatatacgtttactgatgggaatccgatagaaaatatggcaaattactcggattatacccgtaatgctgttcttgttgcttcctcaaactttgactttatgtacggaaaattactaatggagagcgaggtttactcgaggattccgagggctatttggcctgataagcctgaagattttggcgcattgtatctggcaaaagtatttttccctgatgcattctacagaaatcagggcgctcctgctttcgggtatggtgaactatacgcagatttcgggctttttacaccagtttggttagttatatctggagtatttaaaggcgtcctggctaagtatttctccaataaaactcaggaaacaaagtcagcgcattatttcataatgttcctattttgcattggaataagtgtgattcctgttagcatgggatggttgttccctgagcatttgatgattgcctttatggtatacattgcatcttcctttgttttttcagcgcatataagattcgttttactaagaagcgataaataa

SEQ ID NO: 389520 - DNA, 1050 bp, Salmonella enterica
atgtccgcacaaacccaggccgctccggccatgaacctgtttgaacgttacctgagcgtctgggttgcgctctgcatcgccatcggcattttgctcggacaggtggtgccgggcgtctttcgcgttatcggcggtctggagatcgcccgcgtcaatttgccggtcggtttacttatctgggtaatgattattcctatgctgctgcgcattgatttcggggcgctgggtcaggtcaaagcgcactggcgcgggatcggcgtaacgttgtttatcaactggctggttaaacccttctcaatggcactgcttggctggctgtttatccgttatttattcgcaccgtggctacccgccgatcagcttgaaagctacatcgctgggcttattctgctggccgccgcgccctgtacggcgatggtgtttgtctggagccgactcactaacggcgacccttatttcacgctgtcgcaggtagcgctgaacgatgccatcatgattttcgcctttgcgccgattgttgggctgctactcggcctgtcctccattaccgtaccgtgggctacgttgttgacctctgtggtactgtacatcgttgtgccggttattctggcccagctctggcgtaaggccctgctacgcaaggggcaaacggcattcgataatgcgctgacgaaaatcggcccgtggtcaatggcggcattactggcaacgctggtgttactgtttgcgtttcagggcgaagccattctgcaacagccgctggtcattgccctgctggcggtgccgattctgattcaggtgctgtttaactcggcactggcctatgggttgaatcgactggtgggcgaaaagcacaatattgcctgtccatccagcctgatcggcgcatcgaacttctttgaactggctgtcgcagcggcaatcagcctgtttggttttcattccggtgcggcgctggcgaccgtggttggggtgctcattgaggtgccggtgatgctgctggttgtgcgagtggtgaatcgttcgaaagggtggtatgagagagcttag

SEQ ID NO: 389521 - DNA, 666 bp, Salmonella enterica
atgaccgtcgctgatttcaaacgccccaaactggaactcccgaacggggcagacaaactgctgttgcactcttgctgtgctccatgttccggtgaggtgatggaggcgatccaggcttcgggaatcaactacaccatcttcttctacaacccaaatattcaccctcagaaagagtatttgattcgtaaagatgagaatattcgctttgctgaacaacacggcgtaccgtttatcgacgcagattacgacacggacaactggtttgagcgcgccaaaggcatggaatgggagcccgagcgtggcatccgctgtaccatgtgttttgacatgcgttttgagcgtactgcgctgtacgccgctgaaaatggtttcagcgtaatcagtagttcgctgggcatttcgcgctggaagaatatgcaacagattaacgactgcggacagcgagccgccgcgcattatccgggcatggtgtactgggattataactggcgcaagcagggcggttcgtcccgcatgattgaaatcagcaaacgcgagcagttctatcagcaggaatactgcggctgcgtttattcactgcgtgacagcaacctgcaccgtaaatcccaaggtcgtcctcttatcaaaattggtcagctttactacggtaaagaagagcaggactga

SEQ ID NO: 389522 - DNA, 432 bp, Salmonella enterica; identical to SEQ ID NO: 103465

SEQ ID NO: 389523 - DNA, 291 bp, Salmonella enterica
atgaataatcattttggaaaaggcctgatgaagggtgtgaacatggctggtccctgttctgaagcgatgcctgcgaaattttgtaatgaatatatacgtggatttgtaataggctattgctatcagctggaacagaaaactggggagaaaagcgttgcagctcttgaagcgggaagactgacgagacgatacaatcttgacagggagatcatggcagaattcttccaggaattcagatcggataaatttttacactatttcaacattggatattatgatggcttgaagtag

SEQ ID NO: 389524 - DNA, 123 bp, Salmonella enterica
atgaatttgtatatgttttatgtaggcggaaacgccggtaaatcaaatattgaagtgcatgacattcagtttgttgcagccagcgctccagaggatgcatggcctgcgctgcgcgaagcatag

SEQ ID NO: 389525 - DNA, 246 bp, Salmonella enterica
atgaccaacgttcagcaaggcaggaacgtagcggacagaaagtacggccataaagtccgctgtgagcgaaaagcggaatatcaagtgagctttttatttcctggcgattcgtctttcgggatcaaagaagaccattggcaggtgaatgtcacggcagcagcgtgcatcagcgtagtccctgcagggaaaaccagaggaggcgtcagtagaggaatcattatcagtctttcgcccatcaaccgttga

SEQ ID NO: 389526 - DNA, 891 bp, Salmonella enterica; identical to SEQ ID NO: 94705

SEQ ID NO: 389527 - DNA, 906 bp, Salmonella enterica
atgaaatccattcgctttaccaatgccgaaatcaccatggcggggaatctgttcctgcccgagaatttcaacgaatccgcatgctatccagctattgtggtcgttcatccgagcggcggcgttaaagaacaaacgtcgggcctgtatgctgaaaaactggcgcgtcatggctacattaccctggcgtttgatgccgcatatcagggtgaaagtagcggggagcctcgtcagcttgaaaacccataccaccgggtggaagatatcagcgcggctatagactatctggtggctcagcactgcgtcgatgagcagcgaatcggcgtcgttggcatctgcgccggcggcggctatgccattcacgccaccatgatggatcgccgaattaaagcacttggcaccgtcagcgccgttaactatggcgacatgtatcgccagggatgggaaggtaatcagcagcctgcatcatcccttgaacttctgcaaatggcagcggaacaacgtactgcggaggcaaaaggcgcagccactggctatctgcccaccaccccaaactccatggcggaggcgccaaacagagattttgcagaagcttatgaatactatcgcacgccacgggcaatgcatcgcaatgcgccgagtcggctcaccacccgcagccttgcgcaactggttacctacgatgccttcaacctcgccgatatttttctgactcagcccatgctggtaattgcgggcagcgaggcgggaacgcgctggatgacggaagagatttatcagcgagccgcaagccagaataaacacctgcatatcgttaatggtgctacccatatcgccatgtatgaccagcctgaatatgtgtcgaaagcgacaggcaaatttgtctctttcttcgcagaaaacctgtag

SEQ ID NO: 389528 - DNA, 756 bp, Salmonella enterica; identical to SEQ ID NO: 94707

SEQ ID NO: 389529 - DNA, 939 bp, Salmonella enterica
atgtctcatgaacaagccgtttcattccggcacaacagctggcaagttgccgccactctccgcttacctgagggatttgatgccagccagaaatacccggcgattgtttgcgcccatcctattagcagttgtaaagaacagacatccggcgcagtctacggccagaaactgactgaagcggggtttattactcttgctttcgatgcatctacccagggtgaaagcgggggtgaaccacgttttagcgaaaacccatccacccgcgtggaagactttcgctgcgcgatagactatctggtgactttagcctacgtggatgaagatcgtattggggttttaggcgtgtgtggtggtggtggatatgccgtcagcgccgctaccattgatcaccgttttaaagccgttgccaccgtggttgccgccaattatgggcgcattatgcgtgagggggattccagtccggatgccgcgctcagaacgattgacgcgctgggtaaacagcgcactgctgaagctcggggggccgctgctcttgttgtcggttatattcctgacaatgcagaagcactggcgaatgcgcacatcaacgatatcgacatcattgaggcagttgattactacacgaccccgcgtgggcaaaagccaggctcgcctaacaaattgcgacttaccagcaccgcaccggccttaaactgggatgcttttgcctttacggaaaagctactgatacagccattacatattgttattggcgatgttcctggcggtttcggttcttatcgcgacggttatgaactttatcagcgtgcgcgctccgttgagaagacactgcaggttgtgaaaggggtatctcactatgatctgtatgatcgtccggaagcgacggcacaagcgctgtcggagattattccattctttaaaaaacatttaggcacataa

SEQ ID NO: 389530 - DNA, 1215 bp, Salmonella enterica
atgaagctcaatgccagacaggtcgagactgccaagcctaaagataaaccctataagttagcagatggtgggggcatgtatctggaggtgttccctaacggcaccaaaagctggcgcatgaagtaccgtatcgcaggtaaagaaaaacgtgtggtgtttggtgtttacccgaccattaccttagctgatgccagaagcaaaagagatgatgctaaaaagctgctggttaatggcgttgatccgagtgcgtttaagaaagaaagcaaactagcccaaatcgaagaagtaaaaaacacctttcagcaaattgcgctcgaatggcacaacatgaaagtgaagaaatggtctgcgggatatgcctctgacattcttgaagccttcaacaaagatgtcttcccgttcatcggtcaacgtcctgttgcagacatcaagccgttggaattgcttaacgtgcttaaaaagatggaagagcgaggtgcgactgagaaagctaagaaagtacgtcagcggtgtggtgaagtgtttcgctacgccatagttacaggcagagccgagtataaccccgcaccagatctcaccagtgctatgcaggggcatgagtctaaacattatccattcctgaccattggggagcttccagccttttttaaagcccttgctggctactctggtagtgagttggtagtgttagccgcccgactaatgatcatcactggtgttcgaacgggtgaattacgtggtgcgttatggtctgaaatttatactgataaagggttatgggaaatttctgccgaacgcatgaaaatgcggcgtcctcatattgttccgttatccgtgcaggcattggaaattattgaaaaaatcagggcaatgactggtaattttcatctaatgttccccggtcgtaatgatccaagtaaaacaatgagcgaagccagtatcaatcaggtgtttaagcgaattggctataccggccgcgttacggggcatggattccgtcataccatgagcaccgttcttcatgaacaaggctacaacaccgcatggattgaaacccagcttgcgcatcttgataagaatgctatccgtggtacctataaccacgcgcaatatcttgatggcagacgtgagatgctgcaatggtatgctgactatatggatagccttgagaatggtggcaatgtgatgcatgggacgtttaatcgacgtgcatag

SEQ ID NO: 389531 - DNA, 867 bp, Salmonella enterica
atggcaatcatgagaaactggtcaacggaacacaccaaagaagttaaaaaatggttggatatcaatacctatcgaggatttgaagatctgactctcatacagctttaccatgagctgcttgcaaggacactgttctttaagccttatcatgaggaattcgaagcgaaagccgtgaacctctatattgaccgaattttcagcggaaaaccgtttcttattacagagcaacatctcggatacctcacgagagaggacaccctttaccaacccccacatttctttttgaccacgacagaacggctggctcagctcagcatcgttggattacggaattcattatttttctgggatggaagtgatgagtattcggttaaccgtgaatttctcgatagccctgtatccgaagctctccctaagctgttcagagatactgtcatggtcgaaatagaccttgcgaatggaactgatgaggaaatagctgaatctttgaaagccgcgctacctcaatggcgtaaagtacggggcattgaagccgatacatctgattcgatcaggtttggctatggaaccatcaagaaaatcatcaactacagactcatacccatgattgacatccttgtatggtctactctgcacaaggttcgcatatcagaagatcgactttcacgcctcctttacaccgacgatgatgatgaagaacagacccgcctcaatcaccaaattcgggacacagacagaccactggcgataaaagcagccagtatacctttcatccgtcagttccatctgttcatcaacaaaaacagtcatctcaaaaacatcagagtttcagacgtgatgaaaatcgcggattctgataaagactga

SEQ ID NO: 389532 - DNA, 207 bp, Salmonella enterica; identical to SEQ ID NO: 134348

SEQ ID NO: 389533 - DNA, 1059 bp, Salmonella enterica
atgggtgatgaaagtcagaaaaatcataaaattagagtcgctcagtatctgaggatgtccacagaccatcaacaattctcaatcgacaatcaggctctttatctaaaaaaatatgcagaagatcacaatatggtgattgtagaaacttatgatgatgaaggtaaaagcggagtctccgcttcaggtagaaaaaacttcaacagactaatagaagatgtcgttacaggaagagtaaaaatagaagctgttcttgtttatgatgtcagtcggtttggtcgatggcaagataatgatgaggcagggcattatagttatctactaaaatatcatggggttaggattatttattgtgctgagaacttaccagatgaatcgcctgaaatccaaatgcttacacttcctgctcttagatatgctgctggtgctttcagtaggaatctttcagtaaaagtttttgcgggacacgtaaaccttgttaaaaggggatactttcagggaggaataccaggatatggattaagaagaaagttaattgataataacaatagacccaaaatgatactttgtcctggtgaaagaaagagtttgcaaactgaccgagtagttcttacccctggtacaaaaaaagaattaaagctggtaaaaaagatatttaatatgtttatttttgatggattaaatgaatatcttatcgcaacaaaactaaacagagaggggtatacatatagtgataaaacagaatggaacaggagcagaatacattcaattctaattaatattcgctacacagggaaatacacttataatcgtacttcacagaaattgaacgctcaaagaattcagaatccacaagaagaatggatcgaatatgatttatttttcaagcctataatttcaccagagaaatttagattagctaaagaaatcattgacaatcgttcaaaaaaaatgaccaatgaagaaatacttaattttttgaaaaagttctcattaaacatggtaaaatttcaggttttattatcgacgaagatgataatggtccgtcgagtagtgtcgtag

SEQ ID NO: 389534 - DNA, 414 bp, Salmonella enterica
atgaaacataaatttacttttgaaaggttaatagcaataaaaaaagagttaagtattcaggataaagagattgtttttttttccatgcatgatcttactcgtagaggtgttaatcctatttggattgatacgctcgctgaattagagagcgtaatgattgatgatgaatattatatagcacttaacattattacaacaaaagggaagaaaaagttcttcaaaggtatgcttgtttcatgtttaaaaaatgatttacttcgcttcttaaatgaggagttctgtgcagaaaccggttgttcaaggccttttataatatcaccgttgttttctatacgaccaaagtatgttatttctattactgaagaggcaggcattcgttattatatttgtgatgattgtgcatctaatccgtag

SEQ ID NO: 389535 - DNA, 243 bp, Salmonella enterica
atggttctgaggcttggtttttctatttccactgcaatcaatcctgaaattttactgatggatgaatggatgagcgtgggtgatagtgattttaaaagaaaagcagagatgagattaaatagctttatctctaaagcgggcattatggtaatggccactcacgatgatgaactggctaaatctgtatgtaataagttcatcaggcttgagcacggtgagatagttagcaaaggcggattttaa

SEQ ID NO: 389536 - DNA, 615 bp, Salmonella enterica
atgaaacgtgtcgggataaaggctcaggtcggataccggagcccgcgggcacgtaaaggcgaggccagtatcgtgtcgcccaacaggctccagcggcagttcaatccggatgctccggatgagcgttgggtaacggacataacctacatcaggacccacgaaggctggctgtatcttgccgtggttgttgatctgttctcacgcaaaattatcggctggtccatgcaatcccggatgacaaaggacattgtcctgaacgcactgctgatggctgtatggcggcgtaatccccaaaaacaggtgctggttcactcggatcagggcagtcagtacacaagccatgagtggcagtcgttcctgaaatcacacggcctggagggcagcatgagccgtcgcggtaactgccacgataatgcggttgcagaaagctttttccagttactgaaacgcgagcggataaagaaaaagatctacggaacgcgggaagaagcccgcagcgatatttttgattacatcgaaatgttttataacagtaagcgtcggcatggttctagtgatcagatgtcaccgacagaatatgaaaatcaatattatcaacggctcagaagtgtctag

SEQ ID NO: 389537 - DNA, 279 bp, Salmonella enterica
atgagcggtaagcgttatcccgaagagtttaaaattgaagcagtcaaacaggttattgatcgcggtcattctgtttccagcgttgcaacacgtctcgatatcaccacccacagcctttacgcctggataaagaagtacggtccggaatcttccactcataaagaacagtcagatgcccagtccgagatccgccgacttcagaaggagttaaagcgggttaccgacgaacgggacatattaaaaaaagccgcggcgtacttcgcaaagctgtccgactga

SEQ ID NO: 389538 - DNA, 834 bp, Salmonella enterica
atggaaaagagtcttttagttattgtccgacataaacctgggcgtactcgtctattaatgcgggccttgcaatccattaatgaccagacgttcaaaaaaataaatatcatcattttctgcatggaggaagaattgaaatgtcacaatgtggatgatttttatctgaaagaactgtcaaatatatatagtgttatctacgacgaaaactgtatctttaatgctattaagatgtctgaatctaattatttatgctttatggatgatgacgattcctgggcccctgaatatgtgtcaaggctactcagtgttttggcgaatatacagtcaatgtattcatctgtaaatgcaatagcatgccatacaaataaagttgctgagattgcggaaaataatagaataattataaattcaacgcaaccatggaaccactatttaaatgctggccctgttagttttgatgttatttattacaggaattctattccactttcctcgtgtttattcgataaaaattctgttatcgatgtgattgaaagtcataaattatcctctcctgcatttttctggcctttttttattcattacctggcagaaaatgatgtttggatcttacctgaagcactggcattttatcatttcagagaaaatgatgactttgaatttggcaattataccgtaattaacaatgagttatttgatatagaatgcaaaattgcagaaaataaaatgatgagaagtattgatgactcatcattgctcaatgtgttactttcaaatattgctaacaatagtctttttcataaaatttcttatattgaaaataagattaaataa

SEQ ID NO: 389539 - DNA, 513 bp, Salmonella enterica
atgaagattaaactctcaatatataaagcaaaaagattcaatgatgatattgaaaaagttttgaatttggagagagtgagaaatccgattgagttcaacatagatgaggctagggtgtatttgtatgcaaaacaattcttagatcccaagcctcctgagtggacaactttatttacaagccaaaagccagaattggatcataatttcttcgggaaaaatagtagcactggtgcagtcttggttgttgaaatgaataactcaagatatctaattcctttcgggacagggcatcacttaattaatgataatagtattgtcaaaggttttggtcttaaaactacacttaattgtattgaacataacaaaattcgtagtttggataaaggcagccatatgtcattaaaatcttttgcttttattaaatcgaccagaattgaatcaagtatctcaacttctgcttcatctgcctcttttatattattaacccattcaaactcttcagggagaggctga

SEQ ID NO: 389540 - DNA, 192 bp, Salmonella enterica; identical to SEQ ID NO: 134334

SEQ ID NO: 389541 - DNA, 855 bp, Salmonella enterica
gtgaataagaccattaatctgctaaaattactgcccgtagtattattaagcgcatgtactacatcgtatcctccccaggatacaacatcggcacccgagttaccccatcgtaacgtactcgttcagcaacctgataactgtagcgttggctgtcctcaaggaggaagtcaacaaacaatctatcgccatgtctatacgctcaataataatagcgccacgaaatttgccaactgggttgcctatagcgtgacaaagaccagccaggcaagcggtcgcccgcggaactgggcgcaggaccccgatttaccgccctcggatacgttggccccttcggcctataaaaatgcccatacgctattaaaagtcgacaggggacaccaggcgccgttggcaggattgggcggcgtttcggactggccgtcgttaaattatttatcgaatattacgccgcagaaatccgccctgaaccagggagcatgggctgcactggaaaaccgggtgcgcgaacttgccaaacaggctgatgtatctgtagtgcacgtagtgaccggccccctttttgagcggcatatcgccacattgccagaagatgcgacggtagaaattcccagcgggtactggaaggttttattcaccggaacggcgccgtcaaaaagtgaaggaaattacgctgcgtttattatggatcagaatacaccccgttcggcgaatttttgcgactatcaggttaccgtggaggctatcgaacataaaacgaagccagtgctgacgctgtggtctgccttgcctgaagcggtagccagcgaggtgaaaacgacaaaggggagtctggcgcagaagttaggttgtcgatga

SEQ ID NO: 389542 - DNA, 1044 bp, Salmonella enterica; identical to SEQ ID NO: 376505

SEQ ID NO: 389543 - DNA, 291 bp, Salmonella enterica
  misc_feature (223)..(232): n is a, c, g, or t
atggtacggaaaatcatcaaacccgctcccgacttgtttatgacagttgggacaataaaccgcgttgacgtagccaccagaggggttttttctaaaggcagctcccatgtgctcgacaaactgctcttttgcccggtaagcctctatctgcttcgtaagttctatgtttttagcttccgcctcggcaagtttctgctcggcggcagcatgggctttttgaagnnnnnnnnnngtacgtcaatctgctcgccgatgaaagcgatacgttcgcgcagcacctcgttactttga

SEQ ID NO: 389544 - DNA, 336 bp, Salmonella enterica
atggctgaaaagcaggttaaagattacgaaaagttcgttgtgcgcttccctgacgggatgcgtgatgccatagccgagcgtgccaaagctaatggcaggtctatgaactcagaaatagttcagatactggaggatgcccttaaggcgcagattgttgcttgggataagccactctccccatcatcaagtgatgaggttgtcactatgtcgatgagtcaacttaacaagattgtgtcgcttgctgctgaagatactgcaaaaagtgtcgttgaaaaccttatagaaaagtatgaaatgatcccaaagaagagcagtaagcccaataataaggactaa

SEQ ID NO: 389545 - DNA, 789 bp, Salmonella enterica
atgcaacaatcttcatcaactgctgtaaatgtagcaccgttaaatgcggttgtcgatcccctcgattgccctgtaatcgtgtgggaaggagtgagggtcgtcacgactgatactcttgccaaaggatacggaacggatgagtccaatatccgtaaaaatcactctcgtaacaattcccgatttattgaggggatccatattttcactgttaaaggaggagagctgaagagtttgcgagtgactaatagtcacgcacaaatttcaaacaaagcgcgctctgtgacgctctggacagaaaaaggcgcggctcgcatgtcaaaaattgtcgatactgacgaggcgtggtctttctttgagcgcctggaggattcgtacttccgtccagccacggctgtcggcatcccacttacctacgaagcagctttagaagacctgctggcaaaggtgaaggaaaaccgggttatcaccgaacagcgtgaccgggcagtgaaagagaagctttggatctctgagaagcgggaagctactgctatggcgaccgcctctgcggagaaacgtaaggcgaatgctttggctgagaaattgggtgaatgcaaaaaacacgcgactattaaagcagtacagcgagtaactggtaagtcattcagccactggccgttgaagaaatggtgtgccgctaatggcatggagcctaaagacgtaccggatgcgacctacggtagtgtaaaatcatggcccgcagaggcatggaaggcagttaaccaaatcgacataaaggggatgttctga

SEQ ID NO: 389546 - DNA, 336 bp, Salmonella enterica
gtgaagaggcttttcttattatttgcggctgttgcttttaatgttggcgctgctacaacgtatacaaaagaacaattgaacaacatggacgcgactgggcagtatccagcgcaggagtcacctgtaacaaaaagcgtagaaaacgtttcgttcgatgaatgcaaagacagcgcgcgcgacattatgaatcagattgctggaaattatcccgcgaaagaggtagtagatacaggggtcttatacatcgtaaaaatctggactaacgatggcgtgattatggtctcttgctcagggccagataataagaaagtcgttacgcaatctgattataagtaa

SEQ ID NO: 389547 - DNA, 315 bp, Salmonella enterica
atgaaaagcatggatttaattgttgcgggtgcacttcttttagccggatgcgcccaagagcgtcctttgacatcttatgatgattcaggtctatgtatcttaaaggggcaggccatggggtatgggaatacagaaataatgcctaaaatccaggctgaatttgctcggcgtggtgagctgagtataagcaaggatgactgcgatacttatatccagacagggaaacaaagtgcacaagtcgatatgcagagtacgagagacattataaatcgctcacagcgatcacaggctataaatgccatacagggttattaa

SEQ ID NO: 389548 - DNA, 177 bp, Salmonella enterica
atgactttagaacaacgagttgagtcacttgagcttaatgtaaaagaactggaaagccgggtaagcaataaagatgagcaactttcccgacttgaacaaattctacgaaatcgaattgatgagtttagtgcctatattgatactactgttctaagcgctcgtgaaacttcgcgatag

SEQ ID NO: 389549 - DNA, 213 bp, Salmonella enterica
atgggaaaattttccatcacatctatcagagatattgactggcaatcagacccaggcaggccaggaaattgcaatgtaacggttggtcttaatacgccagtaggatttgtacaaatttcttttgatccaggtgaactggatatcagaaaatcaaccattgaggaactcgaaaaggtagctatcgcgaagtttcacgagcgcttagaacagtag

SEQ ID NO: 389550 - DNA, 555 bp, Salmonella enterica
atggctgaagtcagtttacacgatttatttgtttacgacgaaacatcaccaagtcatttgagatggaaaataactgccaatacatcaacagcaagagccggtagtgtggccgggaagattaagccatatggctcaaacaaatactggtccataagatataaaaataagcagtacaaagcacaccgagtagtctgggagcttgtcaccgggaatctcttaaagtctgttgacgtaatagaccatattgatgggaatggcttaaataattccataatgaatttgcgtgtggtcgacaaggctttaaatagcagaaatagccgaaggagaggagtgcctagctcagttgggcttccttccggcttatgcatgcacgctaacgggcttagcataagggccagagtgaatgatttagaagggaaaagaatatcaaagtctttctctataagaaaaaacggactggagaatgcgataaaacaagcagttttctggcgagatgaaagcatacgggcgctaaatgaattaggtgccggatataccgataggcacagtaaataa

SEQ ID NO: 389551 - DNA, 279 bp, Salmonella enterica
atgcaaaaacgacttagacaaagggatgttttcatccgtcgattaaaagaagcccgacagcgcttagacatttctcagactgctgtggggattgctgcggctgtagagccttctgttgcaagcacccgtttcaatcgctacgagaaaggtgttcatgggcctgatatggaaaccgttgcacggatagctgatgtgctgaatgttccccttccatggctgttcacttctgatgagaatcttgctgaactgattctcaacttcgctgcccatctctcctga

SEQ ID NO: 389552 - DNA, 885 bp, Salmonella enterica
atgtcattcagccattcttccctctccgcacacgtaaagtcacatctgacctttcttcctgaagaaattcgccagaaaatccttgaacatcttcgcagcgtcattcagtacgaacccgttattggcattatgggtaaatccggtgccggaaaaagcagcctgtgcaatgccatttttcagtcccgtgtctgcgccacgcatccgctgaacggctgcacccgtcaggctcatcgtcttacctttcagcccggtgaacgaagaatgacgctggtcgatctgcccggcactggcgaaacaccacagcatgatcaggaataccgggcactttacagtcagttactgcccgaactggatctgattatctggatcctgcgggctgatgaacgtgcgtatgctgccgacatcgccatgcatcagtttttactgaatgaaggtgccgatccctcgcgttttctgtttgttctcagccatgccgatcgcatccacccggctgaagaatggaacaaccagagcagcacgccatcccgtcagcaggaactctcactggcgacggtgacagcccgggtggcaaccctgttcccttcatcatttccggtactccccatagccgctcctgccggctggaatcttccggcatttgtgtctctgatgatccacgccctgccaccacaggcaaccagcgcggtttattcgcatatccggaatgaaaagcgcactgcgcaggatcagcaacacgcacagcaggcttttggtgacgccatcggccagagttttgacgctgccattgcccggttcagctttccggcctggatgctgcagcttctgcgcaaagcccgtgatcgcattatccgcctgctgatcacactgtgggatcgcctgttctga

SEQ ID NO: 389553 - DNA, 669 bp, Salmonella enterica
atggctaaaaacaaaggtatctgtcggaataaaaaatgcagcaatcctgtttcagaatttgatgaggcaaatgccctgaggttatgtgatgatcattatcagttatggaaacgaaataaagagaaccgtcgggtcaggaatatttgtcgtataatcagtaaatatgacaaaagtctggaccgggagatatttgacagagtaatagatgctgcaagaaatcaaacgggaaagagaattgttgaggacgcaaaaatattacatcaattgcgcaattcaaagcaagtaagaaaaagtcttcataatggagtactccggtcacgggagtggctcaatacacaggagttactgagaagaaaaaatatatctgttacaggtgactcatttaaatcttacataaaggatattgtcagattatattgctataagtttctctacagcagagaatatcttaatgaaaacgcatacaaaaaacaatatcagagagttattaaccccagagaatttaatgttccgatacttcaacttgaagttgcatggatcaataataattgccgttcaagtgattcaagctctgatattatcatccttcccaggatgataagaagaatggttgtatttaatgatacgaagataaataaacaattagaggaaatgttggggggggggtag

SEQ ID NO: 389554 - DNA, 471 bp, Salmonella enterica
atggtggaaatcgaaaatatcataagacctgaaatatttccgacatcaatttacccgcctttttcactttcatttatcgagagagaattgccactactgaatctggcgcactcacagtacaaaagagcaataagtaaaaaagtggcgaattcaattttttatactttgcgaaaaactcacgtggcattatggctgcatcttgaaatgtttgctcttgtggcattcatcaaactgtatacaggaaaagggtttgaattcatgaaaaacatgtgtgtatttatagattatgataaagggataataaaatccacgcatgaagaactgctgagtgaaattaagtgtaacattcagttgaatttaaaggtgaatcctgataattttcctgaattaatagaaatatacaattcatgctttagtaaaaatatattgttgtatgatgttcaggatgatggttttaaatggtgtttatga

SEQ ID NO: 389555 - DNA, 192 bp, Salmonella enterica; identical to SEQ ID NO: 19886

SEQ ID NO: 389556 - DNA, 216 bp, Salmonella enterica
atggtcacagttaaccttcattgctcctgttgccagtccgttcaggtttaccgtcacgggaagaacccaaaggacatgatcgatttcgctgccgtgactgtcatcgagtgcttcagctcacttaccgttacgaggcccgtaaaccgggagttaaagagcaaatcactgaaatggctttcaacggtgccggagttcgcgatactgcccgtacgctga

SEQ ID NO: 389557 - DNA, 567 bp, Salmonella enterica; identical to SEQ ID NO: 19643

SEQ ID NO: 389558 - DNA, 291 bp, Salmonella enterica
atgttcaaatacctctcttctggcaggaaagtcaggcgtatagatgattttctgcgctttctctgtgggtaccgccattttggtttgctgctcgtttgggataagtgcatagagagcgccaagtcgttgcgtcggtatctcgagtatatcgaaatccatgtggccattgacctcttcaagcgtcacgttaactacctgctcttttttgagcaccaacatcccaggttcgtcacagtaaatcgtatcgtgattattgctaatcgtcagtttaccgctccgaaagcaaactaa

SEQ ID NO: 389559 - DNA, 294 bp, Salmonella enterica
atgaacgtagccgagaaaattaaggcaatacgtaaagcagagggtttaactcaagtaaagttttgtgaaatcagcggactagcgctcagtacgttaaaaaattacgagggaggacatgcagagcccggcttgggggtggtgatgaaaatcacaaacactcctcagtttcagaaatacacactttggctaatgacagataaaacagccccgcaggctggtcagatagcaccggctttcgcacacattgggcaagaatcaacggaatcagaccactccgagaaacagactggttaa

SEQ ID NO: 389560 - DNA, 273 bp, Salmonella enterica
atggaaccaaacgattatttgttgcagtacccgctcgacgcggttcatgtagaaaagtttgctgagttattaggcaagcccaaaacggcggttgcagaaatggtgaaagctaacaagctaccggtaattgagcttcgggatccatgcaaaccgaatgctcgcgccggtgaaaagtgggttttcatcccggaatttaatcgcgcagttcgtgaggcgttctacaacagaccggtagaacagcgtgacgcgtggctgctttggatggggctttga

SEQ ID NO: 389561 - DNA, 225 bp, Salmonella enterica
atgcatacagtaacaggaaagcatcgcggtaacttctcattaatcctgcaacaggcgcgagccgaagcgcaggccgatgcggcgacgcgtttttcctctcatctggatagcttaatccgtcacatagctggcgctgagttgtcgcgcgttgagattgtcgagttgctcagtcaggaatccatcaagtttcataatatcggcctttctcgtgaggagactctttaa

SEQ ID NO: 389562 - DNA, 225 bp, Salmonella enterica
atgccggattatatggatcacattcaggagcgacagacggaatcactgacttgccagattaacgccgctcgggtgaagccgtgcggcgctgctgcattggtttgcgaagaatgtgacgcaccaatccctgccgcccgccgtgcagcatatccgtcggcgacacgctgtgtttactgtcaatcagcgcttgaatcaaaagctaaacactttcgggggcaggcatga

SEQ ID NO: 389563 - DNA, 276 bp, Salmonella enterica
atgagcattcgtatagcgattggcgagcgctatgtcgtcacaagtgaccgttttcagttcattttgcaagagaaaaagaccgccgaaacagggaggaatgccggtaaagagtggctggatgttgtcggttattaccccaaattaaaccagctcgtttccggtctgattcatcacgatattttgagcggcaacgctgtctcttttgaagtgttgagcgctcaggttgagctgctcggtcagcagtgtttacgggcttttgatgcaaatggccgttga

SEQ ID NO: 389564 - DNA, 2277 bp, Salmonella enterica
atggccgttgaaattcgggggcgttctgcccctacaccgccaccaccatttgcaaaaggcaccggcaaagagtttgccggtgtttactcatggaacgcgccgcgtgaggctattgggcgcgagagaccccttacacgtgacgagctgcgtcaggtgcaaggcgttttatctaaaattgaccgcttgccttactttttaagttctctgtttacctcgcgctatgaatatatcaggcgcaacaaaagccctgtgcatgggctgtatttcctcaagtcgacatttctgcgccggttgtggccgcgcattgagcgggttaatcaacataacgaaatgaatacagaggcgtcgctgctgtttcttgctgaaagtgagaattacgcgcgtttgccggggatgaacgataaagagctgaaaaaatttgcgtctcgtatcgcctcgcagcttttcatcatgtacgaggagttaagcgatgcatgggctgaggcgcacggtggcaaagaatcgctttttaccaatgaggctcaggcgcacctgtacggtcatgttgctggcgcagctcgtgcttttaatgttgccccgcttttctggaagaaatactgcaaaggccagataacaatccgacaggcattttccgccgtcgctcgcctgattaacgatgaatggtggactaaccaactcaagacgcagcgcatgcgctggcatgaagcactgctgattgctgcaggtgaggtgaataaagaccgctcgccgtatgccagtaaaaatgccatccgtgatgtgcatgcacgccgcctggcaaatcttgaatacctgaaatcctgcgagctggaaaacaaagttaccggcgaacgtatcgaccttatcagcaaagtgatggggagtatttccaatcctgaaattcgccgcatggagctgatgaacaccatcgcggggattgagcgttatgccgctgctgagggtgatgtcggtatgtttatcacgctgactgcaccgtcgaagtatcacccgacacgtcaggtcggaaagggtaaagataagactgtacagctcaatcatggctggaatgatgaggcttacaccccgaaggatgcacagcgttacctttgccgtatctggagcctgatgcgtacagctttcaaagataatgatttgcaggtttacggtatgcgtgttgtcgaaccgcaccacgacgggacgccgcactggcacatgatgctgttttgcaagcgccagcagcgcaaagaaatcaccgaaattatgcgtcgttatgctctcaaagaggatggcgacgagcgcggtgcagctcgcaaccgttttcaggctaaacacctgaacaaaggcggtgcggccgggtacatcgcgaaatacatcgccaaaaatatcgacggttatgcacttgatggcgagctcgataaagatacaggcaagccgctcaaagataccgccgccgctgttactgcatgggcgtcaacgtggcgaatacctcagtttaagccgattggcctgccgacgatgggcgcttaccgtgagctgcgcaagctgcctcgcggggtcagtattgctgacgagtttgacgagcgtgtcgaagctgcacgcgccgcggctgatggcggtgatttcgacctgtatatcaccgctcagggcggcgcaaatgtcccgcgcgacggccagaccgtcagggtcgcccgtagcgtcagtgatgaggttaacgactacgaagaagatatcgagagggtggtcggtatttatgcgcctcacctcggcgcgcgtcacgttcacattacccggtcatcagaatggcgaatcgttccaaaggttttggccgttgagcctttgaccttaaaaagcggcatcgccgcgcctcggagtcctgtcaataactgtggaaaactcaccggcggtgatattccaggtatgaccaatacaccgtctgagcataccgcagcggtgctaaatctcgtcgatgacggggttatcgcctgggatgaccccgaagtcgtgacggtgctcaggggcgcactaaaacacggcgcacaacagcaaaatcggcggcaaagaagcggtgaacttttaaaaccgcatgacgtcgccccatcaggcaggctgacaaaatccgagcgcgctcaaataccgcgcatacgtgtcgagttagcgcagctagggattacgctgcagcggtgggaacttcaggcgctggcccgaggagctactgttaggtttggagatttaagtttttcatatccagtgattgacgagtggggctgggctatagtttaa

SEQ ID NO: 389565 - DNA, 864 bp, Salmonella enterica
atggctaaaaaaatttcgaaatggtttcgcatcggcgtcgagggggacacctgcgacggtcgcgtcatcagtgcgaccgatattcaggaaatggccgacggctttgacccgcgcgtctacggctgtcgcattaacctcgagcatatccgcagcgttattcccgacagcccgttttgtcgctatggcgacgtcacggaagtgaaagcggaagtgatcgacgaagattcggcacttaacggcaagctggcgctgttcggcaaaattgccccgctcgacaacctgctcgcgatgctggcgaaaggccagaaggtttacacctcgatggaaattcgtcctaactttgccaacaccggcaaatgtcacctcatcgggctggcggtaaccgatgaccctgcgagcctcggtaccgaatacctgcaattctgctcccgcgcacagcaaaacccactggcagggaagaaagaccagccgggcgacctgttctcagtggcaactcttgccgagctggaattcgaagacctgcccgacaacctgctgagcaaaatcagcgacaccgtgaaaggcatcttcagccgtaaacagactgacgacgatgcgcgtttcggtgatgtacatgaagccgtgaccgccatcgccgaacgggtgcagattggcggcgaaagcgctgaggtgcgtttcagggccattgaaaccgaactcgccgacgtcaaaaaagcgctggccgaacaggccgatgccacctcgcagcaattcagcaccctgaccaccacgctggaaaataccgaaagcagatcacaggcgcgccgcaagttaagtaccggcggtgacggtgattcggcggtctccacgctgaccgactgctaa

SEQ ID NO: 389566 - DNA, 468 bp, Salmonella enterica
atgaatgactttaaaccctttgacgataagctcgcggggctgatagcggcgctgtcacctgctgcccgtcgcagaatggccgcagatatcgcgaagaccctgcgagcccgtcaacagcgccggattaaaacgcagaaagcaccgggcggcacaccttacgccgccagaaaacgccagccggtaaaagccaaaaaaggccgggttaagcgggaaatgttcgccaaactccgcaccagtcgttttatgaaagcctcagcggggaatgacgcggcggtcgtggaatttaccggcaaggtacaacggatggcgaatgtgcatcagtacggtctcaaagataagccagggcgaaacagtgcgccggtgcagtacgatgcccgaacgcttatcggatttgatcatgaatcaaaaaatatgattcatgacataattatggtttctttagctgaggcggctagatctattgattga

SEQ ID NO: 389567 - DNA, 1344 bp, Salmonella enterica
atggaaaataaaaaatatcaagtatttgtgagctctacatatgtcgatttaattgatgctcgcaaaaaaatcatagaaacggtccttagtttataccactttccagttggcatggagatgtttagtgctgatgactctgaacagtgggatataataaaggagactattgatgctagtgattattatgtgattatcattgggcataaatacgggtccgtttctaaagatggtattagctatactgaaatggaatataactatgctaaatcattaaatataccagtgttggcttttattagagggagggacgttttaacaaaaccacatgagcgagaaagtgaccctcaaaaagaaaagcaactaaatgcttttattgaaaaagctaaagctaacaaaatgtgtgatttttgggagacaattgatgagttagcgacgaaggttgctatcgccttaccaaaagtaatgcgacggaatccacgaacaggatgggtgcgcggtgaccaggtcgcatctaaagagattaccgccgagttggctgagctatctaatgagaatagaaaactaagggaaaaagtccgcgaatatgaaagccaattacatagcgatgcacctcaattagaactgagcatgattgataatgacttaactttgacggtggatgcggagtcgacttatcaagagtaccttccacaattatgcaaggaagcggtacctcttgagttgaaggacactatcaccactgatgagattgaatcatataactcttcactgccaactgataaagaggtggatttatataataaaaaaatgagattgcactgtaattacaaaaataatgcaattacagtaagtcccgttttaagaaataatgggaggacttttgcgtcaaatgtttatgttgagattgattttcctgaatttctaatagtgcttaaaggttctaatgaagacttctttataaaagagccgaaattaaaaatccctgagtccccaataagtaagcataaaaaaagactcagtgctttaatgtcactcgaaaattttaggatgggtatttttgatgagacatcgatagcaatagctaaacctcatttcgaagtgccagcaataattaatcgaatagctgatttaggaacagttaaccaagatgtgtgggttatgaaagaggaccataaaatcacgttgcgtgcgaaaaaagtgttacagagcttaactgttgagtatgaagaaatagtcatcattcccttaacgattggcactggagttattaattttaaaattatatgtgagcaattgaaggagcctgttgttttttctcgtcaggtcacagttaccgccagctag

SEQ ID NO: 389568 - DNA, 417 bp, Salmonella enterica
atgctcaacctcaaatcggcaattgcaaccgtcgccattcttctgtctatcagcgcccacgcccaaacgaataacgtaaaaactttgcaaaaacagctaaagttatggcaaccgattgaaataaaagaaagtaataatgtcgtgactgtcgttcttgacgcaaaccaagttacacctgaaatttatgatgcagtcgtaagctcaggaatttgtatggatgtttggacaaaagatgtaccggactcctacatgaaaacaactaaagaattgcacgtactgaataaacataaggcgtttggttatgtgctcgaacagcctctcgcaacttgtaacgagatgggtaaagaaccagatgacagagctaaagtgatgatgctctcaaaaactcatatgtttggaatgccaaagtcaaaataa

SEQ ID NO: 389569 - DNA, 1008 bp, Salmonella enterica
atgaaactctttctttttatcgtgatgttattgattttacctgaaacatacgcagcctgtacgggagaaattacttatcaggataatttaattattcgtgaggattttacgattaaccctaatcagtccgcaacttatagccataattttaacgatacaacttgttcagggacttataagataacgcgtatggatccttccgatatcatcgtgggattatacaatgatacagtaaaactgaagttaaaaatcgcctgggcagataataatactctcacaatgccgtttacaacgggctatacggtaacggttgaacccgcttcctctggggcgaatgtaaatatttctgccggtagtgggaacagtgtcctaatcaacggggtggtatcaataacaagcgcttcttctgcaactcagtttacggccagtttgcggtttttagggtgcctgctagcaggaagaggctggaatgcctgtgccgcagattataatagttatcttagaggtgcagggttatattcatttgatctgtttgtgtcctacgatcgcaagcagacaacctgcaaacctgaagatctgacgatcacgctaccgaatattgcgctttctgaattatataacacaggcaaggtcagcaacaaaaatgccgcggataatattcgactccagtgtgataatctttttggtaatgctaaacaaacatcgcgtaaaatgacggtttatctctccagcagtgatttaataccagatagctattctgtgttgcgtggtgctgtgaataatggcgtcggatttatactggagagcggtggaaaaacggtgaatatttcaaatacagcagagcaaggtaatgcttcaacgttatggaaagtggatcaagtaggcacgccgctcaacagtgatatgataacaatccctattatcgccagttattatgtttatgaccgagacaatataaagccaggcgatctaaaagcgactgcgctgatctatgtgaaatacgattaa

SEQ ID NO: 389570 - DNA, 1509 bp, Salmonella enterica
atgttaagagattttttaaaagaaaaagagattggtggtattcagtatgtgtttgtatacccaaacattccaaaaaataaagtagataatttttcaaaatatttttctaatggttttctatcgcaagaaaaagtctgtctctttcttgatgacactgtatttggtagtgggaaagaaggggttttatttacagagaactacttatgtcgaaaaagaatattcgaaccaagcttgtcgctgttaatttcagatataataagaatggaatgcaaaggacgttctttatatgttaatggggattgtttttataagtttagtactgttagcggaaaagacttgcagcacattgttaatgtgatgaatgaatggattggcgaagaaaaagcgcaaaaattacccggatctattaacaatgtaagtgacattgagatgaattgcgcacccagaaaagaagatagcgatgaacgccaacctattgtagctgatatgttgataaaattcttatcatcaaataatagttttattgttgagtggataagcaagaattttaaagaaagaattttagattatattgatagtgatgatgcgctaaataaattaacttttgttatttatggtaagatgccatctgctttgatgccttttgttaagccagaagatgttagaaactttattgcaaagaacaaagttgattttttaaatgccattggtttatgcggggagactgaaaatcgagcaaatgttatagctggtcaaactgcagcaattgatgtctgtaagtgcgatgataattactcagaagagaatgtagaaaacaaaaaaacaaaagaaataaaaaggggggagccggaaaattatgagttagcattttctttgttgcgtgatgatgactcctctgttaataacgtattacgttttattacaaaaatatctctaagacatatgtgggatgtttttaactcctctccattccctcctgtgtatagggtaaaatataagttagcatatgacttctataacgcaatatcacaaatgttgtgttcgatagacattgatgaaactgatgaagcctttgaattgcaaatggctgctagtttggctattttcccagtaatggtgttcgcttctgttgttcatataaaagataactatccaataactaatgatgttttagacttatttatagagaacgtagaggttacacttaatgcatgctgctgcttttataataatgatagcaatagagagttttttagacaaatgtcagtgtcttttgttgagaatgctttatcgcgtggaaatgttttgattaacgagtttattgatgctggggtcaagggaatatccattacgagagaagatctggatttattatgttcagaggcaatatatgcaactgatgagtggattgatgctatatctaaaatagaattatcagaaaataaaggttatatctacggatggagagaattgctgtgcacatcgccattagatgcatttattggataa

SEQ ID NO: 389571 - DNA, 1203 bp, Salmonella enterica
atgagcgttaaacagctctggcgctggcaaggcgttaacgataaaggtcaactggaacaagacgttgtatgggtggacaatcgtctggcgctgatcatcaccctgcaacatcagcgcattatgccgcttcgcatcaagcgcataggcgttaatgccgcactgtggaaagaagagcaaagcgctgaaattattcatcagttggccacgctcattcatgccgggctgacgctttctgaagggctggaactccttgcgaaacagcatccacaccgacaatggcaagcgctgttgcgcacgctggctcacgagcttgaacagggcgtccctttttccagcgcattagtctcctggccgcaggtatttccgccgctctaccagacgatgatccgcaccggagaactgaccggcaaactggccgaatgctgctttgaactggcccgtcagcaaaaagcgcaacggcagattacggttagcgtgaaaaaggcgctgcgctatcccgccattattctgacaatggccgctctggtcgttttcgccatgctgcactttgttctgccggaatttgccgccatttaccgtagcttcaataccccgctccctcttctgacgcgcggtattatcgcgatagcgcaatggggggcggcatggggttggctcatcttgttcctgacgatgctcattgctatcgctcaccgcagggtaaaacaaaagccgtcctggcaagcgcagcggcagcgtcttctgctacggcttcccgttatgggtcgcctgataagaggccagaaactagcgcaaatattcaccgtactggcattgacccaaagcgcaggcattccttttcttcagggactggaaagcgctatcgagagtctcggctgcccttactggtcacagcgtttaacgcaggtacatcaggagatcgccgcaggcaatccggtctggttggcgctaaaaaatacccaggaatttagtccgctatgcctgcaactggtcagaacgggcgaagcgtccggttcactcgatatcatgctgcataaccttgcccgtcaccacagtgaaactacgctggcgctggccgataatctggcgtcgctgttggaaccggcgttattgatcatcaccggcttaattatcggtacgctggtggtggcgatgtatttgccgatttttcatctgggagacgcgatgagcgggatgggataa

SEQ ID NO: 389572 - DNA, 363 bp, Salmonella enterica; identical to SEQ ID NO: 372979

SEQ ID NO: 389573 - DNA, 609 bp, Salmonella enterica
atgagggggagtatcgtgcgctctttaattagatatatagctcagttccctatggccagtatttttaaacaaatgctggggatttttattttatcactaattctagtgggtggcattgcatttctgcattataaatatggattcagtattaccttggagaaagatactactttctttaattattatgaatcaaaaataagaggatatcttttttcaggattcatttctgttgggtcttttttgttgtcattgcacacttttgtaatagtaaatcttaaagataaactttttgattcagaagcatataaaaataattatatagattttaaaagtcaacagattagaaattttactgatgatatgattaaggcatctgaatactatgctcctttgaatgttctatcagtcttccttaacgtttcgatatggttatcgattattacagctgttatacagtttacacttggtttttatgataactcatatacagctcttttttgtatgtaccttgctcttttgactgtcctcttcctcctgaattgcctgatacttatacgctgtaatattaaggtttggctgacacttgagcagaaaaataaacctaaataa

SEQ ID NO: 389574 - DNA, 825 bp, Salmonella enterica
atggggtttgagggaggggagcgatttttccttttccatgaagatgatgtatttttttcaggcgtcgtattatcctttaaggatcagcgaagagattgtagagcaagatttcaggatggacaatttactattcatacggctgatattcttgatgatgaaaaattgattgattttaatttttttgttgttaagaaaagttcgttgaaaggtctttacgagtactatcataactcttgcagtatacatgttttgtttgctttgttgcgtaataaattcaatgctttgaaagcagataaaatttccaattatattgctgataatttggctttgggtcgtgaaaaagctgaggctaagggtaaaaaggaatatgcaggaagactttctacatctattttaatagataatagagatatacctactgtactagctgaatatgctaaggttaagaaaatagaaatgttgttcgatgctcagcaattcgctgttgggcatgcagttgcactgcaaagaagttcgcgcgaagttaaagtatcttttaatataacggactctgaacaatctaatattgataggctaacccaaggcgtcgttgagcttgcaggtaatgtaggctttaaaaaaggaagcgttagtactgtagatagtgatgatatagagcgaactatttctattttaaattgtcctaaaagattaggagagtgtgagttcgaagatttagctcataggattgatggcttaacggtggaaaatttccatgaaaatgagatacttgtcgagctgaaaagggaaataaatgagggggagtatcgtgcgctctttaattag

SEQ ID NO: 389575 - DNA, 495 bp, Salmonella enterica
atgaaaaatgcgaagaaattaattgttgcaagtgtattgagcatgatgactgctagttgttatgctggctcaattgtggcaggctctgagcaaaaaagttcagtggatattagttttatttctcctcaactgttgagcgtaacgtttgctcaagtgccgaacttagcagctgggaggttcaagagtaatacggagattgcgactattgcagttagttcttcttccgctaaacaatttgcgatcgcagcggattttaatgcgttgaatctctataacggcgattcatggactatacgcggtaaaaatactggcaaaggaatcatagtgtacttctatggtgaggcagccaagccacaggggagtgtaagttacaatgggcatcagtggttcatatataatattaacgacaaacttggtattaaactggctggagaccagaatatcccagctgatgtcttcccaatgactgtaaacatagcggcatatcaagcttaa

SEQ ID NO: 389576 - DNA, 888 bp, Salmonella enterica
atggattggaatgttttttttagcacggtcagtcagacatctggtgctatcgttggtatattctctgcttttttgataacaaagatcatatctaatcaatctgacttcggcaggatgaaagaacgtgtttccttgcttataaataaatcaaaatctttaaagttagaagcggatgctagatattttgattggtataataagcgaaaacaagaacgtgaacttgaaaaactagaggggatgtttgatgaaactagtgattttctatctgcggatgagtattacgataaactgaatttctccccatttcaatcaagggaagacgttttgattgctattgctaatgctattgatagccgaaaaagcgagagggagaatagaccgttaaatttttatgaagcgatggcgagcaaaataagaatgcctttgactatattaggaagtgaggttcaggaagaatttgaacttattgaagcgcttaaggtgagaatacttgcaaatattaatgatattgattatgtttataatgagataacaaaggagaagtatggtaagaatctaataacaatctccattgttgcatcatcacttttattttctttaggtgtaatctatcctcttagttttatcccgaaaatttctggtgaagatattaatatttcttttatggcattttttgatgtgttattttcaattcgagggtttttcttatctttgattactgttgtttttttaagcctgatggctgtatttttatatataaacattaatttgcggtttgaaaagaaagtgattttagaacttaaggggtatatgcaaattaaggagtactctgaatattttgaaaatgaaagaaagaatgacttgtacttccagagtaaaggtggttga

SEQ ID NO: 389577 - DNA, 321 bp, Salmonella enterica
atgaaaaatccattaccgcctgtattacgcgccacgctctatcgtcgcgccgtggcctgtgcatggctgaccctgtgcgaacgccagcaccgctacccgcacctcaccctcgacgcgctggaaagcgccattgctgacgagctggagggcttctacctgcgccagcacggcgaggaaaaaggccgccagatagcctgtgccctgctggaagatttaatggaagccggaccactcaaagccgcgccgtcgctgtcttttctcgggctggccgtgatggatgagctttgcgcccgtcatatcaccgcaccagtactgcactga

SEQ ID NO: 389578 - DNA, 945 bp, Salmonella enterica
atggataatcttgataaactgatgaagatagattggaaaaaattggtgatcactgaccattcttggattcagagccaattagttgagagagcgccatcagtagagagaaaaataacctctcgattattcaccataccatttagtggcgtaatacaagaagccaattcattcattgaatcattagctgactcaatagaacattatgtttttgataaaacggcgattgatattatgcgacaaaagggacaaataccatttagaaaagcggctcaatttttcggtgataccaaccccataaaagatgggaaatatggtgaattgcttctttatattctttcggaagctatcttaaacacccctatggtttctcataaaataaaaactcttactaatttaaatgaccaagttaaaggtggtgatggtgttttttttggtaagtacagagataatatatccattcttattggcgaatcaaaaatatataaaaacttcagcggtgctttagatagtgcatttgattctttagaccgtttctcaaaaaattactcaagcggagctctttcccatgaattgtttattgcaagaaaaaacataagtaataatttcgactttgaaacaatggaattaatctaccaagctttcacccctggctctgaaatatattcagaatgtatcaaaactcaccctgtattattaatgtttgaagatagcgatataaaggaaatagagaacaacgctttaacaaaatcagaggctgaaaatttatttgaaaaatggttatataacaaaaaagaagaaataaaaattgcgatcaaggataaactaactaagtatccggatgttaagccatgtttcttagatttctttcttattcctatgagtgatgtcggtaattttaagaaatcattatatcgttctatccatggcattgattataagccgtaa

SEQ ID NO: 389579 - DNA, 2628 bp, Salmonella enterica
atgagtagcgggattgcagcagaggcattagatcacgttgatttcaagcgtgtttttgatgcgttgattaggaatttattcttaaaaaatagagacagtgacactgatgttactatagatatagaaagcattagaagagcaacatggctggcctcattaggttctttaggagatgaaagtcaaaaaagtattgcaaatgcatttggtagcctcctctatttatatgacccgagcaacgagctatatttgaaaacatgttatatcctgcaatctcgctcaggtaatcttgtatcatcaaagcacttaaatggtttgtataaagaaaatcaaaaattgcataattttggtacaactcttgactttgagcttgcaactcatagatttgaattaggtaaagattttgatggtaaaactatatttttcactcattatcagaaatcattatgggagaagttggaatctggtgtaaacattgcggtttctgcaccaacctcttccggaaaatcgtttataattaaaaaatttatatttgatagaattcaaaaaaacaaatcaaaatttttcgtgtatgtcgttccctccaaagcattaatcaatcaggtaagcaatgaactttctaaagagttaaaagaaagcgctttagtgctaactacgtacagggaattagaatgttttgataaaaatatagtttatgtgcttactccagaacgatgcatgagattactgcaagagcaaaaagattgttctcctttattagttttcttcgatgaaatacagaatattgaagatggtacacgaggaagcgtatatgagaatgtgatttatagaatgacaacaagctggaaggattcacaatttataatggctggcccttatatagagaatctccacctttccttgcgtgaggtaatagacatagatttacttgagcataaaacattagctacaccagtacttcaactcaagaccgtcctgacggtatttaaaaaatcacaaagtgttaagtataaaattatcacccccacgggaagcattgttcagggggattacgatataggcaaagctttatatagtaaactatcaaattcaagaggacaggcattaaaatacttaacctcagtatttcatgaagatgaacaaaatataattttttctcccaaaaaaaatatggcagagggatgggctctatccgtagcaaacgatgatcaagataatcataaggttattgacaatgaaaaaattaaaaatctttgttcatttttagaaagtgaaatccacccattatactcattagttagatgcattaaaaaaggagtggcttttcatcatggaggattattagatgtggccagactggaaatagaagatttattttcatctggtgtaattaaaaacctcgtttgcacttcaaccttgctacaaggggtgaatttacctgccgacagaattgttgttatctcacccaaaataggaaactacgaactctctcaatttgaatttttaaacctcataggtcgtgctggtcgcattaacacttctttgtatggtgagatattttgtatcgaacttagcgatgaggagtgggcagaagaacgcataaaaaatgaagataaaaaagaaattgtatcttctgttttaaataaattaaatggaaatattgaatcagttattgactatataggattgagtggcaaggaaatactcaacagcgatggtgattataaactctacccgttggttttatatttaagaagccaatatcttgtcgataaaaatcattactctaaaattataaaaaactcaaagttaaataagaaacaaactgaagacttagaaaataaactagacattttttctaaaaaaatatctatccctgaaaatttattggcaaggaatccttttgttgatcccttactattaagtgagttctttgaactaataaaatctcagggagttggtgaatggatgatttcaaaatatccaggaggcaagagagaggctaaatcactggatgatgaattcaaaaacatgaactactacaatcaatataaaagcattatctctcgtatgaatgagatatttaatattgaacaagaggtgaattataaagatgatggaaaatctcggcgttatagatatttcgtaagcatcaacaaattagcctatgactctcataattggatgaaaggccataactataagttcttcattgataacatggttaaagataagttaacaaaaaaaggtttagaaataacaaataaaaatattgataaaataaccaattttgttacagctcacatcaacactaatttgaactttatattagttaaatatttatcactttggactgatgttgttggacatttgatgtcagaagaagaaaaagaaaaaaacaaatttttcctgaacctaccttccatgctggaaatgggaagttatgatcctttagttcttgaaatcatgagttttggcattaatagatctacagcaattgaattaacaaaaaaacagagaataaaagaggggcaatcagttgaattatatttgagaaattacaatatagccaagttatcaagccttcataggaagtatttagaaaaagcaggatttggctcaattaaataa

SEQ ID NO: 389580 - DNA, 318 bp, Salmonella enterica
atgaaacgcgccccctttctctgtaagcagtctccggaccgcacgctcgaagtggtgattctggccggaagcctggcatgggagacctcacgcgtgcggcgaaaagatcccgaccgggaagatgatgttcccccggtggtactcggatcagatgaactggccgatctggacaacctgaccattatcaggcccgacacactctacgtccgggtactccgtgatctcctcccaatatcagagccatcattcatccagatgcagacttgtaaaacagattttgcaatatcgataccaacaactctgatcgtgttcatgtaa

SEQ ID NO: 389581 - DNA, 414 bp, Salmonella enterica
atgagtgaacgtgaaattcgctgttacagcggcgaggtgcgcgcagaaacgcacgacagcgagcccagccggatcatcgggtatggttcggtctttgacagtcgttctgaactgattttcggttcgtttcgcgaaatcatccggcccggtgcgtttgatgaagtgctgaatgacgatgtacgggcgttgttcaaccatgaccccaattttatcctgggtcgcagaagtgcgggcacgctggcactgacggttgatgagcggggctgcgttatgacatcaccgtgccagaaactcagacaatccgtgatctggtgttggcaccaatgcagcgcggggatatcaaccagtcctcttttgcatttcgcgtcgcccgcgacggagaggaatggtaccaggacgaggatggtgtggtga

SEQ ID NO: 389582 - DNA, 267 bp, Salmonella enterica
atgctcatttcccggacattacaaaaaccgccggcgcaggtattaagtgcgggtacattgaggttgtctgacacatcacaagtgacggagattcatccccaaggtctcttacttagcaatgaagacaactacctcctctctgtctggccggttcgatcgcagtctctcctcgttactggtgcagtcactgtgacggtgatgcagatgataatcaggacgattaatatcgctgcggttgacttatccggcaaaattatgctgccatga

SEQ ID NO: 389583 - DNA, 465 bp, Salmonella enterica
atgaatcgtataaccaccggcgtaatagtctcgttgctgatagtgatcgcagcgctggcatgggccactgaccactaccacggtaacgcggtgaagtacaaagagcagcgcgacaccgttactcataagctggcgctggcgaacgcgacaattactgacatgacgaagcgccagcgtgacgttgccgccctcgatgcaaaatacacgaaggaattagccgatgcgaaagctgagaatgatgctttgcagcgccgccttgctgctggtggtcgggtgcgcgtcaaaggacgttgtacagtgccagccagtaccacatccgccagccccggcggcgtgggcgatgctgccaccgtcgaactctctccaggtactggacaaaacgttttcgatatccgcgccggaattatcagcgaccaggaaaaactgaagtatttgcaggagtacatccggacgcagtgcagataa

SEQ ID NO: 389584 - DNA, 309 bp, Salmonella enterica
atgaaaaaccccacgttattgcagtacttccactggtattatcccgacggcggtaaactctggtctgagctggcggaacgtgctgatgggctgaatgatatcggtatcaatatggtctggctaccgcccgcctgtaaaggcgcctccggcggctattccgtaggctatgatacctacgacctgtttgacctcggcgaatttgaccaaaaaggaactatcgcgacaaagtacggcgataaacgccagttactgacggcgatagacgcgctcaaaaaaataatattgcggtgctgctcgacgtcgtcgtga

SEQ ID NO: 389585 - DNA, 483 bp, Salmonella enterica
atgaaactcaaccttattaccgtcagcctggctacgctcgttgccgctggcgcattcccggcccatgccggtcctcaggcgcatgtcgtgtgcggctatcaccacacgctgggcgatgacgcgattatgatgtttggtaaagcgaatcaggcgatgtggcatgacttttttggcaacacccacaccgacgcggtctctacctaccagacgttgcgcgcgcaaccagataccacctgtgataataaagccgacagctccgcttactgggcgccgtccatgaaattacctgatggtgaaatcgtaaatccggcctaccaaaagacctattatcaatccacaaatgtagcgcaatatccgctccatccattcccggccgggctggagttactggccggcgaccatcacggtaaccgcaatcacctttttatgtgccaacggcaaaggttacaccaacaaggtaggcgaaatatgcggcctgcgtaa

SEQ ID NO: 389586 - DNA, 753 bp, Salmonella enterica
atgaaaagtcgttatttactattttttctaccactgatcgtagctaaatatacattagcagcaacagtgcaactctttcattctcctgaagaatcagtgaacagtcagttctacttaccaccaccgccaggtaatgatgatccggctttccgctatgataaagaggcttattttaagggctatgcgataaagggttccccacgatggaaacaagctgctgaggatgcagatgtaagcgtggaaaatatagccagaatattctcgccagtagtgggtgctaaaattaatcccaaagatacgcctgaaacctggaatatgttacagaatcttctgaaaatgggcggctactacgctactgcttcggcaaaaaaatattatatgcgtactcgcccctttgtcttatttaatcattccacctgccgtcctgaagatgagaatactttgcgaaaagatggctcttacccttccgggcatactgcttatggtacacttctggcattagtattatcccaggccagaccggaacgcgcgcaggagctcgccagacgaggatgggagttcgggcaaagcagagtgatatgtggtgctcactggcaaagtgatgttgatgctggccgttatgtgggagcagtagagtttgcaagactgcaaacaatcccggcttttcagaagtcactggcaaaagtccgtcaggagctgaacgacaaaaataatttattgagtaaagaagatcaccccgaacttaattactga

SEQ ID NO: 389587 - DNA, 141 bp, Salmonella enterica
atgattatgaacaagagtcgaaagcagtatttaagaataaagaaaccgaaaaagaaaaataccaaaattggcgaagggattattgttgtcagtgatggaaaagttcatggcggagatattggattcacttgtcgggtttag

SEQ ID NO: 389588 - DNA, 1467 bp, Salmonella enterica
gtgccacgggcaaagatcggaagggttacgccagtaccagcgcagccgtttttccatttcaggcgcataacgctgaacccagcggtaaatcgtggagtgatcgacattcactccgcgttcagccagcatctcctgcagctcacggtaactgatgccgtatttgcagtaccagcgtacggcccacagaatgatgtcacgctgaaaatgccggcctttgaatgggttcatgtgcagctccatcagcaaaaggggatgataagtttatcaccaccgactatttgcaacagtgccgggcttgctacaagcggtgaatggcttatttcagcccgggcacttcagggcattggtgctgcaatgacagcacccaatgtactggcattaatatcaaccacttttcctggcgataaagaacgtcataaagccatgtccgtgtacggggctatgtcgggactgggactggttgcaggcctgctggcgggaggcatactgaccgatcttctgggctggcgctgggttttcttcgtgaatgtacctgtcggaatagtggtactggtcggcacaagaattctttcggaagccggattacatgagggtaagctgaacgcaggctcagcgttaagcagtgtttttggcatgaccttgctgatttttttcatcacacgtgccggcgaaatgggctggacagacagagtcgcgctcagcgctctggtgatgtcagtcgttcttctttcgctttttgttttcatccagttccgcagtgcgaacccgttattgccgttgcgactacttcatgatcgcagcagggcgggctcttacggggctgctctgttgctgggctttggcccgatggggactctgtttctgatgacgctgttcatgcaggatgtcctgctgtacagtccgctacagacaggattagcctggctaccttttgggctggccatcattgtcggcgcagcggtaaccaccaggatgcttgcctggttttctccccggctgttagccgcgctgggggggatgattgcctcaacgtttatgctatggctttcaatgatcgaacaaacaacccgctacagtacgcacatcatgcctgctatgtttggcgtagctttcggttttgtcatggccattctctccgttacgctaacggcggtgcaccgggttcccgcacgggattccggcattgcttctgcgctatttaatgcctcgcaacagaccggagtggcacttgggctggctatattgtcgaccctatccttcagtgtgacaaaccggcaactcccggatgccatggctgtattgagacagggccattcgtcaggcaacgggggtcttgtggatacggcaagtatggcgctgataaatggttacagcgttgcgctgatggcaggggctggtgctatgttactggctgcgctgtcggccagcatactcatccggtcaacatcatctgggaatacccggtaa

SEQ ID NO: 389589 - DNA, 1974 bp, Salmonella enterica
atgcaaaacgataatttattcgtaaaatttaaattactggcagtattatgcgcaccggtctcgttaacggtgaatgcgcaaaatattccccaacctgaactcggacatacgagcgcgccgctattgtcgcaggatggctatcagtttaaagacttgaatcgcgacggaaaacttaaccagtatgaagactggcgtttatcttctgcgcaacgggcggaagatttaacacggcggatgacgcttaaagagaaagcaggtctgatgatgcacggcacaggcccggtaagcggcaataattttggcaacggtgatgtttatgatttagatgcggctaaaaagatgattgttgatgcgcatattaacagcattcttacccgtcttggcggtaaagaaccccgtcgtcttgctgaacaaaataacaagttgcaggaaattgctgaaagtgcccgtctgggtattccggtgacggtcagcactgacccacgaaattcataccaggcgctggcggggatcagtaacccggcaggtaaattcagtcagtggcctgagccaatcgggattggtgcagccggtagcgaaagtcttgccagagcatttgcaagcaaaattggtcaggagtaccgcgcggtaggcatcaccgaggccctctcccctcaggccgatatagccaccgaaccgcgctgggcacgtatcagcggcacattcggtgaagatcctgagctggcaagaaagctggtccgggggtatatcactggcatgcaaaacggcactcagggactcaacccacaaggtgttgcggcggtggttaaacactgggtgggttatggtgccgccgaagacgggtgggatggacataatgcctatggcaaaaacgtggtattcaaaactaataatcttgaagagcatatcgttccgtttaaaggcgcatttgaatcgcaggttgccgccgttatgcctacttattctgttctcaaaggcgtcagcctgaacggtaaatccccggagcctgttgctgcgggctacagtcattttttgttaaccgatttactgaggggtcagtacaattttaaaggcgtcattatcagcgactggttaatcactaacgattgcgatgatgagtgtatacatggcgcgcccgggggcaaaaaacccgttacaggcggcatgccctggggcgttgagtcattaacccaggaacagcgtttcgttaaggccgttcaggcgggtatcgaccagtttggcggtgtcacggactcagatatcatcacaggggccgttgagaaggatcttatcagtgaaagccgtatcaaccagtcagctcagcgcattctattgcaaaaatttgaacttggcctgtttgagcagccctacgtaaatgccgcagatgctgaaaaaattgtgggacgcggggagacacagaaagaagctaaccaggcgcaaatgcagtccctggtgctgttacagaacaaaaatattcttccccttaagccgggaacccgggtctggctttatggtgccgacgcggcggaggcaaaaaaggccggtttagctgtggtcgatcgtcctgaagatgccgaggtcgcggtgatgcgcacgtccgccccgtttgaacaacctcattacaattacttttttggtcgacgtcatcatgaaggctcactggaatataaagcggacaacgacgttatgaagaccctgagcgatgtcgcccgcaaagtgccggtagtcatgacaatgtatatggaaagacccgctgtactgacaggcgtaaccgataaaacccaggcgtttattgctaatttcggtctgagtgacgaggtgctgttttcacgactgatttcagatgcgtcttattcgggccgcctgccattcgcattgcccgcttctatggatgccgtgcttaaacaggatccttccgtaccaggtgatttggaagcccctctgtacgcgttaggtttcggactctctcgctga

SEQ ID NO: 389590 - DNA, 1320 bp, Salmonella enterica
gtgaaaggtctcaaaatcgttgttattggtgcgggttcaagttacacgccggaactgatggaaggcatcatcaaacgtcagcatgaatttccggtgcgtgagctgtggctggtcgacattgaggagggccgggagaaaatggccattatcgccggtctgaccagacgtatgctggaaaaaaatggcctggacattccggtttatgaaacgctgaatcgtcaggaggccctgaaggatgcagattttgtctgttcccagttccgtgcgggttgtctggaggcgcgtataagtgacgaacgcatttcactcaaatacaatatgattggccaggaaactaacggactgggcggattcgctaacgcgtgccggacaatccctgtcgcgctcgagattgcaacggaaatggaacagctttgccccaacggctggctgctcaacttcaccaatccctcaggtatggtcaccgaagccattcttaaacacagcaaagtgcgcacggttgggttgtgcaacgtgccggtgatcatgcagaaaggaattgcgagtctgctcaatgtcagcgacgttaatgacttcattcttcaggtggccgggctcaatcattttattttcgcgcgccatatctggcatgaaggtcgcgataagctttcggatgttatccggtgtatttctgaaggcaacgacccgcttatcccgcgcaatattcccccttttaaatggccagcgggtttgctggaaaatctggccatgatcccctgtccttatcttcgctattactatatgagcgacgatatgtaccgccaggaactgggcgaggcgcaaggcgaaggtacccgtggtgaagtggtgaaagcactggaaaaacagcttttcgatatctaccggaaccccgaactcgctgaaaagccgaaggcgctggaaggacgtgggggccagtattattcagatgcagcatgcgaattaatgagcgctatctataacgataagcgtatcatcatgcacgttaacacgcgtaacaacggcgccatagcaggcttaccggataattgtgccgttgaagtaagctctctcatcacccgctctggccctgttccgcttaacgtggaaccttttccggatgatacgttgcgcctgattcagctgatgaagagttttgaagaactgacaattgaagcagcaatcaccggcgatcaccatacagcatggcgcgccctggtcatcaatccgttaattaacagcggcaatgtgcttgacaaggcactggctgaggtcatcgaacataacaaagcgctgatgcctgcatttcataaaaacgcctga

SEQ ID NO: 389591 - DNA, 918 bp, Salmonella enterica
atggttgctcaggaaaacatgctggcgctattgcgtacgtttgagattgccgcatttcacctcagctttacccgggctgcaaaaacactcagtcttacccagggggctgtcagccagcgtatacgacatcttgaaactctgctggggttcagattatttatccgtctgacccgtaagctgcagcttaccgatgagggacagcgcctgctgaatgtgctgtcattatcattgaaacgcatccatgacgaaattgaagatatccgtgttcagggattgcgtggcaaactttctgtgggacttcctcctacgtttgcgttcctgtggctggttccgcgtttatctgaattcagggcgctgtggcccgggttgaatattaattttcgggtcagggccggactggtggatttcaatctggaacgcgtggatgttgccatttactacagtaatctgcggtatccggacctctattgcgaacgcctggctgacgaaacgctggttcctgtctgttcgcctgagtcagaaaaaagaattcagacgagcaatggctggctggctgatattccttttatacatgcttccgaatctgttgattctcaggacgtcttttcagagtggcgcgaatggtgccagcgaacaaaccggcctttgccggtggaagaaaacttcatgagcttcaataactgccagatggcgattgaggcagcggtcagcggatgcggagtcgcgatgggaagaaagcggttggtcaaaaagtacgttgaggcaggaagccttgtgatgccttttgaacaggaaatccccgccgggcgaggatatgatctcattatgccccgcgaaaaccttaaccgtccaggtattgtggcgttcagccagtgggtcaaagcgatcctgagtgaagagaaaaccttctgccggtga

SEQ ID NO: 389592 - DNA, 390 bp, Salmonella enterica
atgaacctcctgatggctccgactcaacctaaaaacaggcaactgaaagccgtcgcgcttctggtcgttgcctgctttgtcatgttgatttgcctgacacaacgggccagtgttttacatcacatgcagagcagggtcgcgacactcaacctggctgccgaaaacaacgctcaggaacgtatgcccttagcgttatcaccctgtgaactcagctctcactcgctactggcctcacagcctcttcattttgatacgcttcttcttttacccggtctgctggttttcgttttagcggtgctgataaaaatcagtgtcctgccgacaccggtcattctttttcgtcctcccttactccgaatacaccttaaaaactgcgtttttcgtgaatga

SEQ ID NO: 389593 - DNA, 2019 bp, Salmonella enterica
atgaaaacgtttttcaggagcctgtggttcctgttattcagtctgtctgcggcctcggctgcggtaccgggctggtcgctgaaacctggcaattcccatgctcaggttcatgtctataacgatgagcccgcagcaggcaaggtccgcctgctgcttgatgtgaagcccgatgaagggtggaaaacctactggagaacgcccggtgacggcggatttcggccagtcattgaatgggactcacaggctgaaacgcagtggtactggccgcggcccgtccggtttgattctgccggcttcagctcagtgggctatgatcggcaggtcgtctttcccctggagattctggcgggggatgtacagcggctacgcggaaagctgacgctttccctgtgcagtaacctttgtgtggtcaatactttcccgctggatattgatctctcggccggcccgtcagcgcattttgctgatgcatgggacaccgcgatgagcaacgttcccccgcaacgcggcaatatggtcgttaaatctgtcaccactgacggcgacacgctggcagtaaaagtgacgtcgccagacggctggtcactgccagatgtgtttcctgataacccgccaggggcaagtctgtcgccgccgcggacagaaactgtcggtgatacattgacagcgcggtttagcgtcagggatgagcagggaaatcagctggatgcctcgcgtttacaacaactctcctgggttgtcagtgatggcgtacacagccagcaattcagtgccgacatcagtcgctctacaacgttatggcagtttatggcgctggcgttagcgggcggcctgatcctcaatctgatgccctgcgtccttccggtgcttggaataaagctggcttcgctgatgacgctggcagaaagtaaccgccgtcagacgcggctacgttttctggcaacagcggccgggatcattttctcgtttctggtgctggcggcgttcatgaccggactgcggttatccggagcctggatagggtggggcttccagttccagaatccctggttcatcgccatgatggttgtcgtgacatggattttttgtttcagcctggcgggcctgcttgaaatccgcctgccttctggcgtaaccacgcgtctggctacggcaggcgggaacggcatcggagggagttttcttgaaggggtttttgcgaccctgctcgctaccccctgtactgctcccttcctcggcactgccgtgacatacgcactggcggcaccgttgtaccagctctggctcattttcctgatgctcggggcagggatgagcctgccgtggctggctatcagcattatgcccggtgtggcgcgctggctgcctaaaccggggccatggatggggaaactgcgcctggtgctggttctccttatgctgggctcctgtgtctggctgatgtcgctgctggtaaaggaatggggggcgcgctatgtgctgattggcggtggcgtcatggtggcatttttcctttaccggtgcgcggaggcgatgccgaaacacaaagaaaatctgcgcagtctggtgtttggcgtgctgtttggggcggggctgtatgcttttctggctccccaaccgcaggggcagactggctcaccgcttaactggcaaccgctcactgagacagcgctcactaaggctctggatgccaataaacgcgtactggttgatatcaccgccgactggtgtctgaactgtcgggtcaacgaagtgctggttctgcatcgtccggatgtggtggctgcgctaaaccgcgacgacgtggtgctgttacagggcaactggagtaagccttctgtggaaatcgagcagtttctgagccgctacggtgccagtggcattccctttaacgccatctttggcccttcattaccgcagggccatgtcctgccgtcccttctcagcaaagagacattactgactgttctggcaacggcagataagacaacgccatctgattttattgaggaaaaataa

SEQ ID NO: 389594 - DNA, 756 bp, Salmonella enterica
atgaaaacgatcctgtcacttatgattctggccctcagtgccgtagcgcacgcacagagtgctgaattacccgaacctgttaaacaaatggaaaaacagggcattgaaatcattaaaccgttcagcgcacccggaggaatggaaggatggttaggtaaatatcaggacatgggggtcacgctttacctcaccccggataagaaacaggttatttcaggctatatgtacgatgcgcagggaaataatctgagtgagaaaatcatcaatgatgaaatttacattccggccgggcgtgaaatgtggaaacaactcagcgcagcgccggggattgctgaaggcagcgcggacgcaaaatgccaggttgtcgtttttgccgatcctttctgtccttactgcaataaattctggcatcaggctcagcctgctctcaaagataaacgtatcagtactaaaacgttgctggttggcgtgatccgccccgacagcgggcagtatgcggcagcgatactttcggaccgggacccggctaaagtctggtatgacctggagagttccgacggtaaaattaaacctgagctgaaaagtaatacaccaccggccgtttttaagcagatccagtggaatcagcaattgatgcagcagacaggcgccagcgggacgcctgctatttattacctgaataagtcgcatgttttacaacaaattatcggcttacctgacgccaggcaaatggctgatttggttgcctgtaaataa

SEQ ID NO: 389595 - DNA, 972 bp, Salmonella enterica
gtgtctgcggttcgtatcgtcgtactggcttttgaaggagtcagtctgtttcagctttcagttccggccgttgccttcggcgtcgttaacaaacctgcaggtttcccggcttatgatgtgcagtattgtgcccagtatccgggacttatcattagcgatcagggactgcctgtcgcgatatccctgggtctggaggcgatgcaggacgcagatataattgtggtgccagcctggaaagatcctgaagaagatgtgcctgaggctatcactgaggcgttaaaagccgcagatgcccgggggaaactaatcgtcgggttttgtctgggcgcgtttgttctcggtgcagccggattgcttgccggacgggaagcgacgacccactgggttgcccgtgatgttttcgcgcgccgttttcccgacacaaagtttcgtcccgatgtgctgtatgtgacagatggcaatatcattacatctgcaggcaccgttgcggcatttgattgctgccttgagatgatccgccagcagcacggttccgacatggccaaccgcattgcccggcaactcgtcacaccaccgcaccggcagggcgggcaggcgcagtatattgaacaaccggtcccgcaattatcatgcgtcgggcgactggttgaagtgcttgaatgggccagagaacatctgtccgaacctatcacgctcgacacgctggcaggcgttgccaaaatgagccgccgcacatttacccgacgtttccgagacacgaccggcacgaccgttacgaaatggttaaatgctgaacgggttgcgcgcgcccaacaactcctggaaataaccagtcttccggtggaatgcattgcttcagaagtcggatttggtaccccgatgtcattacggctgcagttcacagcccacctgggcacctcgccttcagaataccggcgcaccttttgtcagatgcgtaacgcccggacctga

SEQ ID NO: 389596 - DNA, 1092 bp, Salmonella enterica
gtgaatcagttcatttttggtacccgcacgggtggggctccggttccgctttctttgctggacttcgcgatggcgggtaaaggggtgacagcccaagaggcgctcacgggcagcatcaggctggctcgtctggccgacaggcgtggtttctcccgctactggcttgctgagcaccacgccatgcccggtgtaaccaccccttcaccgccgctgttgctggcgcgattaaccggggaaacgacccatatccggcttggcgctggcggtatgatgttgcctaactttccgccgctggtggtggccgaacagtttggtttactggcctcccttgctccggggcgtattgatttaggcgtcgggcgcgcaccgggtaccgatatggctacggcatcggcgttgcggcgcggtaatctcggcgcagacagtttcccgaaacaactcgatgaattactgcacttcctgaagggagattttccgaaaagccatccctggcataaggcaggtgtatacgccgttcccggcccgttgcaggacgaggaaaacgcagtacctggcgcgtaccagcgtcctcccgtctggctgctgggttcttccgactattcagcgcgtcttgcggcgcaaatggggtttcctttcgcttttgctgcacatcttgccgatcagaatgttgagatggcaattgatctttaccgacagaacttccgtccttccgctgtactggaccgcccgtatgttatcgccagttttggagtgatggcagcggatgacgggcgtgaagcccggcgtcaggcctgggcctattcccacgcaatgatgcgcatgagcaccggccgttcttttatcgtgccaacgccgcaggaagcagaaaactatgagtattcaccagcagagttgcggctgattgaaatgtggaatgccaaaatcatgagcggcacaggtaatcaggtggtggaccaactggcagtctggcaacagcgtattaatgctgacgaaattatgttgctgaatctggggcactctcaggaggctatttatcgctcaacggaacttattgctgatgcctatgacatgcccgccaacattaatgaataa

SEQ ID NO: 389597 - DNA, 876 bp, Salmonella enterica
atgacagcgcataatgcggaatattacgatcagatcgccacgatatatcacaaattacagggtgcggatgccatcctcgttggtggcgcttcaggtatgtcaacagctaatcagcatgacttttacggttacagtaaatattttcgcgataactttagtgagtttcagcgtaattatggtatccggaatctctgtgacgcgctttattatcgttatcccagcagtgaggaacgctgggcctatctggctaagcacggcacgttaatgtttgatgagccacccggccagacctatatcgatttacatactctgattaaggataaaaattattttattatcacgaccaatcaggatatgcagttttcaaagctctttcctgatgagaagctttgttatccgcagggcacctctcactggctccagtgcggacagccctgtcatgatggggtctatccatcagaaccggtggtgcgcaaaatcgcggccagtataaacgacacgcgggtccccaccgcgctgttaccaagatgtccacgctgtggcgctgaaatggaaccctggttccgttccccggtttttctggagggcagcttctgggagcattacatggacaggtatcaggattttatcaaacaaaactcccataaaaaaatcgtcttacttgagctgggcgtgggaccgatgacgccgaatattattaagcatcccttttcaatcgccgcttatcactgggcgaatgcttttctggtgcggataaataaaggtgaaccgccgacgcacgatctcctgaaagagaaaaccatcacgcttgattgtgatatcgcacaagtgctgagcgacctggtgtcatttgaaaaaacgctgacggctgcttaa

SEQ ID NO: 389598 - DNA, 849 bp, Salmonella enterica
atggatcagctattatatcatgcactgacacgtattcaggaagcggatgccgttatcattggcgcaagcaatggtttttcgatagccagcgggatccatttattcgccagtgacagcgctttctggcaccattttggcgatttcggtaagcgccacggttttgccagtatcattcaggggtgctttcatcattatacctgtgaggcagagtactgggcgttttacagccgtctgtttgattacttcattaatgtcagggcgccgggtgaggtgatggagaacctcctggcgctcgttaaccacaaaaagttctttgtactcacctcgaacattgatggtcattttgtcaaagcggggctggaacaggagcatttatttgaaatcgaaggcagtggcctgaatctccaatgtgctaatgcctgtcacgatcgtttgtattccggagcagaacagctcagcgcgatggcgcgtgagcaacaggacggcagggttccggacgcgttaatcccgtgttgccctgtgtgtggtgggaagatgcgtgtgcatgtggaagtggacagcggatttcttaaaggcatggcttggaatgaaagtttccggtcctaccgacgctttcttgcaaagggacaggaaagccgcactgtttttatggagttgggtgtgggtgccaggaaccagttaatcaaggcaccctttatgcaaaatgtatatcagaaccctgaatccagctatattacgttcaataaaggcacagagctttttattccggctgaaattgccgcccggtctgtcggcattgacggagatataggccataacctggccatgctcgctctactgagttcataa

SEQ ID NO: 389599 - DNA, 570 bp, Salmonella enterica
atgctgactgaagacatcctgaaaaataaaatctgtttgcctgttgcccatcgcattttacggggggcccattttatcacgtcggatatccgtttcggcctacccgacagtcactggcatggcgtcgatcataccctccgggtgctgatcttcacgctagtacttggccacagaaaaggactcagaccggatgaactggaaacattatcgctggctgccgcttttcatgatacctgccgacaggatgaatggaccgatcccggacacggtgaacgtgcagcatattactatcaacgtttttgtgaagaaaagggcgcggagcctgacgtcatggcacgttttctgatgcattaccatgacagggatgattccatcggtctggcccgcatcgcagcactccacaggccaggcgaacgtgccgtactgctgtatcagatttttaaagatgctgatgcgctggatcggtttcggcttgcgcctgatgctctggacataagccagttaagaaccagggaagcactggaattaattcctttttctcaacaacttctgaaaacgatgacgacgtga

SEQ ID NO: 389600 - DNA, 660 bp, Salmonella enterica
ttggtacttaacagggaaagcctgaagaacggttcattccttgaagcattcaaagaaatgccgggcatagaatggtggtcccgcgaacgtattgacctgtccatgtacgagacgctggaagggcatactgaaggcgatcccctgtggatatttgcctatggctcactaatatataacccactttttgacgctcaggaacgcgttcatgccacgctggatggctggcatcgcagcttctgtatccggctcgttattgctcgtggcagcgttgattttcccgggcggatgctggcgctggagcctggcggcagttgcgaaggtattgcgctacgcctaggtttagaggaacctgaagaagagttgcgtctcatctgggtaagggaaatggtgagcggggggtaccgaccttcatggacaacaatcaggctggctgacgggcgtatcgttcgcgctattttttttgctgcagatccagacagtcagctctatgagaaagaaacggcacctgacgtgataacgcctctcattgcccgagcgacgggagatctgggcagtaatcaggactatgtgctcaatctggacgcagcgttacgtcagcatcatattgctgatgccgggattgacgagctggcccgtcgtcttcgtttggaaatcctttaa

SEQ ID NO: 389601 - DNA, 552 bp, Salmonella enterica
atgatgaaacaacgcggcttaatcgtaatcgatttgcaaaacgaatatctgcctaccggtaaattacctcttaccggcatagaggctgctgctcataacgcagcgcgagctatcgctgacgcccgctcaaaaaatattcccgttttccatattcgccatgagtttgcgaataacgaagcgccggtttttattcccggctctgacggcgtggaaattcaggatactgtcaccccggcggcaggcgaagcggtcattgtgaagaacttcatcaactcgtttcgcgaaaccgacctgaaagcgcaactggatgcaaagggtgtcgaagaagtcattatcgtgggagcgatgagccacatgtgtgttgatgcctgcgtgagagcggcagcggatatgggctatccggtcaccgttctgcatgatgcctgcgccacgcttgacctgacatttggtggcgtcaacgtaccggcagcacaggttcatgctgccatgatggctgcgtttgaattcggctacgggaaagtccagtcaacggcagactatctttctgcataa

SEQ ID NO: 389602 - DNA, 981 bp, Salmonella enterica
atgctggaaataggaatttttatttatccgggtgttcagcaggccgcagtgcttggactggacgatttattctgcgttgcgaatacgttttctaagaaatatcagcagaataacgacaggttgataagggtgtcccactggcagcaaggctctctccgggaagacccggtacgcatttttgataccgtaccggatgccagcccggcacctttatcagcattaattattccacccacgctcagagagcctgcagaggtagacgcaacgccacaactggcgcaatggttaaccgggttgcgcgctcagggcgtcattctgggctcagtgtgcgccggggcgttcgtgctggcctcaacgggattaatgaatggccgtaaaatgaccacccactgggcctacgctgatttgctgagccagcggtttcctgaaatacaggtcgatgtaaatcaactcattattgatgacggagatatcatctccgccgggggactgatgtcctggaccgatcttggtctgcggttagttcatcgtttgttgggtccgactgtcatgatcgatactgcgcgaatgttgcttgtcgacccaccaggacgtgagcagcgctattacagcgtgttttcgccgcgtctgacgcacggcgatgcatcagtcctgaaagtgcagcactggcttcaggcaacacaggccagagatgtcacgctttcggatctggcaacacactcgggcctggaagaacgcactttcctgcgccgctttcaaaaagccaccggcatgaccagcacggaatattgtcagcatctgcgggtaggacgggcgcaggagctcttgcagttcagtaatgactcctttgatcgcattgcctgggaagtgggatacagcgatccgggtgcgctgcgtaaaatttttacccgtattgtgggcctgacacctggcgagtatcgtcgtcgcttcagcgcaagccacgcaacggaagacgcctga

SEQ ID NO: 389603 - DNA, 438 bp, Salmonella enterica
atgactacactgcaaatgaagtggaacggtttaacaaagggatcgggaacgattgaagctggaaaaatgaatgttgccgttgccattcctgaacattttggtggtacaggcgaaggcgccaaccccaaagagttgctggcggcatctgcagcctcctgctacttaatgacgcttgcggccatgttgcagggacataagattccggccaccgggattaccatgtcgacagaattaaccggtgataaaccatcaaatatgcatatcgtacacaccgtacaggttttactaaaggacgatgcacaacccgaagatcagcagggggcacaggacttgatccataacgctgacagatcctgcatgattggtaatttgcttaaagaaacgggtgtgaagattacgattgagggtaatgtcaacagtacggcagccctgcactga

SEQ ID NO: 389604 - DNA, 297 bp, Salmonella enterica
atgaaaaagattgaactgacaccgaaagccgaggaggatctggaggctatctggaactacagtttccgggagtttggtctgataaaggctgacgattacatcgggcgaatttctgcggtgtttgaagtgctggccacacatgacgtgggcacgcaccgggctgaattaggcgataatatttacgcattgccggtggaacaacatgtgatttttttcgctccgtcgcattccaccataaccgtgatccgtattcttaatcagtcacaggactccttacggcatttacagtggagatag

SEQ ID NO: 389605 - DNA, 261 bp, Salmonella enterica
atggcccgtacgatgacagtagacgtaggtgaagaactgcgtgaatttattgattccctggtcagggctggagattaccgcacccagagtgaagtcatgcgtgatgcgctgcgtttgctgcgtgagaaacaggctgaatcccggctgcaggcactgagggacctgctggccgaaggtgtaagtagtggtgatactgcgccctggaataaggatgcgtttctcaaaaaagtcagagcccgggccgtcaatgaaaaagattga

SEQ ID NO: 389606 - DNA, 1419 bp, Salmonella enterica
atgattgaaacgcttttaaagatacatactgactctgaaggagtggattttaaaagaatctggggggaaggtatttttgtttttgattctaatgtccttcttgacctttacagactgccagaatcagccactaaagacttaattggagttttaagtaataaggggttcaataagaaaatatggattggatttcaagtgttacttgagtttttgagtaaccgacacgaggctataagtgatcaaaaaaataaattcaccacagtcaagaaactactcaacgaatcaatcgaacagtatgacttaatattcgaaaacctgataaaggaaatgtctaatttaaaactcaagcaacgtcactccttaatagatcctgacaaattccttacatcaggaaatattgaaaatggaaagcaattccttgagttattcattgaagacttgttaaatttagaaaacaaacaatcagatgtgaatgatgaggacaaaattaaaaaatcggtccttgagatgtttaatggtaaagtaggagtaggcttcactaaagaagagcttgagaaaatttataaagagggggaggaacgatataaaaacaacacgccgccaggatataaggacgttaaaaaaacaggttcgtatcatgtagaagatagggagtttgttagaaaattcggagatttaatattatggcaagaaataataaagatggctgcagagaaaaaagcaccttatgtggtgctgataacaggtgatgttaaagaggattggtggatagaaaaaagaggtaaaaagcttggtcctcgcaaagaacttttaaatgagatctactcaaaagttcccgagcttaaaacattttacatgtatgatacatcaacctttttaaagcacgcaaaatctgaactttctgtgaacatcagtgacacatctattactcagacgaaagatttgattgagagatctagaaaaaatagatttgcgcttgagggtagagttacattaattcacgatttgattaacgatgttgctctaagcataaatggcattagagttggaattggtagttctgttaaatcgttacctccaataaatatagattgccagcacttttattcaagctgctttgagattttacgaaatgcacaacatcatggcataaataactatgtaggtgtccaagctaaaaaactcgaaaactatatagtacttaggttcaaaaacaaaattcctactaatcactcgagcagcgaagcaatcaacatacttgaatctgcccataatggattttctgaacgaggttcaggaatcgatatgataaaaaaaatgatgcaccaatatggaattgatactcatatagtacaagaacaaaaaaatttcaccatagaattatacatacctaaatcattttttttatcaatggagtga

SEQ ID NO: 389607 - DNA, 1089 bp, Salmonella enterica
gtgctgagccagctgaccctgcgtttcccgaaaaaactgatcgagcggctcaagaaccgcgccgccaccgaaaacacctccgtgaacgccctcgccgaacgactgatggaaagcagcctgcagggcagtgccgccggtgaggaatacctgcgcctcgttacggatccggatgaagccgtgcgccagctgtaccgacagctgatcctcggtcagaccttcggggctgccgccccgtcccgggacaccctgcagttcatggtggagctggcgcaccaggcctaccggcggggccagggacaactggtcagtatgtcgcggctgcgtgtactgctggacatgacctttgaactgctggcctggcaggtggaaaacggtcagccggtggatgccccgtatctgaagggtattttcggcatgaccggcgaggactggcgcgcggaaagtgagcgatttatggcggggctcacgccggctgtcacccaggattatgccgaacacctgctccgtccgctggccagccgggcctttgatttgtatgcgctgcctgatgaggctatcgcagccatctttacccgcagccggctgaaggctgtctttccgctgtgcatgtatgcccgggactggtctttcagtgatctgcgacggttcactgatcaggttcgcccggtggtagccgctgcgcgcgaaaccctgcaggccggtacgctgcgctttgaaatacgcatcagtggacaggagccggacagccgccccggagagtggtatgaaatgccgcgtctgtatctgctggtaagcggtcaggagtttgtgatgcccttcggctgggcacagttcagtgaattgctgcgcaccctgtccgtttaccaccatgacccggcagtgctgacgcagggattcgacggcaacagtgtggtctttgcaacccgggtgacggccagtcaggatgtcatgctcggtctggacgccctgcgggtgtatctcccggaggcgggatttgctgcgctgatcggtagcctcgtcactcgctgtgagcacgggcagctgtcgcagacgctggagagtctgcgctgtctttacggagatctgtaa

SEQ ID NO: 389608 - DNA, 1827 bp, Salmonella enterica
atgacgtccgcattcattaatgaagaagccgtattaaggattggggaagtctgtgaagtttccggaagaacagtaagcgtgctggttgataaaaataaaaatctcagcgacctgttcttccacggaaaagtcctcaaaaatgtttcagtaggtagttttatcgaaattaaaaaaggctttatgagccttattgcaaaggtggaaacggaaaagattgtggaagaaaaattcctgtccggaagtggaagcgattcgctgcgttatcgcaggtatctcaccgcgaccctgaccggatacgttgatcggtacggcaggtttaccggcggcactcgtgaacttccactcattggtaatgaagcttttatcctgacagaagagacacttcacctcattcactgtatcgcaggaactgcccggaacgggcttcagttctctcgtacggatctggaagatattgatattacacttccattgagcggtcttcttaattcgcatattgctatttttggcaacacggggagtggtaaatcgaacacgcttgccgccctataccagcacgggtatgccgcactggctaagctacttggtgggggttttaaaaaacaagcccgtttcatgctgctcgattttaatggtgagtatggctgggatgaatgtatcacccgggacaaggtggtatacaacctgaacactcaccacgaaggcggggaccgaatcccgatgcctgcggacgtgttgcttgagcatgagatcctgtctgtcctgacagatgccacagacaaaacacaaaagcctttccttaagcgcgtactagattttaggcgatatgtggaagcaaaagagcaaccccaggcctactttcgtgggatccttacaaggcgtgtaacggaaacacttttcggatgcgataaaaagaaaagcgatgacctcattgatttattccgtcccatcctgagggatgaggatcttattgccgacattgatttttatttcaaagatggggtgtggcgcacaaaaggtggtatttattttacaacggaggataaaacgcaacagtgtaatatgtaccgcaaagcggcagagtaccggtttcctgatgacattatggaagaactactcgactatatgtacctgcagctgattaatgaatatctctccagccgctctaacccggagcatatctctccggtgattaaccggatgagagggatccgaaaagatatcaggaagatatttgatactacagtgggcgcagatttgtgggctgtgacgaattttattgtgctcaatctgaatatggtcaacctgacgatgaaaaaaacgcttcccttaatgatggcgaagtgggcctattctcaaaagaaaatgaatcaaactccttcctcccttcaccttattatcgacgaagcccataatattctttccagtgcttcatttcgagaatcggaaagctggaaagattaccgcttggaaacctttgaagaaattattaaagagggtcgcaaatttggcgtatttgttactatatccagccagcggccaaatgacatttcacccaccattatctctcaggcgcataattactttatacatcgcctgataaatcaaaacgatctgtacgcaattgaaaagtcggtttcctatattgaccgcctgaccgaggaatccattccaacgctggcaaccggcacatgtatcttcagcggcgtgatctgcccgatgccgctgaagctacgtattgctgaactgcaccataacgaaaaaccgcgaagtcataccctgaccttcgaagagctggcgcggttaaatatgccaccgctaccctga

SEQ ID NO: 389609 - DNA, 1047 bp, Salmonella enterica
atggcttttttgcgcgcatactacggtcaggacagagaccgggaatactttgaacgcattttccagtctgcaaacatcaactttcttatcggctcgggcgcatcccttccagcaatccgggtgctgggcgatatcgaaaatgagctagaagccctcgtccgcgcaggaaatgatgaagagtattttagtaaagcagagcagtttcttgaaagcgtatggagagccactgatgtgcttctcaaacgaaaacgcgcttatgaagatcagcttccggcgctgaccggacttgtagaagacactcaccagaattatacagcattcattcatgcgcttgaaatgctcctgacccggcgccggtccggccttctgcccaggcgcatcaacctgtttaccaccaattatgatttgtttatagagaatgcagcggtcacgaataacaacatcattcttaacgacggattccggcaacgcgcagatatttacaaccggatgctgtttgatgcgaaatgtttttatcagactgtgcatgcgactggtaatttgtataattacagtgtagagcttcccaccgtgaatctgattaaactgcatggttcactctcctggtttaaatatcagcaggatatctattatcacattcaggagatgaaaccggaagcgtttgaaacgtccgtaaagagacaggaatgggtcaacagtcatcagttggtattacccaggaaggataagttccgggaaactgtactggacaatgtatattatgatttgctacgaacttactctaatgaactggataaagagggaactcttctggtggtgtttggattttcttttgcggatgaacacattgaaacgctgaccaagaaagcattacgtaatgccacactcaaactgattatatttgcgtacaatgaagcatcgaaattgctctttacggaaaaatttcgtgattactcaaatgtggatgtggtatatacacccggcgtggcgcttgatttctctaaagcgaatgaaattattacctgctttcttgggagagcgaaatga

SEQ ID NO: 389610 - DNA, 372 bp, Salmonella enterica
atgcgcgagcagccggatgccgtgcttaaacgccttgaaaatgcagtcctgcgtaatcaccgcattgtggtctcggccatcacgtatgccgagatgcgcttcggagctgttggcaggaaagcttcaccgcgccatgcccagctggtcgacgcattctgtgcccgcctcgatgccgtactggcctgggaccggacagcagtggacgccacgacggaaaccagggccacgctcgccgctgccgggacaccgatcggcctgaatgacacagcgattgccggacaggccatcgctgccggtgccgttctggtgaccagtaatacgcgggagtttgagcgcgtgcctggtctggttctggaagattgggtgaagtaa

SEQ ID NO: 389611 - DNA, 336 bp, Salmonella enterica
atgacgtggaagtattatcttgttagtagcatttggggactaacatttctcggatttattatctttatatggagccgggacagagaaaactccatattgcagtggattctgattgctggtttttttagttgctttctttatccattcgcaaagaatgccattgagaattttgctttaagatttacgacgcgggagttctggaacgcaggaattttggctgacggggtgggtaaaaatagcttattgcttttttattacgcgctgtgttttgctttagccatcccgctgggattaccaagattgatctatttaggctttaaaagaaaggccatgtaa

SEQ ID NO: 389612 - DNA, 207 bp, Salmonella enterica
atggaaaggacgatcgatgccctgaagcttaaagggctgaagctcaatgatcaactgctgtcgcatttgtcgccgtcaggctgggagcacatcaatctgacaggcgattatatctggaaaagcaaccggataccggcttccggtaagtttcgtcggctgaggccagctaaagtggaaaggtcaaaaaatgagcttaatgtacaataa

SEQ ID NO: 389613 - DNA, 783 bp, Salmonella enterica
gtggttcagcggaaaatgcaaaaacagatacacacggcgttaatgtctgtggagacgatgagccccggcgcgatcgacctggtgaaggtgtttgcactgacggccatgtttctcgaccacctcaacatcctttttctggatcccccgtcagcggaactgtatgcgctgggccggatggtgtttccggtatttgccatcatctgggcgaggaacctcagccacagtccggcatcgctgcagacccgcgccacgcggatgtggatgtgggcgctcatcgcccagccggcgttctggctggcgttccggcatcaacagccgtggtatgccctgaatattctctttgtgttcgccggtgtgacgcaggtggtcgcgctcggtcaccgttacggggtcaccggcacgctggccggcatccttctgctgctcatcctggcggtccccctgcacccggcaagttacggcgtgacgggcctcgtgttctcctctgcggtggtggccgtcttttccccgttcgcgcaggcggccacattcaggaaaatcgtcatgattatcgccgccggcgcgttgttctgtctgaacggtatcacccatcttgtcgcgcgccccctggatacgctggttatcgcggtcctgccgggtctggtgctgcccgttatggcgatctggctggccgtccggctgaaacccgccggttcaccccgctttatgcccgggcggtttttttaccacgcgtatgccggtcatctgttgcttcttgccctgttcctgaccttcctccggtga

SEQ ID NO: 389614 - DNA, 1017 bp, Salmonella enterica
atgactgataatatccggtctgccgttcactggtctgcgcttgcgcctgatgagcaaatccggttctggcaggaggttgatgccggaaaacaggacagtttccttgtccccacagcaaaaaaactgacccgccgccggcgcggggaacattcaacaaaacccaaatgcgaaaacccggcctggtaccgtcctgagcattataaaaagctcacggggcagcttggctatgcctacaacaggctggtaaaaaaagaccgggaaaccggccagatcagcctgcgcatgcacatctcccgtcatccgctgtttgtcgccggccgccgaaaggcgggccgtaagtatggcttccgtccggagcgccagcgtttactggatgcgctctggcccgtgttgatcagtttttgtgatgcgggcaaacataccgtggggatgtgtatctcgcgtctggcgaaagagctcagtgccagagacgccagaggcaatgttatccccgaaacagaggtgacggtgtcacgactttcccggcttatagaggaacaggtacgctttggcgtgcttggcctggctgaagaacgccggtgggatcgtgaatcgaagtcctggctgcccacatacgtgttcattacacaggccgggttccggatgctcggggtaaacctcgacaaactggcccgggagcaggaaaagaaactgcgtctcagcgcggagcgtgaacagctgatacgtgagggcgtgatgggagagcatgaggatatttccccgcacgctgcccgtaaacgctggttcagtatgaaacagcgtgatgccctgcgtttccgtcgccagcgtggcgcggagcgcaggcgtgccggccgcctgattaaactccctgtggatgaacagatccaggccgtatcgacgtggctgctgaaatccatgccgcctgatgaagcctacttctgtacagcagaacggctgagggagctggccatccagcagctttatcagctggatctggcgttatcccccccggactga

SEQ ID NO: 389615 - DNA, 783 bp, Salmonella enterica
atgaaaagagtaaaatccttcgccaatatagttacaacatacatattatttatttcattagcacaggcttccggctcccagctgtcattctcaccggagcaggaagcaaaaataggagagatcgcagcaaattatcttgtcgcacaccctgaagtgcttgtctccgtaagccagcgtctgcagcaacaacagaagcaacgcgagcagatgagttttgcagttagcgttatggaaaatcaggcaaccttacttaatgacgcagcaacaccggtctacggtcctgacaacgcacaggtagctgttattgagttcttcgattatcagtgtacgtactgcatcgctatggctccggagcttcagaaggtcatgaaaacccatcctgaagtgcggtatgtctttaaagaatggccaattttctccggtagccgtgaaaactctctgttagctgctcagcgaggacttgctgtctggaaggaaaaaggtgctgaggcttatgtgacgtaccataacgccgttcttgcagccggcagggactccggggctgtgacgaaagagaacattgaggaagcggccgttaaagcaggctggcaggaaaaggaaaagacagattttcgggatgtgattgccggaaacgatgaactggccagaacgctggggctgagcggcacaccgggcattattgttatgccaacaaaagccgccatgcccaacaacataacggtatttccgggcaaggtgtcggcagaaatgctggaaaaagctatccggaaagctggcgattaa

SEQ ID NO: 389616 - DNA, 5427 bp, Salmonella enterica
atgatgtctgttgccccagtagcgtcagccggcgaggctgcaggctactacagtaattccgataactactattttctgggcagcctgcaaagcctgtggatgggtgaaggcgcgaaagaactgggcctggagggaaacgtccggggagatgacctgactaatgtactggaggggcgtctgccggacggctcgcgcctcggtaaggaggttaacgggcagcacgtccaccgtcccggtcatgacctgacgttttctgcccccaaaagtgtctcgatactggctttaatcggcaacgataaggggatgctggaagcacacaaccatgccgtccgtgtggcggccggttatgtggaaaagctaatttctgcgcgtaacacgaaagaaggtgtcacctctattgttcacaccggcaagatggtggcagctgcctacacgcatgacacatcacgtaatcttgatccccagctgcacactcacctgctcatcgccaacatgacggagtacggaggcaaatggaaggcccttgccaccgactatattcataacgccggctttatcgaaaccgtcatgaagatgcaggtgacgctcgggaaaatctaccgcagcgccctgcgtcagcgcgtggaagcgctgggccatgaagttgaagaagtcggcaaacacggcatgtgggaaattaagggcgtgccggaagaggttcgcgaagatttatcctcccggggacgtgaaatacagggtgctgtcggggcggaagccacgcttcgtagccgcgatgtggcggcaaaggacacccggcaggcaaaggttgacccgtcacgcctgcgtctgatggaacgctggctcggccagctgaaagacagaggctatgatctgaaggcctatcaggacagcgtggtgccgcgcagtgatgcatcccgtgacatgcgtccgcagccggttaagtcagcgccggaacagccaggcagaacggaaactgtcgacacacccgggatgcagtcacctggaatcaccgcaaaaggcgaagataaaggcggtaacggcgctgaacgcagtgacccgccatcccttcaggtatccacgccgcagccccacagcgcgccggtgcagcagcccctgagtatcacaaaacctgagcccctgaagtcactggcacctgcagaggaaccggtacaggtaccggaagtgatggatgcggtacgtatggccatctcgcagctgagcgacaaccggacccgttttaccttcggggagctgatgctgacgaccgctgagctgagcgagcaattaccggagatgaatgtcatacgccaggccattgatgctgcgctgaaggaaggcagtatcgtcccgctggacagcgaaaagggcgtgttcacctcacggattcacctgctggacgagctttccattcaggcgctgagccaggagcatctgaaatccaccgccgtggtcagttttcagcgtcctgcacagtatgcgcccgcagcgctggaggtggtggagcaggatgcgcttgtgctgatgaatgccccgtcgggcgtggccggaatacgtgaactgactacgcagctgaccgacatctccatggcacagggccgggaggtgcaggtgctggcgagttcagccgagcgcgccatttcgctggccaggtctgacacgttgcgcgatcgtctggtgagccgtcagcaggtgctcagtggtgattttcatctgaaaccccagagtacgctcatcattgagggcgcggaacttctgggcctcaaggagacactggtactgctgggtgaagcccgcgcacaggatgcacagctggtctttctcgacagtgccggtcgccaggcgaactgcaatgccatgtcagtgctggaatcagccggtgtaccacgctcacgtcgcaccgagccggcgccggggctcgaagccgaagtgataagtatcgccaacaagcgtgaccgctacgaggcgcttgccgggcgttttgcggatctgagcgggagtcatgaaaacgtaactgccgtggtggtgggtaaacgagaacaggcccagctcaccggtcttatccgtgacgcgctgcagaatgcgggccagctggaccggaacggtatcagcatcgaagcccgttcgccggtgtggctggacagtaagacccgccggatgccgggatcataccggtccgggatggtactcgaggatcgcagcaatgcaaaagaacgccattcctatgttatcgatcgtgttcatgaggacacgcgcatgctgtccctgattgatggtgacggggtactcacccggatgaaaatcagcgaagtgaccgctgactggcggctttttaaccgcgagacgctgaacgtggcgaccggggagcggctgatggcggtggcgggcgaccgggaacatgatctgaaggccaaagacaggcttgaagtgaccggtgtcagtgatcggggcattgaggtcaggcgcggtaacgacgccctgatccttccccgcgataagccgttatatctcacccacgcatacgtcagcgcaccaggaggacgcgacaacgacagtggcgtggtactggccgcgctcaacagccgggatatctccagtcagaccatgaactctcttgcccagagtggccaccgggccgaaatttttacagccgaggtacaggaccgggccgaagcacgcctgcaaaggatgaaaaccagtgcgtctcccgtgcagctggtccgcagtctcagcggaaaggaggacgttaatgaggcagtgggacaccttcacgacggggttcgtactgaggctggcctggcagtctggcgtgccgttaacgatcaacggacagtggctttcagcgagctggcactggcggaagccgcagagaaatttcttcctgattttaatgcaattgggcaggaaatcgcctcgatggtaaaagacggtgcgctgatgcgtgtctccgtcaggggtgaaccgtatcttgttgcccgttcgacctgggagatggagaagtccatccttcgtacggtggaggaggggaaaaacacacagcaacccctgctcgaccaggtgccttcagccgtgttaaacggtctgaccgcaggtcagaggcaggccacaacgctggttctgagcagcagggaccagtttacgggcattcagggctatgccggtgtggggaaaaccacgcaaatgaaagccgttgtggccgcacttgatatcctgccggcagaggtgcgtcctgagataactggcctcgctcccacgcaccaggcggtaaaggaaatgagtgacgtgggcgtccgggcccagaccattaaatccttcattgtcgagcatgatcaggccacggcggcaggagaaaaaccggattataaagggcgtgttttcctgatagacgagtcttccatggccggtaatcaggataccgcggcgctgtttcaggccattgcagtcggtggtggccgcgccgtctcgatgggagacgtcgaccagtttgaatcagtggacgccggcaccccgtttaagctgatgcaggaacgcagccccatggatgtggccatcatgaaggagattgtccgtcagaaagacgtgcagttgcgtggtgcggtgcatgacatcattgataaccgtattgatgccgcgctgaaccggatcattgcccagccttccgacaggattgcccgggaagccggcgcagagggaccggaaagtgcgctgcaggaatcacaggcaccggttgccgatattgtcagtgactggatgggccggacgccggacgcacgggcacggacgcttatcatcacgcagcttaacgccgaccgccatgccgttaacgccggtattcacgaacggctgactgtgcgtggtgagctgggtaaagacgcgataaccgtaccggtcctcgataaaatctcccacacccgccatgaatttaacaaaaccgctgcctgggatgcaggaatggtggtgaagcgcggcgatcgctaccaggacgtactggcggttgatcgcaacggaaatacggtcacggtgcgtgatgaagacggaaaggttggcctgtattcgccccgtgaactgatcaccggggatgtggaactgttcaggcgaagccagatagaagtgcgtgccggcgaccttgtgcgttttacgctcaccgatcgtgagcaggggcagacgggaaaccagcggtttacggtggatgccgtcagtgacacgggagatatccggttacgcagtgaaaaaggcagtgtgaccattaatcccggcaatacccgggcccagcaacatattgattatgggtgggctgtcaccggctatggcgcacagggtgccagcacagattacgtgatttcgcttgaaggcactgaggaagggcgcaaggcgctggccacccggcgggctttttatatttcagcctcgcgagccaaagagcatgtccagatttacaccgacggtaaggcagactggacgaaagcgctcaccatgcccgagcgggaaatcaaaacagcgcatgacgcgctggctccggaaactcagcgtcagcaggctaaagcgatctgggccatgggacatccggtgctgaaaacagccattggccgcgcctgggtccggcatcagggaatgggcgacgcatcgctgaccgcaaaaattgttccggcaacccgccggtttcccgaaccggcactggctctgccggtttatgacaacaatggcaaaagtgcgggactggcgctggtatcgctggtttccagtccggaaggcagactgactcagggagatacccgtctggtgatgactccacgggcacagggtgccgtgctacagcgaagtcagtcgggcaaaacgcatgtagtgaaagatattgctgccgcgcttgatgccgtaagagcacatccggatgacggggttgtctggcagacgggtgacgaaacgccatcagcccacctgatgaagctaacaggtggcatacgaccagacgaggaaatacggcttaatctcaccacacggtcagaccaggaagcgttacaacttcagaatgagcagaaacaggcggaacagatccgggaacaggaagccgtacgtaagcaacagaatgacgatagcggaattgcgttgccgtcagatgctgtagtgacgctgcggccggaggaactgaatccggtcaggcacggggcgcaggcaccggacagtgtccttatggccagcatgcgcgagagcgacagaacctacgatcctgaactgcagcttgcactgcgcgtgcgtagcgaccttacagtgccggacaagtcagtgggagagcttgaaagagcctcaagcgttatagctgaactttcccgcgcagaacaggaattgctacggcaggctgatagtagtgaacgtggtcgtatgccggaacgtgaagaacaaatcccgccacgcatcattcagaaagaacgttga

SEQ ID NO: 389617 - DNA, 2520 bp, Salmonella enterica
atgactgcctaccggtggcgtatgtttcttcaggtgaataactggatcagtttctgggtattcctgctgtttgcaggcctgaccgccgtcatttttttcctcagtattccacgggagatgctggataacggctccctgtggtggtttgcctggataaacaacagcttcatcgatctgatgccacccaatggcaccgccagactgtatgacatccattactggtatgcgcccacccgtacgcagatggttctcaaaatgaccctgccgcaggtgtatgcagatccgtatatgcaggcaatggggagccggttacaggatgaactgacctgggcggcactttgcagtgggctgttcagtgtcgtcgtctttgcggcagtcgcctggtatatcaccggtattggccgacgcgagagcgaagatgaatacatctccggtatgcggctgaccgacaagcccgccgaggtgaataagctgttgcataaaaacggtgaattgtccgacttacgcgtgggtgatctgcacatggtcaggatggcggaggtactgaacttcctgatgcacggtaccatcggtgtgggtaaatcgaccctcatacgctggcttctggactacatacgcaagcgtggtgaccgggccatcatttatgactccggctgtaccttcaccgaaacccattacaaccctgacaccgattttattcttaacgcccatgatgaacgctgtgccaactggcagatgtggggcgagtgtgttgatgcggttgactatgacaacctggccgccagccttattccggtggaaggggactccgatccgttctgggtatccagctcgcgcactatttttgccgacctggccattcgcatgtctgcagaccctgaccgaagcattgaaaagtttctgaaaacgctgctttcgctcagcatgaaaagtctgcgtgactatctggtcaacaccccttcggccaacctggttgaggagaaaatcgagaaaacagccatctccatccgatcggttgtgactaactatgccaaagccctgcgttacctgcagggactggatgacggtaccaaaccacctttcaccatccgtgagtggatgacacagccgcaatatgacagcagttggctcttcatttccactcaggcccgacaccgcaaaagcgtgcggccgctgatatcgctctgggtttcgctggcaacgctgatgctccagagcatgggagaaaacagcgatcgccgcgtgtggttcattatcgatgaagcacccagcctgcagcgcatcccggaactggccgagacgctggcggaggcgcgtaagttcggtggctgtttcgtgctgggcatgcagaacatggcgcagatggttcacgtctacggccgcgagctggcaaaaagtatctttgacctgatgaacactcgtatgtatggccgctctccgagtgcggagatggccaaagtggtggaagaggaactgggtaaccagcgcaggcgtaaaatccgtgaacagaacagctacggtctggaccaggtgcgtgacggtgtgtcgcttggcaaggacgaggtgaataaccccgttgttgattacgagcaagtcatgcgactgccaaacctgagcttttacgtccgtctcccgggcgaatatccggttgtccgtctgaagctgaaataccgatcgctgaagaaacaccatgctggcctgatggagcgcaacatccgtgacgccctcagcccggagctggaaaaggttatacaggaaaacgagcgtgcggccacggcggcaggactgaagttcccgaccggtgacgaagcgctggagaagaacggtgacgcggtatcttcagctgaagatgctgcgcctgcggcgactgcagactcagtaaaaacgagacgtctatcacttggcgaaaagcccgcaactgccgttgcccccacccagcacgaaacccggatggtaccagcagaacgtaacccactgccggtcagggagcagcccgtaaccgaaacggagagcagggccggggaaccaaaagcgcagatccacaacacagtgacagcttctgtcaccgacgagaaaaaaaataacgttgtctctctccgaccttcagcgatcccacccgcagatgcggcctccgggtcgaagggcatcccttcagcacttcaaaaaatcagagccagaacacagggagaagaatcggttgaaccgcctccgtccggtgccctcggcttgcttaagtaccggctgaattccggagccaccccgtcaggagagagcgatccggccagcgagagtgcaggcgagaccatgaatctggatatgaaggttgccatattgcctgatggtggtctcagcctgacaacggccggaaaaagcgtgaaggccagtacgccgactgaagaacaccagaccaaccgacaactggcgcgggaagaagagaacattctacttcaccgagacgcggacgacccgggttacgacgaaaacgaccaacactattacgaaagagagcctgaactatga

SEQ ID NO: 389618 - DNA, 732 bp, Salmonella enterica
atgaaattaaaacaatatgcagtcgttggcgttgtggcatccactctcgtactgtctggctgtggcgcaatgtccaccgctgtaaaaaaacgtaacctcgatgtaaaaacacagatgagtgaaaccatctggcttgaaccctcttctgaaagaacggtgtacctccagatccgtaatacttccgaccaggatatgtccggcctgcagcctgaaattacccgtgcgctttcagcgaaagggtatcgcgtgaccaacactccggacgaagcgtattactgggtacaggctaatgtcctcaaagcccagaaaatggacttacgtgaagcgcagggtttcctgaaaacgggctatgaaggtggtgtaatgggtgcagcgctgggtgccggtatcactgcctacaactcgtcatccgctggcgccacgctgggcgtggggctggccaccggtttgattggtatggctgcggacgccatggtggaggatgtgaactacacgatggtgaccgatctgcaaatttcagaacgcagcaaggcaacggtgacgacagataatgttgccgcgctgaagcagggttcttccggcgttaaagttcagaccagtactgagcagggtaaccgcgccagatatcagacccgcgttgtgtcgaatgccaacaaggttaacctgaagtttgaagaagcgaagccggtgctcgaggcgcagcttgccaaatccatttccgctattctgtaa

SEQ ID NO: 389619 - DNA, 717 bp, Salmonella enterica
atgaattttaaaaaattaggcaagtgcttttgtatcattatgcttgccatttatttcatgggtccaattataagagatgtcattccaaattatattttttatgattatgaagattggctcgcccttgctggaatgtatacggtaggtttaattgcagcattcccattaactcttccacttgtcaagccccgtagatattgggatagagcttcgggggtattatgctgcattgccttgctgggtataatgctgcaaattttatgcgcgatttatttctgggcaaacggagtcattatgtacctttccatgtctattgtcatatgcctggctggcgtagcggctatttatatggggaaaaaatcctgcaaccattctcatggtgccgcgatttcatccgtaaatcggttgcatagtaatttatatgataaaagagaacccgcatcttcttttttattgaaacctttaggatacaatgcggggagattgggaaatgtgccagactcaaatagtgctttaccccaacccttatctactaccttcgtagatgatgctatcaaccgtgacttttctcctgagatgaatatagatacttcaatcaatccaacgacagggttgccaatgataggtgggatatcgggactagatgtggaggggaatatctggggtgcgagtcacgttgatgattcaagtacgtacgacaccaatcgcgaatattaa

SEQ ID NO: 389620 - DNA, 3843 bp, Salmonella enterica
atgctcgaaatatatacaatttacggcgggggaatgtggaaaacgtcgtttgacgccgtggttacccttctgggaagcagctcattcaataccctgatgcgcatggccggtacgttcgcagtactggccgtcctgctgacatttattaaacaacgtaatcccatggtgtttgttcagtggctcgcgatttttatgctgattaataccattctcctggttccgaaacgtaacgtgcagattatcgacatttcggacccggcagcagtctggaaaacggataacgtaccggtcgggctggcttccatcgcctcgctgactaccagtattggttacaaaatgtcgacgttgtatgacaccctgatggcgagacctgattcggtgacctacagcaaaaccgggatgttgtttggctcgcaaatagtggctgaaaccagtgacttcaccacccagaacccggagcttgcgcagatgctgccggactacgtggaaaactgtgtgattggcgatattttgctgaatcacaagtacacggtgaatgaactgatgaactccacggacccgctgggcctcatcaccagtcagccgagcccgctgcggggcatctttaagaccaccgcctccacccgcgaatttctgacctgccgggatgcggcgacacaaatccgcgcgctggccaacacggaagcgaacaccaccagtgccacgttcagcatgctgacccgcaagattttcggcaaccgcgtgaatggctccaccctgctggcgaaggcaatggctgaaagctacggatatttctacgccggtggaatgagcgcggcgcaaatcatgaaaaacaacatcacaaacagcgcggttcgccagggcgtgaaagggtttgcggcccggtcttcagataccgccaacctgctgaatctggccaccgaaaacgcggcaacaaaacagcgcctcagctgggcggccggaaacgcgctggcaacgcgtacgcttccgttcgcgcagtcactgttgatgatgatcctggtgtgtctgttcccgctggtcattgcgcttgctgccagtaaccacagcttgtttggactgaacacactgaagatatacgtcggcggcttcatctacttccagatgtggccggtgatgtttgccattcttaactacgcagccaatttctggctgcagacgaagacgggcggcacgtcacttgtgctggccaataccgacctggttgcgttacagcactctgatgtcgcaaatctggccggatatctggcactttcgataccggtgctggcgttctatctgaccaaaggtgccgcagcgatcgggtcgcaggttgccggcagcgtactcagctctgccgcgtttggatcggcgggggttgcggcaaccactgcggacggtaactggtcgtttaacaatatgtcgatggacaatattaaccagaacaagatggacaccaacctggtgcaacggcaggggcaacagacctggcaagccgataacggctcaacgcagaccatgacggccggaggacaaacggttattgatggcgcaggtgcgatgtcaaacctgccggtgaatatgaaacttagccagctggcgagcagtggattccaggaatcggcgcgtaaatcgcatgttgaagcgcagaccgcgctcgacggttacaaccacagtgtaaccagcggctggtcacagttgtcgcaattgtctcgccagacaggtaccagcactactgtgaacagcggtactgaaagcagccagactacaaatgcttcgcgtggcgccagcatgatgatctcggctgtagagagttatgcgaaggccaatcatatctcctcacaggaagcatacaaccagttgatgaatataagtaatcaaggttcagcctccgttggctcaaaagtttctggtggtgctggtattaatatcggtgtggcgaaggttggcggtgaagtttatggtggtacagaccttcgccattccactggaagctcacgaggaacgcaggactctcatagcagtaacaacgattctcgtcatgataaaaatagccaaactatccaagactttaagcaggggatggatatggttacgagcaacagagtgacggatggcacaagtcagagtgaaaacgcagcaactaacgatgtccaacagtttgcagccacgcttaatgatacccggagtcagtaccatcagtttacaacgagttctactcagagtgatgagtacagccgtatggccacactcacgcagaacgagagcgctgggctcgatacgaactacacccaggagtttgtgaactgggctgctaaccggtatggcgacaaaactcagagcatactcaccagtgcgccgacagcacgtgaagcggcgatggagttcgttaatgagcgactgaagccggaaataatgggcgattatcagctgggacgctcagatcttgatgcaggaagagagcatccagcattcaatgacgcgcacattgttcagccgtcaacgatatccgggcagcaacactatccggtatctgcttcggttgaagtaagtcagcgtcagagcatgcagccgggctatgtcggggcatccacactgccgggggcaccgtatgggcaacgtccgggaaggggtgaaggacaaatctacaccgataacccagctactgacgttgtttcaggtacagagaatgtgggccgtaaggatctcaccggcggatactccggatcagcgtcgggacaacggcgggaagatgagtctgtggcttctgccagtcagtctggagaacctgcaatttatcaacatgcaggaccgaataacctgcctggccagagcaccggtaacgtaacgggtgtccagaatgtccaccatgcagctggtcagcaggaaagcccccaaccctttaccgggagccgctccggcgggtatacagcgtccaccccagccgggacagaaatcttgtctggccagagcaccggtaacgtaacgggtgcccagaatgtccaccatgcagctggtcagcaggaaagccctcaacccttcaccgggagccgctccggcgggtacacagcgcccaccccagccgggacagaaatcttgtctggccagagcacaggtaacgtaacgggtacccagaatgtccaccatgcagctggtcagcaggaaagccctcaaccctttaccggaagccgctccggcgggtacacagcgcccacctcagccgggacagaaatcttgtctggccagagcaccggtaacgtaacgggtgcccagaatgcccgccatgaagctgttcagcaggaaaatgctctacctttaaccgggaaccacgcaggtggatctacaacaacattgataggtcagagtaccagcaacatgactggcgatcagaacagtcgttatgcttcaaggcagcaggataccgcaccggctacatctacccctcgtcatataagcagtgacgcccaaaatgttgtatcaggtggaacgggtgattattcgcaagtgaaaaacacattccaggaaaaccagaacaaattgcatgaacaggcggcacacagttttgagtctcaaaatgcattacaaagacaagctatcgaacaaagatctgaaaacgagagaaaaataaaagaaaatattgatgaaataaacaaaaatcgatccactgttcaggcatccagtgatattcttaaagatgagaattctaatgcccaagggaagtttcttattggccaaaaagtggcccagatagatcaacagatacctgggatagatgtggataaaaaaagagagctcgaacagcagctcgcgaaattaaaagaacgtcaggctaagggggagctatga

SEQ ID NO: 389621 - DNA, 1362 bp, Salmonella enterica
atggttaagcctttagtggctgcgggcatgtttttgtccgcactttttgtctcccccgttctggctgacgtaaacggtgacctgaatggatttttcagcagtctcggctacagcgggaacgtctcgcaggcccaggcctggcagggacaggcggccggatacttctccggtggttctgtctatcttcgtaacccggtcaaaaacgttcaactggtctcgatgcagttaccttcccttaatgccggctgcggcggtattgattcctaccttggcgcattcagcatgatcagcggtgaagaaatacagcgtttcgtgaaacaaatcatgagcaacgccgccggctacgcgtttgatctggcactgcagacaatggtgccggagctcaagcaggcaaaagactttctgcagaagctggccagcgatgtgaactccatgaacatgagttcctgtcaggcggcgcaggggatcatcggcggattgtggccggttacgcaggtgtcccagcagaaaatttgtcaggacattgccggcgaaaccaatatgttcgctgactgggcggcctcacgtcagggctgtacggtgggcggcaggggagacgccgtaaccgcacgggcaagcgatgcgcaaaaggaccaggtgctgaaaaacaagaatcttatctgggacacgctcagcaaaaacgggctgctggctggcgatcgtgcactgaaagaactggtgatgagcactgtgggttccatcatttttaacaatgcaggcaacgtcaccattctgacgccgctggtcgataaccgggacttactgaaggtactgatgcgtggcggaacggcgaaagtctacggctgtgatgaggcatccctttgtctggcacctgtcgtgacgaatctgtcaataacagaatccgctgccctggtgacaaaggtcaaaaacctgctgctctcaatgcagaacaaacttacagatgatgtggcgctcaccgatgaggagaagggttttgttaacaccacctcagtaccggtactgaaatacctgaccaatgcgcagagtatgggtatgagcgccacctatctgctgcaggtctctgattttattgcgcaggacctgatgatccagtacctccaggagctggtcaagcaggccagcctgtccctcgccggaaaaaattttcccgaagaagccgcagcaagactgcgggacaacgtaatccatgcgcagggcctgctggctgatatgaaactgcagtccgcggcagaccagaatgcgctggacgggattgaccgcaacatgcagtacctgcagcagcaggtgtccactatcgtttcaggctcgtatcagagcaactaccactggggtgatcgctga

SEQ ID NO: 389622 - DNA, 270 bp, Salmonella enterica
atgatgacaaacacgtatgcaatatcgcgtatcgagcgggcgtggctttttttcagcgtcacgctgcttgtatccgccgccttttatggctttctcgcggcccgggtggacagggcaatgtcccgaccggaactgacatttttcattcaggatatccctgtgttgctgcttatttcgctgagtgccggatttttcctctccgctgtcgggcattacattctgcgtgccgcaatgaatgaaaaaacacagggggaggtgagacatggttaa

SEQ ID NO: 389623 - DNA, 609 bp, Salmonella enterica
atgaagtataaaacaggtctcgccctgatcttttttatgccggtattgtctcttgcaggcgcgcgtgaggagctgatggcgctggaagcgggtaaaaccggcgcgcccttcacgatcacaaccacgcagactgccccgcagccggtcacgccgccggaaagcctgatggccctgccggacggacgccgggcaaatatgaaagactatgcggtggtgctttttatgcagtcccactgccagtacagcgcgaagttcgaccctcagctcaaaagctgggcggatcagcacaatatccgggtgtacccttatacactcgacggcggtggggattcagcttacccgatacctatgatcccacgtaagacggacccggcctcacctattgccgacgaaatcgtgaccttttttgggaatggtcttcccattgccacaccgaccgcatttgccgtgaacgtcaacaccctgaaggcttacccgctgacacagggcatgatggacattcctgcgctggaaagccgctgggccagtctggtccaggcagatatggacaacctcgatcctggcatgctgcccccgatgcccgcgagcagtcagctcacgccccagtaa

SEQ ID NO: 389624 - DNA, 219 bp, Salmonella enterica
gtgaacattactctctatatcagccttaccctgtcgggcctgctggcccttgtactgagcgaaataatgacgtttcccgtttccgccgtccggaccggactgacatggtttggctatggcatgtgggccgttgccgcagcgatgcttgtgtatgcgctgcttcgtgcacgacagcaacggcggggcagaaaaactacggaggcccgccatgaagtataa

SEQ ID NO: 389625 - DNA, 780 bp, Salmonella enterica
atgaaatattttgctctggtaatgatgctggccatgagcagtttgccgctcaaagcggaagagatcatcactcccgctaaaccgttcaccggctggtcctggtataacgaaccgaaaaaggggcccgagctaaaacccgcaccggcaccgaaagctcaggcggtgccggatttcagtaagctgtccgcgcaggagcaggcgaaggtgctacggggtttcacgatggaggcgcttaaccgcgccattctgtacccgacacgggaaaatacggcgacgttcctgcgctggcagcggttctggacagatcgcagttcgatgttcagccagtcttttgccgccgcgcagttgagtcatccggagctggattacaacctggagtatccgcattacaacagcatggcgccctttgtacagagtcgtgatcaacaaaagcggcaggatgctgtggtgcaactggcacagcaatacgggctcttttacttctaccggggcagtgaccccatcgatgtgcagatggccggggtggtggcggactttgccagaactaacgggatatcactgatcccggtatcggttgacggacaggttgcggcctcgctgccgcagagtcgtccggataccgggcaggcccggacgatgaatatcacgcatttcccggcgctgatgctggttgaacccaaaagccgcatctttcgcgcgctctcgtatggcttcatgactcaggacgatttgtcaaagcggttcctgaacgtggccaccggctttaagcctaattcgtaa

SEQ ID NO: 389626 - DNA, 1830 bp, Salmonella enterica
atgaaaccttttcttgcggccctgatccttatagtaccttgctttgttatggcggattcagtaactgatgcctacaacgccggtgcggcatacggtaagggcagtgccggacagggcacaggtagtctcagtaatccgggttcagtgactgactccattcctggttacaccccgagcccgccgcaaagcggttactatggcggtgtacgggggggagacgggggactggctgacaaagggcaggaggctttacagaataacgatgccggtcaggctgttatcgactccggggttaaaaaccctcttccgacgctggatcccctggccccgtatatcacagcaggtaaaaacgcggagtccagtgcagacagtattgttaacgggactggtaacgctcagcagtgccagcaaacaacggttaacaagactgtgtttgagagatacacctgtgaacgtgatgcctgggtagaacaaagttgtgtacggaatggcactgcaggtggaggctatggtccgccggttgaaaccgtgagtaccgtggttatagggcccgaaaatttcaaggctgttaaccggcaattcatcttcacgatgccccaggatatgacggtgactgatgccacactaacggtgacgtcctccgcctgggtttcggacgtacctgcaatgtttatgggcctcatcattcccctggagtacgcgggtactcagactttcgcactcaaccttagcggcgttttgcggcagggacaggaatttacctcggtacaaatgtgtccgagccagtgcaacggtgtgaccagagcgatgatacagaggtcgatggaaggcgtacggtttaccataacttttaataaacgggactattaccatccgtttcagccttccgtgagctgggcagaagcctgtggcttcagtaaggcaggggcggtacagacatccagcgtttgcaccgtcgcaggtggcaaccgtactgtcgtgtttgatggcgttgcccgttcagtctggagtgactgctggcagtacaccgatcagtatcttgttaagtcagattcgaaaggtacctgtgaatcgctgatgaataaccgggcctgtacgcaaaccggtataacctgccagaccgcgtacggggcgtattgtgaacacgaaacggtcagttatgactgtcagaaaacctacagctcgggcggtctggtttgcggagggcagtatttttgtaaaaccggtaactgcagcgataccagcggtgccggtgacagcggatttgacacggccgtggccaaactggcgggcctcgcctcggcggctgatgacgtgagtaaacagcaggatggtgttgacgtccgggctttcaccggcagtgtaatgagttgtcgcaaggccgtcgccggattctcgaactgctgcaaggattccggctggggcgctgatgctggtctggcggcatgtaacagcgatgaaatggcgctgggtaaggccaaggccaagaaggtcaccgtgaacattggagagcgctgtgaccatgaagtgttaggcgtttgtgtacagaaaagcaaagtgtactgcgttttcggtggcaagctggcccgcatcattcaggaacaggggcgtcgtgatcagctgcacgtcggattcggcagtggtaaaaacccggactgtcgtgggatcacaatacctgagttgcagaatatcgacttcgaccgaattaatttcgctgacttctacgaggacctgatgaataaccagaaagtcccggatacagccacgcaggtaaaactcatcaaagaccgcatagctgcccaggtgaatcagcagggaggccagaaatga

SEQ ID NO: 389627 - DNA, 621 bp, Salmonella enterica
atgaaaaataccctccattgcgcgttgtttatcagcgtgctgatgtcttatgtgccggtttcgctggccagcgaacaggtcggtttgtcagccagcgacagggactggatgaaacagcaacagcaggcgcttgaggcattcaaaatgagactgcaagggcagtcagtacaacttccagcggaacaacagagcctggttgacaggctccagggcggtatatcccgccaacaggcagagcgtgaggacgggcagaaacgaacctttccggcggtgtacttcgtgagccttggactcccacgcgaagggttgttaccaatgttgaaagacgctaaccgctatggcataccggcgacgttacgcggactggtgaataacgatattcggcagaccgcgtcggccatgtttgaactggccaaagaagacaggaatatcggggtacagattgaccccacgctttacaccaaataccacatcacaactgttcccgctctggttgtcacctgtcccggacattatgacgttatacgcggcagcctcccgctcaaacaagcgctggaaaaggtggcacaaagcggtgaatgcgctgttaccgccaagcaactgctcaaggaggctaaatga

SEQ ID NO: 389628 - DNA, 987 bp, Salmonella enterica
atgaaagggtatggctggttactgatcctgctcctttgcacgcccgtcgcggtttcagcggcgtccacgaatgccggtgacggccgctgggttaatcccatatccgatgtgtgctggaagtgcctgtttccgatgtcagtggggagtgtaaaactggcctcggggccacagccggacaccagtaaccctgcgtctcccatccagatatgctcttatggcgtgttataccgcatgggactggccatcgggtactgggagcccacagcgatgaccgatgtgacccgtgagccaggcgtgatggtgaacatgggcggttttaaaatcaatctcgggcgcacgggtaccggcactgccggacagagtgaccgtcctgcagccggtgcgttctatcacgttcactggtacaaatatccgctgatttcctggctcagtatcatgaccagcaccggctgcttccagggtggagatatggacattgcctatatgtctgaagtcgacccgctctggaacgacagtaccctgtcgatgatgataaaccccgaagcttccctgtttggcaaccttgtcgcccaggccgcctgtgcagcggatgcggtggcgagtacagccggtgtgccattgtcgccactgttctggtgcgccggcagccagggcagcatgtatccctttaccgggtttaccagcggagaattttcacctctggaatcctcgctgctggtcagtgagcgtatggccttcaagctgcaccgggaaggactggtgatgaataccgtgggcgcggattttgcggtctgttaccagtacccgtcacctatcgtgccgaaagagcgctggcggtaccagatggtcaatatgtatccggaaaccaacagctgtcatgcttttggagccagcacccagatctggggcacgccacataactccccgcaatcaaaaaagaacttcggatatctgctctggcgcaaacgcaactgcgtctatacgtga

SEQ ID NO: 389629 - DNA, 327 bp, Salmonella enterica
atgactcttcctgaacatatcgggccggtgacggtcgttcgtgatcctgacggcttctggacccacccacattattattctcctcctcaggacagtatcagcgtcagcggcgggtttgatgactggttacaccggcacaagctgacctgttcactttgctggatggaaaacgacgcatcaccacaggttattgagggctgggctgcaggaaactgcgacatcagcgactggcaaccgtccacgccggcaggcgaaggctggtttatcggatctgtccacgataccgaagatgggccggtgtgtgtctggttgcgggaggtaaaatga

SEQ ID NO: 389630 - DNA, 222 bp, Salmonella enterica
atgaaacaagaccctgaaagcgaaaagggccggaatgtcatcatctcgtcagtacgtcacgatgaaggttcggccagacagctgaacgagatccttaacagtaatccactgtaccgcccgtctgcggtgctgcggggtgccattcttgccctgtatgaaatggacaaggaacagcagctcgccatcatcatgaaagccgcagccagcggcaaaaatcattaa

SEQ ID NO: 389631 - DNA, 570 bp, Salmonella enterica
atggcgctgacggactgctttatacctgccgactcgctgcaggcgtttatgacctgcgtacgtgaaggggaaaatctgatcggcgtggtgatggtatcccttgtgctgggcgcctggctggcgttgcaactgatgcgtgaaatgcgtgttcgtcgccgggctgtggaggtggcagctcgccgggatgtacccgctaagtttgccagcgtggagcatgccggtgccgtctggcggtacgccaacaccgatatgtaccagtatgtcctggccgagcttgaaaaaacgctgactgcagaggggtattcgctgacacgaacccgcaaaatgagtgtgatgttatctgatacctgccggaaccgggtcgccagagaagtattccttgcccgcgagcgattcctgacgccgatgagacctgaaagcgagatggaggcggcggccgatgagtgcagccggaacggctattcggcacagtggctggcctgcttattacgtggatgcgagctgcagggctggtacgttacgcgatatgcgccatcaccggctatgtcacccgcctctgcctcccactga

SEQ ID NO: 389632 - DNA, 294 bp, Salmonella enterica
atgacaaccaccacgttaggcgatttgtttccggaactgcgtaaggccgttgcggaagagaaacaaagaaaaatcagtaacaaaatcacccgtgccgggaccgcagagcgccttaaaacgctctaccccgaaatcgaatcctggagcaatgtctttgccgttaaggcgtggtggatgtggcttcagtcgaacggcatggaactggttgagccggaagaaagggacgagcgtttcccgcagtacctggttggactgatccgcaaaaaaatggtggagatagggtcatggcgctga

SEQ ID NO: 389633 - DNA, 636 bp, Salmonella enterica
gtgagaagacagaagcaactgatagtcctgcttctgctggcgttatctgcaggctccggcgcaaaagacctgggtacctggggcaatgtgtttgaaccggcagaacaggacatgctggtctttatccaggaccgactgaaaggaatggagcagtccggcgagctggaccggcttcgcgaagaggcgattgagcgggtgaagcgaaatgcggtgcgacccgcgccggtgaaaggcctgacggcagccaccacataccggacattcccttttgatcccacctttaccgttaatgaaaccatcactgacatgcagggaaacatcattgcgcgtcggggggaccaggtgaacccacttgataaggtggcatatgaccaggtgctgtatttcattgatggcgataacagggatcaggtggcgtggctccggcagcagattgcaggcgggaccacgcacaaggtgattctggtgaacggcaacatccgggaaaccagtgagaggctggatgagcgtatttacttcgaccagtccggcattctgacccgtaagtttggatttcagcatatccccgcgcgtgtcacccgggatggccgtgtactgaaagtggaagagatcccgatggaaggagcgaaaaaatga

SEQ ID NO: 389634 - DNA, 429 bp, Salmonella enterica
atgggtgaaagccgcatgagtgatgaaaacataaaaccgcatgacgaggccgcccgcggaagtgcaacgacgtcgcgcctgttgtctgcccgtggtgtgagactggccgccttcattctggtcccgcaactgattatgaccatggcagggtggggctacctgaaagtcaccacaccagaaatcgtggtgttcgacatgaagggcaccattgatctctttaaagagcagtctgcacgccagagcctcgatgaggaaaaggcgcagcgactgacccgccggtttaacacagcactgaccgacagtctgggagactggcagtccagccataacgccattctgctggtcaaaccggccgttatcagcgagcagacggatatcacacaggaaatccgtgcggacattgcccggcgtatgcaggagggacagtga

SEQ ID NO: 389635 - DNA, 2601 bp, Salmonella enterica
atgaccgtttttgacagtctgatcgatatgatgaaaaacggcaaagaggccgatggtgcagccactgcgcgtaacaacctgtcccagacatgggactatccttccctggttgcgtcactgccttaccgctattacgacgagaccagtgagctgtttgtgaatgccggcaccgtgggcttcattctggaagccgccccgttgcccggtgccaacgaccaggtgatggcggcgcttgatgacatgctgcgcaagaaactgccccgtaaaaccccggtcaccgtcattctgaccgccagtaaatgtgtcggtgagcgcattgcagggggggtcagtacggatatgtggaaaggtcagatggccgatcacctgaataaaattacccgggcattctggcagcgctcagccttacacggactggctaacgagcgcgactatccactgtatctgcgtaattaccgcatctttctggtctacggcaaaccggttaagcgtgtgacccagcaggtgatggatgacctggtgcagatacgtaacaccatccgcgtttcactgggcgcggcccgtatcgactgcatgaatactgacgttaacgcctttctgtcggtgatgcgtgagctgatgaattaccgccatgagcaggtaatgatgtcctccggcgattataacgaggatgaaaagctcaaccgccaggtggttgatccggccatcgatttgcgagtgtcgccctctcacatccgtgtcgagctgcccgagtcgattgatgctaacggaacccgtcttccggcgtcggcgtgccgcatcgtgaacatgcagctcagtaaaaaccccaggcgctttgcgctgtggcagggagccgacaatttacagaatctgcgcttcccggatctgggcattccctgtccgtttatgctgacctggaccacggaactggaggaacaaaccaaaagtcagagtgaggcgttccgcaaggaccaggacctgtccaaaaaagccaactctgcctatgcggctttgtttccgggaaccaaaaaggcggcggaggaatggcggcgcacccgtgagcagctgcacagcaacgagattgcgctgtgcagcacctacttcaacctgaccctgtttacgccggacaacaccatggcatcgcaggaatgcgagctggctgccgtcaacgtgttccgtaaaaacgaactcgaaatggtgaccgtgcattatcagcaaatgcgcaactggctggcgggtttcccgtttgtgatgcaggaaggcatgtgggaagacctgaaggtgacgggcgccacgctgcgcgccaaatcctggaatgccgtcagcctgatgccggttgtggccgaacggcagctttccaacgtcggaatgccgctgccgacgtaccgcaatcaggttgccttctttgatatgttcggggaggagaacggcagcaccaacttcaatatcgccgttaccggcacatcgggtgcaggtaaatcctttcttacgcagggtattttacgcgacgtgctcaatgccggcgggtatgcctgggtaatcgatatgggcgacagctataaaaactactgccaccaggcaggcggtgtctacctcgatggcgcgaagctgcgctttaacccgtttgccaacgtgaaagacatgaagcactcagctgaagggattgtgcgcctgcttaccgtgctcgccagccccacgcagccgcttgatgcggtctgcgaggctatcctgcaaaaagcggttgtggatgcgtgggataaaaaacagcaccacgcccgcatcgatgatgtccatcactatctgacctgtgaggacgtcaaccggacctttgccgacaagccgaccatcatcgcgcgtctggccgagctggccatgttgctggaaacctactgcacctggggaccggacggcgaatactttaacgcagacagtcccacacttgatggcgaaacccgcttcgctgtcctggagctgttgagtctggaggataagccgaaactgttgtcggccattctgttctcactgatcctggcgatacaggaaaagatgtaccacagcccgcgtgacctgaaaaaagtctgcatcatcgatgaagcctggcgactgctgggtggctccaacccccacgcggcacgcttcatcgagactggctaccgcaccgttcgtcgtcaccggggagcctttatcaccatcactcagggtatcaaggacttcagtgccggtaaggaagcggaggcggcatggaataacagttccaccaaaatcaccctgctgcaggacgcgaaagccttcaagaaatacctgaccgaaaacccggatcagttcactgatatggagaaggaagttatccggggctttcagccggcgcttcttacgggttacagctccctgctcatcagcgccggtgaatacagctccttccaccgtctgtttgtcgacccggtgacccgcgcgatgttcagttcgcggggtgaggacttctcttatatgcagaacgcccagaaggcgggtgcatcctctgaagaagctgcctacctgctggcagagaagaaatacggtgatgaactccgggaacttgaagaatgggtgaaagccgcatga

SEQ ID NO: 389636 - DNA, 555 bp, Salmonella enterica
atgaacaaactattgggtgctgcactgctgtgcagcgcgctgaccggctgcgccggtatgaatggtgatttcgactgtaataaaaccgcgaccgatcagtgcctcaccacgggcgaggccaataaacttgccgctcagggcaaaagccttgacgacctgacgtcgcagaaagccacaaaaaagcctgcgggtgaaaccctgccggcactgcgtaacacagcgcctgtcgttaatccgcagcgtcctgtttccgtcgcagcaaccggaccgctgtcagcaaaacccattgcgccacgtccgcttgccaccgtgcctgcggggaccggttcagtggtgaccccgcctgccacaacgagccatgtgacgccgttaacgccggtaaacacagcaggccgcgtaccggtgcagcgtattccggatgcgacccagcgtctgtggattgcgccctgggtggacacggacgacaacttccatcagcccgccgtcgtggagtttgtgaaaaacaaatctcactgggatgaaagctaccgggtaatcggtgagggagacgagtaa

SEQ ID NO: 389637 - DNA, 1404 bp, Salmonella enterica
atgaatctgaatgaaaatctgaaaacgcgccgccggcagctgaccattctcgcaggggttctcgccgccggttcagcacttgccggtggcgtgatgtggtacggacagcatcaggaagcaaagaaaaatccgcctcctgctgtcgcacctaatatgaccggcgttgtcactgccgcattcaacgaacaggtcaatgactccgcgctggcgcagcaacaggccaaaacgtctgcacttgaacagcagattgctgtgctggcgcaacaggttacccagaacaaactcaccactgaacaaaaactcgctgacaaagacaatcagattgcgctcctgaccgagcagctgtcgaaagcctccggtggcaaccagaccacgggcccgcagacaccacctgcgggcacgaacggcacaccactgcccggtccggttgctgccggtcaggcccggccacccgaatacacactgacccctgcttcctcaccggccgccactggtgcagtgaatatggggcagggtacagggttctatcctggggggtcaggtcagcgcatcacaggtggcctggccaccacgtctttcagttacgacacgctgaagaagaaacccacgaaactaccctggatcccgtcaggctccttctctgacgccatcatgattgagggggccgatgccaacgccagcgttaccgggcagcagaacacccgccctgtgacgtttcgacttatgggtaatatccagatgcccaataacaaggaatacagcgcggatgggtgctttgtggtgggggaaatctggggtgacatctccagtgagcggggcgaagtccggacaaagtctatcagttgcgtgctcaaaaacggaaagcacatcgatatggcgtttaatggtcatgtcagctaccagggcaagggcggtattcgcggcaaaccggtgatgcgtaacggtaaaattattgggtatgccggtgcggcggggttgttgtccggatttggtgaaggcatcaaatctgccgccacaccggcagtggggcttggcgcaacggccagtattggtgccagcgatgtgtttaagcagggcattggtggcggtgctgacaaggccgctgacacactgagtcagtactggatcaagcgtgctgaacaataccatcctgtgattgatatcggtgccggtaaccgcgtgacggtggtgttccaggaaggcttccgtcttgaaaccctggaggatgcagaagaagaaaaagccagagaagccctgcaacaggccggtaatgccgcgcagggagcggtggcagcacagcccgccagtcagatatcttccggcacttcctcagtggaaaatcttaacccggatgatgtactccgccaggccagccagttacgacttggtgacaccatcaactga

SEQ ID NO: 389638 - DNA, 741 bp, Salmonella enterica
atgaaatctcgtttttcaccggtggctgctgctgtattaatgacgacaggactttttgcaggcggcctccgggccgccactgcgcctgccgccatcccgtttgagaacgacgccgcctttaacgtcgtgttaagtaacaacagtcccaataaagttgttatagacggggagctgattaccagcatcagcggaccggccggagcgtacgaccagagcaccactgaaagcggtgcgctgattctgtctccgctggtcggccagaacttcacgctgtttattcagactgaacgaggctcagccctgagtctgaatgtcagtccccagcccggaagcggcagaacgctgcgcttcacgcctgtgtcgccccctctgcgtaagaatgaggatgcgaagacatgggaagagggtcagacttacgaaaaaacactcgtcaccctgtcccgtgctgtcgtgaatggccaggttcctgatgagtatgaggaatatccggtcagtcgcatgactgcatatgcgccggcagtcagcgtgcgacttactccggaacgccagtttgtgggcaaccatcttcgcgtggttcgcttccgtctgactaaccccggaagtatcacgcagaacctgcgcgagcgtgatttctggcgcaagggggtccgggccgtcatgctctcgcaaaatcagctttatgcgggcggtgaggggtatgcatggattgtcttttcagatgacggagtaccacgctcatga

SEQ ID NO: 389639 - DNA, 585 bp, Salmonella enterica
atgaaactaaaaattaaaggagaacgggataagcagctgcgatatacatttattggaatttccgctctggctctgttttcaacagccggaactgtaattaccggttcactggcatggtatttcgccatgaaccagaaaaccattaccacgccaatgaccttcaatcatcccttcagctcagatgcactcaccgccgatgcaaccggtatgaccatgttcgccacttcctttatttactggcgtttgaatgtgagtccggaaaacattgataacaaccagaaaatgctgctcggatttgttccctccgccagtcgggacacgctgaaaaaagcgctggatgttgaagctgagcgcatcaaaaaaggcggcataaccacccgctttgagacaagggaagtacggtcaatgaacgagcctggtgtggtggagttcagcggaacgctgaagtcttccaccacaaacggagctatcaccacgcccctgaaggaccaggataaaacctaccggctgaaaatgagctacgagagcggacagattaacctcctgtcttttgaagagcttcagccggttcccaccttaaactga

SEQ ID NO: 389640 - DNA, 303 bp, Salmonella enterica
atgaacggggaagatgataaatattacttcccggaaacgctgaatcagcaggctcgctactttggtttaccgattgatgaattactggttacggcaccgcttgttgtatttggcgtgctgaacaatatagcgattgagttaaccgcaatagcgggccttctctggtttgtcatgaaatatctcaagaaagggcaggggtcatactggcttcttaatttctgttactggcaccttccatcctttttattcaggatgacttttcgacagatacctgattcaagtttccggcactggagagcctga

SEQ ID NO: 389641 - DNA, 354 bp, Salmonella enterica
atgaaaaccagtggcaatgcccttcaggcaggaaagggatgggcggtagcgtctttatttcgcaaggcgcgaaataatcttaagttaaataaatgggcaaaatacggaggacttgccttaatttcatttatgtttgctcacccggttctggctgcaggtacggatttattgtccagtcagaacaccaccgttaattcaacattcggttccggttcttctctcgttaaatggttctatatcgccgaaatcatcatgggcctgtttatttatattaaaacccgctcgcccctggttttcgtcggtattgtcatggctatcatctttacccgggtcgctttcggtattgcgagctaa

SEQ ID NO: 389642 - DNA, 642 bp, Salmonella enterica
atgaaagttaaagaaaaaatgtgggaaggtcgtggccgcccgcgtaagttccgcccgggcgaagccgtggagtggcggctgcgtgcgccggataatttgttaatggaattacgaatatgtgccagggtgggcaaaagaagtgttaacgatgaaattattgcgcgcttactgttatcgcttaattaccagccgggactgcctgtaattaaaactgctgaagcagaaaagcttatttccctggcggtaaagtttgaggagtggcttggtcagttgcttgacactggtgaggctgagcatgaagaaattaaagcaacaaagacgcagtcagagcagttgtggatgtggcgtgacggagaaagaatattacttccgggtaaaacgaccgggtacagtatgcgtattcctgaaaatctggccgaagagatacgggtgatggcacgcgtacataaacgcagcctgaacgacgagatgctgacccgcctgatgaatacactgggttattttaccgggcgcatactcgaccagaacgaagatacgcaggcactgaaagtattgtgtatggaatttgaagtgtttttgaaagacagaatatctgaggcagaaaaaggggagctgccgtgggataaggacagccatctgtga

SEQ ID NO: 389643 - DNA, 396 bp, Salmonella enterica
atgggcagagtgggaatttaccttaaagacaaaatagaacgtgaagtacgtgatattgttcagcatgacctgcaaaatggagcaaatccgggagaagcaaacatatctgctacctgcaatgaattaataagactgggtttgctggtttataagagggatgattctgacggccacagattcgatctggaagggtatcaacgcgaccttattcgaaaagcagcgggctcccgcgagggaacggtattgatagctacgttactttcagaaatgtatctgaaaatgactgaaaaagatggtcacgggaaactggaagaaacgctgaatatgattataactggtataaacgatgcggaagacgaggctgaatcgcggcattttgttaatcaggacgattaa

SEQ ID NO: 389644 - DNA, 546 bp, Salmonella enterica
atgaaaaaaagcctgctggttctccttgccatctcattatctgcacgcgcggcaccggaaatgtgttttaaccaggccgggcgtgattttggcatcgacccgctgctgcttacggctatttcaattaaagaatcgcgtcttgttcccgatgccataaacggcagtaacagcaacggaacggaagatgtatgtggaatgcagatcaacagttcgcactacgggaagctgaaaaactttaatattacgcgaaaggatcttctttcggatccgtgtatatgtgtctataccggagcatgggtactggcgcataacttcagcgcatggggaaggaactgggacagtgtcgggatgtataacaccgggccgtctgaaaagttcataaaaaaacggcgggcttatgccgatcatataaagagaatatatcgcgtactgctggcaagaaaaatcgtgtccgaaaattcatccgtgcacgaaagtcagaaaacagcggcagccaccttttccgaaaatatctcccccggtcagttaaataaagtctcgcaatag

SEQ ID NO: 389645 - DNA, 822 bp, Salmonella enterica
atgacccgtcttgcatcccgttttggcgctgctcatgttatccgccaggaacgtcccttaaccaatgatgagctggcaaaatatgtacccagcgtttttacgggcgataagcatgcgtcacgttcggagcggtacacgtatattccgaccatcacactcctggataaacttcgcgaagaagggtttgaacctttttttgcctgccagacccgtgtgcgtaattttgacaagcgggaatttacgaaacatatgttacgtcttcgccgccgtgaccgaattaccggaacagaagtgccggaaattattttactgaacagccatgacggatccagtagttatcagatgatcccgggcatgtttcggttcgtctgcacaaatggcatggtttgcggacagacgtttggtgatattcgcgtacatcacaaaggggatattgtcgggcaggtcatcgaaggtgcttacgaagtcctgggaatatttgacagggttgatgaaaatatcgatgccatgaaaagtttaaccctgtcaccggcagaacaacgggccttcgcaggtgcggcgctggaatatcgttacggagaagaacataaacccgtgactgttgaccagctgcttgactggcgtcgtcgcgacgataacaagcccgatttatggagcacatttaaccgggtgcaggaaaatatgattaaaggcggcgtgcctgcccgttcaaaaaccgggaagagtacccgaacgcgggcgataaacggaattgacggagatgtaaaactcaaccgggcattatggacactgggtgaggaaatgataaaactcaaaaactga

SEQ ID NO: 389646 - DNA, 213 bp, Salmonella enterica
atgcacacacagaacgtcaaaaccgccgctcccgaatcttccgaaagatgggttttggcatttcccgagccgaaaacggcgcgccttattgctgtttatggcacagacgtcagctacgccagaaatgttctggaagatttgaaggccgccggtgcctcttattcccgtcgaaatatcatcgccgatatgttccgccgtctgggggttaattaa

SEQ ID NO: 389647 - DNA, 216 bp, Salmonella enterica
atgctgatcacattcagagtagcctcttacctgccaaaaggcaaggagaagaaggccatgaaactgccgcgaaacgcccttatctggtgcgtattaatcgtgtgtttaacgctgttaatattcacatacctgacgcgaagttcgctctgcgaactgaggctgaaggacggagacagggaggtggctgcggtcatggcttacgaatccggtaagtag

SEQ ID NO: 389648 - DNA, 321 bp, Salmonella enterica
atgacccgctggcgttactccctgcggtgggtgctgcgccatttaccctgtcccggcgagcgtgaactgatatccgtagaggtggctgccggggagcctgcccccgatgccattatgtcgcgttttgttccggggtccggctatgcggtgacactggattttacaggcgggaaacccgttaagcgctggagtgcggagcgtaaggccgccgcgcggcgacgtaatctggagcgacgcgtcagaaaacatgcgcccctgtttgccgatgaactgattgaccgccagcttgctgaacgaccggaatactttgaggggaaatag

SEQ ID NO: 389649 - DNA, 732 bp, Salmonella enterica
atgatcccgaattcccgctcccttgtcaccctgcaaccggcgcgacaggcagcacttcaggccatacttgacgttgaaacccgccgcagtgaggggcgacggctgccggaactgccgtatgtgcgtacgtttctgcgcattctgaccggcagcagccgcatcaataccgatgtggcccggcgtattcccggcctgaactggcatcccaaaaaccgtctggtttcgctgaaacaggttgaggcggcactggaaatattgctggcaagccacggggaaaaatgcccgctgccactgcccatagatattcagggcgagcttttcccggaactcgttcacaatcataccggacgcaaacgccaccgcatggagatcggcacggcccgaagccagcgccgcgaaacccgactgactgaacaggcctgtctccggcgccagaacctgctggcccgtgccgttacggaactgaatttctgttccccggagacggttcaggtatggtacgcccgctggagcgacgagttcggcgaggaactggcggctccgttctggcggtggcaacgttgcttccgctcactggatgagctggagtggaaccggctcagtcacgatccgctgtggcaggtgatgcatgacctgcggttgattgtccgggaaacgccggagggaacgcaccgcgccgagcggtggcaggtacccaataagctgcgttatcagccggtggcaggcgtatga

SEQ ID NO: 389650 - DNA, 432 bp, Salmonella enterica
atgcgtaacatcatcaccactgacgtactcaaaaccatgatccccagcgagttcgaggattaccgcaacggcggcaatgacctgcgccgcgccctgacgcacgccgtgttaggtaaagtggacgccccttccggctggaacagtgactgcgaatataacgctgaatacggcggactcttcccggtgcagtgccgtttcacgccagcgcatgagcatttccatattgtgctgtgcagtccgggggatgtctcacccgtctggctgatggttttcgtgtcagataacggccatccggtatcggtcgtcagaacgctggcggagtttaatccgcagttaatcagtcacaccctcagcctgacggcgcggctcgacagcgacgggtatgccgctgactttatcatccatacgctggcaatggagggcgcacgatga

SEQ ID NO: 389651 - DNA, 2004 bp, Salmonella enterica
atgtcagtgaccgagtctaaaccaaaagcggcccgtaaggccaccgccaaatccgccgccccgaaagcggcagccgcgctgaaagccgcgctggatgccgcgcccgttcagtacattccgttatccgcgctggttaagtccccgctcaatgcgcgtgtcattccctacgcgcaggaaagcgtggtttccctggcggaaaccatcgtttcggttggcctgttgcagaatctggttgttcacctcctcccggaggccaggtatggcgtggttgccgggggacgccgcctggctgccctgaattatctcgccgaaaatggcacatacaacgccgaccagggtgtggcggtcaaagtggtgccggaagaactggcggtggcggcctcgatgatcgagaacgaccagcgctgcgacatgcaccccgccgaacagattaccggcttccggacgctggaaggtgaaggtaaaacccccgcgcagattggtgacctgctgggctacagcgcccgccacgttcagcggatgctgaaactggcgggactggctccagcggtactggatgcactggcgaccaatgaactgaccaccgaacactgccatgcgctggcgctggaatccgatccggaacgtcagttgcaggtgctggacgccgcccgccagaaagggtatcagggaaaaccggacgtgggcgtcattcgctcgctcatcaccgccagtgaagtgtccacatcctgcgcaaaatttcagtttgtcggcgctcaggcattcagcccggatgaaatccgtgctgacctgttcagcgctgatgaaggcggttatatcgacgcactgacgctggatacggcgctgctcgaaaagcttcagcttgtcgcagaacacctgcgcgaggtggaaggctggggatggtgcgcagggcgtctggatacggttcgctggcacggtgaggacgcaaaaacttatatcctcccccgtgatgttacgcctgtgtataccgatgcggaacaggaacacctggacacgctgagcggggagtacgacgaatacgacacggtgtgtgaggaaagtcaggcgctggaagcggaaatggcggcaattgaatgtgccgcagagcttcgcgcatggaataccgaattccgggcggcagcgggtgtggtggtgtcatggaacggtgaagtcgaggttcagcgcggcgtggtgctgaaagcgcaggtcactgagaacactgacccggacgcgcccgggacgccgtccgtgatgacccacacgcaggagccggaacccgctgacgaaatcagtctgcctctccttacgaaaatgtcgtctgaacgcacactggcagtccaggctgcgctgatgcagcagaccccaaaggcggtggcgctgctcgcgtggacactgtgcggggaggtttttacgggctgctcaacggcgcgtaatcctcttcaaatcagaatgacatgctcgcattactctctgtgcggtaacgcgccgtccggacaggaaggcgcgggctttctggcgctgatgaaagagggtaagcggcttgaagccctgctgccggaaggctggcgcagggatttcaccacttttttcactctcgacgggcagacgctgctgtccctgatgggcttctgtgtggcctgtagcgtgaacggagtgcagacccgcgaatatggccgcacgtcacgcagccccctcgatgcactggaaacggcgctggactttcatctgcgggactggtggcagccgacgaaagacaacttcttcggtcagcttaaacatacgcaaatcatcggggcactgaatgaggccggagaatcaggagccgcccgtgatgctgaaaaaatgaaaaaaggcgacgcagccgaatttgccgaatcccggatggccgcaaaccgctgggtgcccgtctggatgcgcgggccggatgcagagaaggacgccggagaaccggactgcaccaccactgataccgacaccgtaaaccccaccgccgaagccgcttaa

SEQ ID NO: 389652 - DNA, 231 bp, Salmonella enterica
atgcagaaaggatccgaaattttacttccagacggaccgtttacccgcgagcaggcgcaggtcgttgtggcggcgtacagcaacgtcaccatcgaggatgaccagatgacacattttcgcgtggttgtgcgggttgacggcgcgatggtctggcgggcatggaattttgagccggaagccggggtctggcttaaccgctacatccaaaaatacggtgtgagaaaaccctaa

SEQ ID NO: 389653 - DNA, 537 bp, Salmonella enterica
atggcagcacggggcgttaacaaagtcattctggtcggcaatctgggacaggatcctgaaattcgttacatgccgcaaggcggcgcagtggccaatatcacactggccacttctgattcctggcgcgacaagcagaccggggaaatgcgtgaaagcgtggagtggcaccgggtcgtcctgttcgggaagctcgcggaaattgcaggtgagtatctgcgtaaaggtgcgcaggtttacatcgagggtgagttacgcacccggaaatggaccgatcagaccgggcaggaccgctataccaccgaagtcactgttaacgctcgcggcacgatgcaaatgctggggcgcgctcaggtcagtacctccccggatggtcgtcagactactggtcaggctccggcacagactgccccggagacggacaaaccgatcaaaggaaaatcccgcaaaaccaaatccgccgccgcgccgcagccgcagccagtacccccacagggcgagtacccgccgatggattttgacgacgatatcccgttctag

SEQ ID NO: 389654 - DNA, 258 bp, Salmonella enterica
atgaccggatggaatatcgcaaaaagctcaaaagaagatcaggacaaggtagccgtggaccttgtcgcgtccggcgtggcctataaagaacgcctgaatatgcccgtgatcgccgaggcgatagcccgggaacagccggagcatctgcgtgcatattttatggagaggctgcgccactaccgccaggtgagcgccacgctgccgggcgcaggcgatccgctgtatgcagaaatgaaagaggctaacagtaaaaactag

SEQ ID NO: 389655 - DNA, 204 bp, Salmonella enterica
atgaatttaaccccttatacccgcgacattttacgccagtaccgcgccctgattaatgcccgccgtaaagcacagggattagatcccgttacgacagataaactgattgattcagtctgcgattttatgaccagtcagtatgccgtgtatctgtgcggttgcttcatccttcagggaaacagcggaacaccaccacaggaatag

SEQ ID NO: 389656 - DNA, 507 bp, Salmonella enterica
atgagcatgaacaccaccaccccggccgtctatgtcggcacataccataaatacaactgcggcagcattgacggtaagtggtttgatttaaccgattttgagggcccggaagactttcaggaagcctgtaaggcgctccacgctgacgagtgggacgcggaatttatgtaccaggactgggagggcattccgtcacagtttgtgtctgaatcttcggttgactgggcgtttatcgatgcctacaaacgcgcctgcgatgaaggcaaagacccggcatttatcgcctgggccgaatacaccggccagtgtgactatgacgaatttgatgatgcgttccgtggtgaggcagaaagcgaggaggagtatgcgcaggaaatggtggaggacaactgcctccttgacggggtgccgcagatgctgcgcggttactttgactatgcagcgtatgcgcgcgatttgttcagcagcggttatgtattccatgacggatacgttttcaccagttga

SEQ ID NO: 389657 - DNA, 426 bp, Salmonella enterica
atgtacggaagacgtattgagttgtgccaggcgctggaaaacatgttcgcgcccgaagaaccgcttgcgctgcttgtctggacggaggacagcgttgaggaagtgtgtgccttcaacaacgagcatccggtgacggaggaggaaatccgtggcgtcctggtgcgcattggcagaacgccaatgaatgaatatcagaaaaacgggatcagcgccgcgtccgtgtctgacctgcttgcgagcgagaggaccgaagcggaccgccatgtggaagtgccggtccggacgctggccgcgctggttgactgggccgagcgagaactgattgcccgcgagagcgaagtatgggacgccggagcagcgacgcctgaaagtatcggtcagtgtaaccagaatatcagcctgctgaaacaactgatgggtgcctga

SEQ ID NO: 389658 - DNA, 225 bp, Salmonella enterica
atgacgaactacaccggtcacgaacaactccgcgccgacgtcgcagagctggcaaatgccatgtgtgacctgcgcatgacgctcaatttacttgagtcacggtatcgcttcgattcgggagtgctgacggagcggcttgtgcgccagaccttctgccggatcaacaccctgtttcttgacgcgtaccgcgaagcccttgagctggacgccagctttaaagactga

SEQ ID NO: 389659 - DNA, 681 bp, Salmonella enterica
atgtcccgttttatccagggtaactgcgtcccgattatggctggctttccggataatgccgtcgatttcatcctgaccgatccgccctatctggttggctttcgcgaccgttccggacgcgctattgccggtgataaaaccgatgaatggctgcaaccggcctgcaacgagatgtaccgcgtcctcaaaaaagacgccctgatggtcagcttttatggctggaaccgtgccgatcgcttcatcgctgcctggaaagcggcggggttcacgattgtcggccaccttgtgtttaccaaaagctactcctccaaatccgcttttgtcggctaccgacacgaatgcgcctatctcctcgcaaaaggccgcccgtgtctgcctgaaaacccgcttccggacgtactggggtggaactatacgggcaaccggtatcacccgactgaaaaaccggtttccagcctgcaaccgctcattgaatccttcaccacacgcggcgcgattgttctcgatccgtttgccggcagcggctccacctgcgtggccgcattgcagtccggacggcgctatatcggtatcgaactgcttgagcagtaccaccgggcagggcgggaacgccttgaggcggtacgccgcgccatgatgaaaccggcggcgaacgatgcctggcttccggaggctgcatga

SEQ ID NO: 389660 - DNA, 741 bp, Salmonella enterica
atgaatcgtttgattgagattggttttatcaaagtaggattctggcaaattacaagcggctatttgaagtatcatcttgatgaaagattcaaggatgttaaaaacaacctttatgcatttgtgtgtgatggtgaagtgaagtacgttggtaaaaccactcgtttactacgaaataggatgtaccactattctcgtcccggcccttctcaatctacgaacattaaaaataacgctaatatcatcggtatgctgactaacaatgttgctgttgatatcttcgtgcttccggattcaggactgatgcactatgggccattccatttaaaccttgcagctggcctagaggattcaatcattaaggtaataagccctgaatggaatggaattcagaagccaacattgcaggttgaggaagctataacaactgaggctgagatcgtcacgcctggcagtaggaaacactacactttcaacatggcagatacttactggcgtagaggattcttcaatgtccaggtagcgaactctcaggaatttggtaaagatggtgagaacatcacgattattcttcgcgatggggtgtcttccatcaatgggatgattaatcgaactgccaacctgtctggttcaccccgcattatgggaggcgttgagctgagacaatactttcaactcaattataccattggtggtattgtaccattcgagctgataacgcaaaacatgatgaagctgatatga

SEQ ID NO: 389661 - DNA, 399 bp, Salmonella enterica
atgaaaacgtatcttttccttctggttgctctgtcagccaccggccaggctgcaaaatttcccgctgagtatgtttgtgataatggcgacagaattcatctcaccccacagggtacagaacagcgtctgatttattcatctgataagtatggaaatcgcagaggcacacttgatgttttcaaaggtgaaggcgagcataaaaatgaaactatcggcacgatttttagtctggatgcttatgccggacgtccggttgcatttactctgcaagtaaagacagtagacagtgttgttcgcaatgtgacctataactatcagctttccggagataaagctgaatcaggtaaatgtctccctgtcaaaaacggtatgatgattgaaggcgataagaactattaa

SEQ ID NO: 389662 - DNA, 540 bp, Salmonella enterica
gtgaaaaacgtaatttttcagccatatatcggagataaatactatgacagtcgttacggcgttcgagtactggtgctcggagagtcacactacggtgataagcaggattcggcatcggactttacacagcacgttgtgaaaacgcatgccctcaaagccggtcttccttttttcagtaagctgacaaatgttctcagaggcaaaacagattacccttcagaacaggagcggattgagacatggagacacgtggccttttacaattacattcaggagtttgttggtgaagaggcgcgaacagcaccaactccggatatgtggacttcggcgcaacttccattcattgaagtggtgaggcagctggagcctgatgtcattctggtgctcggcagtcggctctggaacaaaatgccggagctgccccctgagtatcccgtagaatggtgcagcatcctgcaccccagtagcggtatggcctatgagccggccattgcggctcttgcagcatcgataaagaaagctaacggggtttttctgtaa

SEQ ID NO: 389663 - DNA, 249 bp, Salmonella enterica
atgagcagactgaaaagaaaggcaagaaatgtggcgctctcctttctgcgccgccagggagtacctgagacacaactcgcagaacgctgtaaatccatcgggcagtattccctgctgggtggcgtgcttctggtggtgccgctcctgatctgggagcttcccactgcagtcactgttttgcttcagctgggttacgccaccatgatgatcgtgggcgttatgctgggctttgatgagaaaaagtcctga

SEQ ID NO: 389664 - DNA, 660 bp, Salmonella enterica
gtgcctgctggcaaatacactttctatctccattctgacgaccggatcgatatgctggctgcccgcacgatcgagaccgtctcccagccgctgcggggggacttcatccgcacggcggcgcttgccggcagcgtcctgtatttgattgacgcgcgtctgcctggactggtgaccgaactcttcgacgggcgtctcagtaccgggcagctgtccgccctggccgcagcagtgtcgggaagttatacgctgatgaccggtatgcaggatgaaaacctgataccggtggcgcattcggggccagtttctgatgaaaaagcagagcgccgccgtttcaccctggtgctgccggacgatgagggcacccgcagtgcccggttgcagatagaatcggtatccacgcggcagcgcggccagttgttacgtaatctgattgtcgcgggctgcgcgctgcacacccttgagccccgcttcccgcgtttgctggccagcctgcctgttccgccgcacagtccgcaggcgctggttgcgctggctggtcagctgacgggttcggtaccggggccggagcagggcagggaagaagcaccgccaccggcgggagtggaagctcagccggtgccgtccccgcagattgtcagtaatatgaaaaaacttttctga

SEQ ID NO: 389665 - DNA, 972 bp, Salmonella enterica
atgaatatctactgtgatgatggctccaccaatgtcaaactggtctggtttgaggacggtgaactgaagacatttatttcacccaacgcattccggccgggatggaaaattgccgatctgggtggaaatgcgtttaactatcaggtgggttcactgaagtacagctgggacagtgtcagccgggatgccatcccaaccacgaacgtggaataccagtacggcgatcttaacctgctggccgtgcatcatgcgttgctcaaaagcggcctcgcaccgcgcccggtctctgtcacggtcacgctgcccctgagcgaatattacgatcatgactgtcagaaaaatgatctgaacatccggcgtaagcgagacaacctgatgcgtccactgactgtcaacaagggggcgtgcttcaccattcaggatgttaccgtgatgccagagtcactgccggcagcgttcagttatctcggcgccatccgtccgggaccgactgaaaccacgcttataatcgatctgggcggaacaacactggatgcgggtgttattgtgggtcagtttgaggatatcagcgcggtccatggtaatccggggataggggtttccctggtcacccgggcggcactggctgccctgcgtgtcgcagaaacagaaaccagcccactgattgcggaccaggtcatacggcagcggaaagatcgtgcatttctgaacagtatcattaatgattcagcaagaattgactatgttgttgagaaaattgaagaagccattaacacgctgggcgcgcaggtgaccagtgaactggcgcatcacagaaacgttaaccgcatcctgctggtcgggggcggggcgtcactgattgaacacgctgtccgccaggcatggccgcttgctcctgaacgtatcgaaacggtcagtgagccgcaactggccctagcccgggagattgccctgtataaacaagaggtctga

SEQ ID NO: 389666 - DNA, 432 bp, Salmonella enterica
atgattctggaaatatggacgccacaggagaattgtcaggttatggcaatcccccttttcactgaacgggcttcatgtggattcccgtctcccgcgcaggactacgttgaagccgagcttgatttaaacgactactgtatccgccgtcgcagctcgacgttttttgtgcgcgccattggtgacagcatgaatgatatcggcctgcacagcggcgatctcatggtggtggataaggcagaaacgccccagcacggcgacatcgtggttgcagaagtcgagggggaatttacggtcaagagactgttactaaagccccgtcctgcactccaggcaatgaatcccgcctatccgacactctatcccgatccggagcacctgcagatttttggtgtggtgacgcattttgtgcaccgcacccgggagaagccataa

SEQ ID NO: 389667 - DNA, 1353 bp, Salmonella enterica
atggacctggtgtggaagaagaatccaagagggcagtttgaaaggaaactaaacttagctgaaaaggaggccctgctgcatgtcttcaccaatggccgtaaaccagctcaggcggacttacgcattgctaataagatccttgaggaaatggacagacaggaactgtggataaagtgtgactgcgttgattccaatccagaagttgaaggcccgtttaactgtgaagtgaacgcgatcaagttacgacacgtgaagtcaacgaggccacatgacgaactttgtccgctgtatcgtctgaaaaaagataaagacgcggacattacagtcagcgagggcaaaaccagtccgctcaatccggtaggaggagacgattggttaccagacaagaaaaaggaggccaggatcacaccgcaggacggagtggtgattccacgtaagcgccgccgcaacacgcttaaacctgttcccgcgctgggacgtaaattactcaccctcattcaagccgcaggtcttaatcaaatggaactggtccctgaatatcaaagcccgggacttacgggagccattaacagggtaaaagcagtacttgaagaattctcaatgagtaatggcactcctttgagccagcttttttgctgtgaaccctggctgacgattgatcggattgacgaaacgttatcacgaatagaaaaggcgcagggcattgacaatcatgaaaaagaaccatgcgtgtatatcatcggaatagcgacaggtgccagacaggaaggaatagaattccgcgttcgcgggaaaacgttcacgcatcggccagaagctcgagtccgtataaacggagaaaattcgtacaatgtcggaagccgggcaccatattgggcaatccttgaataccgtcgcggcagagacgccaaagtttactgccatgaaggttacgcacatgccgcatacgcgctcgataatcctattccggtagacagtaacaaggagcgtgaaacgttgaagacaatcatcaacgcaagcagttatgcaggacgccagttgaatcacccagaagcaataagccttagcaaacctttgtttacgacaaagaccataagggagggcatagaagaaattattcatccagatttcatattgaatgtggctcctgcaggagaaaatccagtagtaacttttatcattgaaacaatgggctatgaatcagaagactatattgagcgcaaaagaaagacccaccgctggatggaacaggaaggtgtactacttacagatcctccgggctggcctgaagcttcagagaaaagttttaatagctttctgctcaggcacattttcagagcaagtaaaatgtag

SEQ ID NO: 389668 - DNA, 306 bp, Salmonella enterica
atgagaaatcgttcaaatacacctcctaaagatgaaagtgctttcataaatggtggatctgccggtcttaacactgaagaaaataaacctgaaataaaaaaaacagtggtgagcaaagctaaaccagtcagtatttctcttgccgatgagaacttacgtgcaatcgataatgtaatcaaaaatgagatgttagaaggaggagtaagagtaaaccgttcagatgtggtaagagccgccgttatgggtttagaaaagctgactaaagcagagatatcaaaactaattgagaaagccaagcttaaataa

SEQ ID NO: 389669 - DNA, 132 bp, Salmonella enterica
atgttaaaaacggaaaaaaagaagaaaaaacttagttttgaaacaaagatatatatgactcttctttttatttgtggactcgctacggttgttaaatttatttttcaggtgatggctgattatcctaattaa

SEQ ID NO: 389670 - DNA, 216 bp, Salmonella enterica
atggagcaatgcatttttgatttaggattaatgaattataaccctgctattacatggattgtaccaattgcattttttttcttagctttggtagttggcatactattcaatattggtaagagaaatagtctagttgtgtttatcttagctatgttgcttcctatagcgacagtttttctttttatattattgggtgggaagattagtatttgctga

SEQ ID NO: 389671 - DNA, 213 bp, Salmonella enterica
atgatgaataatcccaagacattttatgaactcgttactgcaaccgaacaggccagagacagctaccggctgcgtggcactgtgttttccaaaatgctctatgaattttggtatgtgcttttgggcatggaagcttttgattggcaaagacttgaggtcaaatgtccggttgcgttagcagaaatgtaccgcctagcaattgatgccccttaa

SEQ ID NO: 389672 - DNA, 258 bp, Salmonella enterica
atgttgagaaaaataccagttatacaaggttctaggcgaggaatggtgcttgttgagatcagccctggatatttccggccccagcctccgcaaaaagataattcaactgacagagagcgaagaaaggatgtgaatgattacgttttaggatggtttgatattgatagtcaaccgatgcaggttgcatatgtcgaacatcaacgcccagacgacaacgaaattctgcttcagcttcgcattatgggcatcattcactaa

SEQ ID NO: 389673 - DNA, 717 bp, Salmonella enterica
gtgaaagatattcaggccacggctgatagcatagcgaatgcgatatcccatccggttaccgtgcagctgataacccaggggactggtatctggggaaacgtggctaccgggctaattactggcgttctgaccggcggtgttacactgacgggcatctggctggcgcaccggttcacgctactccgtgagaaacaggcgtcagacgataagctgaaacaagagcgtctgtttatcgcaacggaactgatttttgttcttgagcagtatgcagaaggctgtgcgcaggttgccggtgactacggggagctgatctctgaagaaaacaaacaagctgaatttgaacccaccgtcggttacccggccctgcctgactttgaaaaggtttccggtgactggcggagcctaccggcagatctcatgtatcgtatccgggagctgccggtactgcgcaacgaggcaatgcgggccattgatgatgccgggaaaaattcgttccctccggttcatgacgaatacttcagtgcacggcagtatgagttttcacggttggggctgaaagccatacaccttgccagactcctgcgcaaactctgcaaactgccgcgctcccgtctaaatgaatcatcatggtcagcgcagcccgaaatgctgcgcattctgcatcgagaacgaaaaaaaagacccagtaagcctgaagaaaaggatgtcaacatttga

SEQ ID NO: 389674 - DNA, 339 bp, Salmonella enterica
atgcctggaagtgaattgcagataagaaagatcatctctttgttatctcaggaacatggcagtatctattgtcggaagacgcaggatatttatggaaatgaactctttgttttacttaattccaagggtgaggaagttgctgagtgggatgaagatggaaatgagtggcgacttactccatacccgcgtccaaccggtaataagcttaacagtactgaaataacgtcattaggttcacgcatagaggatcaaatcctcaaaataggaatgtgtcagggaagactttcacatcttcctagacaaaatattaaaccaaagaaagtacgcagagggccataa

SEQ ID NO: 389675 - DNA, 204 bp, Salmonella enterica
atgactgtatttctcatcctcaccgccatcgcatatggcatcgtcattaccggcggctacatccttttagtggtcaaagggtatcagggttggaccctattctggaaaaactatgacgacctgccccatatctaccgttcccgctggcgataccagagacgcttcattctcagacgcatctggaagcgtctctttaatcgctga

SEQ ID NO: 389676 - DNA, 291 bp, Salmonella enterica
atgaacccagaaaaccagcaacgtatacgggagatgattgaatccggagaatttaacgggtatacgctggtcagcggagaagactggcagctccccacggcacgcgaaactaccttcgttcggaggctgatccccctgactgacatccagctggccaaccggctgaatgtggacgaacgtaccgtccgcaagtggaaatccggccagacccggatggtgttcaccacatggtgttgcctgtgctggctggccgggctggggatgctgctggataaccttctcagcgattaa

SEQ ID NO: 389677 - DNA, 1128 bp, Salmonella enterica
atggcatttacgaaaaatcaacacatgctttcgcaatgggtactaaggaactttcgcagcgacgacacggcactcagtccgaaggataagcagcgagtctggtgccatacggtatacccttcacatactggagataacgtcctctatgaacagcctcttccaatttccagtgtcgcggtcgctaaaaatctctttcggctcatcgatgccaaaaccggagaagtctttgacatcgaagaagaactgggggcctatgagcgtctgacggccgcagtagtgaacgacattattcacgaacataatttttctcgacttcgtctggctaagcccggcgatttcccgttcgagacactgaccagctttgcagtaatgcagctgcttttaaatttacataatccccagaataagaatccctacaagcaggatcttcttgaccactttcatcgtgacattgaaatgcattttgaagaatatataaaaagcattcagtcactgcctggcacccagcccgcactaatgaacgacagtttttatcaaaaattgcttcgcgtagccaacgcgtcctcatccagagaggataaatgtcgggcgatttttactttgttcagcctgctggctattctcaataaacccacgccttatgacatgatcaatgtcttccggaataaaatattcagtcggacgagcgtgattgaaataatacacaccggccacgcttttgacagtactaaccccagaccagtctttgcgatagccccgaatatattttgtttatacacaaaacagaacagaatatatctgccgttgtctcataatttcactttgtgttttattactggctcaccattaacattccgtccccggatagacgttttttcaccacgacccgaactgctgaagtgttgtgacgatcgccacttaaatttctacaaagtttcttttgattacattgataatgtcatgagcaccatcgatatgtacaatgtaggaaattcaagcactttctattctgcttatcagctcagcgacgttgaaaaatacctcgatttgcaggaaaaagatcaccaatattactatacgcctgcagaccccgtgcgatggcaccttcagcagccggattcattatga

SEQ ID NO: 389678 - DNA, 1593 bp, Salmonella enterica
atgaccttttcaataaccagcctgctggataaaacagggccatgtatcagttcggttcttgtggatgagatgtcaaggaatccggccatcagccgcgaaacagcccgaaagcagatatcccgtgccgtggcgtccggacaggtccgctacgtcgataagctgctgccgaaacgagagcgattcatttatctacagaaacagtacggatcggaacgctactggtcgaatctgacgacagcgcttctggattccggctcagcctacgggctggcgctgagctgcattatggcacggggcgggattctgaagatggagcactttgctgcagcaagtggcgcacctgaggcaatgaaaaagcggctctcctggaggacggtacttgagggtctgctggaaaacaaaatggtaaggcaggtttccctgccagggataggtgactgcatcgcactgagcgagaaaaaagagtcgtcatacgcgcatgccgtgctgccactgaaagcgcgccacatcactgagtcgattatgctgaaagccgtcggtcagtgggtcaggaatacaggtatcatcagctatgacacattacggacccgggataataccaatgaagatctcagaccttgcgtgtcacaattcagtttcgatatgtctgccgcatcctttctcaatccgttgcttcagttgacgaaaacaggtgagacccgtccaggattctttgtgtgtgacatccttctcggcactcgcttaagccatgagcatcttcagccttttattgtgaaatgccgctccatcagtagcctgaaaaataatcctagatgcctgtttatgttcatcgccgatgagtactcagaagatgcatttaaggcgctgaaacgcgcaggtattattccggccacgcccgagaatctttttggtagtgaactcgcggaaacgcttatacagcttcgtgagcttatcagttatataacactgagccttaatgaaaacatttcgcaaattgacgatattatgtcaaaactttcccgcatagaaggtgcaactacccagcttcagggggatttgtttgagtatattgttgcggaggctgtgcgtggtgataacgggtttattgatattggcagactatgtaaaaatgagaacgggaaatctgctgactgtgatgtcatggcaattaagggccgatctgaaatcactttcatagaatgtaaaggatataaaccctattcagtagttaaacacgaagtaataaaacactggattggccatcaaatacctgtgtttcgtaagtttgccaagcgtgactacccaaacgcagatattaaggttgagttatggaccaccgggaaattcagcgatgaaactcgtgagatgctggataaatatatcgactctgtcgatatcaataaaaaatataacgtcagaattctggaagcacataatgtccgacaaataataagggcaaccaggaatgaatcacttatccgggtttttgaaaagcactttattgattcgaaaatgaaggtgtcacgtcacagaacggcacctgatcccacgaaactcgcaggcagggatgatgattttgatgatggcttttaa

SEQ ID NO: 389679 - DNA, 2133 bp, Salmonella enterica; identical to SEQ ID NO: 150274

SEQ ID NO: 389680 - DNA, 285 bp, Salmonella enterica
gtggccgacattctgaatattaacccatcgcaacaatgcctgctggatgtccgtacgtcgaacgagttggaaatgctgggccggtatcctgaggcgttacatatcccggtggatgaattacgttcgcgtcttaatgagttaccgaaagacaaagaaatcctgattggctgtcagtcaggcttacgcgggcatgttgcctaccgattattgaagcagcagggttttcgggcaagaaatctctccgggggctataaaacctatcagttgtctctcgcagaattgtag

SEQ ID NO: 389681 - DNA, 1038 bp, Salmonella enterica
atgaaaattacccggcttgccattctgattaccctgacattttccgtcctgaagtcgcaggccacggagttcaatgccagcctgctggacagcgggaacctgtctaacgtggacctcacggccttcagccgcgaggggtatgtggcgcccggtaactatattctcgatatctggctcaatgaccagccggtacgggaacagtatccggtcagggttgtaccggttgccggactcgacgcggccgtcatctgtgtgacaacagacatggtggccatgctgggtcttaaggataagattattcatggcctgaaacccgttaccggtatcccggacgggcaatgccttgagctgcgctccgctgacagtcaggtacggtacagcgctgaaaatcagcgtctgaccttcattattccccaggcctggatgcgttatcaggacccggactgggtgcccccttcacgctggagcgacggcgtcaccgccggcctgcttgattacagcctgatggtcaaccgctatatgccgcagcagggggaaacctctaccagctacagcctctacggcaccgccgggtttaatctcggcgcctggcgattgcggagcgattaccagtacagccgttttgacagtgggcagggcgcatcacagtccgatttttatctgccgcagacgtatctgttccgtgccttgccagcactgcgctcaaaactgacgctcggacagacgtacctcagctccgctatttttgactccttccgctttgccgggctcactttggccagcgatgagcgcatgctgccgccctctcttcaggggtatgccccgaaaattagcggcattgcgaacagtaatgcacaggtcaccgtcagccagaatggtcgcattctgtaccagacccgggtgtcgccggggccttttgagcttcccgacctgagtcagaatatcagcggcaacctggatgtcagcgtccgggaaagcgacggtagcgtccggacctggcaggtcaacacggccagcgtcccctttatggcacgctag

SEQ ID NO: 389682 - DNA, 1434 bp, Salmonella enterica
gtggccgccggacgtccgctgtacggcgggacgcataacaacagcacggtcagccctgactttctgctcggggaggccacctggggagcatttaacaacacgtcgctgtatggcggcctcattgcctccaccggcgactaccagtccgcggcgctcgggatcggccagaatatggggctgttgggcgctctgtctgcggacgtcacccgctcagatgcgcggttgccgcatgggcagaagcagtccggttacagctaccgtatcaactatgccaaaacgtttgataaaaccggcagtaccctggcgttcgtcggataccgcttctcggaccgccattttctgtccatgccggagtacctgcagcgtcgggccactgacggcggcgatgcatggcatgaaaaacaaagctacacagtgacttacaaccagtccattccggtactcaacatgagcgcggccctctcggtaagccggctcaattactggaatgcgcagtccaacaataactacatgctcagcttcaacaaagtgttcagtctcggcgagcttcaggggctctcggcctcggtgtcgtttgcccgtaaccagtacaccggcggggggagccagaaccaggtctacgccaccatcagtatcccgtggggcgacagccgccaggtgagctacagcgtgcagaaggataaccggggtggcctgcagcagaccgtgaattacagcgatttccataacccggacaccacatggaacatcagcgctggtcataaccgctatgacactggtagtaacagcagctttagcggcagcgtgcagagccgtctaccgtggggccaggcggcagcggacgccaccctgcagcccggacagtaccgcagcctgggcctgagctggtacggctcggtgaccgccaccgcccacggcgccgctttcagccagtcgatggccgggaatgagccccgcatgatgatagataccggagacgtggccggtgtgccggtgaacggcaacagcggggtgaccaaccgcttcggggtgggcgtggtgagcgccggcagcagctatcgccgcagcgatatttcggttgatgtggccgccctgccggaggacgtggacgtcagcagctccgtcatcagtcaggtactgacggaaggcgcggtgggctaccggaagattgacgccagccagggggagcaggtgctcggtcatatccggctggctgatggcgccagtccgccgtttggcgccctggtggtgtccgggaaaaccggcagaaccgcggggatggtcggagatggcggtctggcctacctgacaggtctcagcggggaagaccgccggaccctgaacgtgtcctgggatggccgggtgcagtgcagactcaccctgccggaaacggtgacactcagtcgggggccgctgttactgccctgcagataa

SEQ ID NO: 389683 - DNA, 897 bp, Salmonella enterica
atggacattaaacaactgaagtacttgatcgcgcttgatcagactcggcattttgggcatgcggcaacggcctgccatatcacccaaccaacgctttctatgcgcattcgcaatctggaagaagaacttaatttaaccttgattaagcgaggccagcgttttgaaggtttcaccccggaaggggtgcgtattctggcatgggcgagggctctactggcagcatatgatgggcttgaggaagaagcagcgatttgtcgtgggcagatcattggtcagcttcgtgtgggtatggtgccgctggccagtctcaatcccatgcagttgattaagccactggcagataaatatcctgaactgcagttcagtctgttgtccatgacttcggaacaaatcatagacggagtgagccgtaatcaactcgacctcggaatttgctatttgaatcatgtagatacagatttactcaatgtggcgtggctaccacaaacgcggatggggttgctgcacgataagaaacattttcagtttgacgaatcaatacccgattgggaaaccctggccgaactgccgttgggtttcctgaccaaaggaatgtactatcgcgaatcgatagagatcaacttcaaagctaaagggttaacaccgaaatatgtctttgagagcgactcaaccttccagatcatccaggccgtgcaggcggggctatgctgcgccattatgcctctcaataatgggttagaagaactgggtgataatctggctattctccccatacaagcaaccgatgttgattcgaggctggcacttctcatgcgtaaccagcaaccgatctcttcgttagcggagagatgctttgccgatgcgcaggaaattttaagccaatctcttgagtcttag

SEQ ID NO: 389684 - DNA, 174 bp, Salmonella enterica
atggcaataacactggagaaaacttcaatgaaaaccgttgatgagacaccacgcccattctggaaaaaattgatgtggctggtcattatctgggcggccagtgtaatggctttgggtgtggttgcgacgatatttaagctgctcatgaccgcagctggaatgaaaacccattaa

SEQ ID NO: 389685 - DNA, 1011 bp, Salmonella enterica
atgggtattgatctgtcaattatctggtttgtcatcatcgtgttcgcaacgttgatgtacatcgtgatggatgggtttgatctggggatcggtattttattcccgttccataaacacgatgtcgatcgcgatacgatgatgaataccgttgcaccggtatgggatggcaacgaaacatggatggtactggggggagcggcattgtacggcgcattccctctggcttacgcagtcatcattgatgcactcagtattccgcttactgcaatgttacttggccttattttccgcggtgtggctttcgaattccgtttcaaagcaacgccggaacacaggcctctctgggacaaagcatttattgtcggttctgtactggcgacattcagtcagggtgtcgccgttgggaccttattaaatggcttaagtgtctccggacgtgcattcagcggctctgctctggtttggctcgcacctttcccactgttctgtggggtcgggctggtgctggcctatgctctgctcggctgtacatggctgattatgaaaacggaaggttcgctgcatcgtcgaatgtcagagctcgccatccctttaaccattgccttgttagccgtcatcgcgattatcagtgtctggactcctttggctcatcctgagattgcctctcgctggttcagcatgccaaatgtcatctttttcctaccggtacccttactggttctcgtttgttgctggggtattgttcgcagtgcttataaccgtcgggcaagttttggccccttcatgctgacgctaggattgatattcctcggtttcagcggtctggggatcagtatgtggccaaatatcataccgccatcaataacaatctggcaggcagcctctcctccgcagagccagggctttatgctgattggtggcttgttgattatcccggtcatcctgatgtacaccagctggagttactacgtattccgagggaaagtcaaaacaggtgagggttatcattaa

SEQ ID NO: 389686 - DNA, 1410 bp, Salmonella enterica
atgttcggattagatgccttccatttggccaggatacagtttgcattcactgtatccttccacatactttttccagcgataaccattggtctggccagttttctggccgtgctcgaaggattatggctaaagacacgaaatgacacttacaaggagctctatcacttctggtcaaaaatttttgccgtaaacttcggtatgggggtggtttccggcctggttatggcttaccagtttggcaccaactggagcggtttctctcagtttgcaggaagtatcaccggtccattactgacctatgaagttctgactgcattcttccttgaagccggtttccttggtgtcatgctctttggctggaatcgcgttggacgcgggctgcacttttttgcaacctgtatggtggcgctggggacactcttttccactttctggatcctgtcatccaacagctggatgcatacccctcagggttatgccattgagaatggtgtagtgatacccgttgactggctgaaaattatctttaacccctccttcccgttccgcctcatgcatatgtccactgcggcattcctggcaagtgcatttttcgtcggagcgtcagcggcatggcatctgctgaagggcaatgatacgccagccatccgtaaaatgttctccatggcgttgtggatggccttaattgtttccccaatccaggctgttatcggagatgcacatggtctgaataccctcgaacaccagcctgcaaaaattgctgcgattgaaggtcactgggagaataaacctggggaggcaacccccctggtactgtttggcctgccagacatggacgcagaagaaacgaagtataaaatcgagatcccttaccttggcagcataatccttacgcatagtcttgataagcaggttcccgccctgaagagtttcccgaaagaggaccgtcctaactctaccatcattttctggtctttccgcgtgatggcaggtttagggatgttaatggttcttctcggggtcgtcagtgcctggctgcgctggagagggcgtctctatacttctaagccgttcctttatttcgcactattcatgggtccatcagggctgattgcattgcttgctggatggttcactacagaaattggccgccagccctgggttgtctacggcgtgcagcgaacgcgagatgccgtttcttcgcatggcgatttacatatgtctatcagcctgcttgcttttatcgttgtttatacctcggtctttggtgtcggttatatgtacctcgtacgtctcatcaagaaaggtccggtacatgctgatgagcatcaggaaacaacagatggcacacctgcccgtcctctgtcggcagtcagtgagagcctggtcacacgtgggagagacaaataa

SEQ ID NO: 389687 - DNA, 2313 bp, Salmonella enterica
atgaaagttaaaaaaagatctgttcccggagttcacccatacgatggtccagcggggggctggggcgccctgaaagcaactgcgattgcggtacgtactcaaatggatacgctggaagcgcctcctacattgttgcgtaccaaccagccggacggctttgattgtccggggtgtgcatggcctgataaagaacataaatccactttccagttctgtgaaaacggtgctaaggctgtcacctgggaagcaaccagcaaacgtgtaacgcctgaattcctggctgcgaacacggtggcgaaactcttcgagaaaaatgattatgaactggaaggatatggtcgtctgactcatccgcttgtctatgacaaggccagtgatactttccgcccggtatcatgggaagcggcatttgaccgtattggtgaaatactccgcagcttgtccccagaggaagtggaattttatacttcaggtcgtgcatccaatgaagcggcctatctgttccagcttctcgcgcgtgagtatggtacgaacaatttcccggattgttcaaatatgtgtcacgaagccactagtgttggtctgccacaatccattggtattggtaaaggtacggtttctctcgaagatttcgatagtgccgaaatggttatctcaattggtcataacccaggaacaaaccaccctcgaatgatgggcactctgcatgaacttgccagaaaagatgtgcctattgtggtgttcaacccgcttcgtgaaagagcgctggaacgttttgccgatccgcaaagtgtcattgaaatggcaacttacagctcgacaaacattgcgtcatcttactaccaggttaaagctggcggggatgcggctgcacttaaaggtgtggccaaaacgttgcttgaaatgcaggaagcgaaaggtgatgtgctggatctcgaatttatcgaacagcatacagaaggttttaaagaattcgctgatgatcttaatgcgacctcctgggaatcgattgaagcggaatccggactgaaacaggcagatcttgagcgtgtagccattgcgtatgataaatcaaaggccaccatcatcacttacggtatggggatcactcagcataacaaggggactgagaatgttcgtctgattgtcaacctgctgttgatgaaaggtaacattggtaagcctggtgcgggtgtatgcccccttcgtggacattccaatgttcagggcaacaggactgtggggatcacggaaaagccttcagaagactttctggaaaagttggaagaagtcttcggatttgttcctcccaaacatcatgggcatgatgccgttcaggcaatgcagtcgatgattgagggtaagtcaaaagccattatatgcctcggtggtaatttcgcggtggcattaccggatcaccgtcgtggtttcccggccatgaaaggtctggatctcagtgttcatatcggaaccaagttaaaccgcacgcatttgttggtgtcaaaagagacgtttattttgccttgcctcggtcgcacggagctagatgtccaggagaccggtcgtcaggctattacggttgaagactctatgtccatggtccatgcttcttccggcaaacttaagcctgcatcagagtttttacgttctgagcctgcaattatcgcgggtatcgcggaagcaacattgcctgacaccaaggtggagtgggctaatttagtcgctgattatgacaagatccgtgtcctgattgagcagacgattccgggctttgatcattacaacgagcggataagaaatccgggtggttttcgtatgccacttccaccaacggagcgagtctggccaacgccgtcagggaaagcggtattctccgtgtatcatggcgtgcacgaaaatattcgtgtaaacggtaatgatatattcagaatgattacgttacgcagtcatgaccaatacaatacgacgatttatgcaatggatgaccgttatcgtggtatttttggtcgccgtgatgttctgtttatgaatgagcaggacatggcggatcaggggcttgaacatggcgatcgtgtcgatatcgagaccgctctggatgatttgccggcacctttacgcctggaagatatcaccgttgttgcttataaaattgcacaaggatcagtaggagcttactatcctgaggcaaatgtcctggttccattggattatattgaccaggaatgtggcacaccgtcttataaatcagtaccggtaaaaataacacttcgtactaaagaggtgttaaaaacacctaatctttacgtgaaataa

SEQ ID NO: 389688 - DNA, 504 bp, Salmonella enterica
atggattatgaatcgtatttagttaaggttttcgatgaaaaagacgacgctgattcacagcaaaaagcactatttaaaattgatgagtttatattaaaacgtagcgatttcaatcgtgaatttgaaaagaatggttttgaggtatcgtttaaatacaatcgcgcaccaagttttgaaagttatctctatgttagttgtcagatacatagagaaagaatagagaattctacggtgaaagttcccctccaaaaaaaggttacaaaattgataaagagaaaaccaatgcctaaaatgcttggggaacaatcagtatcattgctgatcaattatttagatgtcactatgcggttgcagaagaaaattgaaagctttcaaaaagaacaggatcatgatgtaagaattgttgatatttgggaccgtttgaacgaaagcgagaaaaatgagctgcttaatgcaatcagaatatttactgggaagcctgatagcgacgaaaatgaggtttag

SEQ ID NO: 389689 - DNA, 825 bp, Salmonella enterica
atgcataagataatttctgataacagtgataactcgcatgcctttcgcaatgtgtcactctggaagcgagaaaacctttcttttgtccaacaagatgttctggcagaagaggtaccggttgcattggtttataacggaatctcgcatgtagtaatgatggctacacccaaagatctggaatattttgcgcttggtttctctttatctgaaggcattattgaacaaccgaatgaaatttatggcattgaaattgagcctgtttgtaatggtattgaagttcgggttgagttagccagcagatgttttatggcgctaaaggaacgtcgacgtactctggcgggcaggaccgggtgcggaatatgtggtgttgaacaactcggcgatattggaaaaccactcattcctttaccttttacacaaaaaataagtctctctcatctggatttagctctgggaacgttatcgttatatcaaccggttggatctttaacaggttgtactcatgctgctgcgtggatgtcgacatcgggaattcttgatggtgggtatgaagatgtaggaagacatgtggcactcgataaactactcggcagtcgatcaatgaagaatggggagtggcaaaatggcgcggcactggtttccagtcgggctagctatgaaatggtacagaaagctgctgcatgtggggtagaaatacttttcgctgtctctgcagcaacctctcttgcggtcgaagtggctgaacgttgtaaccttacgcttgtcggattttgccgtccaggtaaggcaaccatctacacgcatccacaacgactgacattataa

SEQ ID NO: 389690 - DNA, 222 bp, Salmonella enterica
ttgttcacacatgtaacagtaacacacaaccaacagaatcgcggtttaagtgaagatttttttgaaattgatgaaaaatgggagttatatattaattcgcaccacatcgttgatttctatagaaaggcagggggttcttttacccttgttacactcatcaatggcgatatgtatggagttcaacaaacaccagaagaattatatgctattttgaaaggttga

SEQ ID NO: 389691 - DNA, 282 bp, Salmonella enterica
atgatttttaaagatattactacaatctatatcaatagcgataaaaataatcgacttatccgttatgatttactacgaaaagaaaataatgattttatcattcaggtctttgatgaccagaacagagacatagcggatcctaaaccgataatcaaaatcgatcagtttgagataacctatgattcttatattgatgattgcaagcactcacaaaaactacctgcttcttttgaagagtatgttgatttgaaattacaggaccaccgaaataaactcgattaa

SEQ ID NO: 389692 - DNA, 597 bp, Salmonella enterica
ttgaccagctacaaaaataccgccagctatgaattagcacatctttcgtggtgtattatcatcgctgttaaacttgcccatcaggaaaggaaaatcataaccccttctcaagagcatatgtttatcatgaactggcttttaaacgcccaaaagtataagttattttcgaaaccatttgcacaggatatcctttggtttctgaatcagggaaaacgttatggccagaaagcggagttatataaaaaagcggcaagtgttctggcaatacaatcaattgagaatgaaaaatacagccatttatttcgctttacgcaattcttcgacgagttaaaagataacggatggcgtggttatgtactacctgagtgtgaagaaaaaaatcagcccaatatcgatacaacagagtctgttatctatgtaggccaggcagcgttagttgattcatttaacaagcatggcgtgctcataaaaccacttcaactcagcgctgcaggaaatacattgttaatccagtcactgttaagtaaatacatgcttaaaacagaaaatgaaataaaatcagatggttttacaactttcacactactaccagactga

SEQ ID NO: 389693 - DNA, 453 bp, Salmonella enterica
atggctgaaacccgcattctggtgagccccgggcgttttaacgtggggaccgaatacagctggctggcggaacgcgatgaggacggcgcggtcgtcactttcaccggcaaggtgcgcaaccacaacctcggtgacagcgtgaaggcgctgacgctggagcactatccggggatgaccgagaaatcgctggcggagattgtcgacgaggcgcgaggccgctggccgcttggccgcatcacggttattcaccgcatcggcgagatgtggcctggcgaggagattgtcttcgtcggggtgaccagcgcgcaccgcagcagcgcgtttgcggcaggggagttcattatggattacctcaaaaccagagcgccgttctggaagcgcgaagccacgccggaaggcgatcgctgggttgatgctcgggatagcgatcgccaggcagcagagcactggtga

SEQ ID NO: 389694 - DNA, 246 bp, Salmonella enterica
atgattaaggtgctcttttttgcccaggtgcgcgagctggtgaataccgacagcctgacgctggatgcgtctttcgaaaacgtctctgccctgcgcgcgcatctggcggcacaaagcgaccgctgggcgctggcgctggatgaaggcaagctgctggctgccgttaaccagacgctggtggagttcacccatccgctggccgaaggggatgaagtggccttcttcccgccggtgacaggaggctaa

SEQ ID NO: 389695 - DNA, 486 bp, Salmonella enterica
atgtcacaactgacccacattaacgccgcgggtgaagcgcatatggtggatgtttccgccaaagccgaaacggtgcgcgaggcgcgcgcggaagcgtttgtcaccatgctgccggaaacgctggcgatgattatcgacggcagccatcacaagggtgatgtctttgccaccgcgcgcatcgcgggtattcaggccgccaagcgcacctgggatctcatcccgctgtgccatccgctgatgttgagcaaggtggaagtgaacctgcaggcccagccggagtacaatcgggtacggattgaatcgctgtgccgcttaaccggcaaaaccggcgtggagatggaggcgctgacggcggcctccgttgccgcgctgaccatctacgacatgtgcaaagcggtgcaaaaagatatggtgattggcccggttcgcctgctggcgaaaagcggcggaaaatccggcgattttaaggtggacagccatgattaa

SEQ ID NO: 389696 - DNA, 513 bp, Salmonella enterica
atgagtcaggtaagcgcagaatttatcccgacacgcattgctatccttaccgtttccgatcgccgtggcgaagaggatgatacctccggccactggctgcgcgaggcggcccatgacgcggggcataacattgttgataaagcgatcgtgaaggagaaccgctacgccattcgcgcgcaggtctctcagtggatcgccagcgatgaggtgcaggtggtgctgatcaccggcggcaccggctttaccgcaggcgatcaggctcccgaggcgctgagcccgctgttcgaccgcgaggtggaaggattcggcgaggtgttccgcatgctctcctttgaagagattggtacctccacgctgcagtcgcgcgccgttgccggggtggctaacaaaaccctgattttcgccatgccgggctcgaccaaagcctgccgcaccgcgtgggaaaacatcatcgccccgcagctggacgcccgtacccgtccgtgtaatttccatccccatttaaagaaataa

SEQ ID NO: 389697 - DNA, 990 bp, Salmonella enterica
atgacctcacaacttacagatgctttcgcgcgtaagttttattacttacgtctgtcgattaccgatgtgtgcaatttccgttgcacctactgcctgcctgacggctacaaaccgggcagcgtcaccaataacggctttctctccgtggatgaagtgcgccgcgtcacgcgtgccttctctgagctcggcaccgaaaaagtgcgccttaccggcggtgaaccctcgctgcgccgtgatttccccgacatcattgccgccgtacgtgaaaacgaacgtatccgtcagattgcgatgacgaccaatggctaccgtatggcccgcgacgtggctacctggcgcgatgcgggcttaaccgccatcaacgtcagcgtggacagtctggacgcccgccagttccacgccattaccggccaggataaattccagcaggtcatggacggtatcgatgcggcatttgcggccgggttcgagaaggtcaaagtcaacacggtgctgatgcgtgatgtgaaccatcaccagctcgataccttcctggcgtggattaaatcccgtcccattcagctgcgttttattgaactgatggaaaccggcgagggcagcgagctgttccgccgccatcacatctccggcatggtgctgcgcgacgagctgctgaaacgcggctggatccaccagatccgccagcgcagcgacggtccggcgcaggtcttctgccacccggattacgaaggcgagatcgggcttatcatgccctatgagaaagatttctgcgccagctgcaaccgcctgcgcgtctcctccgtgggcaaactgcatctgtgtctgttcggggatggaggaatagacctgagggatctgatggttgatgaccggcaacaggccgaactggaagcccggattaccgaagcgctgacgcataaaaaacagacccacttcctgcatcagggcaataccggcattactcagaacctgtcctacatcggcgggtaa

SEQ ID NO: 389698 - DNA, 918 bp, Salmonella enterica; identical to SEQ ID NO: 158702

SEQ ID NO: 389699 - DNA, 2739 bp, Salmonella enterica
atgcccgcattgtgtgatatttgtcaggcaagaccggctaccagccgcgtcaccgtggttcagaatggtcaacgtaagactattgacatctgtgattatgattaccgccagctaatgcgacatcagaacatcatgaaccccttcgactcattgctgggaagaggtgggctctctggcttcttcaatggttttggcaatagccctcgcgatcgtgatgacgagggaatttttggtgaagtaccacgtgagtcggtcgatacaacggaagcattcagtaagcagtcactggaattgttacagcgagcggcagaaaaagctcatcagcttaatcgtagcgaactggatacggaacatcttctgtacgtactttctgatgctgacgtctgtaccgcattgtttaaagatctgaaaatatccccggacgatattaaaagctatatcgatcagaatgcttatagtggcgcaactgagaccgggagcacacctggtgacctgtcaatatcgccccgccttaaaaaagcgttcatgtacgcgtttcaggcatcccgtgaactagggcattcttatataggaccagaacatttactgatcggcctgagtgaagttcccgatagcgtagctggtgcattactcaagaaatatgggatctctcccgaggcaattcgccagaaagttgtgaaaatcgtaggtaaaggcgccgaagatggccgtgttgatacccctaccggtacgccaaaccttgataaatttggtcgggacctcactgaaatggcgcgagctggtaagctggatccagtccttggacgtgcgcaagaaattgaaaatacgatagaagttctggctcgccgtaaaaagaataacccggtactcattggtgaacccggcgtaggtaaaacggcgatcgttgaaggactggcacaacgaattgtcaaaggtgatgtgcctgaagttttgcgtgataaacgtctcgtcgagatcaatatgaactcgatggtagccggagccaagtatcgtggggagtttgaggaacgggctaaacaactgattgatgaagtgacggctaaaaagggagagctgattctctttattgatgagcttcataccatagttggtgcgggtcagggtggaagcgaaggtgggctcgatattgcaaacgtcctgaagcctgctctggcacgtggagaacttagcctaatcggggcgacaacattaaatgagtaccagaagcatatcgaaaaagatgctgcgcttgagcgccgcttccagccggttctggttgaagagccaacagtagatcaaacgattgttattcttcgtggactcagagacacacttgaagcccaccatcaggtcactttcaaagatgatgcatttgttgcagctgctgagctatcagaccgatacataacgtctcgttttcttccggataaggccattgacctcatcgaccaggctgcagcacgcgttcgtattggtgccagttcacgacctgttgcaattcaggagcttgaggctgaaatcgcgcatctgaaacgtgaaagagattacgcctcctcccgtaaactttttgacgaggtgaaacgttttgaaagtgacattgccgctaagcaggaatcccttgaacaacagacagaagcgtggaagaacaaaacgggctccgaaacccttgaagtgactgttgctgctgtggcggaagtggtctccagactgaccggtatacccgttagcgatttgacccaggaagaacgaaaaaaactgctcaatatggaggaactcctgaaacaaagagtcgttgggcaggatcaggcagtcacagcagttagcgatgcagtcaggctctccagagccggtctgggacaggcccatcgtccgattgcaaccttcttgttccttggtccgacaggcgtggggaaaacggaattagccaaggccattgccgaagccgtatttggtgatgaacaggccataattcgtattgatatgtcagaatatatggagaaacacactgtcgcccggttgatcggtgctcctccaggatatgttggttatgatgagggtgggcagttaactgaaaaagttcgacgtcgtccatacagcgtgatactgctcgacgagatcgaaaaggcgcatcccgatgtttacaacgttctgttgcaggttttcgatgatggccgattaaccgacggtaagggccgggtaattgatttcagtaataccaccatcattgctaccagtaaccttggttcggctctcattatggctaatgctggattaccggaagaagagcaaaaaacgccgaaagtcctgcatgaagagttaatgcaactgctgaaaggccatttccgtccagagtttcttaaccgcatcgatgaagtgattgtgttcaactcgctgtcgcaggagaacatccggctgattgtccagattcagctcgacagactgactcgcactgcagctgcacaggacatttcactcaaactcgatgactccctcgttgaacatctggttgaagtcggttatcagcccgactttggggcgcgtgaactcaaacgtaagattcgccaggaagtggaaaccaggctggcaaaagaaatcctcagcgatcaactcaagtcaggagatacggtcagcattggttacgatgacagtactgaaaccgtcgtgtttaagaatgaaacaattccagtaaaaaaagagaatgacagtgtggatgaaaatcaggaaaatgcaaaaaactga

SEQ ID NO: 389700 - DNA, 1146 bp, Salmonella enterica
atgatacaagcaatcaaagaccctaatttttttcagaatatactaagcaccctactgcacagtgatatacccgtcattcgggtgatagttatctttgtcctcctgcactgcatcgcacactatgtggtacttccctttctggacagaaaagcagagcaacttcggtcatcccgactgcagatcattactcaccatcatctgtttcgttacacagtattaacccttcaaggcatagtgctgacagcacaactgtctctggtgatatcacctgaaaataaaatactggattttatactcctgggggcacgactgtgggtgcttacctttgccttgctggcattttattcatttatagatgttggctgcgaactttacaaaatcagcaataaactcagtgggttaccttatcggggtatcgaacagagccttaagctaacaggcgctgtagtttacgctattttgttgatttcattactattgaataagtcaccgcttatcttactcagtggactgagcgctgtggcagcggtattactgttagtgtttaaagatccgctccttggcctggttgcgggcatacagctttctgcaaatgatatgttgcgacccggagactggattgaacttgaccaactgggtgcgaatggaactgttcaggatattgggttaacgacggtcaaagtacttaactttgacaataccattacgacaatacccacttacaccctggtttcaggggcatttaaaaactggcgttatatgattgagcataatgccagacgctttcagcgcacgattaatattgatattaaaacgattaaatatattaaccctgaagaaaaacaggccattactggaaatccatctttacctcaactgacggagatggaaagcaatgcccatactaacgtggaacttttccagcaatatgcctgtgcgtatttacgtcaacatgatgctatctgtcagcaaatgacattgatggtccgtcagttacaacccacggtttatggtttacctgttgagttttatgcttttacatcgtttacggagtggatggcgtatgagcagttacaaacagaaatcatgtcctatctcattagcattgtgccattctttaatttaaagatacatgatgtttcatag

SEQ ID NO: 389701 - DNA, 858 bp, Salmonella enterica
atgacgaaagaaatgactaacttagcgttagcacctgttggcaatctggagacctacattcgagcagcgtactcatgtcccatgttgtcacaagaggaagaacaacgtttagccagcaacctgcaaaaaaatgatgaccttgatgcagcaaaacacctgatactttcgcatctgcgttttgtgattcatatcgcaagacaatattctggttacggtttaccgcaagccgatttaattcaggaaggaaatgtcggtctgatgaaggctgtgcgacgttttaacccggacgttggtgtccgactggtttcgttcgcggttcactggatcaagtctgaaattcatgagtatgtattgcgtaactggcgcattgtgaaagttgctacaactaaagcgcaaagaaaattattcttcaacctgcgcaaaactaaacaacgactcggctggtttaagcaggatgaagtggacatggtcgcccaggagctgggggtttcggtaaaagacgtccaggaaatggagtcccgcatgtcagcacaggacatggcctacgatatatacccggatgatgaatcagataaccatcggtctgtttctccttcactctacttgcaggataaatcctcggattttgccggaatgattgaagaggataactgggagagtcaggcatcagaccgtctggttgtcgcaatggataccctagacctaagaagccaggagatcatccgcgcacgctggcttgacgacgaaaatagagccacactgaatgaactggcggaacgctacggtatatcggcagaacgagtgagacagctcgaaaacaacgccatgaagaaattacgcatggcgattgacatataa

SEQ ID NO: 389702 - DNA, 972 bp, Salmonella enterica
gtggcctgtccattttcacaatcagtttcccaggctgtagatgagaaacttacaagtgcagccatattcctggttgtgacccttaaccccggtacctccgctgaaactactgtacgaacattctgtgcaacactatcctcccttgtcagaggggtaggtttccgtatacctgatggtggcctgtcttgtgtgttgggattcggggaggaaggatggcgtcgcctttttggggatgctaaacctaaatatttgcataccttccgtgagatcaatggcgtccatcatgcaccttctacggccggagatttgttatttcatatccgggcaaaccgtatggatctctgctttgaattagccacccggatactatcggaccttgaaaattctgtttccgttgttgattccgtacagggattccgttatttcgataatcgagatctacttgggtttgttgatggtactgaaaacccggtcgctcagagcgcggtggatgcgacattgataggtgatgaggatggggcattttctggcggaagttatgtcattattcagaaatacctgcacgatcttgataaatggaaagccattcctgttgaacagcaggaaaaaatcattggccgcgaaaagctatcggatgttgagctgaaggatgcagataaacccagctacgctcataacgtgctgaccagtattgaagaagatggcgaagacgttgatatcctgcgtgataacatgccctttggcgaccccggcaaaggcgagttcggaacctactttatcggttactccaggaaacctgaacgtattgagcgcatgctggagaacatgttcattggcaatccaccgggtaactatgaccggatcctagatgtcagccgtgcgattaccggagcgttattttttattccgacgtccagttttcttgatagcgtcgaaccccaaccagagctcagccacaagaccgagggctaa

SEQ ID NO: 389703 - DNA, 918 bp, Salmonella enterica
atgttttttaatgacgaaagtttgttcagtttccttttcaggactcaacttatttatggctatcataatttcagaaatctcataacgcttggcggatgggtttcacataaaataaatgcaaggaaggagcttttcccaatttaccatcgatttaatgaattgaagttattaaatgtagttaattcaggtgaacatccccacaccactttttcttccccatattcaaatttaagagagtttaaagaatttattgagcatggtacagcttatatcaatggtcggcctgacagaacaatcagattttgcaatgtttgtattatagaaaacaaaaaaaagtatggtgttggttacctaaaaaaagattgggagttctctcggtattgttttatccacaaagtaccattgtctgaaactattcctttttcatataaaaaaacagtgaatgctatgagtgatatcatacagggtgttttacctgaaaatgatgattttgtgatttcccccctagaggaaacaaaatggaaagaaataaaaaaacagcagaaaaaacccttatccactctttatataaaaccgtgcgcttcgtttttaatgaaagaatggatttatgaaaacagaattatattaactgaattgcttcaaaaaaaactatatgatctccaaaaggacgtgctactgaaacagctcactttgtaccctgattggtacgtctcaaaactatatcacaaaaggcatgatgaaagccttgttatttttaaagattatgtaacacagaatacatgtataataaaagaaaagtacggtatattacggaagaatagtttcgtttttcggtgtttaaaggcaaaatcaataaattgtaatgactgcactgaaaaattatcgtcgagagattgtaaattgcgaaatcaattttaa

SEQ ID NO: 389704 - DNA, 996 bp, Salmonella enterica
atgttgttaaaagcattcccgggggaaatcctctttagtcgactttgcagaagcttgtcagtaagtggaatgccggtgcagaagttttcaaggtgcctcgggctggaagcacggtcctcatttcatcctttcctgacacagcatctgacagagattgctgagactagtcacgaaaacgctgagcttctctgggcggaacaaactctgttccctctatgggtatggtcaatgcccggttatgcaaaagcgcttcggcaactgacgggccctccggcacgtttgttatggttttatcaacttacaggcaaccactcatcccaaaggatgcaacttcatttttgccctgtatgcgcaagggaagatgcaatgggatatggtgtcccctactggcattgtgaacatcagatcccgggagtcagcatctgtaaccgccaccgctgccggttaatacccaagctggttccacccagtcctcacattgctgttgaattttaccccgacaagtttaacaacatgatcctctgtaagaacatagaaaatgattttgcagtctttgccagtcagatattgacttgcctggcgcatggtgaagaagtatcagttaattacttttgcggttttgcctcgaccagaactgatgtgaagaacatgaagcacagcgggaacgaaaaactcgacatgtcattgaacgacctgattagacatttgtgggagaaaaattctgacccagttatcactgataaatcacacttcctttattacatcctctctaactttgaaaatatattccctgcacaaaaactacttctctttttttatttgaagcgcatacaaagcataaggaaaagtgttagtagagagtacagcaccccaaacaaaacaaataaagaaaacataaacattgaaatacacaaagccgccatggaattaaactacctgatgatcaatcattggccttcaacaaaactcactgtcgagtttagagctttaacgtga

SEQ ID NO: 389705 - DNA, 1464 bp, Salmonella enterica
atgactgtgaatgcaaaatatcaccaagcagatttgccagaatacagaggtaaccctctgatagaagctctccctccccttatgtcccgggaggatgtcatgctggctctcagcaattttcctgaaattaatgaaaacgagcgtgaactgagcaatgaggtgcgtgaacagtacgttgatcgtatagatgccttccgctgtcctcagggaacattctttgactgttacaaggcaatagtacgacttctgcggacaggttatacaacccgtaacccacttgatattcacacagttcggtttcttcattacagcgtagagggaagcttaggtgaagctctcggtgatggatttcatcgcccccgggcagggactttttccattaccggcataagcggtgtgggcaaatcaaccatgcttgagcaggtactggggcattttccacagatcattgatcataatgtttatcaggggcacgatcttacccctcttcgtcaggttgtctggcttaaaataaattgccctccaaattcgaaagcacgtgacctgacggaaatcttacttgccgctatcgacgatgcacttggacttaagcgtacagccccgccatcaaggactggtacgttactccggctcatcgcgcagaaaattaagtctgccttcattggcgtgctggttattgacgaaatgcaaagactgacccgcacaaacggtgatgaacagcttatcaattttcttcatgacatcgtcgatacattaggtgtcccgctagtcttttgcggaaatccagaattcgaagacaaaatgcgccaacggttacgtttcgccagacgtgcagaaaccgcaggtttcattcgtcttaatccgctcgcgtaccagacgtccgactggcaatctttcattaagtatctgtggcgctatcagtggactaatgtctacactccccttaatgatgagctcaacataaaaatgcataagctgtcgaaaggaaatcttgcgatagcacagcgattatttgttactgcgcaattaaaagttattggtaccggtaatgaagtcattacacccgctttgttgggtctttccgaatccgtattaaccagtcgcgcagatgaatttatccaggcagacgctctcgtttatgacgaggaactgcccgaattatcagagtctgaagagacagtattacctctgaagaataacggcaaaagcttcctcaaaagccgtgaaatcaggcaaaaaccggtcagacgggtgcataaatcattcacagtcacagccgatttgaaccggccccagcatgaggagtttgcggaagagttaaataattatactgcacaaactgaggcgatcctggccaaaaagtgtgaacctgtcctgttccgtgcactctggcaaaacaaatgtcgttacagtgccctggaacactacgatcggctttgcaacgatccttcaacagagacctga

SEQ ID NO: 389706 - DNA, 2121 bp, Salmonella enterica
atgaaaataattaagaattccgtctggttagtttcaaaaattgaagggctccctgacgccctgtaccgggttcttgccctgtataaagaaacaggaaccatggttctgtatgaacttaacgacaaaaaaatcacacgtccgaaactattttacattgaaccatttaagttgggtgtacaggaaagaaacattgtgcatttcaactatcctatacctgtatggatgatggccacagaaaatgatattccggataaaaacaggatccggagagataagaatttcgccctgattagcccactgttgtctgatcctgagtttctctttttgtacgcgctcaacgagcgaagtccgttgttaagaaattatgcaaaggacaacaacgtcagctattccacgataaaaaaattattatcgaactgctggaagtacggaagaggtaaacagtcactgacgccagcatacgccaggagtagagggaatggggtcaataaaacagttaagtctgtttctgttggccgtaaaaagaaagggcgcgccctcattgatggcagagctgaaacctacatcatgcgagaacgcgactcagctaacataaaaaaaatcctgaaaaaacactacctcaaaccgaaaggcaaaagccaggctgaatgctggcgcatctatcttgaagaatacttccctcaactggcttcagtatctcaggactgcgccattccctatccttctctggcacagttcagatattgcatcactaaacttttctctcttgctgagatcgcacgtcggcgcacaacagaaagagactttttactcaacaaacgggctttagcggggtcttctgctgactctgatacacttccgggctcagtattcgaaattgatgcgacagttgctgatgtgcatctggtatctgaattaacgggagatgtggttggccgaccgacagtgtatctcgttgctgatcgtgcaacccggatgataaccggcatgcacgtatcttatctttatgcttcctggcgagcagcatctcaggcacttgctaactgcttttcaccgaaaggacagtactgtcagttatttggtatcaatgatattagcgatgaccgttggccatgcgcccatgtaccaacaaagttactttgcgataatgcagaaatgctggggcttaaaacgcagtctgcagttgttccattcacagaattaatgtttgctccttcctacagggctgacctgaaaggcgtcgttgaaagcaggttccacatacttaaccaaaaggcaatccataagcttctgggtacgacaagagggggattagttatcaggggtgagacccggccacaattaaggtcatgttatacgcttaaagcatttacagaaatcatgatacgtgccgttgatgagtataaccatgccctgaatacagagcttctgtatattaatcctcttcttcttgaacataatctgattgctactccggtcaatagctggaatgtcagtattaataacttccgttttggcggttatcagatcactgagcacgaaattatatcaagacttctgtacccggatagcgcaagtataactggcaagggaattcagtatggtaatcgattctatgagtgttcagaggatgagatggtcagggccagaagtttcggtcagacacgtgttgaagtgcggattaatgataactccatggacaacatttatataagaagtggaaaagatacttttttttcacaacgggaactgctgtccaggcgaaaaatatttcagggccttcctcatatggaagcagaagttgtttctgatattgtcgatatgcataaaagcagtaatgttattacacctgagtcgatggcattgcggaagctgattgaagctaatgaacagcaaggtgaaattttgctggcagcactgaggaaaaagggccgtgggcgttataaaaacataagggaaaatcgaagaaaagaagtgctgtatgctcaacagggagactccagaaagacccgtgaggattacaaacttccccccgcaaacaacattgtgattttaccaggtcccgaagcaaggaaagcgtggcttacaaaacaaaacgatccttacaagaaggataaatag

SEQ ID NO: 389707 - DNA, 849 bp, Salmonella enterica
atgaccagaggaagacggtttacatcgtttgagagctatgaaaaagcactcagggacgggattggccttggaaccggggaaaattatcagccctggatacggccacaagactttacaaactcaacgggtatccgctcagccatacgcggtttaaaaacgttcagacagcacaacacgctgtccgggattgaaagcgagttttattaccttgccgaattcaatgattcagtaattgatattcgcgaacagtttccgcttttccccgtcacactaacgcaaaacattgccaacattcttaatgtcgcccatccggcattacgcaggaaagtctgcgacacagatgagccagcagtacccaccgtcatgacaacagatttcgttctgacattcagaaaccaggatggaaccatcaaatatcagtcttattcagtaaaacctgatgaaatcatttccagacgtgatgccgaaaaacaagaaattgagagactgttctgggagggcattaatgtacgttttcaggtatatacagggtctgaggctaccagaataaagagtagcaatattagctggtttaccgcccctttcaggatgaacggactgcccgattatcatcttgatgcgtccttgttaagagcgtttcctcccggtcagtacgttcttcttcatatggtaaaccaaattgcttcatctttacggatcagccctgatgatgccttcatcgtacttaaatttatgttagcaaccaaaagtatcgaagctgatctcacatcggacatcgttagcaatggatgtattgtcgttttacgcaacagtgcatgtgacatgggattagcaaatgaaaataattaa

SEQ ID NO: 389708 - DNA, 648 bp, Salmonella enterica
atgcttgaaaactacgtttgcaaaatctatgtgagtgataattcaaaccctagttcatttcgcgaagcaacggcatttggcttcgatgacggtacgagtgcacaccttctcaccgcagcccatgttgtgacggatgttcttggcaagaaataccccagcagcaacaaccaaaagctttacgtaatattccacaatcatctcggaccagtaaacaccatcccagtacctgttgaattcattcttaaggactgtaatgaccaaagcaactttcaaggcaatatgccgtttgtagatagtgcgaaaatgattttgccatctggaatgaaacagcctgtatcccattattttaaacgccgcccccccgtcggcaacatgcaaacatttggggtcggatatccattgggccagactgcactttcaacggtccttgggaaaattcaaagtgtcacttcctgctactgccctaaacactctaaccagcattgcacatctcgttttgaaatttcgcattacaacaagcaaggatgctcagggggcccctatatcatatctgatgaaggtgagtattatgttataggtagtctcattggtgaaattcatccaggtccacctccaaccctgtcagttcagtcatcgaccgatttttag

SEQ ID NO: 389709 - DNA, 858 bp, Salmonella enterica; identical to SEQ ID NO: 130558

SEQ ID NO: 389710 - DNA, 210 bp, Salmonella enterica; identical to SEQ ID NO: 130559

SEQ ID NO: 389711 - DNA, 285 bp, Salmonella enterica
atgaatacatttttatacgtgcttttggcctggattgttgtactttttatcgccaacaaactgctcgcaagacgtaagcccaagacggttaaaatcctggtacagcgcaacgggaaagccgcagaggttgatgctgtagtggttcagggttcaaagagcgctgacgacggtgatgatttagatgatgatcaggacgatggtcttttcgatctgaatccttatacacgtgaaaaccaaactaatggttgggctattctggccagaggtgatcaccagtcaaaatga

SEQ ID NO: 389712 - DNA, 894 bp, Salmonella enterica
atggtgcgtaatcttaagagtaatgacgatttttcgcgtgaactgtcttttctttttcacaggtctataaagattagaaattcaggtttcgcaatttttggtgcaggtctattgataatgatttttagtgtttgtgtgtggttgttgtcactacacttctcaccttcagttctggactttgatattgatgtgcccttgtcattaattgattcatctgagggcgaaggtaaattaatgatttcggatattggcgattcatttggaggtttctttactacatactctaagttgttattaggggttatgggtctatttttagtgtcttcaactgtttttaaaattataaagggaggggaaataggcgagatgttcccgatgcttataattggctctgcttttcttataggcatgtcagtttttacatctgctttaggttctgatgagactgatgtcaattcatcctcgacggtaaattttatcaagaaatatgtaaaagatgagaattatgataaacttgttgcatatttaaatgatagtagttggccctcaggtgaagatgtatctgtgaactatttaaaggcacagttgcatataaaacttggcaagccagatgtaaagctaacacagaatgttgtggagacgtatacgtctggtttattacagtctaatattcccgtgaaagttcgttatgcattggaaaagacagctttagataaaaccgtctcaccgcttgcgattcgttatgagcaaaaacgtatgactaaatcatataactttgcaaaaatgtcggttatttgtcttaaagtaggtattccggtggcgttcgttggcgttttgttcgctcttcttggtataaaaatcaggcggcgggtcagatttattgcatcacattaa

SEQ ID NO: 389713 - DNA, 273 bp, Salmonella enterica
atgattaataatttgagcaccaaaactgagattgttgcttttactttgacttccgctgaactggaaaagcttgggctgaatgagcaagatgaaaaggagattaaagccgtcgcggaatgcattaatgccgatgatccagaaacagtttatcgctttggccgggcaatgggggaaaacactgctaattatgcggatagcctgcttgagcaaattcgcaataaagatttagacgaagccgggagcaaattaactgaaattctcgaacttaactga

SEQ ID NO: 389714 - DNA, 477 bp, Salmonella enterica
atgagtattatattaccaagccatcttattgaccttcataatgccttccttttaatggacgaggctccactggaatgtgatgggcataccatgataataagtaatgctcttgtaaaggcctgtatccctcatgaacgaattcttggcaccgttcgcggccagcacaatggattttgtttgtatcctcatctctggcttatgctagatggttatataatcgactaccggttaaggatgtgggtaaacctttctgacgggacgtcagtttccgacactgctccgcatgggatttttcctgccaattcggatgagataaattatctgtatgaaaaacataaagtcgtccccgctaagctgttagataaagacctccttagctttatctcagatggtttttcgggcagactaactgttcctgagtcgacaatagactggttcaaactgcactcacatgatatccctgaaattaagaactga

SEQ ID NO: 389715 - DNA, 528 bp, Salmonella enterica
atgaacattaccgacaaagaacttagctcaaatacagtgagtcagtatggatggaacttaggagagttcaatcactcaacgccttttacatctcattttatttatatcaccgactatcataaagataatacatggatgatttcactttcgcaggaggattttaatacgaccaaaatttcaacatcgttaagtctagatgcctgtgtgtccatgctcggaaagatactaaaaaaaatgtctaacaaaatcggtatctcacaaacggaagaatctgaattcgcatttcttttaacaaactatattaaacaaactttgacttttagagaatggcaacgcaatgctgaaggaaatcaacgactgcactttcttattaatatctacggtgcaaaagaagacggtggcgaagtggttttaagaccatttattgtaaatcctgatgaattaatgcttactccagcggctgtcgttgaatttaattcgcaggttatcaacgttgatcggcagcgtcatcctgagtggttccgttaa

SEQ ID NO: 389716 - DNA, 516 bp, Salmonella enterica
atgatagatgcacgctatcaaggtaagcctattaacagtattcctgaagtagcgtttgctgaaggtttatcgcgatccggtttaagccctgttctgctactggcatccccgaccacagtacccgttactacggatgagcgctggtggctcgcaaaggaaaacgtgtcaggacattacggcaggattttttatgctgcggtgcgggagctggtcataaggtcggaaatcctgtcagcagtgggaagtatttcggatgagaacttcacgtccgaacacatgggttacttcgagcgacttagatctgatgaaaaagaagtcgtgtttagcgattatttgcgcactctcgctgaatgcggtcttacctgcacggcgaataatcttgtcaaactgacgcaggatttatacccgattgatgcaactcctgacaacattagaaagctatccacggacagggatgcactgaacgaactacacatcgatggtatggtactttttattaccgaccctgcgctttga

SEQ ID NO: 389717 - DNA, 378 bp, Salmonella enterica
atgaacagcgaacacaataagcaaggctgcaaccgtgcggaagaagtccaaaaagaaagtcagtcgtgcaataaagacgatgaactggcgcaactcctggcgaatcttgaaataactgatagtgctctgtacctgagtaacgaacgtatagaggaaattgcgtctacagactctgatgcggagaaacgccagcttgccggtcgcctactgaatttgcagcgatacagagacaacacctctgttcttcacgccctcagctttaaacatcagccaggttgttatcctctcaatccgcttgatgaccgcctactgaacaagctcagtgattttcagggtcgttcaatttctctggatggtggggatgataatgcatcgtga

SEQ ID NO: 389718 - DNA, 357 bp, Salmonella enterica; identical to SEQ ID NO: 85996

SEQ ID NO: 389719 - DNA, 327 bp, Salmonella enterica; identical to SEQ ID NO: 91887

SEQ ID NO: 389720 - DNA, 462 bp, Salmonella enterica
atgatcggtgctccgggcgtcttcgcgcccgtgatcgagaacgccaagcggcccgatgccggcgccgtcatggcgtggggtgtcgcgatcgtggcggtgatgatcctcttcacccctttgctgctgcgctgtccaccattccggcgctggtatggccggacggatgcgctgtcggagcggcagcgccaggcgcttgccgagcgcggcctgcgccgctactaccagaccgctttcgatgacggctacgtgccccgcgtgatgccctacgtgtggcgcatcatctggacggtcggcgggttgatggctgtgaccgccgtactgcctaccaacaccggacggccagccttcgatgccttggtggtcttctcgacctggtatccgataggcgtgatgctgctggttttcgcgtcgaggccccttggccggttgattcgccaaagagcacaggagcggcggaaatga

SEQ ID NO: 389721 - DNA, 372 bp, Salmonella enterica; identical to SEQ ID NO: 85999

SEQ ID NO: 389722 - DNA, 558 bp, Salmonella enterica; identical to SEQ ID NO: 86000

SEQ ID NO: 389723 - DNA, 1005 bp, Salmonella enterica; identical to SEQ ID NO: 31749

SEQ ID NO: 389724 - DNA, 321 bp, Salmonella enterica; identical to SEQ ID NO: 188807

SEQ ID NO: 389725 - DNA, 462 bp, Salmonella enterica; identical to SEQ ID NO: 188808

SEQ ID NO: 389726 - DNA, 168 bp, Salmonella enterica; identical to SEQ ID NO: 83459

SEQ ID NO: 389727 - DNA, 438 bp, Salmonella enterica; identical to SEQ ID NO: 118543

SEQ ID NO: 389728 - DNA, 477 bp, Salmonella enterica; identical to SEQ ID NO: 83457

SEQ ID NO: 389729 - DNA, 351 bp, Salmonella enterica; identical to SEQ ID NO: 188812

SEQ ID NO: 389730 - DNA, 1659 bp, Salmonella enterica
atgaaaatagtgattgttggtggtgttgccggcggggcatccgctgcagccagagctcgtcggttatcagaggatgtcagtattgttgtgtttgaacggggaagcgatgtctctttcgccaactgtggattaccttatcatataggcggaaaaattcctttaaggcagtcactgattctgaaaaccccggaggattttaaatcccgctttaacatagacgtccgtatctgtcatgaagtgacgtcagtggatccggttaataaaacggtgacggttaaaaatctgacctcaggggaggtctatagcgaagaatgggatcgtctgctcctcagtaccggcgccgctccggttgtccctcctttgcccgggctacaggaagagggtgtctttacgctgcgaaatcttactgacatggatgctatcctggggtggattgagcaacatcacgtagctcacaccacgcttgtcggggggggatttatcggacttgaagtgatggaggctctgagcgaacgggggatcagtgtgaccctgctggagatgggggaacaggttatggctccggttgatcctgaaatggcatctgccctgcatcaggaaatccggagtcatggcgtggatctgcgtctcagaacggcgctcaccgaggtactgcggacagagacgggattccgcgttgcactgtctgagggtgggtttctgcagaccgacatggttattctcgccatcggggtaaaacctgagaacagccttgccacaggagccgggctcgcagtgggtaaacggggaggcataagcgtcaatgcctgtatgcagaccagtatccctgacatctacgccgtgggggatgccgttgaaactccagactttgtctttcaggaacccgctaattttcctctggcagggcccgccaaccgccagggacgcattgctgctgataacatgctagatcgtcacagcctttaccatggcagtcaggggacatccatttgtaaggtattttcgctgagtattggcagcgtcggtgcgaatgaaaagcagctgaaagttcatggcacccgatacgagaaggtttacgtccatgccgctgatcatgccggttactacccgggggcaacgatgatcagtctgaaactgctgttcagccccgataccggtaaaattctcggggctcaggcatcagggaaaaaaggggttgataaacgcatcgatgtcctgtctgtcgcacagcgcgcggggcttaccgtcaacgatctcgaacatcttgagctgacttatgctccaccttttaacagtgcaagggacgtcgttaaccaggctggtatggtggcgacaaatgtaatgaaaggagatacggtcatatgtcatgtcagcgatgtgttacaacgggaaccgggcagttattgtttacttgatattcgctctcctgccgaactgaaacaatttggcgaatatcctgacgcgctatccattccactggattccctgcgggagaatcttgaaaaagtgcctaaagataaagagatttttatagggtgccagagtggcctgcgcgggcatgtggcataccgtattcttcaggcccacggcttcaggacatataatctgagtggtggctttataacctggcaggcggtaacggagtcaataagtaaataa

SEQ ID NO: 389731 - DNA, 465 bp, Salmonella enterica; identical to SEQ ID NO: 161500

SEQ ID NO: 389732 - DNA, 510 bp, Salmonella enterica
atgactgcgaaagatcagtttgctgctcatgttggtttggactgggcggataaaaaacacgatgtctgcgttcagtttaaaaacggtgatcgcatattccatgtgattgaacatacgcctgaggcacttgatatctggctcaatgagttacaccagagggcgaaaggcaggattgctattgccgttgagctgaagaaaggcccggtggtgtatgcactccagaagtacccatttgtcactgtttttccagtacacgcgttgtcactggcccgctaccgacaggctttctggcccagcggcgcgaaggatgatccgcaggatgctgagctggcattagacctgatgctacgttatccccacaagataaaagccattgaagccgacaatccggatatccgattactccagcaattagttgagcagcgccgactgctggtcgaagacaagcgtcgctttgttaatcggctcatcaatacgcttaagcagtattaccctcagcccctggggtaa

SEQ ID NO: 389733 - DNA, 204 bp, Salmonella enterica; identical to SEQ ID NO: 26728

SEQ ID NO: 389734 - DNA, 585 bp, Salmonella enterica; identical to SEQ ID NO: 26727

SEQ ID NO: 389735 - DNA, 1782 bp, Salmonella enterica
gtgggacgcaacgtagtaagatgtctgacggtactggcgtcgctgtggatgctaagtggcgcggtcagggcgcagacatggaacattggcgttttggcgatgcgcggggaggtttctacacgtaatcactggcagccgctggaaaccttgttgaatcagcaaatccccggtgagcagtttcatattcaaccgctggacctgcggcagatgcaggaggcggtgaatcgtggaacggtacactttgtggtcaccaatccggcgcagtttgtccagcttaacagccgctcagcgctacgctggctggcgtcgttacgatccacccgtggtgggaaagccaccagtaacgtgattggcagcgccattctcgtcaggcgcgacagtgggttaacctccgcacacgatctgatcggcaaaacggttggcgccattgatgctcaggcgtttggcggctatttgctgggatataaagcgctcagtgatgccggtctgcgccctgaacgtgatttacgtctgacgtttaccggatttcccgccgatgccttactctatttattacgtgaaaaagccgtgcaggcggtgatcgtgccggtgtgcctgctggaaaaaatggatgaagaaggcctcatccgtaaaaccgattttatgaccgtgttgaatcatccgacttcaattccctgtttaaccagtacgccgctctatccggactggtcatttgccgcactacctgtagtgagtgacgagctggccgatcgcgtcacgcgggtactgttcaatgcaccgcaaaacgcgacgtttcgctggggtgcgcccgcctcgacccgtgaagtagaagcgttgctgcgcgacgtccgacagcatccgcagcagcgtcagctgtggctggatgtcaaaagctggtttattcaacaccgactggcgatggggggcgtggtcatcgtattgctgttgcttacgctcaattacatctgggtgatgctgttggttcgccgacgtggcaggcagctggagcggaacaacgtgttgttgcacaaacaggaacaggcgctggagactgcccgccaaatgagcgtgctgggggagatgacctccggttttgcccatgaactcaatcagccgttgtctgctatccgtcattatgcccaaggctgtctaattcgcctgcgtggtcaggatgagcagcatccgttgctgcccgcgcttgagcacatagacgcccaggcgcaacgaggagccgatacgctgcgcaatctccggcagtgggtcagccaggcacagggcaatccggtactcaccgatgactggcaagccatcaacgttcacgatgctatccatcacgtctggcaattactgcgtatgccccagcaattcccggcgataacgctgcacacgcaggttagtaaggcgttaacgttgatgctgccaagcgttcttcttgagcaggtgctggctaacctggtactcaatgccgcccaggcaggcgctacgacggtatggtttagcgccctgcataaggatggcggcgtgcgtattcaggtgcaggataatgccggaggtattgacgaggctcagttgtatcaggcgtttcagccgtttatgaccacccgcaaagaaggtatgggactaggactggccatttgtcagcgactggtgcgctacgcaaacggagatattgagatcaaaaatcagcaggccccggacggtaaagcgggggcgagagtgacattgtattttaagccaaatcaggaaggaggccgtagtggcgataattcatctgctggatga

SEQ ID NO: 389736 - DNA, 735 bp, Salmonella enterica; identical to SEQ ID NO: 26725

SEQ ID NO: 389737 - DNA, 1023 bp, Salmonella enterica; identical to SEQ ID NO: 26724

SEQ ID NO: 389738 - DNA, 3066 bp, Salmonella enterica
atggctaatttaacccgtcgtcagtggcttaaagtcggccttgccgtaggtggcatggtgacttttggcctgagttatcgggatgtggcaaagcgcgcgatagacggtttgttggacggaacctcgggcaaaattacccgtgaccgcatttttgccaacgcgctcatccccgaagccaacgcccggcctcactggcagcaaaacccgcagcaggtgatctcgatgacgcagtgctttggttgctggacgcagtgtggtgtacgggttcgcgttgacactgagcaaggcaaagtgctgcgcattgcgggcaacccttatcatccgttgtcgcacgagcaccatatagacgcctctgtcccctttgccacggcaatggaacagttgaccggggagtcaggtcttgacgcacgttctaccgcctgcgcccgtggtgcaaccttactcgaaggtctgtacagcccgctacgtattctggagcctatgaagcgcgtcggtaaacgcggtgaaggaaaatggcagcgcatcagcttcgaacagctgatcaaagaggtggtggaaggtggggatttgtttggtgaaggccacgttgatggtctgagagctatccacgatcccactacaccgcttgatgcgaaacatcccggctttggcccaaaatccaatcaactgctggtcaccaataccagcgatgaaggacgtgatacctttttacgtcgcttcgcactgaacagtttcggcagtaaaaacttcggcgctcatggcgcttactgcggtctggcctatcgggccggttcaggtgcgttaatgggcgatctggataaaaatacccacgtaaaacccgactgggataacgtcgaattcgcgctgtttatgggcacctctccggcgcaatccggcaacccgtttaagcgccaggcccgccagctggccagcgcccgtttacgtgacgacttccgctatgttgtggtggcgccagccctgccattaaccacggtgctggctgacgatcgcggccactggcagcccgtacgaccgggaagcgactccgcgctggctatggggatgataagctggattatcgataaacaacgctataacgctgattatctcgccattcccggcgtgcaggccatgcagcaggcaggagaaaaaagctggactaatgcaacgcatctggtgattaccgatgaaattccaacgcttgccggacaacacctgaccctcgcccatctgagtgcaaacgcagcccaggagccggtggtcgtcaacgaggccggtgagattgtcgccgccagcagttgcccgcgcgctcagctgtttgttacccgtgaagtgacgctggccgacgggcagacagtaacggtaaaaagcagcttccagtgtctgcgtgagtccgcagagaaactgtcgctaacgcagtacagccagcagtgtggggtgtcagaagcagacattgccgttctggccgacgcattcacccgccacgggcgtaaagcggcggtgatcacgcacggcggaatgatggcaggcaatggattttataacgcctggtcggtgatgatgctcaatgcgcttattggtaacctcagccttgaaggcggcgtgttcgtcggcggcggcaaatttaatggtgccaccgacggtccgcgctacaacatggacagcttcgccgggaaggtaaaaccgaaagggttaagcatcgcgcgcagtaaaaccgcttatgagtcttcggaagagtaccgcaataaggtggctgccgggcaatcgcccttcccggctaaagcgccgtggtatccgtttgtcgccggtcagcttaccgaactcctcgtctcggcgcttgaaggttacccttatccgctgaaagcctggatctccaacatgaccaacccgttttacggcattgcggggttacgcggcgtggcggaagaaaagctcaaggatcctgctcgtctgccgctgtttattgccattgacgcctttatgaacgaaaccacggcgctggcagattacatcgtgccggatacccacaacttcgaaagctggggattcagcgctccgtgggcgggcgtggccagcaaagccaccaccgcgcgttggccagttgtcagatcggcgaccagcctcacggctgacggtcaaccggcctcgatggagtctttctgtatcgcagtggcaaagcgcatcgggctacctggattcggcgacaatgcaattaccgatccgcaaggtaatcactatccgttgaaccgtgcggaagattactacctgcgtctcgcggccaatattgcgtttatgggcaaagctccggttgctgaagcacagccggaagacatagcgctgaccggggtccagcggatcatgcctgtgatgacccaaacgttgaaaaccgatgaaatcagccgagtggcgtttatctactcccgcggcgggcgctttgcgccggacaacagcgggcgagttgataaccgcgtcggcaatgcctgggaaaaaccgctccaaatctggaatgcgaacgtcgccgcgcaccgccatgcgattactggcgagcgctacagcggctgcccggcctggtatccatcacgtctgtcagatggacgtgcggtcgaggagttgttcccggaacaagagtggccgttgaagctgatttccttcaaatccaataccatgtccagcgccacggcggtgatcccacgccttcatcatctgaagccggttaatctggtggcgctcaatccacaggatggtcagcggtatggtttagcacacggcgatatcgtgcgtatcaccacccctggtggtcaggcgcaagcgcagataagcctgctgcatggcgtcatgccgggtgtcatcgccattgaacatggttacggacataaagaaatgggcgcggcacagcataccctcgacggtgagccgatggcgtttgatgagcagattaagtcggggattaatctcaacgaattgggttttgcggacccaacccgacaggtagccaatacctggcttgactgggtgtcgggtgcgtcggtgcgtcaggggttgccagcgagaattgagcgagtgtag

SEQ ID NO: 389739 - DNA, 369 bp, Salmonella enterica; identical to SEQ ID NO: 26722

SEQ ID NO: 389740 - DNA, 1350 bp, Salmonella enterica
atgggccgttatacaaggtttaaaagggtagttgtttattttctctgcatgatgattgcttacggcagtttccccagaattgcgtttgcaaacccggtaattattggtcttggtgaaatcttcggatccgttattgctcgccgtgctgctatatattccgccgaaaaggcagctgatattgcatttaccaggcaagtagcggctgcaaccattcagaacgtcgaaaaatcagctttagcgaaacagcttttagttcccaaaagtaactttttatctcgagccggtcaggcaacctgggcgggtcttggtacggtcggaactgcatattctctttacgatctcttcgatgacgtgttcgactcaagtgttaaattcgtaaatggagaagctaactctagtggcggttacactgtcactgtggacggcgtacagacagatgtgccgttttcgccagtgcctgtataccgtagccctgctaatgcgggtataggtgaaatgaagctttggaacggtcagcttgtttatatgaaggatacttcaggcaaggatgtgcgtggtatgccatatctcccggcgtatcgcaatccaactggttctacgtgggtaatatactcgttgaccgacgaaccaatttttaatacctgggttaatacgacaggaactaagggatcaacaacttactggtattcgccaaacggtcaaactggtgcaactcaggtaccaattttcacatatcagcgaactttaaaagcaggtgagactttacctaatattggatcctcgatccttcaatctgctgacgaactgcaacaggtagctggtcagaccgaagtaaaagcggaagttctcgcacaaactatcaatgatttgatgcacgacgcagcaacgcaaacgggttatgacggcgtgccttttagtgatactgatgctgttactgtagctgagattaaagatttactggctaaggaaaatggagttgttacaaaagcaggtgtttttgatccggcatttaagtctgatggcactgtaaatattccaaataaggttaagacgtctgaatctcctggcattgatttgggagagaatccaaatattaaagagccagatttgggcgatactccgaccgcaaaacagattatggaaccggtaataacaccgctttcatggatagataatatgaagctttcaggacatgcagctgtttgccctactggtagctttgaggtgttcgatactctcattactattgattcacaatgtgatctgtttgagagattacgggatatagcaaaagtcatctcaaccctgatttgggctattgttgcacttcgagttgtattaagcgcgtag

SEQ ID NO: 389741 - DNA, 234 bp, Salmonella enterica
atgtctatcctgaaaaaagtaattgttggtgcgttcgctgttgctgctgctgtttctgctcctgctgtaatggctgctgaaggtaccaccgaagttgatctgacgcctctgactagtgctattagcttctctggtgttactactgcgattctgggtattgcagctgctgtggctggtctgtatgccctttacgctggcgttaagcatgtgctgcgtatggttcgttccgcttaa

SEQ ID NO: 389742 - DNA, 273 bp, Salmonella enterica
atggttaaagttgaaattaaaccttctcaggtttctgttgatgttcgtaatggtgtttcggctaaaaccggcaagccttatacaatgcgtgagcaaatgggctatgcctggttgggtggcgattacccggaattaatcaagctttctcttgatgagggtcaaccaccatatacagctggtttttatgagcttctgctttccagtttccgggttggtgactttaaccgtctccaagttgatcgcgttcgtcttagtccaatcgatggcaaataa

SEQ ID NO: 389743 - DNA, 132 bp, Salmonella enterica
atgtttgcaattatgttcggttggataatatcattcattcagattatttttgagtcctgtctttatactttgataatcgcaatcgtacttacgttaatccctcgcttattatttggagttagaaatggttaa

SEQ ID NO: 389744 - DNA, 1239 bp, Salmonella enterica
atgatagatatgctggtattgcggatcccttttaagccctatctcgtaaatgagaggttggattctgctggtaactatgtagctcacgttgacctaacagaggtcgcccgccgttctgggcttattctttccgctcattccgttgaatacgcaatcgacggtgatttgacggtttcaggcctgaaacatcgttatgaatcattagcttctcactatacaggcgttgccttcaagctttttgaaggtggtctgaactgtgagccatgcgtagagcttaaggcgtccccggcgaaaattctgcaaggccataacgttttcggacctacagattttgaactttgctctctcgagttcttcgggatcctttctgagtctatgcctgatctctacgaacttcttgatatcccaaacacttccgtttcccgaatagacgtaacttttagtgctcgggtacagactcaggcaatggctaatcaggtaattaactaccttcgtaatgtaagtaatggtcagactaaaaaaactaaggcgcaggactacgatacaacagttacctggaacggcggttctagacatcgtactcttgtatcatatttgaaatggaatgagatgcaggcgcagataacgagattgcgccgtaaaaaatcctgccagctcagtcagtatgaaaaaaatgctctgcatgtcctgtctaatccagatctacaggaatttgctgttggattagtacgctttgaagctcgcttacatacccgttattttgaatcttttggattgcctcgtaatttaattaactttgttaagtatcaaaattcttatccgaccggaaagtttgaatgtgtttgtgatttgtggaagaaagcttttaaagatatcttcggcgcgttagagggtgcagaaatgaatatttatgatgattctaaggtttacgattctttgtgtgatgcgttctcaacagtaaccaaaaacgggaatatttcaaaatcgaagcctaatcgcttgtttggattttaccgtcgcctcgtaaatgaaggttatgacaatgttgcgatgacaatggatcgtatgacattttggcgtcatgaaaaggatctaacttctgttggcctttctaaagctcagctcaagaacctgacggcagaaaaaaacaacgttgtgccttttatccgtgcgatcaatgtggatttcatgaaccagtatcctgcatggtatcaggagccgatgtcacgatatgcttaa

SEQ ID NO: 389745 - DNA, 189 bp, Salmonella enterica
atgtctggaacaagcaagagaaccactgtaactatcaacaggcatatggccgaactgctcaaaaatgcaacagttgaagccacaacccgtgcaaacttgcctataaaacaatcagatctagtaaattaccttataaaacataaacttgaagaagcgatcgaaggcgttttaaaagaaaaaggcctgtaa

SEQ ID NO: 389746 - DNA, 1215 bp, Salmonella enterica
atgaaaaagttacttttatttatcctggttgtattctctttaccctcttttgcagtaaaggttgattttcgtttggatgcaatgcagttgccaaaggctatcaatttcttttattcggatgtaattaagcaaccgtttatgcttgcgccagaactggcgaacgatacgcgagttgtgtcttttcatgtaactgaagatgtggatgcaaaagcattctttttaagatatctgagtaatatgaatgtcgctgtcagtaacaaaaatggcgttgattatatttatatggtgacaccgaaacaggttgatgtgcctaaatatacttttgtctatacgcctaagcatcgaagtgttgcatacctttcaagccttcttcgggggattgttggcggcgattttggatcggtagcaggagctgagccagtacagggtgtaactatgcaaccttctgtcgcccgaactgggaatatcaatggtgatggtgatgtttttgtctattatggtacccggtcagatattaggaaaattgaggaagtgttacctgtcatagataccccatcctctgaagtttatgtcggtggttatgtctttgaagtacagaccaatgaacggaatggatctggcttgcagctggccgccaagcttctgaatgacaaactctcgatccagattggcggaactgctgaaggcggtggccagaactttgttaaattcagtagcggtagtcttaatgcactgtacgagctattcagaactgacagtcgctttcatgtagtcagctcgccatccctcagagcgcgctcaggggttcaggcttcgttttctgtgggtgaagatgtacctgtactgggtaatgtgtcttatgagggtgagaaggctgtacagtcggtagaataccgttcgagtggggttatctttaatgtcttaccttatgttcgctcagatgtcatcgatttgaacatcagccaggaactgtcgaattttgctaaaacagatacaggcgtaaacaattcaccaacgctcatcaagcgcagtatttctacagccgtatctgttaaagacggtgacataattctaattggtggtcttgctgaaaataagacgaacgatacagatactgggttgaccttcatgccttcgtggttttcgtctaaaagcagtgagaagtacaaaacagatattgtcgtcgtgttacaggcgaggaaggtagcgcggtaa

SEQ ID NO: 389747 - DNA, 681 bp, Salmonella enterica
atgtcagataaagacactttggcgacatgcgatattgttgtcattaaccagagccttgacacgatagcgaggtttattaaaaccagaattgaaacaacctatagaatgcagaagcatgtttctgtaggcctaaagaatcgttatcgtgttgatgtttttactggtgtaaagctatttaaaaactctcgggtcacaagttatcagaataaatataacaaagaaatatttgctctatatcattcacattacggcgggcaaggtgatgagcaaacaacggatgacaggcagaatatttttaaacagaaaaagctttgggttctgtttagcttcataataattatgctgtgttcttcaggttattttgtgttttctttttttaagggttcaacgcctgaaaataaagaggtaagcactccccaaaataaacaattaacagataaggttacagttcaaaataatgaagttgtaccaaagcaaccggtaattcaaaagccgggactttctaaaaggtggagaattaacggaactcttgttaaagaagggaaaagctttgtaattctcacggattctgtaggtctgaatagattggtctcaagagctgggttttcaaatgatggcttgatgcttaatggaattgtagacggcgaaatcgtatcttactttagtggcgaaaaatcatga

SEQ ID NO: 389748 - DNA, 771 bp, Salmonella enterica
gtgccacgggcaaagatcggaagggttacgccagtaccagcgcagccgtttttccatttcaggcgcataacgctgaacccagcggtaaatcgtggagtgatcgacattcactccgcgttcagccagcatctcctgcagctcacggtaactgatgccgtatttgcagtaccagcgtacggcccacagaatgatgtcacgctgaaaatgccggcctttgaatgggttcatgtgcagctccatcagcaaaaggggatgataagtttatcaccaccgactatttgcaacagtgccgccagacgtgtgctgctcgtggagggggatgctgagtttattctgatcgaggccttttatcgccgcctgtatggcagggcaccggaggaagacggagttcacatcatcgctatcggcggaacgagtttccgtcgttatcttgaactggcccgtcttctggaaaatcgcgtcgcggcccttcgtgataatgacggcaactatcagcaaaactgcgatgaacgctatgctgacgtgatttgttcccgctcccgggtatttgctgatcgcgataacacccgatccacatttgaaatcagcctgtatcaggataacgctgatctgtgtgatacgcttttccgcggaccccgccggacactcacggtgcaggaatacatgctggccaataaggcagaagcagcattccggctgttacagctgcacgccggagagctgaccgtacctgattatattcaggaggcactggcatggataagagagtga

SEQ ID NO: 389749 - DNA, 1023 bp, Salmonella enterica; identical to SEQ ID NO: 30132

SEQ ID NO: 389750 - DNA, 183 bp, Salmonella enterica
atgaaaagtggaaaatatacgaaaagctgctttgttaatcatgccagctgggaatatgaaatgattgaaaaaacggagggattactggaaccctacagagaattacttgagttctaccatgctgcatatatcgaactgggacgaaaagtccgtcaatactcaaaatcagaggtggcacaatga

SEQ ID NO: 389751 - DNA, 2706 bp, Salmonella enterica
atgctgattccgtcaaaactaagtcgtccggttcgactcgaccataccgtggttcgtgagcgcctgctggctaaactttccggcgcgaacaacttccggctggcgctgatcacaagtcctgcgggctacggaaagaccacgctcatttcccagtgggcggcaggcaaaaacgatatcggctggtactcgctggatgaaggtgataaccagcaagagcgtttcgccagctatctcattgccgccgtgcagcaggcaaccaacggccactgtgcgatttgtgagacgatggcgcaaaaacggcaatatgccagcctgacgtcactcttcgcccagcttttcattgagctggcggaatggcatagcccactttatctggtcatcgatgactaccatctgatcactaatccggtgatccacgagtcaatgcgcttctttattcgccatcaaccagaaaatctcaccctggtggtgctgtcacgcaatcttccgcaactgggcattgccaatctgcgtgttcgcgaccaactgctggaaattggcagtcagcaactggcgtttacccaccaggaagcgaagcagttttttgattgccgcctgtcatcgccgattgaagccgcagaaagcagtcggatttgcgatgacgtttccggttgggcgactgcgctacagttaattgccctctccgcctggcagaatacccactcagcccataagtcggcacgtcgcctggcgggaatcaatgccagtcatctttcggattatctggtcgatgaggttttggacaacgtcgatctcgcaacgcgccattttctgttgaaaagcgccattttgcgctcaatgaacgatgcactcatcactcgtgtgaccggcgaagaaaacgggcaaatgcgcctcgaagagattgagcgtcaggggctgtttttgcagcggatggatgatagcggcgagtggttctgctatcacccgctgtttggcaacttcctgcgccagcgctgccagtgggaactggcggctgagctgccgaaaatccacagtgccgctgcagaaagctggatggcccagggattccccagcgaagcgattcatcatgcgctggcggcaggcgatgcgctgatgctgcgcgatattctgcttaatcacgcctggagtttgttcaaccacagcgaactttcgctacttgaagagtcacttaaagccctgccatgggagagttcgctggaaaatccgcagttggtgttattacaagcgtggctgatgcaaagccagcatcgctacggcgaagtaaacaccctgctggctcgtgctgaacatgaaatcaaggacatcagagaaggcaccatgcatgcagaatttaatgctctgcgcgcccaggtggcaattaacgatggtaacccggatgaagctgaacggctggcaaaactggcactggaagaactgcctcccggctggttctacagccgcattgtagcaacttcggtgttgggtgaagtattgcactgcaaaggggaactgacccgctcactggcgttaatgcagcaaaccgaacagatggcacgccagcacgatgtctggcactacgctttgtggagtttaatccagcaaagcgaaattctgtttgctcagggtttcctgcaaaccgcgtgggaaacgcaggaaaaagcattccagctgatcaacgagcagcatctggaacagctgccaatgcatgaatttctggtacgtatccgagcacaactgttatgggcctgggcacggctggacgaagccgaagcatcggcacgcagcgggattgaagttttgtcgtcttatcagccacagcaacagctccagtgcctggcaatgttgattcaatgctcgctggcccgaggtgatttggataacgcccgtagccagttgaatcgtctggaaaacctgctgggaaatggcaaatatcacagcgactggatctctaacgccaacaaagtccgggtcatttactggcaaatgaccggcgacaaagctgccgccgccaactggttgcgtcacacagccaaaccggagtttgcgaataaccacttcctgcaaggtcaatggcgcaacatcgcccgtgcacaaatcttgctgggcgagtttgaaccggcagaaattgttcttgaagaactcaatgaaaacgcccgcagtctgcggttaatgagcgatctcaaccgtaacctgttgctgcttaatcaactatactggcaggccggacgcaaaaatgatgcccagcgcgtgttgctggaggcattaaaactggcgaatcgtaccggatttatcagtcactttgtcatcgaaggcgaagcgatggcgcaacagttacgccagctgattcaactcaatacgttgcctgagctggaacagcaccgcgcccagcgtattctgcgagaaatcaatcaacatcatcggcataaattcgcccatttcgatgagaatttcgttgaacgtctgctaaatcatccagaagtgccagaactgatccgcaccagcccgctgacgcaacgtgaatggcaggtcctggggctgatttactccggttacagcaacgagcaaattgcaggcgaactggaggtggcagcgaccaccatcaagacgcatatccgcaatctgtatcagaaactcggcgtggcccatcgccaggatgcggtacaacacgcccagcaattgctgaagatgatggggtacggagtgtaa

SEQ ID NO: 389752 - DNA, 231 bp, Salmonella enterica
gtggtggctgcgcagttagtgcaagaagttaaacgctatcttgcaagcccggcggcggtgggggaatatctcgccgaccagctggtactgccaatggcgggggcgggagaatttacggtcgcctatccctcatgtcatctactgaccaatatcgcggtggtggagcgttttttgtcagtgcggtttagtctgactgaagcagacggcgtaacgcgggtgagcattgaatga

SEQ ID NO: 389753 - DNA, 384 bp, Salmonella enterica
ttggagtcattaccctttgctattggtagcgccggaagttgcacgctggtactacaaacggtactgcccgcgctgtggtttgccgatggtccttcgcgtgttgaagtgagcggaggtaccgataacccgtcggccccgcctgcagattttatccgccgggtgctggagccgctgctggcaaaaataggaattcatcagcaaaccacgctgttacgtcacggtttttatcctgccggaggcggcgtggtggcaacggaagtctcgcccgtggcatcgtttaacaccttgcaacttggcgagcgcgggaacattgtgcggatgcgtggagaggtgctactggctggtgtgccacgccatgtcgctgagcgtgaaatcgctacgtag

SEQ ID NO: 389754 - DNA, 633 bp, Salmonella enterica
atgacttatgcatccccggctcttcgtcgtaaaccacaggaagtatctgaacactttattaaactcgttcatgctcgaattgctgaagtgtctggctggaagtatatattcgaaagaatacctgctttcaaagacgcttgtgcaaaagccccgagccaggttccttgcccgtttactggcgcagggaaatcgaagtttcgtttccgacaaaaagacctttataccggatgtgcgatccataatgactttccggtaaatgagttttgcgacggaattgatgttctggcgaaatattatgaattaagtaaaacgcagacttgcaaaaagattctctcagattttttcgggatggatctgcatgctccgttaactgacgccgacattgaaaatgaacgacgctataaatcagcagttcgtgccacagaaactcttgaccgagaggaagtggcaaagcgaatgcgaaaacttgatgtgatgtatcactataccggtgaaatcaagcctaatactcctgttgctttgtacctccgtaatcgtgggatctcccgcttactgagtcacttaccaaaggatttaggctttaataaccgggtaggaagtgagataaatgctcagttcgcaaatataaactga

SEQ ID NO: 389755 - DNA, 825 bp, Salmonella enterica
atgtcacagctaagcctggattccctgtttgatgcctttgataacctgcccgccgttgttaacagtacgccagccattcagaccgccccgccggttaaaactgtttcgcgcatggtcacgtatgacatcgcaaaaaagcagtttatcagcgtatttaaagccaccgggcggcatctgcggcgctgggatgttttcagtgattttattacccttgccgccagtgagctggatatggcgcggatacgaacgcaggataacatcgagcgaagccgtaaaatttgtgaacggtacgacgggcaggatcaggaaaacctgaaaatgctgttttgtatgctcgtcgcggcgctggaaggtaagtttcaggattttctcggatcgatattcatggagcttgaactgggttccggtgacatgggccagtattttacgccgtacagtgtccagtccatgatggcccgtttgctgatacctggtgtggcggaaatcatccgtgaaaaaggatggttcaccctcagtgaaccgacctgcggcgcggcgggtatggtgattgcgtatgctgaatgcctgcttgacgccgggtttaatccttcggaacacatgtttgttcagtgcatcgatatcgatcccattgcggcggatatggcttttattcaactgagcctgttaggcatcgccgcagaggtgaccaccgggaatacgctgacgttgcagtgcagccgggtgcggtacacaccagtgtattacctcaatgaatgggaagcgcgcctgaaactgcgccgacaggtggacgcgatgaaagattttctggccagcctggcagcataa

SEQ ID NO: 389756 - DNA, 243 bp, Salmonella enterica
atgaaaaaagcaggcttacgcctgctcattcccgccgggttaacgcctaggaacgtaagacccggcaaccatcaaatttcagtagaggataaatctatgaatttcgacccgcaaatcgtcgcacaggcgaaagcgtttgtaaacgacttaagaacgaaaggaagcgcccgcgtcccggccctgaagctggagcactggcagcagtttatgactcaggtttacgcgggcctggggctcgcgtga

SEQ ID NO: 389757 - DNA, 456 bp, Salmonella enterica
atgactgtgatgaactcatggccgaactggcccgcgattactgacacaacgtttagcctggcggcctgcgccgccttaaccaacccgaaggagaaaaccatgcttacacacatcactgaatcattacgttatccggcgattaacgccagcgccgaagccgagcgggcttactggatgggccgcgaaagaatggcagtaaaagcgcccgaagaaattgatgttcatcgttttcacgatgcgctggggcgtatgtacccgctcaactgggcatccggtgataacggggaaagtgaaacgtttatgagcgcggaaatgtactgcgggaacgtgactgaaatttttacccgcatcggcatccgttattaccgtatgcgtgattacagcaacatgaaccacgcgcagatcgtgcagcgcgttaaggaggtgttttaccgggacaacgacagccagaaatga

SEQ ID NO: 389758 - DNA, 369 bp, Salmonella enterica
atgcacacacagaacgtcaaaaccgccgctcccgaatcttccgaaagatggggtgaaaaatcatgtctgcggactgatggctttatccgcaaccttcattcatcaaatgcgtttgatgtgatccgcgctgatgtggtgcttatccgaatggaggcacaggcgaaccggggatgtggtctgcattacgaaatttttgaatcccgtctgttaggggcggcaatgggttatctcgaaaaattaccggtaaaagaccgcccggtctttatgggggccgccgcccgccgtggatattccttaacgctggctcatgagcaacaggcacacaatgactgtgatgaactcatggccgaactggcccgcgattactga

SEQ ID NO: 389759 - DNA, 1011 bp, Salmonella enterica
atgcccctgcgtgctttagtggcggtgatagtgacaacggtagtgatgctggtgcccagggcgtgggcggatacggcctgggagcgctataaggcccgttttatgatgccggatggtcgtatcattgataccgccaatggcaatgtgtcgcatacggaaggtcagggcttcgccatgctcctggcggtggcgaataacgatcgtccggcgttcgacaagctgtggcagtggacggacaacaccctgcgcaacaagtctaacgggctgttttactggcgctataacccggtggcgccggaccctatcgccgataaaaacaacgcctccgatggcgataccctgatcgcctgggcgctgctgcgcgcgcaaaaacagtggcaggataagcgctatgcgattgcctctgacgccatcaccgccgccctgctgaagtctacggtggtgactttcgccggtcgccaggtgatgctcccgggcgtgaaagggttcaacctcaatgatcacctgaaccttaacccttcctatttcatcttcccggcctggcgcgccttcgcggagcggacgcatctcaccgcctggcggacattgcagagcgacggacaggcgctgctggggcagatgggctgggggaaatcacatctacccagcgactgggtggcgctgcgggcggatggcaagatgctgccagccaaagagtggccgccgcggatgagtttcgatgcgatccgtatcccgctgtatctctcgtgggccgatccgcacagcgccttgctcgcgccctggaaggcctggatgcagagttacccgcgcctgcaaaccccggcgtggatcaacgtcagcaccaacgaggtggctccctggtatatggccggcggcctgctggcggtgcgcgatctgacgctgggtgaaccgcaggaggcgccgcagattgacgacaaggatgattattactctgccagcctcaagctgttggtctggctggcgaaacaggaggcactgttgcaaagttag

SEQ ID NO: 389760 - DNA, 477 bp, Salmonella enterica
atgatgacggagaacaataacccggtggtgatgacctggtttcagcagcagcagacgcctgccggatggttcgatctgttgattattatgatcgaaggtatgctaaataatgccggcgagctggaaagccagcccttcctgcgtcagatgggcgcctcgctggcggagacccatccgctgccggcgtcggagacggtaggggatctggaggccaatatcaaccggctgctgactcattttcactggggcgtggtgaccatcgatgtcggtgaggacggcctgcgcctgcgccatcaggcgttgccggtcagccgcgacgaagcggggcgcgtgcgctggtgcaacgcgttctgtgccatactcgaggggttatattctcgctggctgcagagtcagggaggcagtgcccacgtgatactgcagcgtgagcgggtgttctccgtctctgacgttcagtttctctactaccatccataa

SEQ ID NO: 389761 - DNA, 198 bp, Salmonella enterica; identical to SEQ ID NO: 251207

SEQ ID NO: 389762 - DNA, 636 bp, Salmonella enterica; identical to SEQ ID NO: 84879

SEQ ID NO: 389763 - DNA, 915 bp, Salmonella enterica
gtgccacgggcaaagatcggaagggttacgccagtaccagcgcagccgtttttccatttcaggcgcataacgctgaacccagcggtaaatcgtggagtgatcgacattcactccgcgttcagccagcatctcctgcagctcacggtaactgatgccgtatttgcagtaccagcgtacggcccacagaatgatgtcacgctgaaaatgccggcctttgaatgggttcatgtgcagctccatcagcaaaaggggatgataagtttatcaccaccgactatttgcaacagtgcctatcacaccaccaactattattccctcgaagggtcgcgctttacgctggagattatcaaaaccgcggcaaccaccggcagcggcaccctggcggcgggtaagtacacctcctacgactgggagagcggcggtaacccgatcctcgaaacctatctgagcgccaacgccatcaccgtggtctcgccctcctgttcagtgctgagcgggaaaaatatgaatgtcgatgtgggttccatccggcgcaccgacctgaaaggggtcggcaccaccgccggcgggaaggattttaatatcgacctgcagtgcagcggcggcctgagtgaaacgggatatgccaacattagcacctcgttctccggtaccctggccaccagcactaccgctaccatgggcgccttgctgaatgaaaaagccggcagcgggatggcggaaggcattggcatccaggtgctgaaggatggctccccgctgcagtttaataagaaatacaccgtcggccgcttgaataatcaggagacccgctacatcaccataccgctgcacgcgcgtttttatcagtatggcccgacgaccagcaccggcgaggtggagtcgcatatgatctttaacctgacgtacgattaa

SEQ ID NO: 389764 - DNA, 537 bp, Salmonella enterica
atgtcacaaattctcattattctccttctactgataattgctcttttatctatcagactcagagactcatcacgctctctttcctcgcttgaacataaaaataagactttacttgcaagtgagataattttatattcttttctcagcactcaatcacgtggttgcatgggtagagtattaaaaaatataaagaactcaattatacaattagattgtgttattactgcccctctcaaaactattgattcaaaagatgctgctaacgaatgtttcatgcagaatgttttctactcatatggagatcagattacatcccttacaagaattttagatgagctatctaaacaccccgatcatgcagaattgaatagcatgcgtttaatgatcatcaagttatttaaaggttacaacttccgagagcgagctattttaatattaaatttactacaatatgattctcaaagttttcaacacacaaagatgatatcactgataagtattctagaaaaaaagctcacaactttagaaggaaactga

SEQ ID NO: 389765 - DNA, 276 bp, Salmonella enterica
atgtataaaaaggttttagctctttcagctttactgatttcttcttgttcaactgataatcagtataaaggaactatgcaccacagtgatttcgaactttcagattcagctgtgaaaattcaaatcctccatatgaaatctcattactgttttttaagaattaaaggccacaaaggaaaatgtagccaaattaaaaatcacccaattagtaattattatggatcgatgaacccgcgtataatctcatttgttgtaatcctcgtgatatatagctga

SEQ ID NO: 389766 - DNA, 312 bp, Salmonella enterica
atggattcagaaacagttcacggaacggtcaggtctggcgctggcagcgtgccggaagccgggccgttattctggaggtcagtggacgctggatggaagcggcagaaggatggcgacgggctgcctgtgttgcgccccggacagactggcagcagtttgcccgaaaaagggctgaacactgctaccggcgctgccgggaaagggtgtaacgaaaaagcagccttcattactccaggagtcagaaggctgaaaggagtttatgagatttgcttttttaatatccggtcgggcagtatgaccagtcagttctga

SEQ ID NO: 389767 - DNA, 384 bp, Salmonella enterica
atgaaaggactgttcagaattgtggatatgaagcggtggtatctgtgtccgcaggtacgggtcgcggatatcgtccagctgaacgggaatatccggccacgatcacgccagtggtggcagttattcaggatggtgtctcagtggcatgttgatgtggttatcgttgagcggcgttcgttcagtattgttgcagcagtagagctggatgatgccagtcatttacgaccggaacgcagacgccgggatattcttctggaagaggttctgaggcaggctggtattccgttgctcagaagccacgatgccagaaaactgctgcagatgaccggagaatggctgaatacaacaggggctgatcagcagtccccagaacatcgtagctga

SEQ ID NO: 389768 - DNA, 447 bp, Salmonella enterica
gtgccacgggcaaagatcggaagggttacgccagtaccagcgcagccgtttttccatttcaggcgcataacgctgaacccagcggtaaatcgtggagtgatcgacattcactccgcgttcagccagcatctcctgcagctcacggtaactgatgccgtatttgcagtaccagcgtacggcccacagaatgatgtcacgctgaaaatgccggcctttgaatgggttcatgtgcagctccatcagcaaaaggggatgataagtttatcaccaccgactatttgcaacagtgccctgcattttctgtctgcgacatctcgcctcctcaatactcaaacagggatcgtttcgcagaggatactacagttttttgaaatcagcgacttgagaattgtgacgaagatctgtgttgacgcacaaattaacggggattactgtcgtttaatgtga

SEQ ID NO: 389769 - DNA, 1005 bp, Salmonella enterica
atggaaaacattgcgcttattggtatcgatctgggtaagaactctttccatattcattgtcaggatcatcgtgggaaggccgtttaccgtaaaaaattcacccgaccaaagctaatcgaatttctggcgacatgcccggcaacaaccatcgcgatggaagcctgtggcggttctcactttatggcacgcaagctggcagagttagggcattttccaaagctgatatcaccgcaatttgtccgcccattcgttaaaagcaacaaaaatgacttcgttgatgctgaagctatctgtgaagcagcatcacgtccatctatgcgtttcgtgcagcccagaaccgaatctcagcaggcaatgcgagctctgcatcgtgtccgtgaatccctggttcaggataaggtgaaaacaactaatcagatgcatgcttttctgctggaatttggtatcagcgttccgcgaggtgctgccgttattagtcgactgagtacccttcttgaggacagtagtttgcctctttatctcagccagttactgctgaaattacaacagcattatcactatcttgttgagcagattaaagatctggaatctcagttgaaacgaaagttggacgaagatgaggttggacagcgcttgctgagtattccctgcgttggaacgctgactgccagtactatttcaactgagattggcgacgggaagcagtacgccagcagccgtgactttgcggcggcaacagggctggtaccccgacagtacagcacgggaggtcggacgacattgttagggattagcaagcggggcaacaaaaagatccgaactttgttggttcagtgtgccagggtattcatacaaaaactggaacaccagtctggcaagttggccgactgggtcagggagttgttgtgtcggaaaagcaactttgtcgtcacctgtgctctggcaaacaagctggccagaatagtctgggcactgacggcgcgacagcaaacttacgaagcataa

SEQ ID NO: 389770 - DNA, 513 bp, Salmonella enterica
atggcaaaggtcgatcaaacaaaagctaatgctctattgcgagcagcaagaactatgtcgcttggggcaaataaaaatacaatacgaattttgtacggtaatcatgttgctgaaaatatcgattttgagcctggtgcaaaaacaaaacttaaaaaaggtatccggggctggagcaaacgcacagataaccgccgagccttttctgctgttattgatgtcgcagttaactattttggttttgatccaataaatcccgaagcgagttttcggcaaattgacttcaaccgaataatgagtgtccttcataatctgggatactttgtatgcgcaccggaagttaataaaataatagaaatccttacttctatgaaagaaattgaagaactaggtgcctgcgaaaaatgtaaacgcccatacattgtgccagtgacaaatgatgctcattgtccacgttgcagattatcttcaactgcttcagccatagagaggtattctcaagaagaattagattaa

SEQ ID NO: 389771 - DNA, 579 bp, Salmonella enterica
ttggttccgcgtacactcggaaaggaaattacatgggagaggtttttttctgcggtcttggacggtgattccaatgtaattcgtgaatatgatacaaatgatattgactatggtatttacgatgccggtgaaaaagtgacttttctgaatggtacagaggatatctataaccccaagaagattcatgagttgcgttctaaatgtgttgatatacagaatgactactttatgcaggtgttttttatctcaatgctcgcaccagagtttgtaagtattttctttggtttaaaaccaactacagctgatgctattaaagacattggttattcatcgttaaaaacaattaacgatgtcgttcttttcccacgtacaattgctttctcacaagggcatattgaagagagtgtttcacttaaaacgaaagtttttgcctgggcttatgaattgtctgctgacatccggttaggaaaagttagtgacgatttgatggaactattacgttatgacactatgttcaccagtcaccgtcaggatgtgttcaacactttaacaaataaagttatgttaaaggattattga

SEQ ID NO: 389772 - DNA, 981 bp, Salmonella enterica; identical to SEQ ID NO: 187672

SEQ ID NO: 389773 - DNA, 630 bp, Salmonella enterica
atgataagcttaaagcacgggagattcagcgcaagagccgttggggccgacgaagtgatcgcacgattgttaatccctgtgaacgctaacattaccgccggtgggattcagtacaataatcttttttatgaatgtgatcctgaaattgcatcaggtgtcagagtatttggaagaaccacttgtgaagcaagaatagatgacaattgcgtagattatatatatgtaagatttgacaaaaatagcattttcaaaaaacattacctacttaagaaaagagatgtatttaaagggaaagctcatcttgatacagatgtaatggctgattgggtagatactcaaaaagaaattaatttatttactctggattcgctcagcaatatcaataataaagatgaatttaacaggaaaggtaacgaaagattaaatgaaatatacgaatctcgccgggtacatggtaaagatattaaaaagaacaggaaaaatgaacttgattcattagggcgaactcatgttgctaatggaagatctgaacccctacttccttcatccagtaatgttctgcttttgcctggccgggaggagaaacaaagatggttaaaaggtaagaagaagactgaggacgcagaataa

SEQ ID NO: 389774 - DNA, 753 bp, Salmonella enterica
atgaaacgtgttgtaatgccggtacgctggcaatgtgcaaaataccagcgttggtattgtggaaatcagccctgtccctggtgctggcgacctgctgcccccgtctgtcattcctcgttcttcgctgtaacaggcatcgtaccggtctcggcgtgctttcctgcgtaccgacaccggttcagcaacattcaaggggatcaaatcgtgcaaataaccgaaaccgtactttcagagccggtggaaatccggcgttttattcagcaggcggtggatcactggccgcgtctgctggccgtccacttcacactccattcggcagaaggaaacatcaacggacaacagattcatgcattctgtacttccttttaccgacaggtgcacgagcgtattactgaacgtaatcacacggccagtccagcaccaccggtggtattacgctggttgcgggaacaacatggaggagcaacaatgcgatgcctgttgctgctcagccagacgagcatttgccatccacgggtcagtgccacggttgatgaagaatgttcgcaacgggtggatttattgcaacagacatggcgggtgataagtgctgacggacaatgccgggtggaaaggtgttttcaggctgcccggggtgatacatccggccagtatattgcgttaaaaacagttgcattgtctctggggttaccggttgtgaccggtattacccatcgcccggtacagcgctgtacattgattacagctcagtga

SEQ ID NO: 389775 - DNA, 681 bp, Salmonella enterica
atgtctgataatcgttcccggcatgatcgcctggcggttcgcttatcactcattatcagccgactgatggccggagaatctctgtcactaaaaacactgtcagatgaatttggtgttacagaacgtaccttacagcgcgattttcatcagcgcctggttcacctggacttagagtacagaaatggccggtacagtctcagacgacagagcagcccaggtgcgatccctgaaatgctttcttttatacagaataccgggatcgcacggatacttccgctccggaacggacgactgataacctgtcttaccgacaaccaggagccctctccctgccttatctggctaccggcgccggatatcactgcaacgttccccgagtgtttctcgcaactcatcctggcaataagacagtgtatccacatctctctgatgactgagcgatggtatccgtcactggagccctgccggctcatttattacagcggtagctggtatctgatcgcgttacagaagggaaaactgcaggtctttcctctggcagatatcaaatcagtcagcctgacatcagaacggtttgaacggagaggccacatccacagtctggtcgctgaagagcgttttatctccgccctgccacatttctctttcatccataaacttatcaacacctttaacctgtga

SEQ ID NO: 389776 - DNA, 435 bp, Salmonella enterica
atgaacaaaacaatattgtcttttgttctgtgcttttttgtgaatttttctcttgcagatatgcgtattctaaagataaataaatcacactatatagatgctgctaacagtgagcgtggtgatgctactttatgtagtaaatggacgttaaattccagacagatagaaaaaatatttttgttaagtgataaatataaggaaatgagtgataccatgactggattttggctctggtttccttgtgaaataacgggtgagttgatttataataagaaaaagtggcatttttctattaatgctgctgccacggcagaatggtccgatggtaaggaaacgatatactgggggtgttccagggaaaaatgtgatgacatgtttatacttccatatccaggccggagttatataggtggtggtggcaaattgatttggtga

SEQ ID NO: 389777 - DNA, 639 bp, Salmonella enterica
atgaaaatcgcattgatgaatgaatttagccaggcatctaaaaacgcaataatttttaatgagttagttgcagcaagcgcacatcaaggccatactattttcaatgtaggaatgtgtgatgacaatgatcatcgtctgacttacgttcatctcggcattatttcggctatcttgttaaacagcagatctgttgatttcgttattaccggctgtggtacaggacagggggcattgatggcactgaacacattcccgggagttacttgtggttattgcatcgaaccaacagatgcctacctgtttgcacaggtaaataatgggaatgcactgtccttgccatttgcaaagggttttggctggggggcagaattaaacatgcgctatatttttgaaaaagcatttgatggcgaaaagggattaggctatccggcagaacgtcgtgaatcacaaaatgcgaatgccattatcctgagtaatatgaaagaagcagttagtaagccactcatggatgctctccaggccatcgatccggagttacttaaacaagctcttggtggcgaaaaattccagaaatgcttctttaataatagtaaagataaagaattggttaattacgttaaaaatttattagatagatga

SEQ ID NO: 389778 - DNA, 981 bp, Salmonella enterica
atggatttggtaactcagacagcgaaacaactcactgaaggagctggagataacacctttggtggcttcctgtcccctgatgataattatcttttttatgtgaagaatgaaaaacatttgcagcgtgttgatttgaccacattagaagaagttaccatatacacagtaccggataattgggtggggtacggaacatgggttgctaatactgattgtacggaaatcgtcggaatcgaaatcagtaaaactgactggaccccgcttagcgactggaaaatatttctggaattttatcataagaatccacgatgccgtttaattacgattgatctggaaaccggaaacgctgaagtgatattggatcgtaatacttggttagggcatccaatttttcgtccgaataataacgatactatcgccttttgccacgaagggccccatgacctggtggatgcaagaatgtggatgattaaccgtgatgggacaaatgagcgtaaagtgcatgagcaccaaccaggtgaaagttgcacacacgagttctggatccctgatggatctgcactggcttatgtttcctatatgaaaggacagcaacagcgttatattcgcaaatataatcctgatactgatgaagattcattagtgatggaaatgccggcatgttcccatttaatgagtaaccataatggtattctctatgttggtgatggttcaggtagtccggttgatgttaaagatacctgcagttataaaattgaaaatgatccctggatttacattcttagcagtaaaaataaaaaaatacataaattggtgaaacataatagttcctggagggtacagaaaggagaccggcaggtaacgcacccgcatccatcattttctccagataataagtacgttttatattcttgcgatgccgaaggtgaaccagcactatatatggctaaaattcctgaggaaatcttaacccagcaataa

SEQ ID NO: 389779 - DNA, 801 bp, Salmonella enterica
atggatttcatcaatatgttctctcttaaaggtaaaaatgctttagtcactggagcatcatatggtattggttttgagatcgctaaagcactaagtaacgctggtgcaacgatcatttttaatgatgtaatagaagaaaacattaaaaaaggcctggcagcatataaagagaacaacatcaacgcacatggttatttatttgatattacagatgaacagtctgtgaaggaaaatatcaaaaaaatagagagtgacgtaggcattattgatattctggtaaataatgcagggattattcagcgtaaacctatgctagaaactacagcagctgattatcgcaaaataatagatattgatctaacaggtcagtttattatggctaaggcggtattgccttcaatgattaaaaaaggacatggcaagatcattaatatctgttccatgatgagcgaattgggtcgcgaaaccgttgtaggctacgcttcggcaaaaggcggcttaaaaatgctgactaaaaatatctgttctgagtttggtgaaaaaaatattcagtgtaatggtattggtccaggctacattgctacacctcaaacagcaccgttacgtgaaattcaaccagatggcagccgccatccatttgatcagtttattatatcaaaaactccagctggacgctggggtaaaccagatgatcttgctggtgcagctatatttttagcatcggatgcttcaaactttatcaatggtcatattttatatgtcgatggtggcattctggcctacattggcaaacagccttag

SEQ ID NO: 389780 - DNA, 324 bp, Salmonella enterica
atgtttgtatttaatgaagatacagcaatagaagatttaggcaacggggtcaaaagaaaagttttggctcatggtggcaatatgatggcagtagaggtccatttcattaagggggctatcggctctttacatcaccaccaacatgaacagttgacgtatgtcttatcaggtatttttgaatttaccatcggcgatgaagtgcgtacagtaaaaactggtgatactttatataagcagcccaacattgtgcacgggtgcaaatgtctagaaaaaggagttttgcttgatatatttacacctcaacgtcaggattttttaaagtaa

SEQ ID NO: 389781 - DNA, 156 bp, Salmonella enterica
atggagcgcttcttccgcagtctgaaaacagaatgggtgccgactgatggttacgtaggcaaggaccaaaccaggcaacaaatcagcgtttatatcctgaattattacaatagtgttaggtctcaccattccaagtgtcaactccacgatttttga

SEQ ID NO: 389782 - DNA, 534 bp, Salmonella enterica
gtgtataatggcgtctgggattcactcattaataaccaggctgatatcgccattggcgcgcccgatacgttactggacggtggtggaattgattacattgaaatcggcatgattcgttggttgttcgcgatttctccggctcatccgctggcgtttattcctgagcccatttctgagagtcagttacgtctgtacccgaacatcatggtggaagacactgcaaacactattaacaaaaaagtcggctggctgttacacgggcaagagtcgattctggttcccgactttaatactaagcttcagtgccagatcctgggggagggaatcggttttctgccagactatatggtgcgtgaagcgatggaaaagtcattgctggtgacacggcagatccacaacccacgtcaggattcacgaatgctgttggcaaccaggcattcggcaagcggtcaagtcactcagtggataaaaagagaatttagcttacaaggaatactgacggggatttatcaggatttgatgcatcgagcgtga

SEQ ID NO: 389783 - DNA, 252 bp, Salmonella enterica; identical to SEQ ID NO: 18125

SEQ ID NO: 389784 - DNA, 138 bp, Salmonella enterica
atgcacgcaggtgtatattttaacgtaattatccggaaagaacagtatattttaatgcgggagttgcatgagcggtatacgggagaaactatcagaccatgggagctacagaggtgcttaagtctcgtaacattataa

SEQ ID NO: 389785 - DNA, 225 bp, Salmonella enterica; identical to SEQ ID NO: 38761

SEQ ID NO: 389786 - DNA, 525 bp, Salmonella enterica; identical to SEQ ID NO: 38760

SEQ ID NO: 389787 - DNA, 225 bp, Salmonella enterica
atgatagccacacagatgtacggtaaaccggtcagtgaactgagcgaggcagagaagcagacggtctcgacactggcaacggttgctgccggtctggccggtggtctggtgggagactcaggtgcttcagcggtagccggagcacagtctggtaaggcggggggcgaaggtagttggttcgtgaattggttggaattctgtaatattaataataaaaatcgctaa

SEQ ID NO: 389788 - DNA, 198 bp, Salmonella enterica; identical to SEQ ID NO: 32498

SEQ ID NO: 389789 - DNA, 351 bp, Salmonella enterica; identical to SEQ ID NO: 32497

SEQ ID NO: 389790 - DNA, 438 bp, Salmonella enterica
atgcgtaacgggaaatatgacgttctgagtcccctgtattccggtgagccggtcaatgaggcggaagtcctgggggcggccgtctggctgtggatgcactcccccctgcatcgtgatgcgccactgcataccctgccggacctgctgctgccggtgattaagcaccgacagtatgtggtggcaacagagcaggggcgaccggttttcttcatgagccaggcctggctcagcccggaggcagaggcgcgttatcttacgcagccggcaattctcatgcctcagtcggactggaacagcggcgaccggatgtgggtctgtgactgggttgccccttttggacacactccggatatgagtcgtcttgtccggcaggatatttttccccgtctgtgctggcgttcgctgtaccaccgtgggcagcagaccgggttaccctga

SEQ ID NO: 389791 - DNA, 1653 bp, Salmonella enterica
atgtctgttttattatcgcctttatctcttcaggcagcggatgtccggcgtagcggagatgaagcatttatcattcagcagcaacgtcaggaagcccttgagcaacaactgacgccttcggcccctgatgttcgcctttctgcacctggctcttttgcccgtaagattaattttcctgttgaaacgccctgttttcagattaaacagacagaactggagggggctgatgcgttaccacactggttgcctttacaaaaaatcgccaacggggcggtcgggcattgcatgggggcgaaaggaattaatctgctgatgagtacattgcagaaccgtctggtcgatcatggttatgtcactacccgggttctggcaccttcgcaggatttaaaaagcggtatcctccggctggttattattcccggtgttgtgcggcatgtgcgtctgacaccggacagtgatgactatattcagttgtattcctcatttccggcacacgaaggctctctgctggatttacgggacattgagcaggggcttgagaatatgcaacgactgccgggtgtacaggctgatatggaaattgtgcccggtgagcagccaggggaaagtgacattcttattacccgcaaacaggacaaatactggcgactggggttttcgcttgatgattcaggtacccgcagcacagggcgttatctcggtggtataacattttctctggataatcctttttccctgagtgacctgctgtatgtttctgccacccataattttccacattacgggggtaagggtagtaaaaactacacggcccattactctgtgcctttcggctactggcagttttccgtcaccgccagtgattacgattaccatcagacggtagctggtgcggttgaggattaccagtacagtggcgagagtcagaatctgggcatgcagctgagccgggtactgcatcgtaacgggacgcagaaaacggtgctgacctacgatgttcaggcccgcaggtcgcgtaactacattaatgatacggaaatccaggtacagcgccggcagacggcggcatggcgacttggactgcagcaccgccattatatttcgcaggccacactggatgccggcgtcagctggcaacggggaacccgctggtctggtgcacaaccggcaccggaagaaacgttcggtgaggcaacggcgctcagtaagatcctgcagttgaatgcatcctttaatctgccctttacactggcagggcagcccttcagttattccttccggtatcagcgtcagctgagcaataccccgctgaccccacaggaacagtttgccatcggtaaccgctggacggttcgtggttttgacggggaacgaacgctgaatgccagtaacggatggtatatccgcaacgacctgacctggcgtacgccactgccggagcaggagttatatctgggaatggattacggcgaggtggggggagccggcagtgaataccttgtgggacgtcatctggccggtggtgttgtggggctgagggggcaactgttcagtacggattatgacgttttcatcggtcgtccgttttcaaagccggcgggttttatgacgagtgatgtgacagccggttttaatctgttccgggatttctga

SEQ ID NO: 389792 - DNA, 144 bp, Salmonella enterica
atgcaaactccggagaattgcatacatcaagtattcttaatctttctgtttctgacagtttattccccggggtacgccttgatgcacctggtctctgatctgtatgaaccacaccaccctgcatccaacgttgaagtgttctga

SEQ ID NO: 389793 - DNA, 780 bp, Salmonella enterica
ttgtctccgaatattattgttccgactcttgccgacagaggggtttatatcgcgtcagaatcaactttttatcgcgtattaaaatcagctaaccaactgacaaggagaacccgtgaacaccaatataagcggcctgaagtactcaaagctgtagcccccaaccaggtgtggagctgggatattagttatatcccatcgtgggttaaggggcagcatttttatctctatatgatcgtcgatatttatagccgaaaaattattgctgccgaagtatttacgaaagaatctgggcagtatgcggcagaactgcttcaacgtgctgtatggaatgaaaaatgttcatcccgcaatctcgtgcttcattctgataacggaggaccaatgcgcagttgtacgttactggcaaaaatgtacgcgcttggcgtattaagttcttattcccgtccccgggtcagcaatgataacccttattccgaatcgctcttccggacgattaagtattgtccatggtggccagagaatggttttcgaaccatagatgaagccagaagttggttaagcaagttcacgcgatggtacaacctggaacacaagcacagcggtattaagtatgttactccggatgaacgccatcgcggaattgacgcacaaatactggaagccagaaaaaaagtttatcgcgaagctcgcaaacgtcatcctgagcgctggagcaaacagttgcgtgactgggaactcattcaggcagtttatctgaatccagaaaaagaagcggcataa

SEQ ID NO: 389794 - DNA, 435 bp, Salmonella enterica
atgcgctatttcgtcgaaaacccacaggaaatcaaccggcttgacatggttttcggttacagaaaccgggactgtgtgctgtataaacaggagatggcgaactggcaccggcaccacaatctcattctgaccctggatgaaggcgaggcggatgaacgttaccgtaccgggcgggtcactgaccatctggcagcactgacatttgaagatatcagcaccatgcaggcgatcgtggttggtcctccggtgatgattaaattcaccgtacagatgttgctggaaaaagggctgcagccggagcaaatctgggtggattatgaacgccggatggcctgtgcagtggggaaatgcggtcactgccacatgggggatgtctatgtctgcgtcgatggtccggttttcaactatgccgtggcacgtcagtttgcagactga

SEQ ID NO: 389795 - DNA, 3876 bp, Salmonella enterica
atgaataaagtttattcccttcgctacagcgctgtggcccggggctttattgctgtatctgagtttgcgaggaaatgtgttcataagtctgtcagaggcctgagttttccggttttattactgtcccccgtacttttctctacaggaggccttgcgggaacagtcaataatgaacttggctatcagtcatttcgtgattttgctgagaataaaggtatgttccgcccgggagcaacgaatatcgccatttataataagcagggagagcttgtcggcacgctggaaaaagcggctatgccggatttcagttccgtaaattcaggaagcggtgtggcgacactaattaacccgcagtatatcgccagcgtgaaacataacgggggatatacaaacgtcagctttggttatggtgaaagccgttacaatatcgtggaccggaataatgcgccgtcactggattttcatgctcccagactggataaactggtgacagaggttgccccggctgcggtgacggcgcaaggggcagtggctggcgcatatctggataaggaacgttatcctgttttttatcgtcttggctccggaacccagtatattaaggacagtaacggacagctgacacaaatgggaggagcatattcctggctgactggcgggactgtcggtagtctgtcatcctatcagaatggagaaatgattagcaccagttcaggtctggtttttgattacaaacttaatggtgcaatgcccatttatggcgaggccggtgacagtggttcgcctttatttgcttttgatactgttcagaatacatgggttcttgttggtgttctctctgcggggaatggagcggggggcaggggaaataactgggctgttattccactggattttatcagacaaaaatttaatgaggacaatgatgccccggtcacattcagaacatcggaaggtggtgcgctggagtggggctttaacagcagcaccggagctggcacgctgacacagggaaccaccacatatgccatgcacgggcagcagggaaatgacctgaatgccggtaaaaatctgatatttctgggacagaatggacagattgacctgaaagacaatgttgcacagggggcaggttctctgacattccataatgattatacggttgcaacttcaaacaacagtacctggaccggtgccggtattattgtggataaaggcgtgttcgtaaactggcaggttaacggtgttaaaggcgataacctgcataagattggtgaaggtacgctgacgatacagggcacgggtatcaatgagggtggtctgaaggccggggacggaaccgttgttctgaaacagcaggcagacagtaacgggcaggtgcaggccttcagtagtgtgaatattgccagcggacgaccgacagtagtgctgactgatgaccggcaggtaaatccggataacatctcctggggatacaggggaggtattctggatgttaacggtaatgatattggctttcacgaaataaaggcggcagattatggtgctcaaatccacaatggcagtaacaaaaatgcaataatctctctggttatgcatgatgccattaagtggaccgggaaagatacaccaagaattttaggtcgggtttatgagtatttcaatgatgaaacgcagaagactgaattctttatattaaaaaccagcagtattgcgtggtctccttcgcctggagaaaaattttttccggatatgttcagaggtgctgattattttaatactcttgaggatgcggacaaagaggccagaaaaaatacacaatatattttccatggtaaattaaccggtaatatcagttttaacccgaagagtgccggtacgtttgttatggatggttctgctgatatgtccggaaccttcacccgggaaaacgggcgtctgacactgcagggtcatccggttatccatgcatacaatacacagtctgtggctgacaaacttgctgccagtggagaccattcggttttgaatcagcccacgtcattcagtcaggaggactgggagaatcgcagttttacctttgacagactgtcactgaagaacaccgattttggccttggccgtaatgccatgctgaacaccacgcttgaagcaacagattcgactgtcacactgggcgacagccgggtctttattgacaaaaacgacggtaacggtacggcttttacgctggaagaaggcacatcagaagcggtgaaggatgcagaccgtagcgtgtttaatggcagtgctgttctgtacgggaagacgacgctggatatcatgaacgcaacctttaatggtgatatcagcggtcatgccggctcgcatgtggagttgtcgcgccggagtcactggaatatgacgaaaagctccacgctggattcgttcagaagcaaaggcgggacgctctcctttgtgacagacaactggtcgccgaaaacgctgacggtaaacacactgcatgccagcagtatgaatatcgccatgggggtcagcaccgccgacaacacgggcgaccggattgatatcctgaataaggcaacggggggacataacacactggacctgtcctccctgtttgatcagactgtcacactgaaaaatgacctgactctggcatctgcaccggtcggaacttctcacgggtacttctcctttgccagcctgaacagggggtttactgtttatacccctgacacacaggtgcaggagaaagacggcagtgtttactggcaactgaaaagtcatgccggaacagcagaatctcaggtatcaacggatgtcagtgatgatgtaacagatacaacctctccggttgcaccggatacagggagtacaggaagcactgaggctgatggtattgtgtctgaagaaaataacagcaacggtgtgacgccttcccctgattctccggcagagaatgcgggcacgacggtgaatggcagtacgctgtttaagggcgcggataacacatctcttctgaagaaagcgcgtgccatgtttgccgcccgtgagttcattctcagcgacagtgctgaccgctggacacaggtggtggacaacagtgatgcagacggcggtgcatgggccatgacagggtacagtcatggtggatatgacgacttcagcctgaaccagagcggactgaatgtgggattccgtcagtctgccgtcggtaatgcctggtggggggtgggggcagagttttaccgggggcacagcagcacggatgactaccgggatgatttcagcctgtggggcgtgcatgttctggcgggcaaatcctttgccggtggtctgtttatgaatggtatggccggataccgggagctgtctgaagactactccattcagggagagctgagtgacctgtccggcagggcaaaaagccatatcctgacagcgggtatccgtggtgggtggaagatgcatgcagccccccttgatatgtcgataacaccgactgtttcactgaacggtgcccgggtggacggaaatcgtctgcagggccgggagcggagcgtgaagcttcatgatggcgatgccctgtggctgaaagccggggttgaggcagaaaaagtttccggaaatatgacgctgaaggcaggtgtctggcggaatatcacgctgaacgatatgcccggaatgaccctgcgtgatgactggaaagcccgtcactacgatgcagagaaggctgatcgctatactgtttcgtttggtgttaacggaaagctgacagagaaactgtcagtgcaggtaaaggtgaacagcagttttgatggttactttaagacggatgcggaaggaatactgggtatccggtatgacttctga

SEQ ID NO: 389796 - DNA, 1560 bp, Salmonella enterica
atgataacaaaaagagaaagacgtttcctgagaacagtagaatggcttggcaatgcacttcctcatcccgtcatcctgttcataatattaacaatttccttaattgtagtttcgatgattggacaatattttaatattagcgccccagacccaagaccacctggagctaaaggccggaatgatgatggtattatttatattgtaagtttactggatgcagatggagttcgtaaaattctttcgaatctggttactaattttacgggatttgcaccactgggcactgttctggtttctcttcttggtgttggtattgcagaacggtccgggttaatttcagcaacccttcgtcttattgtgacaaaagcccctgcaaaagtaacaactatagctgttgtctttgccggtatcatgtccaacatggcttcagaacttggctatgtcgttttaataccactttcggcaatactttttcattctctgggaagacatcccttggccgggcttgctgctgcttttgcgggagtctcgggtggctattcagcaaatttagtattaggtacaatcgatccgctcttgtcaggaatcacccagcaagcagcgcaaattgtatcatctgattatattgtaggggctgaatccaactggtattttatgtttgtcagtacattttttataacactcatggggtacctgataacagaaaaaatagttgaaccacagttagggaaatacaagggtggagggttcaatcaggatgaacagtcaattcgtaattcatctgatgttacagcagttgagaaaaaagcgttaatgctgtcctttttatctgtacttctactatctgttattgttgccattctggttattcctgaagatggaatcttacgtaatcaacaaacaggattaatcagcaattctccatttcttaaatcaatagtggctttcattttcatattcttttcattagctggtgtagtatatggatatacagcgggaacaataaaaaatagcaaagatattgttgatgccatgactcattcaatgagtacattgggactttatctggtcattatattttttgcctctcagtttgtagctttgtttagctggacaaatattggtcaggttattgcggttaaaggcgggagttttctgaatagtcttgatttgccagattccgtaatatttattggatttatattgatttgtgctgtcattaatttaatgattgggtccgcatctgctcaatgggcagtaacagcaccaatttttgttcctatgttaatgatggcaggatatgcccctgaagtaatacaggctgcttatagaattggagattcagtaacaaacattattactccaatgatgagttattttgggcttgttatggctattgtacttaaatacaaaaaggatgccggtgttgggactttgatatcaatgatgcttccatactccatagttttcctcgtcgggtggtctgtattctttgttatatgggtctttgtactgaacttacccgttggccccggggcatcgacctattatctcccataa

SEQ ID NO: 389797 - DNA, 990 bp, Salmonella enterica
atgaaaaaccctgatctccagaacctcacggactattccccctcagatgcgccctgggacgctcacagaagcgtttctgatgacgtgggagggatttacctgcttgcagccgaatatgagcgctacggggcgcgtatggctctctgtggtggtttactgcgtttcgggtggtctaccctcaaggaaaccggagaaacgcgtctgaggctgcgtgaggcgcatttctgccgtgtccggcattgtcctgtctgccagtggaggcgctccctgatgtggcaagcccgtttctaccagtccctgccgcgtatcgtggcggattatcccgatgcccgctggatgttcctgactctgaccgtgcgcaactgtgcgatcggggagctgggcgagatgctgaaccggatgaatgcagcttttcagcgcatgaaggttcgcaaggagttccggcctgtgcagggctggatacgtaccacggaagtcacccgcgggagcgacggcagcgcacacccgcacttccacaccctgatgatggtgccgcctggcatgctaaatgggaaaagttacgtcaggcatgaacgctgggttgaactctggcgggagtgtctgcgggtcgattatgacccgaatgttgatgtccgggcagtgaaacctcgtaagccgaagggcggcgaatcgctggcctgcgcgaccgccgaactggtgcgcggtgcggtggccgaaaccctgaaatattccacgaagccggctgacatggtggccgatcctgaatggttcctcgaactgacccgccagacgcacaagcgccgctttgtggcgaccggcggcgcactcaaagacgtgctgaaactcgatcaggaaactgacgccgacatggtgatcggtgatgatatttccgagggcgacgatgacggttcacgaatcgcgttcgagtggaaaaccgaggtcagaaagtaccgtcgctcaccgacgaaagataaaactgaatcaggctag

SEQ ID NO: 389798 - DNA, 636 bp, Salmonella enterica
gtggccgtactcgcccttcagtatcccggcggtttccttcgcgatggtcttgtagcgctcgccggtcaggacgttgagcaccgcctgggtgccgacaatctgcgaggtcggggtcaccagcgggataaagccgaggtcctcgcgcacgcgggggatttccgccagcacctggtcgagtttgtccgccgcgttctgctgcttcagctggccttccaggttagtgagcattccgcccggcacctgggccacgagaatgcggctgtcgtagcccttcagctggccttcaaaggcgtgatactttttgcgcacctcgcggaagtaggccgcgatgctctccagcttcaggatatccagcccggtgtcgtgttccgtgccggcaagcgtcgccaccagcgcttcggtggccgggtggccgtaggtggcgctcatggacgaaatcgccgtgtcgacgccgtcaacacccgcttcaatggccttcagcagggccatctccgccatcccggtggtggcgtgacagtgcagatgcaggcgcacctcaaaacgttttttgatttcgctgaccagctcaaaagcggccatcggggtgagaatgccggacatgtccttaatcgcaatcgagtcaacgccggtctctaa

SEQ ID NO: 389799 - DNA, 225 bp, Salmonella enterica; identical to SEQ ID NO: 389787

SEQ ID NO: 389800 - DNA, 267 bp, Salmonella enterica
atgataaaagcggtaataaatacccagatccccttgagaccgatttgcactggcattaagacggtaccggcgccgatcgccataccgatacacaagagcacccagccaaaatcatattttgtaaacggtaatctcgttgaaagcggtgtggtcgtagcgttactgttatttaatggtaatgtgtcgtcctgcatagagccccctgcccaaaatataggcagctctctcataaagaatgctgcctataaccaggctatagtgccttga

SEQ ID NO: 389801 - DNA, 249 bp, Salmonella enterica
atgctggaaagtgcgtaccacgcccatgcgggcgatctgctggcccggcaatccttccagatgccgctcgcgcaacgtgatcgtaccgcctgtcggcttataaaaaccggtcaggcagttaaacaccgtcgttttacccgcgccgttagggccaatcagcgacacaatttcccgctcacgcaattccagcgatacattgttgaccgccagcaaaccgccaaagcgcatcatcaggccgttaaccgctaa

SEQ ID NO: 389802 - DNA, 450 bp, Salmonella enterica
atgaacacttcagatacaatagctttatggacagcaataggaacgtgtttagctgctattgctacagtaatcactgctgtgattactggatgtgctttgagagtagcgattaagacattacattcatggaaagataaagaaaaatttatacagcaggttagattaaaacgcgctattttggaataccgccaaaagatagaaagtatcaaaaacctaaataatgatcaccttaaaataaatgaacatgtgattaatgtactacaaccagctctgtccaatgtttaccatgagatgaagttggccggatttaaagaaaatgaatgtatagagtttgagctatttaatattgtttggagttcacagcaaaattatgaatcaagccatatgaattataaggaattattggatagtgctgtcgaattacagaaagcaattaagattaatttttga

SEQ ID NO: 389803 - DNA, 426 bp, Salmonella enterica
atgaaaaataaattaaatgttttggctcttactcttgcgtcgttatccagtgtttgttatgcaaacatggctgattataatacgtatcagagtaatgttcagattaacaatctgtctcatggcgtgtataagtcagggggtaaggacagtcagtttttttgtatcggactgaataatgagagtcaaatacctaatgccaataccatgtgtaaaatggatgtgttcggaactcataaacaggggtttgataacatgctggcgacagcacggtattattatacaacaggggagaaagtaagaatatattataaagagaatgtctgggctgacagaaattttacagcaggattctctggtaatgaattaattgcgataactacttgtagttcaatagattattgtatggggcctacgttgccaaactaa

SEQ ID NO: 389804 - DNA, 321 bp, Salmonella enterica
atgatgaatttaactactcgccagcaacatgttctggataccttgatcaattatcagcgtaagcatggttttccccctacaaataccgaattggcagagctgctgggatgcagctctcctaatgctgcagtagaccatcttagggcattggagaaaaagggagtgattacgataacccgaggtgtgtcgaggggtatctgtatcaacacatgtaacgatgacgcagaaactctagcactgataaaagcacttgttactgatgaagctgacgccagagaacgggccatcacatttcttcagggaaaggggataacgctatga

SEQ ID NO: 389805 - DNA, 618 bp, Salmonella enterica
atgacaacccagtatggattttttattgattccagtcgttgcaccggttgcaaaacctgcgaactggcctgcaaggactacaaagatctctctcccgacgtcagtttccggcggatatatgaatacacaggtggcgactggcaggaagataacggcgtctggcaccagaacgtgtttgcctattacctctccatttcgtgcaaccactgcgaagacccggcctgtaccaaagtctgcccgagcggcgcgatgcacaagcgcgatgacggttttgtggtggtgaacgaagaggtctgtatcggctgccgctactgccacatggcctgcccgtacggcgcgccgcagtacaacgcggccaaaggtcatatgaccaagtgcgacggctgttatgaccgggtggcgaaaggcaagaaaccgatctgcgtcgagtcctgcccgctgcgggcgctggattttggcccaatagacgaactgcgtaaaaaacacggtgagctggctgccgtcgcgccgctgccgcgcgcgcatttcacgaagccgaatattgtgattaaacccaacgccaacagccgcccgaccggggacactaccggttatctggccaatccgaaggaggtataa

SEQ ID NO: 389806 - DNA, 264 bp, Salmonella enterica
atgccacgctttcctttcggcgcatactcggccagcatggtacccgcgccggaaatttccgccccggcgcccagcccctgtataattcgcaatgtcaccagtaatactggcgcaaaaatgccgatttgcgcatacgtcggcagtacgccaatcagcgtggtgcagatccccatcatggtgatggtaataaacaacactttttttcgtccgatgcggtcgcccattttaccaaaaacaaaggcgccgatgattctggctatataa

SEQ ID NO: 389807 - DNA, 162 bp, Salmonella enterica
atgttacaaaagattcctgcgaggacggggccaaaaccgaccgccaccagcccccctgcctcttttgaaatcgccatccgggtgaagcgattacgcgatccgaaaatttccgccatggtgatgttttccagcgcaaataatcccagcacggcaaagttatga

SEQ ID NO: 389808 - DNA, 798 bp, Salmonella enterica
  misc_feature (233)..(257): n is a, c, g, or t
atgaaaaaaacactgattgcactggcagtggctgcatctgcagtggtatccggctcagctatggcatggacccagactggtactggcggaagtttggaattaggtggtaccctgacaccgcaggataaagtcactccttgggaagtggctgttggggcggcaaatacaaaccttaatacagatattgcaaaaggagagagaattgttgatattcctgtaaataaacctattcnnnnnnnnnnnnnnnnnnnnnnnnngggtatccgtactatcagtacgacaccgttcaagggagtgaacggtatttctccacagattgactatggcaatgcagttaacgtgggtgcatttgcaaatggtcgggcaccattaactctgcaagtgagagatgataaggatgccgtaattggtacgttaacctcagaactgggggccagtgcactgatctcagtcaaaaatcacaacggtggttggagtggttataaccacgtctatgctgacactgtaggtcaggggttcttcggcggtctgcctaaagcaaaaaacgctaccccagacgataatattgcggtcaccgttatgcctgaagttgcggatcattatgtagatcagggtgtatcgtggtctgaagtaggtgctgcctctagttttaataatgttgatgctacttatagtgcttattatgcagctggtattgaaaaagggaaatctatcaaaatcaatcttaattctccggtccagggtgacgctaatattgtttggaaagcatccctgccgattattgtttcttaccagtaa

SEQ ID NO: 389809 - DNA, 291 bp, Salmonella enterica
ttgaaactgaataaaaaatcattttccggcgtcaggatagtgagggccggggaactcgaaccgggggccgtgtccgaagagcagttctggctacttgttgatatatccccgatacacagtgaaaagattattctggccctgaaagattatttcgtttccgggtattccagaaaggttgtgtgcgaacgccacggtatgagtggcgggtatctcagcaccagtgttaaccggctgaattttatcagcaggaatgtgcataaactggcgggttattacagccatcatgaatga

SEQ ID NO: 389810 - DNA, 501 bp, Salmonella enterica
gtgaaacaatacgccatacaacccgccacactcgaatttaacgctgagggtacacctgtttcccgagattttgatgatgtctatttttctaatgacaatggactcgaagagacacgctacgtttttcttggcggcaatcgtcttgcggagcgatttcccgtacattcacatccattatttatagtcgcggaaagcggttttggcaccggactcaacttcctgacgctgtggcaggcgtttgacggctttcgttctgagcatccacaggcgacgctgcaaaggttacatttcatcagttttgagaaattcccgttaacgcgcggcgatctggcgctggcgcaccaacactggccggagctcgcgccctgggcagagcagctgcaggcgcaatggccgctgccgctcccgggatgccaccgcctattgctggatcggggtcgggtgacgctggatttgtggtttggcgatattaatgaacatgtggacgtcaaacctgtttaa

SEQ ID NO: 389811 - DNA, 981 bp, Salmonella enterica
atgtcgattaagaagctcgaaggtggtcaatatgaagtagacgtatggccgcgcggacgtaacggaaaacgcattcgtaggcgatttgagaagaaacaagaggcggttctttttgagcgttatgtattagcgaacgccgacaaaaaagaatggctgggcgcaagcgttgaccgccgcaccttaagcgagttgttagatacctggtggctgctgtatggacagactcaggtaaatggcgagattgaaaagcggcacctgaataaaacaatcagggcgctgggtgatccagccgttaaccgactgaacaagcgaatgattgcacagcaccgaagccaacggctggaagacggtatcagcgcagcaacgatcaaccgggatatttaccgtttgtccgggatgttcagcacgttgataaagctggaagagttcaggaaggaaaacccctgcaagggtctggaaccactgaaagaagcaccgccagccatgacctacctcgccaaatcagagatcagcagattgctggatactctgaccggcgacgatcgacgcgtagcactgttatgcctaagcaccggcgcacgctggggcgaaggtagcacgctgcgaggcgagcaggtaaatcacgggcgtgtgacgtttcttaagaccaaaaacgggaaaaagcgcacggttccgatatcggaagaactggagaaagagatcaaaaccagcgacaccgggccactgttcaaagttgactatgaaaacttctgcgaacggctccgacaggttaagcccgatttaccacgcgggcaggccacgcatgtgcttcggcatacatttgcaagctggttcatgatgaacggggggaacattattgcgttacagcaaattctggggcacgccagcatacaacagacgatggtttatgctcaccttgcacctgattacctgcaacacgcagtaacgttaaaccctctcggcggcgggttggcggtgtga

SEQ ID NO: 389812 - DNA, 321 bp, Salmonella enterica
atggtagaaatccctaccccgtcaagcggcgtgggtgaaaaaatcagagctatcagggatgcggaggggttaacaaggcagcaattctttgaattaactggaatacctgcaggcacgcagaagtattacgagacaggaagagtggagagcattggtagtgatatcttgcttaagatcacgcagcattcacgtttcgcaaaatatacgctctggctaatgactgacaagaccgccccacaagctggtcaaatcgcaccggccctcgcacacattgggccagagtcaactggatcaggccgctcagagacacaaactggttaa

SEQ ID NO: 389813 - DNA, 456 bp, Salmonella enterica
atggtcatgaaacatgagggaaggggtgaagggttctgttgccgttatgcttctacggggggcctgatcgggtggtttatgtatggcgaagatacgcagaacgttatctttgtggcgtcttccgatagtggtgattttgtccaagcgataaataaagcaaccgctgatctgcaagagcgccttgctatggagaaggagtttcttaactgcatgttgaacgcgatgaaaaattattctgatagaagtgcaccggaattaagaggcgagcagttagaaaaagaaaaatcatattcaagattagacagcttgattctttttccagatgaaaaattagttatggcatcggaagtgatcaaatatttaaagaaaatggctaatgagcgcggggggtatctcaataattgcaatattaagaaaatcctatcattagccatagaaacagttacagaggagtaa

SEQ ID NO: 389814 - DNA, 216 bp, Salmonella enterica
atgaccaacaatgaacttcttacaaaagaaactaacgagataattaaatcagccttaacaggcggtacttttgaatatcttgctaattcagtagctaaacaacttcctactcgtgccgatggttccaccccatctaaatcaactgtcacttatgaagaaatatattgtgcagttttcaatatgatggaacgggcactaacaggtaaaagtgagtaa

SEQ ID NO: 389815 - DNA, 282 bp, Salmonella enterica
atgacagacaaagagttagagggattcattgaagtgcgtcacgctgttgacgcggttccatacccgaaatttgccgagttaatcggtaagaagcccgccacggttaagagcatgattgaagacggtaagttgccgatcatcccgtggaagaacccggaaagcttgggcgcccgcgctgaaaactggatctatattcctgagttcaaccgcgcaatgcgtgatgcctattacaaccgtccgagagagcagcgcgacgcttggttgctgtggatcggtctttga

SEQ ID NO: 389816 - DNA, 252 bp, Salmonella enterica
atgttgatggtgaattgcttaaattgggaatgtgagggggcttttgtggctgtgcaattaatacagttaagtcgtcattcatatttatatcgtggcttcactattcagaaatgcccgcgtaatccttttacgtttaagcactcttatcgtatttccagcaatggcgattattacgggcgtgactttgctttagcggaagccatgcgcacggttgatcagatgtataagcaagggggcagtaatgcacgatga

SEQ ID NO: 389817 - DNA, 231 bp, Salmonella enterica
atgcacgatgaaggcccatcactggcaagcctgcttaagcacgggtgccaggtcacacacttcaagaactcacgcggctggctggaaacgccggacggaagattttttaagcccgaaccagcgaaggttcaatttatcaaaggtaaaaataaaccgtttatttatacccaaagaataaataaaggcttcctgcttgcactggctgaattatttaaaaagctaattaagtaa

SEQ ID NO: 389818 - DNA, 210 bp, Salmonella enterica
atgaccagacgtgatcaatatagcttcattttgcatgttcttttacctgctatcgaaaatgaaggcttaaccattaaaacccgccgtgatggtgagttaaccctttctgccactggatcagtaaccacaaattttatcagcaacctgcgccagcactgcattgaagaattgcagcgcccttctattccagcttccccatacggagtttaa

SEQ ID NO: 389819 - DNA, 582 bp, Salmonella enterica
atgaaccatgtaatgattgatatcgaagctttggataaaaagccaactgcggcgatcgtctctcttgctgcggctgtatttgatcccatgactggccgtgttgatgcgtcaatgtatcgcactgtcaacattgaaagcagtgaggcagcaggcggaaccatcggcgcagatactgtgaaatggtggtttaagaagtcccgcgaggtacaggccgctgtattaagcgatcaggctgtgcagttgggcgttgctctcgctgacctgaacttgtttgttcttgcgtattgcgatgctgattcggtaaaggtttgggcgcgtggcactgactacgatatgccgatcatcagccacgcgatgcagtctcttggtatccggccagtatggaatttctggaacgttcgggatgttcgcacggttgaagaaatatctttaatggtttgcgggtacgcctcccgccgtttagttgatgagaataagcacaatgctgccgctgacgtctggaaccagattgcgcagctttctgacaatctgaaagctattgcagccgctgggaatgataaatcggcggaggcggcattatga

SEQ ID NO: 389820 - DNA, 996 bp, Salmonella enterica
atgatccgcccgttcatcaaatgggcagggggtaaaacccgtgtcctccctgacctgctgccgcatcttcctaaagccgactgcctcatcgaaccgttcgtaggcggcgcatcggtatttctggcgactgaataccgccgctatgtgctggctgatatcaacccggatcttattaacctgtatcgggaagtcacccgttacccggacttagtgatcgatgcggcccgcgaactgttcaacagtaagaacagcccgcagggatacaacgaagtccgcgccgcgttcaacaagcaagtgggtacggtaaaaagcggtgggttgcgttatggcgctgaaatggcgtgcattatgcgcgctgctcaattcctgtatctgaatcgccacggttataacggcttatgccgatacagccggaagacaggctttaacgtgccgtttggcaagtataagagcgtctactttcctgaaaatgaaatccgcctgtttgccgaaaaggccaacgatacaaaggcaatatttctttgcgcgccgttccagcgttctctacaggtcgtcacgggtggcgatgttctcgtttactgcgatccgccttacctgcctgaaagcaaaacagccgattttacccaataccacacagagccattcacggaagacaaccaccgccagttagttcaggcactgctggaagttaatcgtaagcatggcgtgaaggtcgtcatttccaacagcgacaccgaagccacccgcgcgatttatcagcccttcaagatgcacgaaatcagcgtgcaacgttccgtcagcaccgacaaagacaaccgccagaaggccaaagaagtgatcggcgtgctgcccgtctgtgatggctgcgggcgctatgaaggtggtcactgtgcgcaatgttgcccaggtatcgccgcatgtgaagaaggctggtcgtttgattgttacggcaattgcgatatttgcgagacgtctgataacccggaaacgtggtaa

SEQ ID NO: 389821 - DNA, 915 bp, Salmonella enterica
atgacggcttattacaacgaaatcgatccctttgccgcgcaatacctgcgcaacctcattgatgccgggcttatcgcttccggtgttgtcgatactcgttctgttgaggatgtaaccccaaatgaccttaaaggattctctcaagtccacctgtttgcaggttttggaggctggccccgtgctttgcgcgtcgcaggatggccggacgaccgcccagtatggacagcaagttgcccatgccaacctttcagccaggcaggcgaaggaaaacaatttgatgatgagcggcacctatggcccgccgttcattggcttgcaggccagcaacgccctgtcgttatatttggcgaacagtcttcaagcaaagatgcagaagtctggatcgaccttgtacaaactgacatggaaagtttgggctatgccttcggggcgtcggcgtttccgtctgcgggcgtcggtgcgccgcacatccgggagcgtacttactggctggccgactccaaccgcgagcaatacgaagaacgcttatcaggatgccgagaaggtgatcgccaggaagctggctggtcggcggtcgaacttacaggactttgcttgtcttgcgggctggcccacccctgcggcgagggatggaaagggcgggtatcaggggggaaggatgcggcacgggaagctgtcaacggatacgctggatgtgacagcgcagatagcaggcccggcccggttaacggattctggggatctgctgactggcttttttgcagagatggaaagtggaggccagttaaacccggccttaagcctctggttaatggggttccctccagagtgggaaaactacgcgccagcggaaacgccgtaaatatctatgcagcagcaaccttcttaaaagcctacatggagatcgcgcaatga

SEQ ID NO: 389822 - DNA, 2391 bp, Salmonella enterica
atgaccacggcaacccgtggccgtcgcgcccctttccgccccaaagtaatagggtgtaagcctgaagattctgagtggtacagatctgaatggtttaagccgcgccatgctattggtcgtgatacgcagccttctgctaatggttttgaatatctgacgccggaaggttcccgaaaacatattgatgttgctgagttgttcgaagagaacgaaaagccggagcacagcaagctgctgcgtcgccgtctggcttctcttccgcagtatatccgccgccactttgtcgcgaagctggatgcactggacgcgaaagaccgcaaagcggcagatcactggctggttaatacctttgagcgccacgtattaacgcgtattgatagcgtgaacagtgtttaccagcctgacactgtgatgcccggcattctactgccaatccgcgatcagcttttccgtatgctctgggcagggaaaaaagagttaaaaagactggcttatacgcttgccgatatctttacgagcgagtttatacgcgagtccgatcaacaattggcacgcactggcgatcctgagttcgcggcgctttctggctatggccgtattgcgtcactggcggtgcatctaaaaacgccgatccccggctggacagcgtattgcaatgaagaacttgaagcggaggacgcgttacgcgcggttctccgtcttgagtcaccgcaatggtggttaaaccgtctgcgccgtatccatgcccggtggcgtgagcatttgatgatcgcagcgggatacgtccagaaaaaatcttctccatacagtagcgccccgtgccttacggaatggctggcccagaaaaaggctaaccgtgaatacctcaaggctatggaactggaagaccaggacacgggggagcgcatttcactgatcgataaagtcgccggtagtgttgccaatccggccaaccgtcgccgcgaactcatgacgagaatgcgcggatttgaagatctggcgaagctggaagggttggccggtgacttctacacgctgacagcaccttcccgttaccactccatgcagcataacgggcgccgcaataataaatactgtggtgcgtcgccgcgcgagacacagcaatatctttgcaaagtctgggccagaacccgcgcagcgtggaagagaaaagggatccgcgtctttggtttccgcgtggtcgaaccgcaccacgatgcaacgccacactggcatttacttctttttatgcgcccggaatgcgtcgagcaggcgcgcgaaatcttccgtaaatatgccctgaaagaagacggcaacgaaccgggagcgcaggaaaaccgctttcaggttgtgccgatcgacgatgcccacggcagcgcaaccggctacatagcgaaatacatttcgaaaaatatcgacggcttcgcgctggatggtgagaaggacgacgaaaccggggaagacctgaaagaaatgtcactccgcgttagcgcgtgggcatcgcgctgggctattcgccagtttcagcagatcggcggtgcgccggtcacggtatatcgggaacttcgccgcctgggcgatcgcgaactggtgttgcaccctgaactggaaaccgcccggcaggccgctaacggtggcgaatgggataactacgtattagcccagggtggcccgttggttgagcgcgataagctgcgcatccgtctgaactatgaaaccactgaaaacggcaacgcctacggcgataacgtccagcgaatcactggtatttactgcccgattacgggcaatgactctttgatcttcacccgcaccactcaatacaaaatcgtgccgaagcgccagagcgctgacggtgtggccgttgacgttggtttttcaggcggcagcgccgcccctcggagttctgtcaataactgtacgcgggatcccgcggtaggtgctgacggtgttgaacatgccgccagcgaagctacaggacagtcagaaatgactgtaccagctgagggcgtgacggtgagttttgatgcgctttcacggcaggaaaagcgagaactggcgcagcggcttagtgacgatgtgcgaagtaagcgtaaaaaacggccaccggaacgggaagacggggccgggctatccgtgaaagagcagcagatcagtgaactgttggcgctacgtgggattgatgccagcgccggaatggtcagatcgatgatggccggtgcgtcagtggcgtgcggcgatcttgttatgaccgtgcaggacgggcggctggtatcgcgcaaccgcgccgcgttggggctggataagcagccgtcgcaggtgatggcggcgaagaaaaagacaagcgacctcgtgaacaggatgaaggctgcgttttcggggcggaagtag

SEQ ID NO: 389823 - DNA, 684 bp, Salmonella enterica
atgagctatctgggaagtaaagcggcgagcggggtttatcagaagattattgctgaaatgcccccgcatgatacctacattgaaacccatctgggaggtggggcggtgatgctgcgtaagccaccggcgatgtgcaatatagggatcgatgttgacgggcaaacacttgaagatttcgcacatgagcataatcgcctttacattgatctggttcgggctgacgcggtggactacctgaacaattatgatttttatcgtgcgggccgcgtcctgatctatgccgatccgccgtatctgcatgaaacccgcaccggaaacgcgcgctatcgctatgaatattctgttgcagatcatgagcggttattgtcctgcctggtcagcctgccgaaaaacgtttccgttattctttctggctatccatcgcagctttatgacgaaagtttaacaggctggcgcagcaaagaatttcaggcaatgacgcgcggcggcgtgcgaacagaaaaaatctggatgaattacccggaagggcgcgcgtatacccacacgtttgccgggaaagactacaacgatcggcaccgtattaagcgcaaagttgagcgctggcgcgcaaaatatgcggcccttcctcctgctgaaaggctggcgatcatggtggcgcttaacgaggttgacgcggggcagtaa

SEQ ID NO: 389824 - DNA, 999 bp, Salmonella enterica
atgactattcaaaagccaatgagtcgtatatatgaaaagataagcaatgctggttttaaccaagcttatattaaaacactactaccagagtggtgggatgatagcttggctgaaaccccggctggtaagcagtatgccagcttgcatttagctcgtatctttagcctggcgccagaaagcctcaaggatgattcaggttctgttagcttctgtttcgatgggcatcatcgttttaagcatcgtgttgatctgggtgaagacgatctcactgtggcgactgctatcgcctattcagcagcacgaattgcttcgagtaacttcggtgtagattacgatcctgatgttgatttggattggacttctgtacgtgcgcagttgttaaaaacatcaccttacgtgacgttgcctgctttggtcaggttttgccacatgtcaggtatccctgtcgtctacattaagaacttcccgcagaaagcctgcaaaatggcaggcatggcgcttatgtgtgccggtcgtccggtcattattctaacccaggcgaaaaaatacggttttatgcttttcgaccttgctcatgaactaggtcacatagcaaaagggcatctgaaggcaagcgccgaaggtgtgtttgttgacaggaaaattgattctggagccacggctgatcttgaaggagaagctaacagctacgcctttggattgatggcaggaaaagaatctttaaggattgtgccaaaagggcggtatttgactgctgaacgtcttgcccgtgctgcaaaagcctatggtgaagagaattccatagacccgacacatgttgtcttgaactatggatttagcctgcaacactggggcgttgcaacgaatgctcttaaatacctttgcaagggcaatccagtggatcaagaaatcgttcaacggctgcttatggaagatatcgatctagattccattaacgatgatgatttggagttactgactgcactctgcggggcataa

SEQ ID NO: 389825 - DNA, 645 bp, Salmonella enterica
gtgatcgttttatcagacaatgatgtcattttgaaacttgcgcagtgtgatttgcttaagcatctacctgaaatacttgatgaagatgagcatgatatttttgttagtccctctgcgcggtttaagttgttatcccctcgtaaacctgaaaaagcgttgaagttatgcggtaatgatacggtttacagaaaagtcgctgatttccttgatcgtgtgcaagaaataccagtggtcacaaatgagcaattattcaacgaacttggaaaggttcctcacattgatattggtgagcaattgcttttggcctcctgtatggaaaaccctggctccctcttcatgaccggagataagcgttgtttgcaggctgtaatggacaaccaagctatcattgcaacagtgcattctcgcttgatcaatagtgtcgtgacttttgaaagtgctttgcttttatctgtaagaatgttgggatttgatgctgtttataagcaattacaggaaaatcctaaaccagattcaatgctgaaacttgcgatgcgttcagcacagcatgatgatgtttgcgggtgtctgctttcattcaccaggcctgtttatgactatctggcttttaaagacaggcttccggttcgggcagcatacatgtga

SEQ ID NO: 389826 - DNA, 258 bp, Salmonella enterica
atgttcagatgtcctatttgcggagcgtcatcccgtatccgtaccagcgctaaaatgaatgacaccaacaccgtccggcgtaaatattaccagtgtaataatctggcgtgcggtctgtgctttagcactatggaagctttcgaaaagttcacctcaaagcagaacaaaggagagccttcgcttccggatgactttattccacacgatgcctttccggcttctcaccgtggccgtgatcagctaaatctagctatatga

SEQ ID NO: 389827 - DNA, 516 bp, Salmonella enterica
  misc_feature (422)..(431): n is a, c, g, or t
atgtcggcatcaatcaaccgctggggaatgcttgccgctcacgtgtgcatcaattttgtgctcgggggcgtctacgcatttagctatttcaaaacaccactcatggcgcaatatcactgggatccggctacgctggcgttagcattctctatcaatatggggatcattcctttaccgatgatttggggcgggagaatgatcgacaacggtaaaggaaagcaggcgatagttatcggcggtatcctgttttctttaggttttatcttgtccgggtttgtggataatttgcccatgctatttttaacctacggcgtcattgccgggttgggatcgggcctggcttttacgggtaatcttaataatattctgaaatttttccctgaccgtcgcggtctggccagcggtatcgtactggcgggggnnnnnnnnnngtatcgtactggcgggtgttggcgtcgggacgctactttgcacccgcctggccgaatattttatggcgcaaactcacgatgttag

SEQ ID NO: 389828 - DNA, 369 bp, Salmonella enterica
ttgctcagacgtatggcggtaattaatgagtcgttgcatccgccgatggatagccgtgtgcgcgatgcctgccagtatatcagcgaccatctggcggacagccattttgatatcgccagcgtcgcccagcatgtctgcctgtcgccctcccggttatcgcatctgttccgccagcagttaggcattagcgtattgagttggcgcgaagatcagcgtatcagccaggcgaaactcctgcttagcaccacgcgaatgccgatagcgaccgttgggcgcaatgttggatttgacgatcagctctatttttcgcgggtatttaaaaaatgcaccggggcaagtcctagcgagttcagggccggatgtgaataa

SEQ ID NO: 389829 - DNA, 180 bp, Salmonella enterica
atgtctctaaaaacgcgtcccattgggggcgcgttgatgagtctggtcggtgatatattcagcaaatgcgctttgatagacgtaattatcagaactcacatattcaataatattatcataatgtccctgcaacacttttccttccagcgcatggaagaaaatataatcttcgattgttga

SEQ ID NO: 389830 - DNA, 714 bp, Salmonella enterica
ttgatccgggacgttcaggccgatggctgcggcaatcttgcccgcgtcacgaccgacccagtcacggctgacggtgcctttgccgcgctcatcaatattcttcagcagcaccggctggagctgttcggcctgagcggcggtcagtttcaccgcgtgctgaccttccatcagacgcatcagctcgtcggcgacgctatccaccacaatcagcactttttcgtcggcgcagatgatgttgttatcaaacgacgcgcctttgacgatggattgtgcagcgcgcggcaggtcggcggtctcatccaccaccaccgggggattgccggcacccgcggcaatcaggcgtttattagtatgtttgcgcgccgcgtccaccaccgcttcgccgccagtcaccaccagcaggccaataccgggatacttgaacagccgctgggcggtttcgatatccgggttcgccacggtgaccagcaaattttccgggccaccggcggcgaccaccgcctgattgaggagggtgattgcccgctgagagacctttttcgccgccggatgcggggcaaacacgacgctgttgcctgcggcaatcaggctgatggcgttattaatcaccgtggccgccggattggtggacggcgtgaccgaggccaccacgccccacggcgcattttcaatcagcgtcaggccgttatcgccggtcagcacctgcggagataa

SEQ ID NO: 389831 - DNA, 213 bp, Salmonella enterica
atgaacaccagaaaaccggcgcagaccatccccatcaccgccagcacccgggcgacgatatccgccggcacccgccggctgaacaccgccaccgccagggtccagccgctcatcagcagcacccacagcagcagcgagccctcgtgcgccccccaggtggcggccacccggtaccacaccggcagctgcgtgttcgagttgccggcgacatag

SEQ ID NO: 389832 - DNA, 273 bp, Salmonella enterica
  misc_feature (258)..(267): n is a, c, g, or t
gtgctcaacaaactctctcgtctgctggctgatgccggtatttctcttaccgatcaccagaaaacgctgctggtcgcctacgttgatatgctgcacaaatggaacaaagcatacaacctgacgtcagtgcgggatcccaacgaaatgttggtacgccatattctcgacagcatagtcgttgcgccgtatcttcagggacagcgttttatcgatgtaggaacaggaccggggctgccgggcatcccgctggctattgtnnnnnnnnnnccctga

SEQ ID NO: 389833 - DNA, 336 bp, Salmonella enterica
gtgaaccccagcggatccaagctgtggtatctgaaatttcgctttggaaacaaaaagaaccgtatggcattaggcccttatccgctcatttctcttgtactggcaagggagaagcaagcggatttaagtctggaacgtgtcaacgctattcaggacgggtcaggcattaatccggcggaaaaacgcagagaggacaagcggggtggagagcccctttatacgttcgagtccgtggcgcgcgaatggggcgccagtaacataatctggtcggcggaacattcaacagcgttattttctgagcttacaggttccaatattgcactgaacgctatctag

SEQ ID NO: 389834 - DNA, 1218 bp, Salmonella enterica
atgacaactaccagcagcatattcagtaaatttaaagcaaaaaaaaataaaattaaaaatgttgatttgtattttacaccttcaaaacctattgaggcaccaacccatttgaaagggcgtgataacgaggtagaacatatccttgacaccttaacaactgatggcaagcattgcatgatctacggagagagggggattgggaaaagctcactcgccttatctactttagaaggagggaaaagggaaggtgtgttacctagtgatatttttgtagtacggtgcgataaaaaaacaaaattcaaagatataattgcaaggccagctatattcattgatagtgaatatgctgcaaataaaagagagacgactaaaaaagcaggtgtcggccttaatgttttgaaattatttagaacggacgtttctgccgaagaaaaaatcataatagaaaaggaagaccttactccaagtaaagcctgttttgcgcttgaagaattaaatgcaatacttctaatagatgaatttgatgttgtcagtgacgacgttaagcatgatgtcgctgagttcgtcaaacaacttagtgattccaatagtcctttaaagattttgttagttggaatttccagtgacggtgcttcgttgatagctgggcatccatctgtaaatagatgtcttcatgaaattcaattatccagaattgaagataaatatttgcatgaaataatagaagctggtgagaatggcttaggtataacatttagtaatgatgttaaaaattccatagttgaaatcagtaatggttttccatactttacgcatcttataggaaaagaatctgcagatataatcttatcatctggtaaaaatcaagttaattccgacattcttcctgaagctttgcagcgtgctgtagtaaatacagaggggcaacttaaaagagactatgagaacgcagttacttcatctaggactgatgtttatccatcaatactttatgcagcagctaaattcaaagataataaatttactattcaagaatggattacccaaattcgcgaggatacgggaatttcattgagtaactatcacatgagtaactatattgggcgttttactagggcggataaaggagcgatccttacaaaagcagctaggggggtatataaaatatcagatcctcgcatgccgagttatatcagaatgataaacagtaaagaataa

SEQ ID NO: 389835 - DNA, 219 bp, Salmonella enterica
atgtttcattgtccgaagtgccatcatgccgcacatgcgcgaacaagccgctatctaaccgaaaatacgaaagagcgctaccaccagtgccagaatatcaactgcagttgtacgtttatgacaatggaaacgatagaacgctttattgttactccgggatccatcgaccaggcaccgccgcacccgactgttggtggtcagcgaccattgtggctctga

SEQ ID NO: 389836 - DNA, 414 bp, Salmonella enterica
atggcagtttactttaacggctttgacattatcctggccccacatttgtgcgacgacgctatcaaactcagcgcggctaacggttttgccgtaattatccgccagaaactgccccagcgagctgtcttttatcgccttatccagccgtatcatggtgccgaaataggcattgggatcaaacccgaaacaggcgccatgtttggcatattcgtagcgctccagacaggaattcccccccgcgccgggcatcacttccttaagcgctgccgcgatgtcaggcgaaagtccgggggcgggggcggagcatttccggctggccttgacttcaggcagattcgggattggccgcgtcgcacaaccaaagcgctgccagcgtcgctggtcaacaccgcgtgcggcgatagatttgggtaa

SEQ ID NO: 389837 - DNA, 192 bp, Salmonella enterica
gtggacggtcagaaagtctgctttgttggctggctctttttgcagacggcactcatcgggctcccgatggcggcgttcatgctggctttgacaaaaaccggtttgccaggaaagcgccagcacatagtcagtgaaatcaccgtactgttgcgcctgaagttcgtcggcgttggcggcaaaaatcggggttaa

SEQ ID NO: 389838 - DNA, 345 bp, Salmonella enterica
ttgagcgaaaatgcgcgcaccgttgaagcggcaagcgcgctggagaaaggtgatttgcaacgtatgggccaactgatggcggagtcccatgcctcaatgcgcgatgatttcgaaattaccgtcccgcagatagacacgctggtagacattgtcaaagcgaccatcggcgatcgaggcggcgtgcgcatgaccggcggcggctttggcggctgtgttgtcgcgctgatcccggaagatctggttcccgctgtgcagcaggccgttgcgcaacagtacgaagcgaaaaccggaatcaaagaaaccttttatgtatgcaaaccgtcacaaggagcaggacagtgctaa

SEQ ID NO: 389839 - DNA, 357 bp, Salmonella enterica
atgccgcccgcccaggcgcaggcgttaagcgcctcgctggcggtgatccgtagcgatgaaggtggtgaacggcgcgaaaaactcgccgctctggttcagcgctttcgggccggcgttaacgcgtcccgatttacgctactgaatgcccatagcgccatccagccgttaatcgtgggcgataacagccgtgcattgcgcctggcggaggcgctgcgtcaacaaggatgctgggcgatggcgattcgtccgccgacggtgcctgtcggtacggcgcgcctgcgcttaacgttaacgcaggcgcatgaagcgtgcgatatagaccgtctgctggaggtgctgcatggcgcaggtgaataa

SEQ ID NO: 389840 - DNA, 141 bp, Salmonella enterica
atggtggcgctctccgtcgatgaactgatgccgctggcaaaagagatcgatcctaacaataaccccagctatggcgtgctttgcggtatgtccatcatggggctcagtctcgtcattttgcagacgataggtatcggttaa

SEQ ID NO: 389841 - DNA, 672 bp, Salmonella enterica
  misc_feature (656)..(665): n is a, c, g, or t
atgggttttctttccggtaagcgcattctggtcactggcgtggccagtaaactgtccatcgcctacggtatcgcacaggcgatgcaccgcgaaggagctgaactggcgttcacctaccagaacgacaaactgaaaggccgcgtagaagaatttgctgcccagctgggttccagcatcgttttaccgtgtgatgtcgctgaagatgccagtattgacgctatgtttgcagagctgggtaacgtttggccgaaatttgacggtttcgtacactcaattggtttcgcgcctggcgatcagctggacggcgattatgttaatgcggttacccgcgaaggctttaaaatcgctcacgatattagctcttacagctttgttgccatggcgaaagcctgccgcaccatgctgaatccgggttctgcgctgttgaccttgtcttatctgggagcggagcgcgccatcccgaactacaatgtcatgggtctggcgaaagcctctctggaagctaacgtgcgttatatggcaaatgctatgggaccggaaggggttcgcgtcaacgccatctctgcgggtccaatccgcacgctggcggcgtccggtattaaagacttccgtaaaatgctggcgcattgtgaagccgttacgccaattcgtcgcannnnnnnnnnccattga

SEQ ID NO: 389842 - DNA, 390 bp, Salmonella enterica
atgacgcaacgtatcgcggtttttcctgctgaccgccattctctgtatgaagaacatgggtattccgccgccatccgttctggtgatttactgtttgtttcaggccaggtaggcagtcacacagacggcacgccggagcctgattttcaaaaacaagtgaggcttgcttttgaaaacctgaaagcaacactgactgcagcaggatgcacattcgatgacatagtggatgtcaccacattccataccgatccagagcaacaacttaacgacgtgatggcggtgaaacaggagatatttgcccatcccccttatcctaactggaccgctgttggcgttacctggctggccggctttgatttcgaaataaaggttattgcccgaatcccctga

SEQ ID NO: 389843 - DNA, 660 bp, Salmonella enterica
gtggaaaatcatgaggccttaatttgctatttagccagtcatggtgagcgtcttgatgagtatgtggattccagcttgttttataaatatccagatgcttaccgttccgttttttctaaaaagtatggttctttggaaataccttctgccggcattcattttacctgggatcttatccaaaaaataaaagataaaggtgggttaatatccttcatcactttacatgtggcatcaacagaaatgttgtccaacagaaaaatacaaacaaaatgtgtagaggaagtgactatcaacgaagaatactacgaggttccgcaagcaacagcggatatcattaatactgcgaagcaaaatggcggacgtatttttgccgtaggaactaccgttacacgatgcctggaatctgcgtattcaagggagcacaattgcctcaaagcaagttctggctggactgcgctttatatacatccaggctatcaactgaaagtggttgactgcctgctaacgaacttacatcagccaaaaacgacgcatatggtgttaaccggtcaatttgctggggttgatctactcatgaaggcctatgcctcagaacatatccagtcatgtaagttcgatatgtttggtgattgcatgttaatcatacaggatgaagggtag

SEQ ID NO: 389844 - DNA, 393 bp, Salmonella enterica
atggcccgcgaacgcggcctgccaaatattaaattcctcccgctgcagccttacgacgccttacccgcgctgctgaaaatgggcgactgccatctggtggtgcaaaagcgcggcgcggcggatgcggtactgccctccaagctgactaacattctggcggttggcggtaatgcggtgattaccgctgagccgcacaccgaattaggacaactttgcgcgcgctatccgggcatcgccgtttgtgtggagccggagtcgaccgacgcgctggtcaacgggattagccaggcgctcgccatgccgaaaaacaacacgacggcacgtgaatacgccgaacgcacgctcaataaagagaacgtgctacgccaatttattgcagatattcggggatga

SEQ ID NO: 389845 - DNA, 402 bp, Salmonella enterica
atgctgcttctcgctgcctttggcgtcaagcgtcaccagattgatgttaacgtcgggctgcgaaatccgctctacgcgaacgttgagatggcccgctatctgatcggtggatttaatatcgccttcaatgcgcgcctgggcgacagacagctcctgccagcgcagaccgcgggcggtgatatccgccaacagctgcggcgcttctaccgtaccgcggactttaacgattccttttgccatgccgcccagtcctggcagcgcattatccagccccggcgcatcgatggcggcgtcaagattcagctccttaacgccaagctcgccttttatatcggcgctgtttgggcccagcgcaaggtgcagccccgggatcgtccactgcatgtagctgttgccctttag

SEQ ID NO: 389846 - DNA, 1161 bp, Salmonella enterica
atgaaaaatgatatattaattaccggtggacatatcatcgatcccgctcgtaatattaatgagattaacaagttacgcatcatcaacgatattatcgttgatgccgataaatatcctgtaacttcggagacccggattatccatgccgacggcatgatcgtcactcccggtcttatcgattatcacgcgcatgttttttatgacgcgacggaaggcggcgtcaggcctgatatgtacatgccgccgaatggtgtcaccaccgtcgtggatgcaggttctgccggtacggcaaactttgatgccttctaccgaacggtgatttgcgccagcaaagttcgaatcaaagcgtttctgaccgtgtcgccgccgggccaaacctggtcacaagaaaattatgatcctgacaatattgatgaaaataagatccacgcgctgtttcgccagtatcgcaacgttcttcagggattaaaactcaaggttcagactgaggacattgctgaatatggcttaaaaccgctgactgaatcccttcgtattgccaacgatttaaggtgccccgtggcaatacactcgactcatcccgtcgttcccatgaaagaacttgtctccttgctacgccacggcgatattatcgctcatgcgtttcacggcaaaggtagcaccattcttactgatgaaggcgctgtcttagccgaagtccgtcaggcaagggaaagaggcgttatatttgatgccgccaatggtcgcagccatttttcaatgaacacggcacgccgggccatcgccaatggctttcttccggatatcatcagtagcgatctctcaaccatcactaaactcgcctggcctgtttacgccttaccatggattttatcgaaatatttagcactcggcgtcgcgcttaccgatgtcattaacgcctgtacccataccccagcagttttattgggcatggcagcagaaattggtacgctggcccctggggcatttgccgatatcgccatctttaaattaaaaaacaggcatgttgaatttgccgatattcatggtgaaacgctcacggggacgcatgtgctggtaccacaaatgaccataaaatccggtgagatattatttcgtcaaattgattttggcgcgcggccaaacggagttgaaaaatga

SEQ ID NO: 389847 - DNA, 297 bp, Salmonella enterica
atgcccagcgctttgccgcgaatttcagcaggcgccagttcagacatatacatggtggatgccgttccggccatcccaaccgcaaaaccacacacaatgcgggaaagggagaagatcatgaacgattcactcatcgccgcccctaaggaagaagcgataaaaatgatcgcaatgatcagaagcgcaggtttacgccccagtctatcggcaatttttccaccgaccagcgcgccgatgatacaaccaatcacgatactggaaacggcccatccggtctcggttggcgtcagttggtaa

SEQ ID NO: 389848 - DNA, 210 bp, Salmonella enterica
atgcaccacctggctgttataaatgaccaagtcgcctttacgaaccgggtagatgcgatcgccaatgaaatactccccgtctccttcggtgataagaatcagttcaacggtctgtgggtgcatatgcatgaaccggacaaacggaccattgctctcactgacctgactcacatacgccaactggggctgagccttattctctcgttctga

SEQ ID NO: 389849 - DNA, 618 bp, Salmonella enterica
atggcgaataaagcgctcagactggcaagatcctcatcgctcagcgcgggcgttttctcatcatgctgcgccgttttactcaatgcggccagagcgctggttttcaacgatggcgttagcgtagacagtagatgctgcgcttgtgttagatcggtaagcgtttcatccgtcgcattcgctttttgcgccagcaggtcggcaagcttcaccgcctggcccggctcgccatgttgggtcagtagctctttcgataacttgccgcctgccgcctgtaaatcggccagcgtgatgcgggcgtctttgccctgtgcgccgtctgcgcctaacgcgcccgccaggagcgccagaaagtcctcggctgaaccggtggtttttcctgacgtcagacccgcggtcatgtcggtatcggtggtgatcagttggggcagggtgatcattcgggtttcctcattgctgcacgctgagcaaattcatccatctttttctgatccatgcggttttcagctaacagcgctgccgcggtttgtcggtcctgtaaggtttgccaggcctgaagtcgctgctttttctcacgccagctcttcagcgccaggtcgactttttgcgtccactgcgtaa

SEQ ID NO: 389850 - DNA, 351 bp, Salmonella enterica
ttgactaccacacaaccgttgccccacatcctgctgctgacgcatggcggctgggtcgatacgctgggcgagttttatcaacgcgtcgaggccgtggtgaaaacgctgccggaaggctcgctgatcctgacggattttgtcggcggcacgacgtccaacgtcgcggcgcggctaagcgccgattatccggtggcggtgattgccggactgaatgcgtcgctactgctggaggcgctggacaggcgcgaacaagggatgctaaccgcctgcgtggatgagttagttgaggccgggcgcagtagctgcctggatgtggtcgcccatgtacgtcagctacaacaatcactctaa

SEQ ID NO: 389851 - DNA, 585 bp, Salmonella enterica
gtgtcgttagtcggcgcgcgcgctcatgacggcagtaccgtgttttacccgctgacgcacaatttgcatcaggacggcatcttgcggaccagcgtcgcgttcccacaggcgaacgccgaacagcaggagcaggcggaatcgatgctgtcagcaattatgcaggcgctgaactacgtcggcgtaatggcgatggaatgttttatcacgccggaaggcctgttaatcaatgaactggcgccgcgcgtgcataacagcggacactggacgcaaaatggcgccagcatcagtcagtttgaattgcatttgcgcgcgattaccggcctgccgttgcccgcgccagtgattaacgccccgtcggtgatgatcaacctgatcggcagcgagctgaattacgactggctgaagctgccgctggtacatctgcactggtatgataaagcggtacgtccagggcgaaaagtcggccatctgaatctgaccgacagcgatacgtcacgtcttagcgccaccctggaagcgctctctccgctcctgccgggcgaatacgccagcgacattatctgggcgcaaagtaagcttaaataa

SEQ ID NO: 389852 - DNA, 855 bp, Salmonella enterica
atgtccgtacagaacattgtcaatattaatgaatccaacctgcagcagaccttagagcagtccatgaccacgccggtactgttctatttctggtctgaacgcagccaacactgtctgcaattaacgccagtgctggaaagtctggctgcccagtaccacggtcagtttattctggcaaagctggactgcgacgccgaacagatgatcgccgctcagtttggtctgcgcgccatcccgacagtctatctgttccagaatggccaaccggtcgatggtttccagggaccgcagccggaagaggcgatccgcgctctgctggataaagtactgccgcgtgaagaagagctaaaagcgcaacaagcgatgcagttaatgcaggagggcaactatgttgacgcgctgccgttgctcaaagacgcctggcagctctcttcgcagaacagtgagattggcctgttactggcggaagcgcaaattgcgctgaaccgctctgaagaggccggagcggtgttaaaaactatcccgctacaggatcaggatacccgttatcaggggctggtcgcgcagatcgaactgcttaaacaggcggcggatacgccggaaattcagcaacttcagcagcaagtcgcggagaatccgcaggatgcggctttggcaacgcaactggcgttgcagttgcaccaggtcggacgtaatgaagaagcgctggaattgctgttcagccatctgagaaaagatcttgccgccgccgagggacagacgcgcaaaaccttccaggagatccttgccgcgctcggcaccggcgacgcgctggcgtcgaaataccgccgccagttgtacgcgctactgtattaa

SEQ ID NO: 389853 - DNA, 771 bp, Salmonella enterica
atgcaaaaatcggtcttaataacaggatgttccagcggaatcggtctggacagcgcgcttgaacttaaacgccagggctttcaaatcctggcgggctgccgcaaacctgatgatgtcgcccggatgaacagtatgggatttaccggcgtgttgatcgatctcgactcccctgaaagcgtggatcgtgccgccgatgaagtgatcgccctgaccgataatcgtctgtatgggatctttaacaatgccggctacggcgtgtatggccccctttccaccatcagccgtgagcagatggagcaacagttttccagtaatttcttcggcgcgcatcagcttaccatgcgcttacttcccgccatgttgccgcatggcgaaggacgcattgtgatgacctcatcggtgatggggctgatttccaccccagggcgcggcgcttacgccgccagcaaatatgcgctcgaagcctggtctgacgcgctacgtatggagctacggcacacaggcattaaagtgagtctgatagaaccgggaccaattcgtacccgttttacggataacgttaaccagacgcagcgtgataaaccggtagaaaatcccggcatcgccgcacgtttcacccgcgatcctgacgcggtagtagcgaaagtgcgtcatgcttttgcaagcgataaacccaggctgcgctatcccgttacgctggtcacctgggcagtgatggcgctgaaacgcctattgccgggccggatgctggataaaattttacaaagctga

SEQ ID NO: 389854 - DNA, 585 bp, Salmonella enterica
ttgcccttcctgtttttgatcctgttaactttccgtgccgccgccgcagacaccttattaattctgggcgatagcctcagcgccggttaccgtatggccgccagcgcggcatggccgtcgctccttaatgataaatggcaaaacaaaacgtcggtcgttaatgccagtataagcggagatacctcgcagcagggactggcgcgtttgccggcactgttgcaacagcatcacccgcgctgggtagtggtggagcttggcggcaacgatggcctacgcggttttgcgcctgcgcaaaccgaacagacgctacgtaaaatcattcagacggtgaaagccgccgatgcccaaccgttactgatgcaaattcatctgcccgctaactacggtcgccgttataatgaatcctttagcgccatttatcctaagctcgccaaagagttcgatattcctctgttaccgttttttatggaagaggtatatctgaaaccgcagtggatgcaggatgacggcattcatcccaaccgcgacgcccagccgtttattgccgactggatggcgaagcagttgaccccttttctctcctga

SEQ ID NO: 389855 - DNA, 687 bp, Salmonella enterica
atgccagcggaaaacagtgttgaagttcatcgtctcaggaagtccgtcggtcagggtgagcatgagctttccatccttaccggagttgaactggttgtcaaacgcggcgaaaccattgcgctgattggcgaatcaggatcgggaaaatctacgctgctggcgattctcgccggactggatgacggcagtagcggagaggtcagtctggtggggaaaccgcttcaccagatggacgaagaggcgcgggcgcagcttcgcgctcagcatgtcggttttgtttttcaatccttcatgcttattcctacgcttaacgcgctggaaaacgttgagctaccggccctgctacgcggtgaaaacagcggtcagagtaaggcgggggcgaaagagctgctcgaacaactgggactgggaaaacggcttgaccaccttccggcacagctttccggcggcgaacagcagcgcgtagcgctggcgcgcgcgtttaacgggcgtcctgatgtgctgtttgccgatgagccgacgggcaacctcgaccgccagaccggagataaaatcgccgacctgctattttcgcttaaccgcgaacacggcaccacgctgattctggtgacgcacgacccggcgctggcggcgcgctgcgaccgacggctgcggttggtcaacggtcagttacaggaggaggcatga

SEQ ID NO: 389856 - DNA, 2415 bp, Salmonella enterica
atgatagctcgctggttctggcgcgaatggcgttcgccgtcgctgattattgtctggctggcgttgagcctggcggtggcctgcgtactggcgctcggcagtatcagcgaccggatggaaaaagggttaagtcagcaaagccgtgagtttatggcaggcgatcggacgctgcaaagttcgcgagaggtaccgaaagcctggcttgaagaggcgcgtaaacgcggtcttaacgtgggcgagcagttaacctttgcgaccatgacgtttgccggcgatacgccgcaactggccagcgtgaaggcggtagatagcgtttatccgatgtacggcgaattgcaaacccgtcctgacggagtgaaaccgcagccgggtagcgtactgctggcgccgcgtctgatggcgctgcttaatttgaaaacgggcgataccattgatgtcggcgacgtgaccttgcgtattgccggtgaagtggtgcaggagccggattccgggtttaacccttttcagatggcgccgcgtctgatgatgaatatggccgatgtggcaaaaaccggtgcgatacagccggggagtcgcgtgatgtggaggtataaattcggcggaacgccgcaacagcttgctggctatgaaagctggctgttaccgcagcttaaaccggaacatcgctggtacggactggagcaggatgacggggcattggggaaatcgctcgaacgttcgcagcagtttttgctgctttcggcgttattaacgctactgctggcggtagctgccgtcgcggtggcgatgagccattactgccgtagccgctacgatctggtggcgattttaaaaacgttgggcgcgggccgggcccagttgcgtaaacttatcatcggacagtggttgatggtgctggggctttccgccgtcacgggaggcgcgattgggttactgtttgaaaacatattgctggtgctgctaaaaccggtattgcccgccgatttgccgcccgccagcctgtggccctggctgtgggcgctgggtgcgatgacggtcatctctctgctggtcggtttacggccttatcgattgttgctggcgacccagccgctacgggtgctgcgccgcgatgttgtcgctcgcgtctggccgttaaaaatttatttgcctgtcgcctgcgccgtcgtggtggcgctgctcgccggattgatgggcggaagtatgctgttgtgggcggttctggcgggtgcagtgatactggcgctgctgtgcggtctggtgggctggatgctgcttaacgtgctgcgcggcatgacgttgacgtcgctaccgctgcgtctggccgtcagccgacttctgcgtcagccgtggtcaacgttgagccagctttcggcgttttcgctttcgtttatgctgctggcgctcttgctggtgctgcgcggcgacctccttgatcgctggcaacagcagctcccgccggaaagcccgaactatttccttatcaatattgcttcagagcaggtcgcgccgctgaaagcctttttggcggaacatcaggtgattccgcagacgttttatccgattgtgcgggcgcggttaaccaggataaatggtaatccgacggaaggtcagcaggatgagtcgctcaaccgtgaactgaatttgacctggcaggatacgcgcccggcgcataatccgctggtcgccggtcactggccgccaaaaccgggcgaagtctctatggaagaggggctggcgaagcggttgaacgtcaaactcggcgatagcgtaacctttatgggcgatacccaggcatttagcgctaaagtcaccagcctgcgtcaagtggactgggaaagcctgcgtcccaactttttcttcatttttccttccggggcgctggacgggcaaccacaaagctggttgaccagttttcgctgggagaatggcaacggcatgttaacgcagcttaaccgcgagtttcctaccgtcagcctgttagatatcggggcgatcctgaaacaggtgggacaggtgctggagcaggtcagccgggcgctggaggtgatggttgtgctagtcaccctctgcggcatgttgctattactggcccaggtacaggtcgggatgcgtcagcgccatcaggagctggtggtgtggcgcacgttaggagccggaaagaaactgttgcgtaccacactctggtgcgaattcgccatgctgggattagttgccgggctggtcgccgcgattggcgcggaaacggcgctggcgatcttacaaatcaacgtttttgatttcccctgggagccggactggcgtttatggggcgtactgccgttttgcggcgcgctgctgctttccgtatgcggcggctggcttggcgttcgtttgctgaaaggcaaagcgctattccgccagtttagcggatga

SEQ ID NO: 389857 - DNA, 1134 bp, Salmonella enterica; identical to SEQ ID NO: 374288

SEQ ID NO: 389858 - DNA, 831 bp, Salmonella enterica
atgggattgcgtcagagtttacgcattgcggccagcacgctattactggcctgcggattacagtttgcccatgccgatagttccccgcaaacgatcgtatttggcgtcgcgccagggccgtatggcgacatggtgaagcaggcgattgcgccgacattaaaagaaaaagggtataaggtcgtggtgcgcgagtttagcgactatgtccagcccaatatggcgttagctaacggcagcattgacgccaacctctttcaacataccctctattttgacaaattcaccgctgacaaagggttgaagctcagcaaacttattgtggtaccgaccgccgggatgggcttctattcacgtaaaatcaacagtctggatgcgcttaaaaaaggggacattattaccctctccaacgatccgaccaacctggcgcgcggccttcgcttcctgcaatcgttggggcttatcacgattaaggacaatatcgatccgaccaaagcctctgaacgagatatcgccagcaatccaaaaggactggttttcaaaccgctggaagccgcacagctaccgcgcacgctggatggcgtgaccggcgcgctggttaacgggaactttgcggtggcggcaggactggatctttccagcgcgattaagcaggaacacctggatgagaatctgaaaaatatcattgcggtacgcagtgaagatgccgataagccgtttgccaaagatattgtcgaggcggtgaaatcgccggcttatcgcgcggtcatcgacgatccaaagaatatttatagcgccttccagaaaccggaatggatgaccgcgacaccctga

SEQ ID NO: 389859 - DNA, 174 bp, Salmonella enterica
atgggcttttttaacattctcgaccaggttatcgacgcccagattattaaagcccatccgattgatcagaccttcagcatccaccagacgaaaaagacgcggcttatcgttacccggctgtgggcgcggcgtcacggtgccgatttccagggagccaaaccccatcgcgcctaa

SEQ ID NO: 389860 - DNA, 249 bp, Salmonella enterica
ttggggacgatgcccgtcaccggagccgtattgtctgccacgctggcgataaccggcgcggcgggcggtgtggcgtcaatcgtcagcacaaatccgctggacaccgcgctgctattacccgccggatcggtggcgctaagggtgaacgtgtggctaccgtttgcaagcggcgtctgcggcgtgaaactccatgtgccgtcgctattcaccgtcgtggtaccgatggacgctggattgccgtcaagatag

SEQ ID NO: 389861 - DNA, 246 bp, Salmonella enterica
gtgctgccgatctctcccgtgccgctgaaggtcggcgtggtatcgttcgttgcgccattattgccgatgttgccgataatcggcgcgacgttatcgctgattagcggcgcgtcaggctgcgctggaggctgggtatcaagggtaacggagaaaacgctggaggtggggctactattgcctgcggcatccgtggcggtggccgtcaggatgtttaacccttcgctcagattacgggttagcggatag

SEQ ID NO: 389862 - DNA, 567 bp, Salmonella enterica
gtggtcgccgtcgcccagcgcggcaggcggcgtaaactgccagcgcccgtccgtgccgaccagcgcctgacctatggcattgccgttatcgtaaaggatgattgtgtcgcctgcggtgccgctaccgctcaaccggggctgggattcctgggtaatctgattggtatcaatcgtatttccgtcgccgtcagttacgccgataacgccgggggcggcaggggcctgggtatcaatggtaatcgtaaaatcggtcgaaaaaggcgtggtgttgccgttactgtcgctggccgtcacggtaaaggtgtaggtgtcgtccgccagtggcgaggccgtggtgtaggcgtagctccagacgccggaattaccgacgataatatccgctatccgtgcgccattctgatacaggtgtactgtggaacccggttcacctgtaccgttaatcgttggcgtgctgtcgttagtgagccccagatgcgcgacgctaccgagaatacccggcgcatcatctgtaatgaaggtgattaccggttgctgcggcgattgcgtatcgaccaccaggtcgaatga

SEQ ID NO: 389863 - DNA, 564 bp, Salmonella enterica
atgcttaatgtttcgccgttaattttcgccgggctaatacctattgagaaggtgccgtcgtcgcctgccgttccactaccgagcgtatttcccaggctgtctttgataaccacagtactgccagcttccgtagtgccggtaagtctgtcgccgacgtcgctaaccgccaggccttccagcaccggcggctgcgtgtcgatatcaatggtaaaggagacggactgcccgctggtgccgcgattgttggtcgcggtagcggtaaagacatggttgccatcggcaagtgccagcgagggggtaaagctccatttgccgtcagcgtcagcgacaatgggcggaaaggtcggtacaggaaagccattatcgttaatcgatatcgtactgcctggttcagcagtaccgctgagggttgggcggttatcatctgtggcatcgccatttttcagcagcccggtaacggtgccagcgtcatccgtcacggtaaggatagtcggctgggcaggatactgtgagtcagaagcggtaaactccgtggcggggccgatgttaccaacggcgtcctga

SEQ ID NO: 389864 - DNA, 297 bp, Salmonella enterica
atgccagcttccgctgctatcaaccgttgtggagcctatttcctgaccattggcgtaaatatggatgactgtgcctgcgctgccggttccctccagagtgggggtattgtcgttcgtaaactggttattgctcagcgtgccggtgaggggagcggcatcatcgatagcggcggtgatagctggtgtatcggggagaggaatgttgggcgcatcaatggttgcggatgggccggtattgccggcatcgtcagtcgcggtcacggtaagttgttcgccgctaatctgtggcgctgttag

SEQ ID NO: 389865 - DNA, 621 bp, Salmonella enterica
atgtcatctcgtattgcatcaatttgcgcagtcataggcctgttgatagctgcagcaaccttctattttcagtttcgaaacgatatatatgagaacctttatcagaaaaattttctcactggcaaatggtccaatgatgctgacctaattattaacagtaaggatctcggacttaacaacaacgaaccattagtaactatacagatgaatgtcgatgatgatggttctattgatggtgaaattatttccgaagggttatgtgatggaatgccattaacatggaatataacattcaatagtgagagtcctacactcaagaactttgttcttgctaggaaatttcaagttcgccaactcgttgatggcgcaatggataaaagcccagtagtcgcaacattgaagctaattgaggaagatcagaaacataagtcaatcacctttgaggttgttgatgaccctgcgcgtatgcttcctaaaaaactcactgtggctaaagatctaccaaagtttgaagagaattataattacttgcaagaatattgcgctaattcaacgctggagtttttcaaaaaaagagctattgagagaaagaacacaatgaataatccaaacccatcctaa

SEQ ID NO: 389866 - DNA, 426 bp, Salmonella enterica
atggaaaaatcgaaccaacaatcaagatccgggtggggtggaaagcgtgccggagccggggcaccttacggtaataccaatgccgtaaaacatggggaacggagtagacgggcatttttcccgatagagggggaagaacgtcgcccgccactggttaacctcagaatacgtaaccttatgctggctgaacgtccggggaaaataagccgtgaaggtctatggcataacggtaaccagcgtgactggcgcgaaagtatgctcattgagggcatgatgtggcaacacaccaggaaaatgatacgccttgagatggcgacggcgcggtcggcgcttgcaggtgcgaaatcaaggctggccgtggagcgttcggcgctggcaacagtggcggcggagcgtgatgcaatgctggctggcagaactaaataa

SEQ ID NO: 389867 - DNA, 258 bp, Salmonella enterica
gtgaccggggctgatttactgaatgtactgtctgatatcgcaggaaccgcaggacaaccggagcggaagctttataccgactggtcaggcgtggtggctgatgtgctgcaacgcgaaaaccacgaccttaacggacaggatttacttcacctccgcacgcgggcggcggcgatactggccccccgtcgacgccagcaacaaagagaaaacgccgccccttaccagtggaagaagccattgccgcggcgcggaaggtaa

SEQ ID NO: 389868 - DNA, 279 bp, Salmonella enterica
atggtgagtgaccagaaggccgaagcgctggaagcgcgggggctgtaccgcagggcggcggcacggtgggcggatgtaatggtgatggtgaaggatgacagggaacgtgatcaggcggctgcacgtcgttcggcgtgtatccgcaggagtgcccgcagtccggtacgggcggaaaacatgggtgaaatacgggaggctatacgccggacccaccggaagatggggatggacaggccggaaggcagcaatttcaggtattacccggaaaagaagatatga

SEQ ID NO: 389869 - DNA, 561 bp, Salmonella enterica
atggtagcagcgaacattaaccgcaaatcagcacatcagcagggaggcgtatggcagcatacgcagcaggccgcgccggaagccgctaaaaccacgtcggcacacaaggtgaagccctgtaacggtaaagcgccgcagaactccaccggcgggacacagcaggagaaacagacagcatcattaccgcatgagcgcgtcaggtcggaaacaatgacccgcagccagtggaagcggcttaagcgcatgagaacgctaacggatctgtggccgctactgtttgacatggataatccgaagccgctgaaacagggaatactggatgatattcttcgtgatattgccggacgcgggttaagtcttggaaagggggccgcgcgtgctgcggtggcgggttatgtacgacgtatcaggtataaaaaagcccttgcctctggtggagcgcgttatgacctgaacgggcagccatgcggagaggtgacgccggagcagcagaccgcagccggtgaactgaaaaaaacaaagcggacagtcaggaaagaggaaaacgggcatggtgagtga

SEQ ID NO: 389870 - DNA, 315 bp, Salmonella enterica
atgaaaaagaaaaattctggcttaactgccagtggcctttctcggcctgaaatccgccccggcgatattttccgggataaccacggctcagtgattaccgtgacggagagcgcccataacagggtgatttatttccgtgaggggtacgcctcgccttgtgtgtgctcacctgatcgcctgatgcgtgaattcagtctggtaagcaaagcgccaccagcgaagaacggggatttagagaggctcatgtgcgtgacaggcgcggaacgaataagggtgatgcgtgaaattattcgggagcgggggaaatcgaagtga

SEQ ID NO: 389871 - DNA, 231 bp, Salmonella enterica
atgtatgacgatcgcttcactatgctgaaatctgaacttaatggtctgcctgtggacgccatcgatgcgatgctgtgtatcgctgaactgataaaaacggcttctttgctgattggtacagatgggcatttcgaaacgggttataacctattaaccatcgctgttgattacgcagagctggtgactgaaatcagagacagaacgaccggacaaggcacggctcaggagtaa

SEQ ID NO: 389872 - DNA, 210 bp, Salmonella enterica
atgagcgcggtttacaatctggtgcgctgtagcgacggcaaaaccgtattccgttttccggctggcggccgctatctggtggatacgtcgaacggactgcaatcaatgcgccccctgctggacgacgagatcatttttacggtggagcgcgcagcgcgctttctggagaaaactggttatcgggtaattcggagggctggtcatgtatga

SEQ ID NO: 389873 - DNA, 216 bp, Salmonella enterica
atgaacaagccaactcaaaacgaatccattgccatgctgacgaccagcgcaggccaggcgctggaatacagccgtcaggcgcttgccgttctcgatatgtggatagatacgctggcgccggatgatgaaatggagagctgccgcgtcgcggccgttcacagcctggtcagtcaggcgtcagaatatctggtgaaagtcagggaggtcaggccatga

SEQ ID NO: 389874 - DNA, 876 bp, Salmonella enterica
atgcttaacctccagaccctgacagcaaaagcccgcgagctgcgcggcaacgtggtaaaagccactaccacgaagggcacccgcaccatgacccccgtctacgaacgggaagaacagcgcaagctgcgcgaacgtatccagcagacccagccggactgggttttactctggtgggatattgcgaccgttaccggctggcgtaccagcgacgtgtgcaacttccgttactcctgcatcaactgggaaaccggcattacaacaattatcgtagcgaagcagaccaaagcagcagaagccagggcgacccggaaggggatcgagattgttcgccagcagcgcaaggacgccgcccggttggctggtgatcacattgcgtacatgcactgggatagcgtgagctgcgacgaactggttgccggcatgacggaagccgaacaggcgatcgtgtttgagctggtggcaaaggctgacgttaagcacgacaccaaacagctgccgccgggcattatcaagcggctgcgcgaacgcatggagcgcaatcttatcggtgacgacctggtattttcccgcagccagatcgaaagtaaccgttgccagtctctggaaggtagcgtgacccgccagaccatctggcgcaaactccacaacgtgatggtgtggtttacccgcgtagtaaacacgcgtctgcgcctgagcgcctactccagccgcaaaattgccgcctttaatctcatgtccgccggcggcgaacagggcttgctggtcgcctctgaaatgctcgggcacagtaacccggcgatcacccggacttatctccagctggggagcaaggccgcggctattcagacgcgcctcgcgatggagataaacgcatga

SEQ ID NO: 389875 - DNA, 189 bp, Salmonella enterica
atggcttctgcgcatgatacccaaactcaccctgaatttacatggcgttttctcaccttgggtgcattctctaatcagatcgtcagtgttacagcttccactgagcgcgaggcgcgttcaaaagtgcccgaaggatgtgtctgcattctggcgtgccggttccgtattgaggaggtacgccatgcttaa

SEQ ID NO: 389876 - DNA, 174 bp, Salmonella enterica
atgtcaacaccattagaaaaacgttctcctccataccagatgcgtctgcctgaggagttcagagcccagctggaagaagcagccaaagcggatggagatacttctctggcaacctggattaaacgagtgcttcgaaaggaattacagcagcgtggcatcgagccaaaaggctga

SEQ ID NO: 389877 - DNA, 570 bp, Salmonella enterica
atgaacatgaaaaagcgccctcacgggcggggcttcgctcaccctgaaaactgtagcgatgatatttccgttatcaattttgagggcgcaaaagtccgcattgttaagatcaacggcgaaccgtggtttgttgcaaaggatgtctgcgccgcgctggaactgaccaattcgcgtatggcgttgcagatgcttgatgatgatgaaaagggagtaaatttaacttacacccccggcggcaatcagaatatgagcattatctctgagtcaggcttctataagctgattgcccgtagccgcaaggccagtacacccgacacattcgcctaccgtttcagcaactgggtgttccgtgaagttatcccgtcgattcgtaaaaccggctcttatggcgtgccgttcgcattcctgaacgatttcagtaagcggatggcagcataccagaaggaggccagcaaacgcggctacaaattgcagcgttgcaagaaggaaaaacgggcgctgaaaagcgaagaagcggagctatggcgtaagtttcagccagagctgctgaaggataatggcgatgaataa

SEQ ID NO: 389878 - DNA, 201 bp, Salmonella enterica
atgattacagactctatccccaccaaaggttatattcgtcgcttccgtctggctgaattgctgggcgttagcgtatccactatagaccgaaaggttcgcaatggttccttaccgcgcccggtaaagttaggtgaaaagatcactgcattcgacgcggtggagattcaccagtggttggaagaacgccgtcattctgcgtga

SEQ ID NO: 389879 - DNA, 942 bp, Salmonella enterica
atgaataagaaatatatccacccaaacaaaagtaccagtcagtccatatggcagaagaatggcatcccagcacttgaatattgttctctacccagagcggctgaattaatgggctgtaaagtgtctgatatactccacctcagtacaataggggcggttcagttgggagttttacttaatgaatttgaagctgccgtatggatgaaagactcaatagacataaccaaaagtgctacaggttggtatgaggatttgatatctgcaggtagaattgatcccatagggtggctagcctctccagatagcccgttaagtcaattgcgttttgaaatcgattacgatgataaaaagtctgcgcatcgcttgtttcgagatgaagaagccgaattcagggataacctattgttagcgagactgagcggactatggagttttcaatcccatttcgaatgggagagcgccatgaataactttggagtttcaagcatcgcaaaattgggattggttttttatcccgctgacacaccattttcacaggcctcaataaaagcacgtctgcgcggtgagaaaataccctacgaaattagttacggtgctctagtagatataacccctagcgatatttatttatcaagaacacagattgaaaagatctacaacaacataggtaaagaactaccaaactatatcaatcacggcgtggagcgccctgctgatgacgagatggaaaagatcggtgaggtaaataacaacaaggttggtgaattcatggaaatgctaatcagaagtgtccctgagttgggtgatgaggttatggaagcatctgccaataagcgtcatagtatattaagcgcatttcttgaaaagaagcagaacgaaggaaagttcacaaacatgaaaatgcccgcatctgccaccatagaaaaatacttcaaaatttga

SEQ ID NO: 389880 - DNA, 324 bp, Salmonella enterica
atgcaaaacaggatgatcccacatatccaagaaagcaccctgcccgtggcgctggcaaaagttcgttcagagatgacggacgttccgaacttcactattcacgacttccgccgcactgcccgtactcatttagcagcgttgggtattgatccaatagttgctgaaagatgcctgaatcaccgaatcaggggcgtagagggtatctataaccggcaccagtattttgatgagcgtaaggctgcgctgtcacaatgggcggatttgctggtggccttagaaagaggtgaagattacaacgtgacgccaataaaaaagacgaagtaa

SEQ ID NO: 389881 - DNA, 807 bp, Salmonella enterica
atgccaaaactaactgatatgcagatccgcgcgtggataaaagccggtgaacgttttgaaggccgggcagatggcggcgggctttacctcaggttcagagaagctgaccgattaccaagctggcgctttcgctataaactggctggtaagtctcgcgctatgcttatgggctcttatgctgagctatcgttatccaaggccagagagacagcgaaagaattggcggcacgcgttgcgctcgggtatgacgtagcagcagaaaaacaggagcgtaaagccgaagcgctgtcaaaaattgaggcagagaaaaatgccatgcgtgtttcagaccttgccgcaaaatactttgagcgtcagatcctgccacgctggaagcatccagatatactgcgccgccgtatcgacaaagatataaacccaagcattggtagcatgaaggtagaggatgttaagccacgtcacattgacgacatgttgaagggcattgttgaccgtggagcaccaaccatagcgactgacgttttacgctggacgcgtcgtatatttgactatggcattaagcgacacgcactagagattaatccctgttctgcttttgaggtttccgacgctggcgggaaagaagttagccgcgaccgctggttaacccgcgatgagctaatacagctatttcaagccatgcgtaccgcgaagggtttcagccgacagaatgaaatcacgttcaaattattgttagcactatgcgtccgaaaaatggagttatgcgctgctcgatgggaagaattcgacttagacggagcaatctga

SEQ ID NO: 389882 - DNA, 1485 bp, Salmonella enterica
atggcggcagccgtctgcgccgtggtcgccagtaatctggggacgatggtggtgatggcggaaatcatggcgctctgcgccgtgttcctcaccggcggtagcaaagagggcaaactgtggtttgcgctgggccgtctcggtacgctgctgctggcaatcgcctgttggctggtgtggcagcgctacggcacgctggatctggggctgctggatcaacgcgctcagcaactgccgctgggctccgatatctggctgctcggcgttatcggttttggtctgctggccgggattatcccgctacacggttgggtgccgcaggcgcacgccaacgccagcgctcccgccgccgcgctgttctcgaccgtggtgatgaaaatcgggctgctgggcattctcacgctatctctgcttggcggcaatgcgccgctgtggtggggcgtggcgctgttggtacttgggatgatcaccgcctttgtcggtggtttgtacgcgctgatggagcataacattcagcgtctgctggcctatcacacgctggagaatatcggcatcattctgctcggtctgggcgcaggcgttaccgggattgctctcaatcagccggtactgatcgcgctgggtctgaccggcgggctctatcacctgctgaaccatagcctgtttaaaagcgtgctgtttctgggcgcgggtagcatctggttccgtaccggtcatcgcgatatcgaaaaactgggcggtattggtaaacggatgccggttatttctatcgccatgctggtcggtctgatggcgatggcggcgctgccgccgctgaacggctttgccggcgagtgggtgatttaccagtccttcttcaaactgggcaacagcggcgcgtttgttggtcgtctgttaggaccgctgctggcggttggcctggcgattaccggcgcgctggcggtgatgtgtatggcgaaagtttacggcgtgacgttccttggcgcgccgcgcacgaaggaagctgaaaatgccagctgcgcgccgatcctgatgggcgtcagcgtggtggcattggcgatttgctgcgtactgggcggggttgccgcgccgtggctgctgccgatgatttccactgcggtaccgttgccgctggaaaccgcgcacaccaccgtatcgcagccgatgatcacgctgctgttggtcgcctgtccgctactgccgttcatcattatggcgatgttcaaaggcaaccgtctgccgtcgcgttctcgcggcgcggcctgggtgtgcggctacgaccatgagcagtcgatggtgattaccgcgcacggttttgccatgccggtgaaagaggcctttgccccggtactcaaactgcgtaaatggctgaacccggtatcgctggtgccgggctggcagaacgcggcggccgcggtgctgttccgtcgtctggcgctgattgagctggcggtgctggtggtgattgtggtttcacgaggagcctga

SEQ ID NO: 389883 - DNA, 942 bp, Salmonella enterica
atgaataaagcagtgattgcgattcacggcggcgcaggcgcgattgctcgcgcgcaaatgagccatgagcaggagctacgctatatccaggcgctgtcagagattgtcgaaagcgggcaaaagatgctggaagcaggtgacagcgcgcttgatgtagtgacggaagcggtgcgcctgctggaagcgtgtccgctcttcaatgcgggtaccggcgcggtctatacccgagacggaactcatgaactggatgcctgcgtgatggacggcaataccctgaaagccggagccgtcgcgggcgtgagtcatgttcgccatcctgtgctcgccgccagactggtgatggagcgcagcccgcatgtactcatggtgggggaaggggcggaaaactttgccttttcacaggggatggcgcgcgtttcgccggatatcttttccaccccggcgcgttacgagcaattgctggcggcgcgtgcggcgggcgaaatggcgctcgatcacagcggcgcgccgctggacgaaacgaaaaaaatgggtacagtcggcgcggtggcgcgggataaattcggcaatctggcggcggcaacgtctaccggtgggatgaccaataaattgcccgggcgcgtcggcgacagcccgctggtcggcgcagggtgttatgccaacaacgccagcgtcgccgtttcctgtaccggaacgggagaggtctttattcgcacgctcgcggcttacgatatcgccgcattgatggaatatggcggactcagccttgccgacgcctgcgagcgcgtggtgatggaaaaattaccggcgctgggcggcagcggtggattaatcgccgttgatcacgaaggtaatgtcgcgttgccgtttaacagcgaagggatgtatcgcgcctggggatatgccggggatacccctaccacaggaatttaccgggaataa

SEQ ID NO: 389884 - DNA, 1038 bp, Salmonella enterica
atgctggcggcgctggaaggcggtcgcgacgccaccagcggcaaagtatttctgccgcaggaaaaggcgctctccgcaggcaactttaacaattttgacgaagtgatggccgcctgggatacccaaattcgctactacacgcgcaaatcgatcgaaattgagtatgtggtcgacaccatgctggaagagaatgtccacgatattctctgctcagcgctggtagatgactgtattgagcgagcgaaaagtatcaagcaaggcggcgcgaaatatgactgggtatccggtctccaggtcggtatcgccaacctgggcaacagcctcgccgccgtgaaaaaactggtcttcgaacagggcgttatcggtcaacagcagcttgccgccgcgctggccgatgactttgacggcctgacccatgagcagttgcgccagcgtctgattaacggcgcgccgaagtacggcaacgacgatgacagtgtcgataccctgctggcgcgcgcttatcagacctatattgatgagctgaagcaatatcataacccgcgctatggtcgtggccctgtcggcggcaactattacgccggtacgtcctctatctcagcaaacgtgccatttggcgccgcaaccatggctaccccggacggtcgcaaagcgcatacaccgctggcggaaggcgcaagccctgcatcaggtacggatcatctcggcccgacggcggtgattggttccgtaggcaaattacctaccggttccattctcggcggcgtgctgctcaaccagaaactgaacccaacgacgctggaaaacgaatccgacaaacagaaactgatggttctgctacggacgttctttgaggtgcataaaggctggcatattcagtacaacatcgtgtcacgcgaaacgctgctggatgcgaaaaaacatccggaccagtaccgcgatctggtcgtgcgtgtggcaggctactccgccttcttcaccgcgctgtcgccggatgcgcaggacgatatcatcgcccgtaccgaacatatgctgtaa

SEQ ID NO: 389885 - DNA, 531 bp, Salmonella enterica
gtgggtaaatctacgctgctgaagacgctggttggcgatctggacgccgatcatggcaccgttaaatggtcggaaaacgcgcgtattggttactacgcgcaggaccacgaatatgaattcgaaaatgacctgacggtgtttgaatggatgagtcagtggaagcaggaaggcgacgacgagcaggcagtgcgcagtattctgggccgcctactatttagccaggatgatatcaaaaagcctgcgaaagtcctttccggtggcgagaagggccgtatgcttttcggcaaactgatgatgcaaaagccgaatatcctgattatggacgaaccgactaaccacctggatatggagtcgatcgaatcgctgaatatggcgctggagctgtatcagggcacgctgatctttgtttcgcacgaccgtgagttcgtcagctcgctggcaacccgcgtcattgaaattacgccggagcgcgtggtggacttcagcggcaactacgacgattatttgcgtagtaaagggattgaaagctaa

SEQ ID NO: 389886 - DNA, 474 bp, Salmonella enterica
gtgtataagagacagccgctggagttgtaccactatccggcggaccgctttgtcgcgggctttatcggctcgccgaagatgaacttcctgccggtgaaagtgaccgccaccgcgattgaacaagtccaggtcgaactgccgaatcgccagcaaatctggctgccggtcgaaagtcgcggcgtgcaggtcggcgccaatatgtctttaggcattcggccggaacacctgctgccgagcgatatcgccgatgtcaccctggaaggtgaagtccaggtggtcgagcagttagggcacgaaacacaaattcatatccagatccccgccatccgtcaaaacctggtttatcgccagaatgacgtggtgctggtagaagagggcgccacattcgctatcggcctgccgccagagcgctgtcatctgttccgcgaggatggcagcgcatgtcgtcgtctgcatcaagagccgggtgtttaa

SEQ ID NO: 389887 - DNA, 594 bp, Salmonella enterica
atgagattgattgtggggatgaccggtgcgaccggcgcgccgcttggcgtcgagctactccaggcattgcgggcgatacctgatgttgaaacgcatctggtgatgtcaaagtgggcgaaaaccactattgaactggagacgccctacacgcccgctgaggtagccgccctggcagattattgtcatagcccggccgatcaggcggcgaccatttcctccggctcatttcgtaccgacggcatgattattatcccctgcagtatgaaaacactggcgggagttcgcgccggctatgccgaggggctggtgggacgcgctgccgatgtcgtgttgaaagagggtcgcaagctggtgcttgtaccgcgggaaatgccgctcagcacgattcatctggaaaacatgcttgcgctttctcgtatgggggtggcgatagtgccgcccatgcccgcgttctacaacctgccgcaaaccgttgacgatattatccagcacatcgtagcgcgcgttctcgaccagtttggtctggagcatacgcgcgcgcgtcgctggcaaggactgcgacaggcagcaaatttttcacaggagaatggataa

SEQ ID NO: 389888 - DNA, 492 bp, Salmonella enterica
  misc_feature (329)..(338): n is a, c, g, or t
atggttgatatgactaaaactaccaccgagaaaaaactcactccgagcgatattcgcggcgtatttcttcgttctaacctgttccaggggtcatggaacttcgaacgtatgcaagcgctgggcttctgcttctctatggtgccggcgattcgtcgcctgtatccggagaataatgacgcgcgtaaacaggcgattaaacgtcacctggagttctttaacactcatccttacgttgcggcgccggtactgggcgtgaccctggcaatggaagaaaagcgtgcgaacggcgcagagattgacgatggcgctatcaacgggatcaaagtcgnnnnnnnnnntcaacggtatcaaagtcggtctgatgggaccgctggcaggcgtcggcgaccctatcttctggggtaccgtccgtccggtattcgcggcgctgggcgcaggtattgcgatgagcggcagcctgcttggtccgctgctgtttttcatcctgtttaa

SEQ ID NO: 389889 - DNA, 450 bp, Salmonella enterica; identical to SEQ ID NO: 112660

SEQ ID NO: 389890 - DNA, 267 bp, Salmonella enterica; identical to SEQ ID NO: 112663

SEQ ID NO: 389891 - DNA, 858 bp, Salmonella enterica
gtggcgattgttgaattgcattttgatggcgatattgcacctgatcaccaagtatctctaagaactctttctaaaagtttaggtcacttgcaaagtgccttagaccgggcttatcttgacataaggcatggtaatctttggaaatatgccaagatgcaccatgactactataaagatgttgaaatgttggtacagcctcctagagaaggcggatacattattgacttcttctcaaagaaagaaattacaaaaaaagttgtcgaaagggtttcaaatgcaataaataatgctgtagtagaagcacagcaagcaggtcttgaaaatgctgacactatcagtaaaagtttggaaactaaacgtgcgcaaatcgctgctcaaaaagttcttccacgtgattatcaaaaacttttagaaaatcctgatccggcagttaatcggcggtatggtgatcgggctattgtaagagacatagatcaaatgctggcaattattagatcgaatcactctggtgatagctcgttagaaatatcgttgacagcagatcgcacagaggtatttgaattcaatagagctaaagctaatgatttccatagagttataacaagaaagaaattgggagaccccgtaatttatcgagtgaaagtcaccgagatggacttacaatatctttctgctaaaatgaagaataattttaataactcggtaagcacgctgagatttgcctcaaaggaagattttcaagaagttttcccttattttcaaggtgaaaaagaaatggtgtttttgggtgcgccttatatagaatatggtgcttttgatccagcttgcggagatgtatattttatacaggtgtattaa

SEQ ID NO: 389892 - DNA, 1656 bp, Salmonella enterica
atgaacctctggcaacaaaactatgacccggcgggtaatatctggctttccagcctgatcgcatcgctcccaatcctgttcttctttttcgccctgattaaactcaagctgaaaggctacgttgccgcttcgtggacagtggttatcgcgctcgccgtcgcgctgctgttctataaaatgccggtcgatcacgcactggcatcggtcgtgtatggcttcttctacgggctatggccgattgcctggataatcatcgccgcggtcttcgtctataaaatctcggtaaagaccgggcagtttgacattatccgctcgtcaattctgtcgataacccccgatcaacgcctgcaaatgctgattgtcggcttctgcttcggcgcgttccttgaaggtgcggcgggtttcggcgcgccggtggcgataaccgccgcgctgctggtgggtctgggctttaatccgctgtatgcggcagggctgtgtctgattgtaaataccgcgccggtcgcctttggcgcgatgggtattccgattctggttgccggacaggttacgggcctggacagctttgaaatcggtcagatggtaggccgccagttgccattcctgaccattatcgtgctgttctggattatggcgattatggacggctggcgcggcgtgaaagaaacctggcctgcggtgatggtctctggcggttcatttgctatcgcccagtatctcagctccaactttatcgggccggaactgccggacattatctcttctctggtgtctctggtgtgtctgacgctgttcctcaaacgttggcagccggtacgcatcttccgcttcggcgatatgggcgcgtcgcaggtcgatcagacgctggcccgtacccgttatacgacaggacaaattgttcgcgcctggtcgccgttcctgttcctgaccgccacggtcactctctggagcataccgccgttcaaagcgctgtttgcccccggcggcgcgctgtatgactgggtaattaacgttccggtaccgtatctcgataaactggtcgcccgtatgccgccggtcgtacacgaagcgaccgcttacgcggcggtgtataaatttgactggttctccgccaccggcacagcgatcctgtttgccgcgctgttgtctatcgtctggctgaaaatgaaaccctcagccgcaatccagaccttcggcagcacgctgaaagagctggcgttgccgatttactccatcggcatggtgctggcgttcgcgtttatctcgaactattccgggctttcctccacgctggcgttagcgctggcgcacaccggcagcgccttcacgttcttctcgccgttcctcggctggctgggggtattcctgaccggctcggatacctcatctaacgcgctgtttgcctctctacaggctaccgcggcgcagcaaatcggcgtttcggatgtgctgatggtggcggcaaataccaccggcggcgtgaccggcaagatgatctcgccgcaatctatcgccatcgcctgcgcggcggtggggctggtagggaaagagtccgatctgttccgttttaccgtcaaacacagcctgatcttcacctgtatggtgggcgtgatcactacgcttcaggcctatgttttaacctggatgattccgtga

SEQ ID NO: 389893 - DNA, 345 bp, Salmonella enterica
atgtcgcggcttggcgcagcgcttggcgccgatcccgccacctttatggggatggcgggcttaggcgatctggtgctgacctgtaccgacaaccagtcgcgcaaccgtcgttttggcatgatgcttggccagggcatggacgttaaaggcgcgcaggataagattggccaggtggtcgaaggctatcgcaatacgaaagaagttcgtgaattggcgcaccgttttggtgttgaaatgccaataaccgaggaaatttatcaagtattgtattgcggaaaaaacgcgcgcgaggcagcattaacgttattaggtcgcgcccgcaaggaagagctgagtcgccactag

SEQ ID NO: 389894 - DNA, 1164 bp, Salmonella enterica
atgttacgacataacgtaccggtacgccgggatctggataagatcgcctgcgatcacggttttgactttcatgttatcgataacgaaatttactgggatgaaagccgggcctaccgttttacattacggcaaattgaagaacagatcgaaaaaccgaccgcagagcttcatcagatgtgtctggaggttgtcgagcgggccgtccgggatgagcagatcatgcagcagttggcgatcccgccattgtactgggatgtcatcgccgaaagttggcgcagccgcgatccttcgctttacggacggatggatttcgtctggtgcggcaaagatccggttaaattgctggaatacaacgcggatacgccgacatcgctctatgaatcctcctactttcaatggctatggctggaggatgctcgtcgtagcggcgccattccgcgtgatgccgatcaatacaacgcgatacaggagcggctgatcgcccgcttcagcgagctgtacagtcgggaaccgctctacttttgctgttgtgaagataccgacgaagatcgcacgacggtgctgtaccttcaggattgcgcgcagcaggcgggccaggaaacgcgatttatctatattgaagaactggggcttggtgtaggcggcgtgctgaccgatctggacgataatgtgattcgccgcgcctttaagctctacccgctggagtggatgatgcgcgatgacaacggcccgctgttgcgaaaacggcgtgagcaatggattgagccattgtggaaaagtattctgagtaacaaagggctgttgccgttattgtggcgctttttccctggccatccgaatctgctaccggcctggtttgagggcgaaaaatcgctcgcagcgccaggcgaaagcagcgtacggaagccgatttattcacgtgaaggcggcaacgtcacgattttcgacgagcggcaaaatgttatcgatcatgccgacggcgactacgctgacgagccgatgatttaccaggcgtttcagcctttgccgcgctttggcgatagctatacgctgattggcagttggatcattgacgatgaagcctccgggatggggattcgcgaggacaatacgctgattaccaaagacacttcccgtttcgtcccacattatattgccggttaa

SEQ ID NO: 389895 - DNA, 336 bp, Salmonella enterica
  misc_feature (298)..(307): n is a, c, g, or t
atggttgcccctgttcccgcgaaacgcgggagaaaacctgccgctaccactgcacccgtaaccgggcaggttcagtctttaactcgcggtctgaagctgctggagtggattgccgagtccaacggcagcgtcgcgctgaccgaactggcgcaacaggcgggtttgcctaattccacgactcaccgtctactcaccaccatgcagcagcagggttttgtccgccaggtcggtgagctgggccactgggccgtaggcgcacatgcgtttatcgtcggcagcagcttcttacagagccgtnnnnnnnnnngattgtccatccgattttgcgcaaactga

SEQ ID NO: 389896 - DNA, 1590 bp, Salmonella enterica
atgaaaaaaattgcgattattggaagcagtggaggcaacctctacaacctgggtggcgccgagccagagaagttactccaggagatttatcagcagtgtgaggctgcgggcgtgaatgtggccgccgtacagtttatcgcggcagaagcctcgatggacgtcgccaaaccggataccccggcatcggtttatgcattaaccacagaaaaccaacaaaaaccacagcgcatatttcagggcaaactttcggaggtaaacacctcggtagtagaaagcgatcgccaaatcgctgagatgatccgctgcggtgagatcgatgggatcgtggtaatgagcgccgatccggtaaaggcgaaccaggccgtttttgccgccgccgttgagatgaaaacaccgattgtcggcaccgggggaacctccatggcgctggtggcggcaaagggggcgaatgtggtcgcgacctccggaacaaccggcaccaccagccgtacccgcgccgtctccttcgtggcgtcactgtgtaaacattggggtatcaagtacaaaccacagttgggtagcgcttcgccctcgcagagcggttccggaaaaagcctgctcaaacgttttaacattcgtagcatcatgatccctgcgctaccaggctttatcgccatggcgattgtactcgccctgagccacataccaggactggaaaaacttaacgatatctttgaaatattactaaaaggtctgccggtgttagtcgcggtactggcggcaaaacagatttccgaactggatgaagtttcaattgtggccggagtcgtcgctggcgtgctttccgtagagggcggtcttatcggcggcattatcggcggtgtaatggcggggattttcgtccgttggctgttcgagctgtgcctgaactggcgcttcccaatgactaccgtcaacatcgtcgccggtgggatatcgggccttgccgctgggttaatcatgcactatctgctgagtccgctggcgctatctgcgggtaattacatcaaactggctatcgaaagcacgctggcattcagcccaattcttgccgggctgctggctggtctggttatctggcctgccattctcggcggcgtctatcacgcggtgatcctgccgttggtgctgctggagatggaaaaatccggcgtcagcttcctcggcgcggtcgatatggtcggtctggtgatggtggccgcaggtattaaccttgccaatgtgatcgccccgcgtgaaaaaagcgaagctgccgttgctacgccgggcctgctcattaacctgggctttggcacctttgttgaatccgcctatcccttcatgttcgccaacaaaattgtttttggctccgccattttttgggccggaatgggcggcatgatgctgggcttttttaacgtcaaaggggtggcctatgttccggctttcgcctcaccgttcttatccaacaatgcgctccagatggccatcgtaatgattgccacaatggcgatgacctgccttaccaccattattgctaaccgtttcaaacctgtcgtacagagcgaatcaacaacgacagccgttaattaa

SEQ ID NO: 389897 - DNA, 261 bp, Salmonella enterica
atggcgggtcatccccaccgaaataccgccaataaagttcacaaagataataatgatgccggcaatagcgtcacctttgataaacttcatcgcaccgtcaaaggaaccgtaaagctggctttccctttccagtacacttcgccgttcgcgcgcggcatccgcatcaataataccggccttcaaatcggcatcaatactcatctgtttaccgggcataccatccagagaaaatcgggccgcgacttccgcgacgcgttctga

SEQ ID NO: 389898 - DNA, 231 bp, Salmonella enterica
atggagcacgagcgctacgtcggtatctccaacctgatgctcaagcctgaactgtatctggcggtggggatctccgggcagatccaacacatggtcggcgccaacggcgcgcagacgattttcgccatcaacaaagataaaaacgcgccaatcttccagtatgcggattttggcatcgttggcgatgcgctgaagatcctgcctgcgctgacggctgccttagcgcgataa

SEQ ID NO: 389899 - DNA, 2340 bp, Salmonella enterica
  misc_feature (2214)..(2254): n is a, c, g, or t
atgccttttacacttggtcaacgctggatcagcgatacagaaagcgagctgggacttggaaccgttgttgcgatggatgcgcgaaccgtcaccttacttttcccgtccacgggggaaaaccgcctgtatgcgcgtagtgattctcccgtgacccgcgtcatgttcaaccctggcgatacgattacaagccatgaaggctggcagctacatatcgatgaagtaaaagaagaaaatggcctgcttgtttatgtcggcacccgcctggataccgaagagaccaatgtgacgctgcgcgaagttctgctcgacagcaagttggttttcagtaagccccaggatcgtctgttcgccggtcaaatcgatcgaatggatcggttcgcgctgcgctatcgcgcccgtaaatttcagagcgagcagtaccggatgccatacagcggcctgcgcggtcagcggaccaacctgatcccgcatcagcttaatatcgctcatgatgtgggtcgtcgccatgcgccgcgcgtactgctggcggatgaagtgggcttaggtaaaaccattgaagccgggatgattctgcatcaacagttattatccggcgcggcggaacgcgtattgatcatcgttccggaaaccctgcaacaccagtggctggtagaaatgctgcgccgtttcaacctgcgcttcgcgctgttcgatgacgaacgctataccgaagcgcagcacgacgcgtataacccgtttgaaaccgaacaactggtgatctgctcgctggatttcgcccgccgtaataagcagcgtctggaacatttgtgcgacgccgagtgggatttgctggtggtcgacgaagcgcatcatctggtgtggagcaccgatgcgccgagccgtgaatatatggccatcgaacaattagctgaacgtgtaccgggcgtgctgctgctgaccgccacgccagaacagctggggatggaaagccatttcgcccgtctgcgcctgctcgatccgaaccgtttccacgatttcgaacagtttgtcgaagaacagaaaaactaccgccctgtcgccgatgcggtggccatgctgctggcgggcaataaactcagcaacgacgaactgaacaggctgggcgatctgatcggcgaacaggatattgaaccgctattgcaggccgctaatagcgatcgcgacgacgcgcaggccgcccgtgatgagctggtgtcgatgctgatggatcgccacggcaccagccgcgttctgttccgcaacacccgtaacggcgtcaaggggttcccgaaacgtgaactgcatacggtaaaactaccgctgccgacccagtatcagaccgccattaaggtctccggcattatgggcgcgcgtaagagcgcggaagatcgcgcccgcgatatgctctatccggaacaaatttatcaggagttcgaaggcgataccggcacctggtggaacttcgacccacgcgttgagtggctaatgggctatctgaccagccatcgttcgcaaaaagtgctggtgatctgcgctaaggcgaccaccgcgttacagctggagcaggtgctgcgcgaacgcgaaggcatccgcgccgccgtgttccatgagggcatgtcgattatcgaacgcgaccgcgccgccgcctggttcgccgaagaagataccggcgcgcaggtgctgttatgttctgaaatcggctccgaaggacgtaacttccagtttgccagcaatctggtgatgttcgacttgccgtttaacccggatctgctggaacagcgtattggtcgtctggatcgtatcggccaggcgcatgatatccagatccacgtcccgtacctggaaaaaaccgcccagtcggtgctggttcgctggtatcacgaagggctggacgcctttgagcacacctgcccgaccggtcgcgcgatttatgattcagcctacgccagtctgattaactatctggccgcgcctgaagaaaccgacgggtttgacgatctgatcaaatcctgccgcgagcaacatgaagcgctaaaagcccagttagaacagggccgcgaccgcctgctggagatccactccaacggcggagaaaaagcccaacagctcgcacaaagcattgaagaacaggacgacgacaccaacctgatcgcgttcgccatgaacctgttcgatatcgtcggcattaaccaggacgatcgcggcgacaacctgatnnnnnnnnnnnnnnnnnnnnnnnnnnnnnnnnnnnnnnnnnaacctgatcgtgttgacgccgtccgatcacatgttggtgccggatttccccggcctgccggaagacggctgtactatcacgtttga

SEQ ID NO: 389900 - DNA, 1038 bp, Salmonella enterica
atgtctgaaataaatcagaacgtaaaagatagccgtcagcagtattaccagcatatttctgggcagaatctgacgccgctgtgggaatcgttacatcacctggtaccgcagacgccaaacgccaactgcgcgccggcctactggaattatcaggaaattcgtccgctactgatggaaagcggcaatgtcattggcgcgaaagaggcgatccgccgggtgctggtgctggaaaatccggcattgcgcggtcagtcgtcgatcacggcgaccttatacgctggtttacagctgatcctgcccggcgaagtcgcgccgagtcatcgccataaccagtcggcgctgcgttttatcgtcgaaggtaaaggcgcatttaccgcggtggacggcgagcgcacgccaatgcataccggcgattttatcctgacgccgcagtggcgctggcacgatcatggtaatccggggtcagagccggtggtatggctggatggtctggatctgccgttagtcaacctcctgggctgtgggtttgcggaagactatcccgaagatcagcagccggtaacgcgaaaagagggcgattatctgccgcgctatgcagcgaatatgctgccgctgcgccaccagcgcgggaattcgtcgccgattttcaactaccgttacgaccgcagtcgcgaggcgctgcacgatctgacccgtatgggcgatccggatgagtgggaaggttacaagctgcgttacgttaatcccgtcaccggcggttatccgatgccgtcaatgggcgcgttcctgcaactgctgccaaaaggctttgcctcgcgtgtggcgcggagcaccgacagcactatctaccacgtcgttgaaggggcagggcaggtcactatcggcaacggaacttttcatttttccgcaaaagacatttttgtggcgccgacctggcatgaggtgtcgtttcgtagcagcgaagacacggtgttattcagcttttcggacaagccggttcaggaagccctggggctgttccgcgaagcacgttattaa

SEQ ID NO: 389901 - DNA, 327 bp, Salmonella enterica
gtggtagttgtcgtagctaatattaaaaccggcgaaatcggtctggtgctcctggctcatttcaccgatcatttgctccggcgtaataccaagctgctgcgctttcagcatgatcggcgtgccatgagcgtcatcggcacagatgaagttaacctcatggccgcgcattcgctggtaacggacccagacatcagcctggatgtgctccagcatatggccgaggtggatagagccgttggcgtacggcagcgcgcacgttaccagaattttcttcgcgacttgagtcatagtgggtattacttcttctgttgtaaaaaagggctttga

SEQ ID NO: 389902 - DNA, 474 bp, Salmonella enterica
gtgaccgagcagcggctgttcgatggcatcccagttcagttcgctgttcaggaaggcttcaacgcgttcagaaagcgtcggcagtaccggtttcagatacgtcatcagcacgcggaacaggttgatgcccatcgagcaaatggcctgcaggtcagcgtcgcggccttcctgtttagccaccacccacggcgcttgctcgtcaacataacggttagcgacgtcggccagcgccataatctcacggatagctttaccgaattcacggctttcccatgcttcgccaatcaccgcagcggcgtcagtaaaggttttgtacaattgcggatcggccagttcagccgccagcacgccgtcgaaacgcttattgataaaaccggcgttacgcgaggccaggttgactactttattgacgatatcggcattgacgcgctggacaaagtcttccaggttcaggtcgatgtcatcaatgcgtga

SEQ ID NO: 389903 - DNA, 192 bp, Salmonella enterica; identical to SEQ ID NO: 369913

SEQ ID NO: 389904 - DNA, 1302 bp, Salmonella enterica
atggctcaggaaatcgaattaaagtttatcgtcaatcacgacgccgtagatgcgctgcgaaatcatcttcatacgctcggcggtgagcatcatgcgcccagccagttgctgaatatctacttcgaaacgcctgataactggctacgccgccatgatatggggctacgtattcgtggtgaaaatgggcgctatgaaatgaccatgaaaattgccggccgggtaacgggcgggctgcaccagcgacccgaatacaatgtcgcgctaagcgaacccgtgctggatctgacgcaacttccggcggaggtctggccggatggcaacctgcccgccggcctggcatcaagcgtacagccgctgttcagtaccgatttttaccgggaaaaatggtgtctggacgttgacggcagcaggattgaaattgcgctcgatctcggcgacgtaaaagcgggcgagtttgccgaaccgatttgtgagctggagcttgagttgcttcgcggcgatacgcgcgccgtgttaaaactggcgaagcaactgctgtcgcaaaccggtttgcgtcagggcagtctgagtaaggcggcgcgaggttatcacctggcgcaggggaatgcgccgcgagagaatacaccaacggcaattctgcggactgccgcgaaagccacggtagagcaagggctggaggcctcgctggatctggcgttgtcacagtggcagtaccatgaagagctctggctgcgcggcgacgagtcggcgaaagaacacgtgctggatgctatggggttagtgcgccatgccttaatgctctttgggggcattgttccacgtaaagcgagcgctcacttacgtgatctacttacccaggcggaagcgacgatgacatccgcggtgtccgccgtcacagccgtttatagtacgcaaacggcgatggcgaaactggcattgacggaatggctggtgacgaaagcctggcagccatttttggacgcgaaggcgcaggccaaaatggccgattcttttaagcgtttcgccgacattcatctttctcgtcatgctgctgaattaaaaaaagtttttggacaaccgctgggtgataagtatcgcgaccagctgccgcgtttgactcgcgatattgacagcgttttactgctggccgggtattatgatgcgatggtcgcgcaggcatggctggagaactggcagggattgcgtcacgccattattaccgggcaacgtattgaaattgaacatttccgtaatgaggccattaaccagcagccgttctggttgcacagcggaaaacgataa

SEQ ID NO: 389905 - DNA, 303 bp, Salmonella enterica
  misc_feature (290)..(299): n is a, c, g, or t
atgaaatggttatgttcagtaggtgttgctgtgagtctggcgatgcagccagcattggcggaaaacctgtttggcaatcacccgctgacgcccgaagcgcgcgacgcgttcgtcacggatttactcaagaaaatgactgtcgatgaaaaaattggtcagttacgtctgattagcgtcggccctgataacccgaaagaagcgatccgcgagatgatcaaagacgggcaggtaggggcgattttcaataccgtcacccgccaggatatccgtcaaatgcaggatcaggtgannnnnnnnnnctga

SEQ ID NO: 389906 - DNA, 5586 bp, Salmonella enterica
gtgaataaagtggtacatttcttactgacattactgatcatgtttgcagtgtcgatcgcgcctgcgcaggcgctattgaagggcggaacctggcaagagctgaactcgacgaccggcgcggttaacggcaccgcgccgctggccgacggtgccactattcccctgtatcaaggaagtatgctgcttgaccctaccaagacctacgatatcgagtttaccgccatgccgcgcgattttagcgctgatgcctcctcaacctcgatgcgtgcggtcaactccaccgatacggaaggcgatctctttaccgatccgccctccatcgcctgggaaaatcaagaaccgccgaccatgagtctggtatgggccgatgccgccacgccggatacgccgctctcgccgcagccgattcttaaccagaccttttgcgcccaaaacctcgccgggcggcaactggttgcctgggcgcaggtggaagatgagaacagcgttcccgcactgtggctttatacccgtaccggggtgccgaacagtgcggtcattccgctacttagcccgaaagtgacgctaaatatcaaaccggcggtgagcgatcctgtttctgtgagcggcgatcatattgacgccaactttgcagcctcgaaagtcaaagcgggggagagcattaccctcactgtctccaccaaagcctgtaatggcgacgtagcgccgaatgctgccttcgtgatccgtcgcgaggatgcaatcaatcgccagggcgtggtcaataacgctaacccggtgcgcgttggcgatactgagttaacgactacgcaaacagaatatcacggtgtaacggacgggcagggcaacgccacggtggtggtgacgcaagagcaaggtccgggggtaaaaacacgactcatcgtctcttcgcaaagctatcccacgctgaccgacaatgtcgacgtcattttcactaccatcaccagccctgacagtgataaggccaacatgtacggtcatatgcttgagaacgccacggcgacgctgaacggtacgacctacactttcacccgcccgaaactggcggcggaaaccagcggaaatgacggcaccgttgtggacaccaacgaaacctgggcgcagtttacctggagtggcgcggataaccattgcgacattctgccggatgccgaacaactggtggcgctaaggcatgagcatagtgcgttggcaacgtacaccggctggccggtgacgggcgatgcggaatactggtcgtcaaccaaagatcagataaacgactaccacgctgccgtgcatatgaacagcgcgtcggtcgtcagggccgccaacagcgacacgctactggtcagttgtgtggataaggcccagcctgcggcgcatccgcagatgacgctctctccagaggggccgtataaagcacaggtgggggaatcgattgatttagtgatgaccgttgtggaccgcgacacgcaaaagccgctgccttatcgctatatggagctgttcattgaccctgcgaaaaaccgcaaaggagagcatcaggacgcgtgggataaccaacgggttacaatcaacaccgaagatatgcgcgcctcgtcgccggaacactataccggtgtgaccgacgccaacggccaggtacacctgacgttaaaacacgacagcggcctgggcgtagaaacgcccatccgcatcgtgatgccggatgatgaaggcggcagcatcgagttgccctttagcgtaattttcaccgtgataaccagcccggatgtggacggcgccaacatgtggggccatatgcagggcgtggtggacgcgggcaacctgtatagacgcccgctgctggcggtggaaaccagccacaaagacggtcagttcagcgaaaacaacgaagagtgggcgacgtttaattcagtggaaaaagccaccgcgcagtgcggcatcggccaggtgccggatcagtcatcgctggcgcatttatacagcgaacatgctggcggcaagatggaaagcgaacacggctggccaaccgaagactattacatcgccgcggacagcgacgcctcgggaacggcgcacgtcaaccttgaaaacggcgatagcggtaaatttaccaatcaaccgaattacctgacctgctcggccaacgaaatggtggcggtgctggacgtctacttcaacgatgacccggcgaccaaaaacagcgatatggttgccaaagtgggtgaacagattaagctgaacattcattcgcgcaacgccctcaacggcatgccgatcgcctataccgacttcaccgtcaccatggcgaacggcaaacggcgcgacgggttgacgaccggttttaccgacaccagcaatggtcagatgctgtttgatgacgtgggctaccttgccgggcaggcttatcatgggatcaccgacgccaacggcgatgcgaccattatcctcacccagccgaagggagtagggctgctgacgccgttaagcattgcgcccgtcgattcattaatcagcacgcccgtttcccgcagcgtgaagtttaccgtcgccaccagcccggatacgccaaaagccaaaatgtggggccatatggctgataccatcaccgtcggcgatctgacctttgagcggcctaagctggcggatgaagtgacgccggaacgtactcaggctgaggctaacgaaacctgggcgcgcgttctgcatcctgacgcggcgggcaacccggataagggcggctgcgcggcgaaccgcctgccgcgcatcgatcagcttgaggcgttgtacaacgccaacagcgacggcgtgatgaaaagcacccagggctggccgacgctgcttaactactggtcttcgaccttccagagcgctaccacgtggaaactgatctcgctgtttagcggcagtgaattcgccaacgccaacgtctccatttacgccagctgtctggccagcgataacccggcggcggcctcgattaccattgaaccggtggatgcgtcgcagtggtacgatggcagcggcgttcacgcggtcaaagcgaaaaaaggcgacacgatgcaactgaaggtgacggtgaaggacgccagcggcaacccgatcccggaagcgccgtttgtgctcacccgcggcgacggttacgatcgcaggggcgagaagtacaccgccagtgagggcaacgatcagcaaggcatcgtcacgcccgtggtgatcgatggcgaatccctggcctggaccaccaccaaaatggggatgctgaccggcgctgacggcacccgcatcatcagcgttacccgcccggacacacacggcacccgaacggccattatcgccgcgctgtatgaaaatgccgccgtgagcgccaacattgacaccatctttaccgtcatcaccagcccggatgtcgacgttgcccgcatgtgggggcatatgttgccgtcgctcacggcggcggatggcgcggagtatcagcgtccacagctctacgctgaattagccaatcaggcaagtgccgcgcaatataccgaagacaacgaaatctgggcggggctttatgggccagacagttcaaaaaccgaccccgctgttaactgcgctgcgggctatttcccttccgtcgaggcgctggattcgctctacagcaaatacccaaaccgcacgataaaaaccgcccagggctggccgatcaaccgttcttactggagcggttccagttccgggtcgttaaccggcggaaagccccgatcctattacattgtcgatctggatgatgattcgcgccggggcgtcgttaatgacggtgtgaacgacaggcaataccaaatttgcgcaacgacgccgaagacgcaggctacgcaaattacgctcacctccacgctggcgacggatgacactattcaggcggtgaaggctaaaaacagtgagtcgatcccactgctcgtcaccaccaccgatgcggcgggtaatccggtgccttatacgacgttttcgcttaagcgcgacgccgggacgccgcgtaaagctgactacccgtttaccaacagctacaccatgacgatgacgcagtctggtggcgcgacgcaagagtttgcctacagttcatcggttctttatggggcgaccggggcgaacggtacgttggccctttcgcttgacgaacctggcggagtcggggtgaaaagcgtggtgactgccagcctgtatgatacgccggcagtaacctcgtcgctgccggcagtgtttaccgtcatcaccagcccgaacagcgacaaggccaatatgtacggccatatgccggaaaccttcaccgccagcaacggcgcggagtttatgcgcccgctgctgtatggcgaactctcatcgcagaatcatacgtcgagttacttcgaaaccaatgaaacctggtttacggtgaataattttaataccgggaattatggcgcgtgcccgataaatcagatggccacgcaggatgatctccagtcgctgtaccgcgatcaccccaaaggtaagatcacgaccgacattggattacccatcaagaaaaaatggtgggcaggcgacagcctggtaaaaaatcaatccatttactggcaatttaccgatctcaatacgggtaatggcggcaccacgttggaaactccggggaatttctattaccagctctgtctgacggaaccgcgacagatgaagattgcgttatctacggacgtgtggaacgcggataaatcggcggcggtggcgaaaacaggcgaggcgataccgatgacggtaacggtgactaacggcgccgggcagccgcaggcgggggcgacggttatgctgacgcgtgattactcttattcgcgtggcacggtggatagcaaatacattcaggccggtgtgattggcgagccggttgcgtccaaaggcgcgttatcagacatgaccctgacgccggtatcgcctgcgggtgcggcagcggtgtttagtaaccagaggggaaccagcacgaaatggtatggcgccaccggcgatgacggtaagttgcggttcacgttaaaccaggataaatcgctgggtttgagaacgtccatcacggcgacgctttcggagctggctggcgagacggcgagcgtcgatgcgatctttacggtaccaaccagcccggatacgccgtatgcgtcatactggggccatatgccggataccgttgaggttaacggcgttacgctgcgccgcccattcctgaaaacagagatgtccaaaatgccgccaggcacctggccgcttaataatgaaacctgggcggcgaactatattgattatggtgaaacatccattcatgctacgacatcgctgccttatctttgcggctcgctggaaaacgccgcgacgctggacgatctgaaggcgctgaagaacatcattggcgacctgcactggcctacggctgcgccggcgtcgtcgtatacatatgattatgcatcgcaaacgatggttggcggtaagtattgctcatttaacgaaacgaccaatacggaaaactgtacgctttcaagtcaaggttttgcttatgcctcgtgccgggtgcagtag

SEQ ID NO: 389907 - DNA, 10575 bp, Salmonella enterica
  misc_feature (9277)..(9286): n is a, c, g, or t
  misc_feature (10559)..(10568): n is a, c, g, or t
gtgacgactgcggatgcagacggtaactggaattttgatatttcccgaaatctgtctgacaatgtttataagattacggttgaatccatcgatcttgccggtaatactgcctcctcatcagcgtataatttccaaatcgtaacgcaaacacaaaaaccaacaatagagttggtcaacgatacgggggttgataatacagaccatattattaatgaaaagaatcctgcactgacaggaaccgctgcaccctattcaacggttaaactctatattgatggtgcactgatcgctgaggtcagaacaaataaagatggcagatgggagtatactctgaaagccgatcaaggtttggttgatggcgatcatagaataactgcttcagttgaagatatcgctggcaacattgcccattcggatcctttcttaattagcgtcgatactgctatttcaataccgatagtttcattgagcccggattcagattcgggaatttcagatgataatttaacgaatatcgttaaacctaccttgcacctaaaagatattgatccggacattatcagtgttcaggtatgggatgccgcgtctgatacgcagatcggtgttgccacgcaacaacctgatggttcatgggcctatacctttacttcagatttaacggaaggcttgcatcaggtttatgtcaaggttgaggacattgcgggtaataaagcgaacagcgcggtattcgattttactatcgataccacagtatcaacgccggtgatttccctgctttctaaggatgatacgggggttacaggcgataacctgaccaacatcaataagccaggttttgctatttccggtgttgatgccgatgcgcatcgggtcgtcgtacaggtgatgcacaatggcgtgagcgaagagatcgaactttctcacctcaatggtagttggttatttacaccagggaatacgtgggcggatggcagctacacgttaacggtgaaagtagaagataaggcaggaaataccaactactcagcgccgctgacggtcgttatcgatacccaaatcgccattgatggggtggaactggtcaacgatagcggcgtgaaaggcgataatatgaccaatgacgaccgtccccactttcgtgtgacggtaccgacggatgtcaatgaagtccgtctgagcattgacggtggtaattcgtgggttcaggcaactccgggcgtggcaggaagctgggagtatatctggccgacagacctggcagatggtcaatacacgctaacggtggaagcgactgataaagcaggcaatacagtgacgaagaccatcgatttcgcggtggataccacgctgtcagtgccggtcatcgtactgaatagcgcggacgataccggtgtccagggcgataacatgacgaatagcacccagccgacatttgccctgcagcatattgatgatgatgccgttcgcgttacggtcagtgtggagcatggcggcgtcaccaccacatttgacgccacgaaaggcgtaggcggatggagctttacgccgacaggggcgtgggcggatggtgattataccctgagtgtgtcagtcgaagataaagcggggaacaccagccattcggcatcgctgacggtgacggtggacacgcaaatcgccattaataacattgaactggtcaatgacagcggtattcccaacgataatctgactaataacgtgcgtccgcagttccaggtgaaggtaccgacggatgtcaacgtggtgcgcctgagcattgacggcggcaagacgtggttcaacgctacccagaacgcgacgccgggcgtctgggattatatctggccggatgatgtggccgacggaggctataccctgacggtagaagcgaccgatgaggcgggaaataagacaacacagacgctcgatttcaccatcgataccactctgtctgtgccgaccctctcgctggacagcgcagatgacagcggcatcgcgggcgataatatcaccaatgttaaaacgccgggctttaccctcaacaatattgataccgatgtcagccgggtaacagtggaggtaatgcacaatggcattaaacaggaggtgccactggttcagaccggcggacagtggcgctttgcgccgaccagcgactgggcggacggcgactatatcctgacggtgaaggtagaagatagggccggaaatgtgaagcagtccgcgccgttgacggtgacagtggacacgcatatcgccattgaccgtattgaactggttaacgacagcggtatccccgacgataatctgaccaatgaagcgcgcccgcactttcaggtgacagtaccggcggatgttaacggtgtaagactgagcattgatggcggcaaaacgtggtttgacgccacgcagagcgcgacgccgggcgtctgggattatacctggctgacgaatgtggctaacggccctcacaccctgatggtggaagcgtccgacaaggcgggaaacaaaacgacgcagaaactggacttcatcatcgataccatgctgtcagaaccgacgattaccctggacagtgcggatgacagcgccgctggcgataacatcaccaacgttaagatgccaggctttaccctcggtaatatcgacgccgacgtgaccaaagtggtggtgacggtggcgcatgatggtaagaaccaacagatagagttgattaagaacggcggtgtgtggcgctttacgccgggcgcagcctggaccgatggcgactatacgttgacggtaaaggtagaagataaggcgggtaatacaaattattctgcgccgctgacggtgactatcgatacgcaaacgtctattgatcgcattgaacttcttaatgacacgggtattgtcggggataacctgaccaatgaagcacgtccacagtttcatattacggtaccgacggacgtgaactctgtgcaactgagtcttgatggcggcatcaactgggttaacgcaacgctgacgcccgacggcgtttgggagtatatatggccgacagatctggtcgaaaatacgtataccctgacagtgaaagcaaccgatgttgcaggcaacacggcgacggaaacgctcaattttatcattgataccacattgtcgacaccgaccatcacgctggatagcgcagatgatagcggcaccgccaacgataataagactaacgttaaaacaccgggttttattatcggcggtattgattctgacgtgactcaggtcgtcgtgcaggtgatgcgcgatggtcacagcgaggaggtggagctgacgcagactaacgggcagtggcgttttgtacccggcagcgcgtggactgatggcgactatacgctgacggtaacggtgaaagatgaggcgggtaatattcgccactcagcgccgttgacggttaccatcgatacgcaaatcgccattgaccatattgaactggtcaatgacagcggtattcccgacgataatctgactaataacgtgcgtccgcacttccaggtgacggtaccgacggatgtcaacgaggtgcgcctgagcattgacggcggcaagacatggttcaacgctacccagagcgcgacgccgggcgtctgggattatacctggctggctgatgtgggagaggggaagcataccctgacagtggaggcgaccgacaaggcgggaaaccagacgacgcagcaactggacttcatcatcgataccctactgtcagaaccgactatcgtgctggacaacacggacgacagcggaacaaaaggcgataacctgaccaacgtaaataagccgacgtttttactgggcaatattgacgcagacgcgcggtatgtcacggttgaggtgcagcatggcggcacgaaagaagtgctgacggccaccaaaggcgcgaccggcatctggagcgtgacaccgaccggcacatgggcagatggcgactatacgctgacggtgagggtggaggatgaagcgggtaacgtaaaatactcggcgccgctgacggtcacggttgatacccaaatcaccatcgatgttattgaactggttaatgataacggtattcccggcgacaacctgaccaatgacgttcgtccacacttccgcgtcacggtgccaggggatgtcaacgaggtacgtctgagtatcgacggcggtaatacgtgggttcgtgcaacacagggcacggcagggatctgggattacacctggccgaaagatgtgaccgacgggctacataccctgacggtagaagcgaccgataaggcgggaaataagacgacgcagacgctcgattttaccattgatacccggctgtcaacgcctaccatcactatggatagcagggacgatacaggtgccattggcgatcatattacgagcgtcaaaagaccgggctttaccattggcaatattgactccgatgcgcaatcggtcattttgcggatcacacagggcggcaatagccaggaagtgacactaacccaggttggaggacagtggcgctttacgccagatgctgactgggcggacggtagctatacactgacggtagaggtaacggataacgcaggaaacgttcgtcagtccacgccgctgatagtgacggtagatacgcaaaccagcattactgatattacattggtcaatgatcatggcgtgccggatgacaatctaactaacagcacccgtccgcagtttgagatcacggtgccggcggatgtgaattctgtgcaactgagcattgatggcggcgcaaactgggtgagcgcggcgcagggtatcgaaggcgtctggggctatacctggccaacggatatgggcgatggaaaacacaccctaaccgtcatggtcaccgacagagcgggcaatacggcgacgcaaacgcttgaatttttcatcgacacccggttgtcgacgccgaccattgcgctggatagcacggatgataccggtacgcctggcgatgatatgaccaatcgcacccggccgacctttattctgcagaatatcgattcggatgttatcaacgttacagtcagcgtcacgcataatggaacgacaacctcgtttactgcgacacagggggctggaggatggagctttacaccgccagcgccgtggggcgacggtgattatacgctgacggtgacagtggaggatcgggcgggaaatacgcgtccgtctacgccgctgacggtgacagtggatacgcaaatagccattgatcatattgaattagtcaacgatagcggcgtccctggcgataatatcacaaaacatgtgcgtccgcagttccagatctcggtaccggatgatgtggaaaaggttcttctgagtattgacggcggcacgacctgggttactgcaatcaagagttcgacggctggcatttgggattacacctggccgacggatatgccagagggacagcataccctgatcgtggaagtgactgacggtgcgggtaataagatgacggggacgctcgatttcactatcgacatcacgttgttgacgccaaccattgagctagcgcccgatcaggataccggacagaataagaacgataatctgaccagtgtcactcagccgatatttgtgttggggagtatcgataaagatgttcgacacgtggaattgagtattgagcataacggcacgtttaaaacggtggtactcaccgaatcagccgacggctggcgttatcgaccggattctgctttggcggacggtagctacacattcaccgtgacggtaacagatgtggcaggcaaccagcaaacatccgcgcctttaaaggtgacgatagacggtacgttgactacgccggtgattgaactggcagctggcgaagatagcggtactgttggcgatcgcctcaccaatcacgatcggccggtgttcgacatacgccaggttgattctgacgttacgcgcgtgatggtcaaagtaacttacaacggtaaaacgcacgaggaagcggcggtattcaccaatggtcaatggcgctttacgccttctgcgagctgggctgatggctcatatcagttagccgttgtggtggaagatctggcggggaatgtaaaagaatctgcgctgttagaggtgcgtattgataccacgacaaccattaacaatatcgtattgcttaatgatactggcgtgcagaatgatcaattaacgaatgttgccaaaccgtcattcagaattgacgttcccggtgatgtcatccaggtacgcgtaaccctggatggtggcgctaactggaatgtgatacgcaaaaatgccgacggacagtggatttttgacagcccgaatactctggttgacggcacatatacccttcgcgtagaggccacggatgaggcaggtaatattgcgaataaagatttagtatttaatatcgatactaatatacaggttccgactattgctttagacgcaggacaagataccggagcgaataccgccgataatattactaatatttcacgacccacctttacgattggtaatgttgaccccgatgttattaaagtcgtggtgacgattgatggtcatgattataacgcgactaaggttggggctggttggcaatttacaccaggcaatgccattccggatggttcttataatattaccgttacggttgaagataaggccggaaataccgcgacatcgaaaccattacctgttgtgatagatacgacggctgaaattgaaagcgtcacgttggttacagatagcggtgatagcgatgtagataacattaccaaagtcgacaagccgcagtttagtattgttaccgctgatgatattacccatgtgcgcgttaaaatcgataacgccgctaattggattgaactcacaaaaggaggggatggccgctggatatttaatgtcggttcggcattacctgatgggaaacacactctcttggttgatgtgactgatatcgctggcaacgttgcgcaagaaacgctgcagtttacgattgatacgactctgcgagagccgacaattgtactcgatcccacccatgatactggtgatgatactaatgataatcttaccaggattaacaaaccggtgtttattatcggtaatgtcgataatgatgtatcacacattgtggttcatattgatggtcgggattacaccattgaaaacacaggggggaatttaacctttacgccggatcaaccgctgtctgacggtcagcatacgatctctgttaccgtaacggatattgctggtaataccaaaacatcggccgaactgcagattgaaatcgacacgcaggttcagattgacagtgttacgttaacaacagatagcggcgtcaacgatcacgataatgtcaccaatgctacccgtccctcttttgaaattgcaacgcctgatgatgtgacatcggtgctggtttctttcgatggcgtaaactggacgcctatcagtaaaaatgcggccgggcagtgggaatttactgcaggtagcgcattgcctgatggtcattatactctccatgtccaggcgacggatcgggcaggaaatacggcaaattccacgctgggcttcaccgtggatacgcagattgacggcctgagcgtcgtgatgctggacgacgccggaaaggattctacggatggtattacgaatattacctctccacgttttgaaatttcagccagagaaccgctgcagagcgtgacggtaattttaaacgggaaatccagcacactgactcagggggcaggtaataaatggctgtttacccctgatacaccgttagtggatggaacttacaaaatagaaatagtggctgaagatatcgcaggtaataaaattagcaaagaggtatcattcacaatagacactattgtttctgatcccagtattgatttgctggatgcggatgatactggcgaaagcgctgttgataatattacgagtgtcactaaaccacgtttcgttattggcaatgtacccgccgatattgatactgttgtaatcagaattaacggcgtttcttatccggttacggcaaatggcaataacctctgggaatttcaggttcccgttgcgttaaacgatggcgtatatgaagccgttgttgtcttcagagatattgccggaaatacttctgaaactaagctgccctttaccattgataccacgacaagcgtcagtgtcagaatggagccagcgtctgataccggcagctccaatagcgataaccttacgaataagcaaaatcccaaattcgaaggtactgcggagcctaatgcgaaactggtgattaccattgttgatgataagtcaggtcgggaggttctaaaacacacgattacggttggcgccgatggcaactggagtgtgacgccgaatatactgccggatggcatgtataccatcaacgtcgtcgcaacagatgtcgcgggaaatactgcgcaaacgcaggaaagattcactatcgatacggttacgatcgatcctaccattcgcctttcggatccatctattgatgatcagtatgaagcaaccagcctgcgtcctgagttcaaagggctagccgaagcgttctcgacgattatgattcagtgggatgggaaagtggtcggctcggcaaacgccaatgcgaatggcgaatggagttggacgccgccatcagtattagcgccaggctcctatgttgtgagcattgttgccaaagataaagcgggtaatgaatcgtcgcaggtcgactttcctgtcgtaatacctgttattgatgtcacgcctccaaccataaagctcagcgaggagagcgatagtggtgccttaggagactttaccacgaataataaaacgccgaccctggttgggaacacgttacctaatgcgattgtgagtatttatgtggatggcgtgaaggtcggcgaggcgacagcggatacagcgggtcgatatactttccagttatcggaaatgaaagatggccattatgtcgtccaggtgggtatcgtcaaccctcgcgataatagcgaactgcgttccaccgccgttgatgtcactatcgataccgaggttgctgaactggtatggaatatatctggaatgcatgagggcggatatatcaatacggtgacgccggagattggcggcaccagtgagccaaacagcaaaatcactatctttgtgaatggcgttgaaaaagcgattgcttatacgacaggcgcaggacactggggcgtagtattacctgctnnnnnnnnnnaagatgttgccggcaatatcagagagtttggtgcgcagaatgtgatactggatacggtaatttcgccgttaaccgtggtattacgcgaagctgatgacagtggcaaagttggcgactggatcaccaataaatctcatgtcaccatcgatggtactgccgaagccggaagtactttaaccatcaggaatccacagggggtggttattgctaccctggtggtaggcaatgatggtcgatggagcgcagaattagatctgcgtgaaggtagtaatgcctttgtcgtggtatcggaagataaagcgggcaacagccaacaaaaagatatcctgatagaacatgatacgcagattgaaatcagcgatatttcattaagtcgggatactaatagcggtgataaatatgatctgattaccaataataagtctccggtactggttgccatgaccgatcccggcgcgacggtacaggtttatattaatggtgtgttacaaggcacagtagaggcgagttcgtcaggtaatattagctataccatgccggcaaatagcgccgacggcgagtatcaggtgcaatttgttgctacggatactgctggtaaccgggttgagtctgcgattacaaccgtgacaatcgattctcaaattgctgtctttgacattgatgaagattcattaccggccctctctaataaccgggcgttgtcagtctcaggtgtcggggaggcaggttctcaggtcagcatctttgtcgatggtaaattagtcaacgttgttatggttgaggctgatggcacatggcgcgcgccgatactgctgcaagatgatggtacgtttaatattcatttcagcattactgacgttgctggcaacactgaagtgagcaaggattatagcgtggatgtcgattcatcaaccgacttcccaacgctcaaccttgaagatgcgagcaactctggttcacttgacgatctgattactagtcacaacaagcctgtgttagttggcaccgcagaagcgggagccacaatccatatttatgtggatgaaaagatcgtggcaaatgttcttgtgcttgaagatggaacctggtcctatcagtttgataatgcgttaaaagatggtgaatattctatccgagtggttgccgaagacccggcaggtaatacggcagaatcgcctcgcttactcgtcacgatagataccagtacgtttatcgataatcctgttatgatggcaggttctgataacggtattttcagtaatgatagtataannnnnnnnnnagtataa

SEQ ID NO: 389908 - DNA, 2241 bp, Salmonella enterica
atgaaccagagtgttcagattttcattgatggggtgttagtcgatacgatcacggtgacggacagaaatcaagtttatcgacctgagtcaccgttgggcgatggttcccatagcatttattatgttatcaccgataaagcaggcaacacggctacctcgaaaacgctaaactttactatcgatacctttaatacgacgcctgtcgccattgattctatcggtggacaaacgttagcagagatgaccggtagtgatggcaaaatatatataacggacacgacacgtaacttattgtttagtggcagtgccgagcccaatagcaaaatagaaatcatcattaatggcttaaatgtgggggaagtttgggttaatgacaaaggccactggcagatgccggtgaacccgctttatttcacagaaggccagctggatatcactgttaaatctacggaccgtgctggtaacgtaaatcaggaaaagtattccatttgggtcgatacgcatatccaggtatttactagcgagcttgatgacaataaatcatcatcgaaaacggactggtggagtaatagctccactattaccatgagaggtatgggggaaattggcgctacggtatcattaatcgtggcaggggtcacgctggcaaccgctgtcgttgcggctaatgggcagtgggagttatcgaccgatcaacttccggaagggaaatacgatatcactttgagtattgaggataacgcaggcaaccgtaaggaagaagtacatgaaatatttattgatcgaacgccgccaaacgctccggtcgtaacttattcagatattgtcaacgatctaattattatgcagggaacggcggaagccaaatctcagctaataataaccgatagtaatgggaatacttatacgttaaccgttcctgataatggtaaatggagtatggcgatcccgtatccatcggaagggaagtttaccattacgagtgtggatgcgattggtaaccggagtgatgatgtccctctcgatatcatgaaagagactcctgttatttcattatctccagactcagacagtggtacggtgggcgataatattacgcgagataatcagcctacctttattatcgggaatctggaaagcgatgttgtggtcgttcaggtcgatatcaatgggaccgtatataatgctgaaaaaaatgccgatggcgtttggttctttacgccaggtacaccgttagctgatggttcctatacggtatcggtaatcgcaagcgatgccgcgggtaatcagaaaaactcgttacccattaccgttacgatcgacagtacgctgaccgtgccggagattgcgctggcagcaggtgaaggcaatggcgcttcagacagcgataacgtgacgaatcacaatcacacccagcctaagttcacgctgcagcatattgatgctgacgtgaccggggtgaccgtaaacgtgacgcataatggcgtgacagacatctatcaggcgacgcaaggcgcggatggctggaccttcacgccgccagccgcctggaatgatggtacctacacgctgagcgtgacggtggtggatcgcgcggggaactcactgcaatctgcttcgctggaggtgacggttgactcaacggtgacggtaacagcggatagccagcatgacgatgcgagcgatgacgccacggcaacagcggttactccaccggagtctgaaacagtgaatgccgaaagcgctacgcatcttcgtacagtgccgtctgcggcggaagaaagcgtggtgaaggagacagcctatagtattacattgttaaacgctgactctggggatgaaatagatcgttcaattagtcagacaccttcttttgaaatatcagtacctgagaatattgttaatgtcagtgttatgtttgaaggagaagagtttactctgccgataactaaccagaaagcaatattcgaagttccgctatctttggaagatggtgaatatactatggacgtgaaattccttgataaggacgatgatttcctgattaaggagaaaacattctcagtcgatcactcctcggcggatattgtgaacgcaatgaatgcaagaggaaagaccgaggatgatattaatgattccccttcaacgagttctgtagggcacaacaataacggcgctattgaagttttcgccgttaatgaagttacgttacctgtagataatcaagaagaacacgcataa

SEQ ID NO: 389909 - DNA, 1704 bp, Salmonella enterica
atgagcagcacactgtctctagcagagaatgatccagaacggttggccgaggtgtgcaaaccggctatcgatattcagcacttgctggatcaaagcttgtcgcgtcttactcaatctgtcatccgaacggaaaaattaaaaaatacgtcaaagcgcgtcgacggtttaatcattggcactggtgagtcggattttaccaaaggcaacacccactatgacttacatatcgatgataaaatcttccagctgatcgatgtgccaggcattgaaggtaatgagtcccactatgtacatttggttaaagaagccattgcgcaagcgcatctggtggtttacgtcaacggtaccaataaaaaacccgaaacgacgactgccaggaagatcaaatcctatctggaatatggtactcaggtttatccgctgatcaacgcgcgcggttatgctgatgactatgagtttgaggaagatcgtgaggatctttgccgtcagagcggcgctgataatacgcttcgccagaccgttgatgttctggctccggtattaggggcggaggtactgctggaggggcattgcgtgcagggaatgctggcattttcagcgctggcgtatgacgacagcacgcaaagtacgaccattcatccctcccgggagcataatctggcggtatcgcagcaggagtacttttcggtgttcccagaccctctggaaatgcgggcatttagccaaattgatgccgtagcccggacaatcagaaataaggttgccaccttccgggaggatattgtcgaaagcaacaaaggcaaagtccgtgagatgctggggcaatacttacaggtgctggaaacacagttagccggacaccgtaccttcctgaaaggtgcagagccagagtttgataagtgccgtgccgcgttccggaatgcgattgctgagtttgaacggcgtattgtgaataaccgccgcaaccgatggaatactttttttaacgggttgaacgaggctagtgacgctatcgtcgaagacgatttcggcgatagcgacgcgatttcgcaacggattcagcgcgagtttaaaacgcgacgcaccggcgttgaagcagacatgctgaaggatacggaacaggctgtggaggtattgcagcagcagatgctgcatgcggtggaacgtctactggaagatatcaagcatgtggaatttcaacaacgggtcggttttacgtgtagtggtggtctcgattttggcaaggatatggtgttggggtacgacctggggttaggcgattttggctcaatggccttcaaaattggcagctatgcgatgacgggtggcacaattggtagtgcattcccaattgttggaacggcgattggtgccattgctggtgcgctggtcggcgtggtgatgacggtgatcggcttttttaccagcaaagcatcaaaaattcgcaaagcgcagggaaacgttcgtgacaagttggatggcgcaagggagaaggctctggacggcgttgcagatgaagccagcaagctggtggcgaccataaataaggaacttgagattggcctactgaagaaagtgaacgacatgcagagtgccttgcagcagccaattaccatttttgaaacgcaaatcacgcgaatcactcgattaaaaaaccaattagagaaaatgccttatggaacaattcaagcaattcagtattga

SEQ ID NO: 389910 - DNA, 1731 bp, Salmonella enterica
atggaacaattcaagcaattcagtattgagaaacaggcggccattgattcgctgttacaattgcgcggtatgttagaggcgctgggtgaaatggagatagatattggtgatgatctacaaaaaatatcctccgccattaccgccgttgaatctgatgtgctgcgtatagcgttgcttggcgcgttttcagacgggaaaacgagtgttatcgccgcttggttgggtaaggttatggaggatatgaacatctccatggatgagtcctccgatcgattaagcgtttacaaaccggaaggactgccggggcaatgtgaaattgttgatacgccgggactgtttggtgataaagagcgcgaactcgatggtaagcaggtgatgtatgaagatctgaccaaacgctatatttctgaagcgcacctgattttttacgtggtggatgccaccaacccgctcaaagagagccacagcgacatcgttaaatgggttttacgtgacctgaataaactttcttcaaccatctttgtgattaacaaaatggatgaagtggctaacctgacgaaccaggtattgtttgaagagcaggcggcgattaaaaaagagaatctgaaaggcaaattacagcgcgccgcaaacctcaacacggcggaatgcgaacggttgaagatcgtctgcattgcctctaacccaaatggtcgtggcctgccgttctggttcggcaaacctgaacattacgaaagccgctcgcgcattaacgatctcaaaaaaactgctgctgaaattctgaaagccaatgtccccgaagtgctgttggcgaaaaccggcatggacgtggtgaaggatattgttaatcaacgcgttacgctggctcatttacagctcagtgaactgaacgcttttgttgaaaaaaacgaagaggatacgcgccgcttttgtcacgatattaggcagagtcgtaccgaggttaaacggctggccggtgagctatttgaagagctgaacctgatggaaaaacagctcatgggccagctgcgaccgctcagcctggaagatatccgcccgtttatggatgatgagttgggatatacggaagagggggttggttttaaacttcacctgcgcattaagatgtctgtcgatcgctttttcgatcagtcatcaatcgtcacgcagcgcttatcggatgacattacgcgtcagctgaactccagcgaaagctttttaagcggcctgagtgaaggtgcatttcgttctttgggcggagtctttaagggcgtgtcaaaaattaacccggcaacactcaaaacaaccatttttgctgcacgcgacacgattggcaaattaactggctatgtttataaatttaagccctggcaggcaacaaaactggccggaagtattactaaatgggctggcccggcgggtgctgcgtttacgataggctccgatctatgggatgcctataaagcgcacgagcgggagcgggagttagaagaagtgaaagcctcgttagcgaaaatcattaaggagccctttaaagaaatctatgatgtgctgagttcagatgaaaaaatgttcgctttttttgcgccacagattcaaaacctggaacaggtggtcactgagctgaccgcgaaaagccaggttatccgtgataaccagcaaaaactgacgattatccagtcaaagcttgccctgctaacctcactcgcgtcggaatccccgtcagtttga

SEQ ID NO: 389911 - DNA, 1230 bp, Salmonella enterica
atggtatccgcgctaggttggcttgatcacgattcagacgcacggactaaaacgttaaatattcttgcgctctttcaacaaaaagagagccgtgatgaattaggtattggctcgatccgagatagttttgctgaacagttatttccaggaaccagcaccatccagacccgtttacgctacatgctttttattccatggatctaccaatacctcgagaatcaacgcatacccgccgcaaactttagtactcaggccgaccgtgacgaacgcgccttaattatcactctctcccggctcgaagaagattcggccggtacatttggtaaaaactcacgcgagaagcttaaacgcctgcccagctccgtttactggtccgggctgcagcgctggggtattcgcgagattctgtggtcgcaggaggaatatcatcggcgtgtggatgaactgtatcgtgcacgcacggaaatcagcgagcgagaatactatgaaaaaaatcggtgcgatatgggcgacacaagcgcgtataaaccagcccagagctggcactccagcctgcctgcgccaccgtccaactttcctgatgaggcaacattcgccctaacacggcaggaagccagttttcttcgcgaccgtattcaatcgtcatgtaaaggcagcctactggcatggttaaccctgcatagcgaaccagcagacgtaagcgcaccgtgggaacacccggattacgcgaaattcccggacgctctccaggaactgctgacccacgcgcggtttttttcttatacgatgcacggcgcagcattgctatataactatttgcttgccaaagaacgagcagataacgaccttctgtctcaacaccgtgacaatttcgtcgcctggtttgccgaaccggttcgcgagaagatcgctacctggccactcgaccgcatgtgggaacttactgccgggcctggctatagcattagcctgaaaactcgccgctttgtggagcagtggattgcactgatccgacaatcctctgggacattactcaccagtaaagaagcctgtgcacttatccgtgcccgcgaaatagccctcaaaggtccgcgttcgcgctttaaaaacagacgtgcactggagcaatggagtggatatgcgggaaccctgcggctggtctatcgctggcataacgtccagataatacttaacgatctggcgcacggtctcaggagagaagaatgctaa

SEQ ID NO: 389912 - DNA, 1797 bp, Salmonella enterica
atgctaaaccccaacaatcgcagtttatatacttcggcattgacctctccgccctgcatggtgtttgacgaagccatcgcaaccagcttttcactcgacccggtatttttattacaggcaccggtctatttggctttcacggcaaccgacagcaatcgcgctcaggatccgctatccatttttgaagccattcgtcgttattccgaacgtatcacggtgtacgttcaaaaaggtcgcattcaagttcccacaaagctcaagcctaatcccttgttcggtttgcttgaagatatgattgttgaatcaaaagccaaaggccgcggggtctttcaccccaaaatctgggcgattcgttttatcaatcctgaaacagacgaagtgatgtaccggttggtagtactgagccgaaatttaaccaccgattcgtcctgggacctctcgttgcagttggacggctaccctgtaaaacgtaagcaaagtgccaataaagcactggtgcatttattctccgtattgcccaaacgggcgacgggaaaaatggcgaaacatcgccggaagcaggcgcagcgcttcgcagatgaactgttgtatgttgaatgggaatgtcccgctggttttgataaggtcgcgtttttcctgcccggagaaggttacgactggaagccacccgaagcggatcgtgcggtggttatatcaccgttttgcaccgatgaggccctgtgccacatcgtggaacattgccaacaagctgatgccctgatttcacgtcctgacaccctgctcgctttgagtaaagagacgctcaaccttttcacgcaccagcttcatcttgacgacgcagcagaagggcagatgcacgacgagagctcacctgatgaaatcattgcctccggtctgcatgccaaagcttatctgtttgaaaatggccgagacagcgaactggttctgggctcagcgaacgccaccagcgcggcgctactggggaaaacaaactgcgaaattttagtctcgctcaagggtaagaaaaagcacacgggcactattgatgacctcattggcagcgacgggatgggaagctatctgcaagattttgaccctggccagctgtttgagcccgatgccctgcgtatcgaagcagaatgccatcttgaacaggcgcgtacgttgcttgctgaagctgcattgagtcttcatggtcaccccggtcaaaacgaccaaagctgggcattgtggcttattggcgagattcctaagttaccgggagttgttcaggcaacagcatggcccataacggtatcagaagtgttgagttgcaatctacaggacccgaataaggagaataaaagagaactcggagagttttcagtccaggcaattaccggactgacagcgttttcccttaaaacatcgcacccggacgtatcgctcaggttcgttctcaatctgccaattgatgccttaccccccgatcgcaatgcaataattttacaaaactgcatgcagaatcaggattttctacgttacttgttgatgttgataggtgaaacggggcatcaatccttctttgccgaaaataccttcggtgatggtcatttctttacagggctagccagtggagaggaattcagcgttctggaagagctgacacgtatctatagccgcgaacccgagcgtttaaacgatatcgccgcgctggtggaaaatatgcgaaaagggaagaacgatatgattccgcaagattttcttgcactgtgggccgtgtttgaatcagccatgggaggacgatatggccgataa

SEQ ID NO: 389913 - DNA, 3150 bp, Salmonella enterica
atggccgataagcatcccagtattattgccccactcacgggcttgaaagatttccagcaacgcaccgtaaattatgttttccagcaattttacggtgataaaccgcaaaatcgctttctggtagccgatgaggtggggctgggcaaaacaatggttgcccggggcatcatcgccaaagttatcgaacatttgcaggataatgtcgatcgtatcgacatcatttatatctgctcaaatgcggctattgcggcacagaatatcaaacgcctgaatgtcagtaatgaggcgcaattttcacactcaacgcgcctgacgtttctgccaaagcaggtgcggtctctgcgccaaaacagaataaattttatcagcctgacaccaaacactgctctcgatcacacccgaagccgtggaggtcacaaagaagaacgcgcgatcttatatcgcattttgtacgatttaccgttagcaaaaggcatgcgccgtgaacgtttacgcaagggaatgcttaacctgctacaggcagcagcaggcttttctggctggcattccacggtagaccggctatctgttgatgacattgacacggaactggcaaaagattttcgtcgcaaggttctggacgataccgaactgtacgctcaactcaaagaaggttgtgaatgctttgccgatgatgacgaggatagcgaaattcacgattctgaactgcgctacacactaatcggaaaactcagaagtaaactggcttcagtgtgtttgtcagcgctggagcccgatctggttatccttgacgaatttcagcggtttaaagctttacttgatggtgacgatgaagccgcactgctggcaaaagcactctttgaacagccggacgtacgcgtgctattactctccgcgactccgtataaaatgttcactctcgatcaggaaagcgaaggggataatcactacgcggactttattcgcacattgcagtttttgtacaacgatagcagtcaaatcaagggtattcagcagcacttactcgatcaccgtactgcattgcacgcttccacaaatgccgcagaaacgaaaaaagcactggaacacgctttattacaggtcatgtgccgtaccgaacgggtaacgatgacgcaaaagcttgatgcgatgaccaaagaagttgcacaaccggcaatgattacgctctccgaccttcatcacgttgccgccgttgatgctatcgcaatggaggtacaagctcgcgatatcatcgaatactggaaatcaatgccttaccttctcaattttctaaagcattacgagctacgtactcttattgacaaagcactggaatacccttccgatacattgggcaaactcgtcaaatcaataaagcctcagttactgtcgaaggcgaaattagagcgctacaaaccccttgatgctgcaaatccccgcatgcgaatgctgtttgaagacacgctggataaagacatgtggcaacttttatggatgccaccttctctaccttacattacgcctggtggggtctatgccaacaaaggcagcttgactaaaacgctggtattttccgcctggaacgcggtacctaatgcgattgccactgtttgttcttatgaggcagaacgacggatgattggtactgatccccagattctacatagtcagttcaaaaagaaagtaaaaccgctgctcaattttgcaaaatcatcaaaagatggtcgtctctccgggatgcctgttattgcctggatgttgccatcaccgacactcgcccgccatattgatccgcttgaaattgccctccagcatgccagcgagccgttgagtgtaaaggccgtaagggcgattgcaacggctaaatgtgaagcactgcttgaaactctggataacggtgagccgggtacgcgtgtggacgagcgctggtattgggcagcaccggcattactggatgctcgtaccgaaacgccagactggtggcagggcgaacattactggtacatagggtcaacgaaaaatgagagtgccgaaaactttcaggaacatatcgacctttttatccaaatggcaaatggcgagatctccctcggcccacgccctgatgacctggctgaagtgctctgtgacttagctcttgctagccccggtacgtgcgccctacgggcgctcaatcgcatcgacaatggcctggcagccgattcagcagagatgttatccggggcagcacagatcgcttctggatttcgctcactctacaacctggcggagagcatttcgctactacgcggcactggcgatgacacttactggcggctaacgctgcgctatggcatcgatggcaatatacaggccatgctggatgagtatgttcatacactgttagagtcgatgggattacaacatgaatccgctgaagcgcagttagcggctattgcatcacgcattcaggccgttgtttcgctgcgtaccacgcaactgaatattgatgagttcaaaacgaaagggggcaattattcctggggcgatttgcacacacgatgtcgctttgctttacgctacggccagcagagggacgacacaaatcaagccgtcgcacatgcggagtcggtgaaagatgcgtttaactctcccttccacccctttgtattggcctccacctctatcgggcaagaaggactcgattttcatacctggtgccacgcggtgatgcactggaatttaccgtcaaacccggtcgatatggagcaacgtgaagggcgggtgcatcgttataagggccatgcagtaaggaagaacattgctgagcattatggtttgcgtgcacttcattcgttggcagaaagctcagatccatggacacagctcttcgcacttgcggcaagtcaccgtaaagcaggacaatcggagctggttccctactggatttttgaagaggggacatcttgcgttgagcgccgggttcctatattgccgtacagcaaagagagcattaagtttaagcggcttaaacgagaactagcactctatcgtattgtattcggccagccgcgccaggaagatttattgtttggcctgaaacaaagtggtaatgagtctttaactgatttttcggagtggcttatttctcttgaaccgccaaagatataa

SEQ ID NO: 389914 - DNA, 567 bp, Salmonella enterica
gtgaaaagaaaatatcttacgcaagaagagattgaaaaactgctgtcagcgaccgacagaatgcccttcccggaaagaaaccgctgcttaatcctgatggcgtttattcacggcttccgggccagtgagctgctggggctgcgcttgtcggatattgatcttgcaggaagacagctttatatccggcgcctcaaaaatggcttttcaacgtgtcaccccctccttcccgatgagtataacgtactgaaaagctggctcagggccaggaagtatcttgagaaaggggctgacggagactggctgttcctgtcgctgcgacggcatccgctcagccggcaacaatttttttacatacttcgtgaggcagggcggttagccgaattaacgatagcgccacatcctcatatgctgcgacatgcctgcggctacgcccttgctgataaagggattgatacacggctcatacaggactatctggggcacaggaatatccagcacaccgtaagatacaccgcaagtaacgccgggcgttttcatggaatatggcgaaaaaaacgtcgagtataa

SEQ ID NO: 389915 - DNA, 468 bp, Salmonella enterica
atgaatgggctggctgtcagtgtgacccgttacagtgactgcgccgcccacgcgggcgatttcccgcgccgctttgttaatcactggccggattgcgtcactcaccgttttttgtcccggtacaaacatggcgtcgccacggaagaccaccctactgtgctggtcatcttcgtccacggtcagcaggccacgggcgatttcgtttgccagcaggattttcagccgcagcttatgaaccggcacgggcggcggcggcagttttataccaatcgcatcaatatgctgttgtacggtgacggtctgcacatccatccggtggctgtaaaggccaaacagcgtcagcatcgccaacagggctatcccggcgctcagccagaccggcacccggcgcatccgccgcagtcgtccgcttatcgccccctgaaagtcaggcgagagcgcgggcatgaccggatcgcgacgctgtga

SEQ ID NO: 389916 - DNA, 525 bp, Salmonella enterica
atggtcgccgtctggtgccttccgcgtctgcatgagttgctgcaccgactaaaaaatccggtcctgattctcggcattggcggttttatactgggtattctgggcgtcattggcgggccgcttaccctctttaaaggcctggacgaaatgcaacaaatggcgtttagccagacgttgggcgcgggagattattttaccttagccgtcgtcaaactcgccgcgctggtcatcgcggcggcgagcggctttcgcggcgggcgcatttttccggctgtgtttatcggcgcggcgctggggctcatgctccatgctcatgttgaggccgtacccgcggcgattaccgtctcctgcgcgattcttggcttagtgctggtagtgacgcgtgacggctggctcagtctgtttatggcggtagttgtcgtaccggataccaatctgctgccgctgctctgcattgtgatgctccccgcctggctattgctggcgggaaaaccgttgctggccgccaaccgtcacgaaccctaa

SEQ ID NO: 389917 - DNA, 570 bp, Salmonella enterica
atgaatgcgatggaaaaaaactactctgagctggtgaaagaacttcagcgccagttacccattaataaaatcgctgaaactctgcagcggcttgtatcagagcgggtttctattagagatttacgtcttattttcggcaccttaattgactgggcgccacgtgaaaaagatgtcctgatgttgacagaatatgtccgtatcgcgcttcgccgtcatattctgcgtcgtcttaatccggaaggaaaaccgctgccgattttgcggatcggcgaaggtattgagaacctcgtgcgtgaatccattcgccagacggcaatggggacctatactgcgctgtcgtctcgtcataagacgcagatcctgcaacttatcgagcaggcgctgaagcagtcaaccaaattattcattgtcacttctgtcgacacccgacgtttcttgcgaaaaattacagaagccaccttgttcgacgtaccgattttgtcatggcaggaattaggagaggagagccttatacaagtagtagaaagtattgaccttagcgaagaggagttggcggacgatgaagaatga

SEQ ID NO: 389918 - DNA, 1281 bp, Salmonella enterica
atgagtaagtctgaaaatctctatagcgcggcccgcgagctgatccccggcggtgtgaactcccctgttcgcgccttcactggcgtgggcggcaccccgctgtttatcgaaaaagcggacggcgcgtatctgtacgatgtcgatggcaaagcgtatatcgactatgtcggttcctgggggccaatggtactggggcataaccacccggctatccgcaatgcggtgatcgaagctgcggagcgcggtttaagcttcggcgcgccaaccgaaatggaagtgaaaatggcggaactggtcaccaacctggtgccgaccatggacatggtgcgcatggtgaactccggtaccgaagcgacgatgagcgctattcgcctggcgcgtggttttactggccgcgataagattatcaaattcgaaggctgctaccacggccacgcagactgtctgctggtcaaagccggttctggcgcgctgacgctcggtcagccgaactcgccgggcgtgccggcagatttcgcgaaacatacgctgacctgcacttataacgatctggcgtcagtgcgcgcggcgtttgaacaatatccgcaggaaatcgcctgtatcatcgtcgaacccgtggcgggcaatatgaactgcgtcccgccgctgccggaattcctgcccggtctgcgcgccttgtgcgatgagttcggcgcgctgctgattatcgacgaagtgatgaccggttttcgcgtagcgctggccggagcccaggattactacggcgtcgtgccggacctgacctgtctgggtaaaatcatcggcggcgggatgccggtaggcgcgtttggcggtcgtcgcgatgtaatggatgcgctggcgccgacgggcccggtttaccaggcgggcaccctttccggcaacccgattgcgatggcggccggtttcgcctgcctgaatgaagtcgcccagcccggcattcatgaaacgctggatgagctcaccacccgtctggcggaaggtttgctggaagctgccgaagaagcgaatattccgctggtggttaaccatgtcggcggcatgttcgggattttcttcaccgacgctgagagcgtaacttgctatcaggacgtgatggcgtgcgacgtggaacgctttaagcgtttcttccacctgatgctggaggaaggcgtatatctggcgccatcggcgtttgaggcgggctttatgtcggtcgcacacagcatggacgacattaataatactattgacgccgcgcgtcgggtgtttgcgaaattgtaa

SEQ ID NO: 389919 - DNA, 573 bp, Salmonella enterica
atgccagcgttaattaatccaggcaatcatcagttttcggttataaatttcttgcctcaccaggaatatgcgggatatagtttaaaggttgccgcaaaatcggcagccgggcgtggaaacccgagtaatctaacggcgacaccagacgcgccatgcgtctttttttgtgtctttgcctttgtgcacctgttacctgtacagcggtttctttactgttgtagctatcgtgtaatggtggctcaggcggggctgacctcggtcaggccggtatccgttagagccggtatttccacccccgtctgggctaccacccatgagcgtggaaactccggtggtagcgttacccactatctaacggaggttgccattatggctacagtccctgctttatctcaccctgaatttacctttgtctttctggctgtccgccgtacagaccgtgatgcccgtccacgtcctgtgcgtgtaatcgcagactgtgagcatgctgcacgccttaaacttgccactgaatttatcctgagctttgctgcccgtatccctgtgaaaaacgccggggaggtggttgcatga

SEQ ID NO: 389920 - DNA, 276 bp, Salmonella enterica
  misc_feature (223)..(232): n is a, c, g, or t
atgaaaaactttttcgcagtctgcatcattccccttgtggtagcctggtccgctactgcatcagcaaaagaagggatctatatcaccgggaaagcggggacatccgtagtaaatgtctatggaatcaactcaaccttcagccaggatgagatagtcaatggtcatgcaacgttacctgaccgtaccaaaggcgtttttggcggcggggttgctatcggttatnnnnnnnnnncggttatgacttttatgacccattccagcttccagtacgtttag

SEQ ID NO: 389921 - DNA, 543 bp, Salmonella enterica
atgttagaaaagatagagtttctggggggagaaatttcccctttcaaaaatacggaaaaagaaagagccttagatgatctcctaatgattacagggaggcttccagatgattatcgtggttttttatacgattatggaggagttgttaaattcaattgcatagtgatttttaaaggcatagaaatgtctgtttgggctgacaataaaggttttgatactattgattatttttatggattgcttgatttaaataaagattatttgcttgcaaatgctattaatacatataaagaatattttaaaatgttatggattccaatcggttgttcatctggcgggaatcaaatttgtttatgtattaaagggaataagaaagggtcagtgtggttttgggatcatgaaatggatccaattattaataataaacctagttcggggttgactctaattgcctccagttttaatgaatttatttccaaacttgaaaaagaggaagttgataactccccatcgaaagccataagtatttctttggatttttaa

SEQ ID NO: 389922 - DNA, 225 bp, Salmonella enterica
atgtacccgatttgtatattgataattttaaaatatccaccgaccagtgccgatatcttctggaaacgctgggtttttgtgggattatggaaacaaaagaacataaaggatatcttacacatttcacaaatccagggccccgtagatttctggatcggaggcgatggaataaatcgcgaggctctagaattctggtttggtgagtataaatcgattgttatgtaa

SEQ ID NO: 389923 - DNA, 1068 bp, Salmonella enterica
atgaataacgaggagaccttttatcaagccatgcgtcgtaagggagtgacccgacgcagctttctcaaattctgtagccttgccgccacatcgctgggactgggcgccggaatgacgccaaagatcgcctgggcgctggagaataaaccgcggattccggtggtctggattcatggactggaatgcacctgctgtaccgaatcctttatccgttcctcgcacccgctagccaaagatgtgatcctctcgctgatttcccttgattatgacgacaccctgatggccgccgccggcgcacaggccgaagaagtctttgacgatattaccactcgctacgccgggaaatacattctggcggtggaaggcaatccgccgttaggagagcaaggaatgttctgtatcagcggcggccgcccgtttattgaaaaactgaagaaagccgccgcgggcgccagcgctattatcgcctggggaaactgcgcctcctggggttgcgtccaagccgcccgccccaatccgacccaggcaacgcctatcgataaagtgatcaccgacaagccgatcgtgaaggttccaggatgtccgccaatcccggatgtcatgagcgccattatcacctatatggtgacgtttgatcgtctgccggaactcgatcgcatgggccgtccactaatgttctacggtcagcgtatccacgataaatgctaccgccgcgcccattttgacgccggtgaatttgtcgagagctgggatgatgacgccgcccgcaagggatactgcctgtacaagatgggctgtaaaggaccaaccacctataacgcctgctcctccacacgctggaatgacggcgtctcctttcctatccagtccggtcacggatgtctgggatgttcagaaaatggtttctgggatcgcggctcgttttatagccgcgtggtggatattccccagatgggtacccattcaaccgccgatacggtggggctgaccgcgctgggcgtggtcgcggcgggggaacagttagcgcaagccgaacaacagccggacaatgaggataaacaggcatga

SEQ ID NO: 389924 - DNA, 498 bp, Salmonella enterica
atgatcgtgacaccacaacgtagccagcatgatgttacgtataatattggcgttatccggcacctggataccaatcgcatcttcgatagcgtacaccgatgccagagcatgtaccccggtacagacaccacaaatacgttcaacaaacgcccaggcgtcacgcgggtcacggccttgcagaatgatctccagcccgcggaacattgtgccgcaggaaacggcattggtaatgacgttttgctcatcaatgttcacttcgcagcgcatatgcccttcgatgcgggtaatcgggtccacgatcagacgacggccggcgtcgttaacggtataaccctgggtttgatactggttactcatgcctgtttatcctcattgtccggctgttgttcggcttgcgctaactgttcccccgccgcgaccacgcccagcgcggtcagccccaccgtatcggcggttgaatgggtacccatctggggaatatccaccacgcggctataa

SEQ ID NO: 389925 - DNA, 480 bp, Salmonella enterica
ttgctggctgaagtcgttggcaatgtccggaaatgcgccgtaactcagcacgcatttatccgacagaccggtgccaatttgactccatgctttattgaactggccgatagccagcgcgtccggaaccatcacgttgttaatgaagtcggcggtgcgggtgatgatcgactgcaccaggttgaggcgctccatattgatagccccgaccgcgccgctttgatcgagattgatcgcgcacggcatcccgccgacgatccagttaggatgggggttcttaccgccaaatatggtatggattttgacgatctcgcgctggaagtcgagggcttcaagatagtgggcaaagcccatcagattagcctctggcgacaatttgtactgtggatgtccccaatagccgttacggaatatcccaagctggccgccatcgacaaatttcttcaatcgattttgtacgtcaaagaagtagcccggcgatga

SEQ ID NO: 389926 - DNA, 306 bp, Salmonella enterica
gtggtacgcgataagcgttcgggcaagcgggccgacttccatggcatgaccccgccagcgcggcgctttaatccaggagtaacgttcctgctcgttgagctgctggatatgcgtatcgctgcctttgacatcacccgggttgtaccagggatcggtaatgccgtcaaaaggatgacgacccagccgatcgtccggatagcggtaccaggcgtgatccacaaactcctgtatctgctgcggatcggccaaatctaccggcatgacatttttaaaatcgccattgaccaccgcgccgcccggcattaa

SEQ ID NO: 389927 - DNA, 1890 bp, Salmonella enterica
atgagtaataaaaaaaatctgtccgcagaagagacggatcttacgcgtaggaaactgttaaccagtgccggtattcttgccgcaggcggtatgttatccggcgcggtaaaggctgatgaaaaatgcgccgtcaaggcgaaaccggcgtgggataaaccgtttaccggcgaaatcccggaaaaattgccagaaggatataatattctgttagtcgtgaccgaccaggagcgtttttttcctacgtttcctttcccggtacccggcagagagcggctcatgaaaacgggggtgacattctgtaatcatcagaataccagtaatgtctgtacgccttcccgctccgtattgtataccggcttacatatgccccagacaaagatgtttgataatctgggattaccctggatgccttatgaccttgaccccgctcttggaaccacaggccatatgatgcgggaactgggatactatacggcctataaaggtaagtggcatcttacagaaaaactggagaagcctttgcctgacgaaaaagatgaggatattgatgtcggggatattcctgaaccagaattacataaaattatggaaaaatatggttttgctgactatcacggcatcggcgatattattggccatagtaaaggcggctatttttatgattcaaccaccacggctcagactataaattggttaagatgcaaggggcagcccttgaatgaccaacacaagccctggttcctggccgttaacctcgttaatcctcatgatgtcatgtttattgataccgataaagagggagaaaaggtacagtggcgtggcgagttggatcaggatgataataccctggcgcccacgcagccgccggaaaacgagctttatcaggcaagctggccgaactatccgctgccggcaaacaggcatcaatcattcaatgagcagggaagaccgccggcgcatcttgaataccagacggcgcgcgctgcgctggaagggcagtttcctgatgaagatcgtcgttggcgtaaactgcttgactactatttcaactgtatccgcgattgtgatactcaccttgaccggatattaaatgaacttgatgccctcaagttaactgataaaacgattgttgtatttactgccgatcatggcgaattaggcggaagccatcagatgcacggtaaaggcgcttccgtttataaagaacagatccatgtaccgatgattatttcccacccggcgtaccccggtaataagaaatgtcaggcgttgacctgtcatcttgatatcgcgccgacattagttgggctgaccggtttgccggaagaaaaacagcaccaggcgttaggcaaccgcaaaggcgttaattttagcggattgctaaaaaacccggaaggcgttgcggttaatgcggtgagaaatgccagcttatattgctatggcatgatcttgtataccgatgcccattatctccaccgcgttatcgcgctacaaagagataaacaaaaaacggtggcgcaaatcaagcaggaaatatcccatttgcatcctgatttcagccatcgttcagggacgcggatgattaacgatggccgttataagtttgcacgctatttctcgctaagggagcataatacgccggaaacctgggaggatcttattaagtacaacgatcttgaactttacgatcttaaaaatgatcccgatgagaaccataaccttgctgctgataaacagaaatatcaggatctcattcttacgatgaatgaaaaactgaataaaattatcaaagacgaaattggcgtggatgacggcagttttatgccggatgcggcccatgagccgtgggatcttactattgagcagtttaaccgcatggcgaaagattaa

SEQ ID NO: 389928 - DNA, 642 bp, Salmonella enterica
atgcacaaaaatggaaaatttatccccctgcttgcgttgggattcacattctttttatctggttgtgattactttgcagataaacaccttgttgaagaactgaaaaaacaacaaaaagaacaagaaacaaagataaatctgttagaaaaacaacaaactacgattatcaacacgacccaaaaggtcgccgaagtcgttggccgcgttgaacgcaaacaacggctattcgactacacagaactggatccatcacaaacgcgctattttattattaacaacggcaatatcggattagccgggcgtattctatctattgagccaatagatgatggaagtgttattcatcttgatttggttaacttactcagcattcccgtatcaaaccttgcgtttaatatgacatggggtacgaaaaaaccttccgaggcaaaagatctgcctcgctggaaacaactcctgcttaacacgaaaatggattcgacaatcgaacttttaccgggaacatggacaaacgtcacgctaacattaaaaggcgtatcgcccaataatcttaagtatctaaaaataggtattaacatggagaatgtcatattcgacagcatacaacctattaatgatacgaaaaagaagccaaaaaaataa

SEQ ID NO: 389929 - DNA, 273 bp, Salmonella enterica
atgcagtataagaacaaagcaaaacatattaatataagagatgggattctgttactcgctaaaaaattcgacctaacattgagcgagaaaaaagtcatttattacgtggcagcaggattatctgttaaaagttgctcaaatttattagatcgaaatataaaaacgatttcaacacaaaagagatcagcctataaaaaaatggatattactactgatgttgaattaatccatttgatgctgaatgagttttacatatcagtcgatattacgtaa

SEQ ID NO: 389930 - DNA, 351 bp, Salmonella enterica
atggcgagcgtacagctacgaaatgtaacgaaagcctggggtgacgtggtggtatcgaaagatattaacctcgatatccatgacggggagttcgtggtgtttgtcggaccgtcaggctgtggtaaatcgaccttgctgcgtatgatcgccgggcttgaaaccatcaccagtggcgacctgtttatcggggaaacccgtatgaatgatattccgcctgccgagcgcggcgtgggcatggtattccagtcttatgcgctctatccccatctctccgttgcagaaaacatgtctttcggcctcaagctggcgggcgccaaaaaagaggtaatgaatcaacgcgtcaacccgtag

SEQ ID NO: 389931 - DNA, 177 bp, Salmonella enterica
gtgatggatgcggtcgtcaagtacgatctggcgcgttttggtatggcgggctccagcattgcggttaacgttaataatctgctcgaccgcgaatacgtcgccagctgcttccagacctacggctgtttctggggcgcagaacgtcaggtcgttgcaacggcaaccttccgtttctaa

SEQ ID NO: 389932 - DNA, 672 bp, Salmonella enterica
atgccattatttttctttattggtggggttttatataaagatacaagatgtataacaaattttatagcgcatgttataaaaaaacagttaccttatcttataataacttatttgattattggtgctattgcattattaattaatgtacgttatggaatacacacaggtgatgctttttcgacaggactatatgaaacggttaaacttgctataaaatcaaattttcataacaataaaatgtttttaacaggttggtttctgtttgcttatatatttgtgagcattttgtcggtgattattataaaaagcataaaacgggtcgttgttagcaatgctttattattatcggtattggtggcgattagtgcattattaataactgtctcaataacatatttatctcctcagtatattctggtgaaagactataagctgaattttatatgccaggtgttaaccggtatgtcgttttatatttttggatatgtgataagaaatcagatatatagcttattaaatttctatatttttattttattaactgtaatattatatgtttcgaaaagttatggtttctctacgcagacaattatgtcatggagttattatccggatgggttaataactgtctcttatacacatctgacgctgccgacgagcgatctagtgtag

SEQ ID NO: 389933 - DNA, 504 bp, Salmonella enterica
ttgattgagccggaagcggcaggcggcggatttaaccttattcctatcgccgcggcaggtaattttagcgtcgggctactgctgttcatctttattacccgggtggtcacgacgctgctttgcttttcttccggcgcgccggggggcattttcgccccgatgctggcgctgggaacgctgcttggtacggccttcggtatggcggcggcagtgcttttcccgcagtatcacctggaggccggtacctttgcgattgccgggatgggggcgctgatggcggcgtcggtgcgcgccccgttgacggggattgtgctggtgctggagatgaccgataactatcagctcattttgccaatgattatcacctgtcttggcgcgacactattagcccagtttttgggcgggaaaccgttatactcaaccatcctggcgcgcactctggcgaagcaggatgcggaacaggcggcgaaaaaccagaatgcgcctgcgggcgagaatacttga

SEQ ID NO: 389934 - DNA, 219 bp, Salmonella enterica
atgcactcgcagaacgtgtcgcgcctgagcctcgcggcccgcacgctgcaaacctcgatattcgtcaaaaacggcccctcctatgccgggatcggcgtcggcggcgaaggctttaccacctttactattgccacaccaaccggtgaagggaccacgtcagcgcgtacttttgcccgctcccggcgctgcgtactgaccaacggcttttctattcgctaa

SEQ ID NO: 389935 - DNA, 192 bp, Salmonella enterica
gtgactacccaggaagatagcgtcattgttattcataatagtatgaaactgtatcggcagatcagagagcgcaatccgaatgcaaaactggttatgcacatgcataacgcatttgaaccagaacttcctgataaggatgcaaaaattatcgtgcccagtcagtttcttaaagcgttttatgaacccgcttga

SEQ ID NO: 389936 - DNA, 132 bp, Salmonella enterica
atgtacacgttttgtgagttcattgaggatgatttcgcgtgcgcctggcaaaccttcaacatttcgcttgtcataaacgagttcgacgaacatcgccatttcctttttactggttggatgaccagtatttaa

SEQ ID NO: 389937 - DNA, 180 bp, Salmonella enterica
atgatgaagagcttctggatattacggatgattcccccttactggaagatatactggcctctctgtcagaagatttataccctacatcagaagaaaatgtacaaagtatttataaggaataccagagtggggatgctgcagcaggggagactgaagttgtattatgccgaggtacaatag

SEQ ID NO: 389938 - DNA, 426 bp, Salmonella enterica
atgactttgaaaaatttttcgagtgataataaattacttttatcgctttgtgctgaagcaaccttaaatcattggtcttttgagggacaagagcttagtgttaatctcacaacttatgatgatgatgagttgattattattatcgagactgatactgttcattcatcacctctttttcctaataaacttttgaatatttgcagaattgtaatacaagatatgcatgaagtattggattctcaaaatgggtattatattcctccaaaggactttagcaatttaatgaagttttctgggaaaaattactcattgtattatggcagaaagaatattatgagatataacctagctttcataggaagtaagaattttctaagttgcccgctaacttctttagatagttctattaaatgggaaattagataa

SEQ ID NO: 389939 - DNA, 357 bp, Salmonella enterica
atgaataaaatatatatacctatcagggcagatattgataatgaagatagcgatgatggctatttctcattaggttttatatttaattatgatgacagcatcattccacataatatagggttatgtcgtgatgagctagaggcggaacctaattctgtttatatagaagcagatgaccagatctatgggtttagaactaaaaaggcgaaatattcaattagtgataatatattgacactaacaattcttgatgaaaatgtcttttactgggataagtctaaaacagttaatattaaaatagatgaaaacaaaattgatgaaatagaaaaatgcctgaaatctatttttaatatttaa

SEQ ID NO: 389940 - DNA, 234 bp, Salmonella enterica
atgatgaaggctcatgataaaggtatgcgaggtgggaaaggcatattaactgttgaaggtcttcctgtgtgtgacttctgtaaacgtagccttaaaaatatggctcaacatttggggcttgaagactttactgttcatgaaaaatatacgggtctcacttatagatttaaaggtaatgatttacatcctgttcgtaaaggcgggaaaggatttaaagggtgtggaataaaatga

SEQ ID NO: 389941 - DNA, 558 bp, Salmonella enterica
atggctaccgagattacttctattgctgtccagtttccctgggctgcgttgattactgctattgctgggctatctggtgcacttggtggtgcatttctggcaaataaatttgccgaaaacagatggtacaaacaggtttcttttgaaaaagagaaagagcgtatcgcgatgcttcgggaaaagggtgaggaattacacatccttgtctcaaaatggggaaaggcgactattaattaccagctttaccaacttcgagtgattaagggagtattaacagaggaccagttacactcgcttgcggctgagctttcaactggtggcgatgttcacgacagaatggatgcattgttatatctctacttcccatcattggataaatttatgaaggaagttcgagaacatttgtcagaaggacataaaatttaccatgcggtaatcaacggggcattggatcgggataagggtttaactatctttgacaaggaggctactaatgtagaagccgcaatagaaaaaattaaaatgggtataaggaatgttcttcagaacttcaattaa

SEQ ID NO: 389942 - DNA, 459 bp, Salmonella enterica
gtgcaagtagatactgattttataagcttagacacattggtggcgactcagcaagcagcaaagtgggctggtgttgccgctattgctgcatgtatatcgtgttttgcaacgattgttggtataggtgtagcgtggagatcattacatcaatggaagccacaatataaggaaaattcaagacttcaattgattgatacattggtggcttatcaacaatgtttgataagcctaccaaaagatctttctaaagatccggagtgtaagcataggaaagaatttttgaaagcaagtattgaagtagatatgagaggtgtaatttatttgaagcaacataataattcagaattaaaagaagagttagaaaaccttcgaattaaaggtgcccaatttgttgcaggtaaggtaagtaaacctgagttggcattgatctcatctataataatgctcattgaattataa

SEQ ID NO: 389943 - DNA, 249 bp, Salmonella enterica; identical to SEQ ID NO: 376948

SEQ ID NO: 389944 - DNA, 207 bp, Salmonella enterica
atggaacgtgatgaactagaagaagaccgcgcagcattcattgcgggtgagattggtggtgcagttggcagtgtgatagctcacgggatagtgataagccgcgatgcgattgtggatagcttggaggctaagcgaagagcagtgggaaacgtaattcacaaaggagttttgcgagatgcggctgctatggtaaggaaggggcagtaa

SEQ ID NO: 389945 - DNA, 273 bp, Salmonella enterica
atgcttgaagctagagtagctaaactggaagctgatattagctatattcgacgtgatattgatgagcttaaaatagatgtgaaatcaattagccaaaacatgactattgctcttgagagactggaaagtattaaaacctctctagataaaaagccttcaaccgatacagtagataaaaaaatatctgacgcaaaactagccgtcttacttggagttccgaccctcatcggaataatgactggcctctacaaattagttcagcattttctttaa

SEQ ID NO: 389946 - DNA, 456 bp, Salmonella enterica
gtgtcgaataacaagcaagctagaatagcctttgtttattcaggcagcgcagacttagtgaacgctggggattcaactcctactcttggcatatcatgtaataaatttccttcggaaaaatccatagtagttcatttcggtgttattggattcaacggtaaggacaactactctctggagattaaaatttttctcaatgaagaagacgttactttgtcaaatctgaaacataataatctactgaactataaacccaagtggagtaacgacggtgaattcgttgcgctaatggctgctgctgaatcttttactgccagagcacctggaatttaccgtatcgaagcaaacttactattcagagaagccaagcctgacaccatttgggaatcgattgattcaaaaacttcatattttgcagtggataagaattggagtagtaaaattgacaactcctaa

SEQ ID NO: 389947 - DNA, 216 bp, Salmonella enterica
atgaacaaattcatagcaacaccgcacagacctgaaatttctgtcagatacgatgagcatgacaattcgcttacaatttctatcaatcactgccctggtgttaattcggaagaattgaatatctgccgagaaattgagatgcacgtaggggaagttcctcgcctgatcgacgccctcactaaggcatacgaatgcgctactggagagaagccttaa

SEQ ID NO: 389948 - DNA, 798 bp, Salmonella enterica
atggctgctttaccttacatgcaattgtacatagctgattatctggcagataccatgcatctgtctacagaggagcatggggcttatttgctgttgatgtttaactactggcaaacggggagagctattccgaaaagtcgtttagcaaaaattgcacgacttgataacgagcgttggatttccgttgaagagtcgttaagtgagttttttatcgacaatggtgaagaatggatacatgaacgtattgaacaggatttggcatctgttcatgcgaagctggaacaacgttctgccgcaggaaaggcctcagtagcaaagagaaaagccaataaaacaatgaaagttgaacgagaaagcaacgtgtgttcaacgctcgttgaaagttcgttagagcggaatgctaacggaaactcaactaataaagataagaataagaataaagatctaaaagaattaaaagatccccctaaatcccccacggggggagatagaaataattttaatccgctttcgattgaattaccggaatggctatccccgactctttgggcggagtgggtgggttatcgcaaacaacttggtaagccaattaaaaccctgcaaggggccaacggctcgattaataaactcgcagcatacaggacgcaggggcatagccctgagttcgtggtgaaactgaccatggaaaatgagtggagggggctacttgttcctgaggaaactgcgagcaaaaagcgtcgtgacgtaaacgaaatatctcaacctgataattcgatccctaccggattcagggggtaa

SEQ ID NO: 389949 - DNA, 606 bp, Salmonella enterica
atgagcaacatcgacaaacaggcgctacgtgaagagttccgcctcatgcaggcgcactatagcgacccagcagaccgtgcacgacaggttatttatatcgccgcagaggcgctgctggatgagaatcttcaactccagcgggaaaaagacgcaacagaggccgtagcgctggcactgcgtgatgatatgcgacaggcgcgggagcaactggcagccgcagaaaagcggaacgccgaactcgaacgcagcgaaactcagttaatcgacgaacgcgataatgctgaatctgccctcaatgatgcctacaaagccgtaatgggccaggcaccagaatggagtaactggtttagcttcgagaatgcgatagatgaaattgagttggcgtgcgagctatggcgcaaccagacagatgacgttatccagttccgccagcgcatagcagaacttgaggcgaaacttgaaactgctgacaagttgcaggatggcgcattccgtgacggcctgaaagctgggttcagctatgggcagacagatgaccaatccgggttcgcgcaatgcatgtctgcatatagcacacgcactgacattggtgtgaaggtggaatga

SEQ ID NO: 389950 - DNA, 315 bp, Salmonella enterica
atgcaacgtatgaacccaaccgatggacataacatgccgtactggtggtcagggctgcttggttttttttctgttctgagtttgcaagattatgtatttatccttggcgctctgatctcggcctatttcaccattaagacctactacgcgaagcggaaagaagaacgtgaacggcttgatgaagagaaaaaaagaacgcagttattggctaagtaccttgctgatgtggccgttaaaccaggtcgagatcgcccagcagcggctgaggtcgtaacagaggcaatgaaacgcatctctggtgaggtggcaaaataa

SEQ ID NO: 389951 - DNA, 543 bp, Salmonella enterica
atggtctcgacaaaaacaaagttaagtgctgccgttctggggctggtgcttgccggtgcgtctgcgtcagtgattctcgaccagtttctggacgaaaaagaaggcaaccacaccacggcataccgagatggctccggcatatggaccatctgtcgcggtgccacaaaggtggacggtaaacccgttgttcggggcatgacgctgtcaaaggcgaaatgcgaccaggttaacgctattgaacgtgacagggcgctggcgtgggtggagcgcaatattaaagtgccgctgacggaaccacagaaagcaggtattgcttctttctgcccttacaacatcggcccaggaaaatgtttcccgtctacgttctataagcgaattaatgctggcgaccgtaaaggagcctgtgaagctattcgctggtggattaaagacggtggccgcgattgtcgtctgaccaaaggccagaaaaatgggtgctatggtcaggtagagcgacgagaccaggaaagcgcgttggcgtgctgggggattgaccatgagtaa

SEQ ID NO: 389952 - DNA, 468 bp, Salmonella enterica
atgaaccgcataaccactggcgtaataatctcgttgctgattgtggccgcagtgctggcgtggactaccgaccactaccacggtaacgccgtgaaatacaaagagcagcgcgataccgttactcataagctggcgctggcgaacgcgacaattaccgacatgacgaagcgtcagcatgatgttgctgcgctcgacgccagatacacgaaggaattagctgatgcgaaagctgaaaatgatgctcttcggcgcaagcttgataatggtggtagggtgctcgtcaaaggaaaatgccctgtgtcatcctcagccgaaacctccagcgcctccggcatgggcaatgatgccaccgtcgaactctctccagttgctggacgaaacgttctcggtatccgggacggaatcatcagtgaccaaacagcactgagaacgcttcaggagtacatcagggcgcaatgccttaaataa

SEQ ID NO: 389953 - DNA, 894 bp, Salmonella enterica
atgaaaaaaactttaagcctaaaagatgcaatgcgtagccttcacgttatcgaaaccgatgaaggaatcgaactacaaagcgctgctggcacggcaaaatatgatgcgtggggcgcacgccgtgaggtgaatggtatcccagagtactttccctcctctgtcacggtaaataagcgtccgcaagcgctagtggatgataaaggaccatctgtacctgatgactcatgcgcaccattggtacgcacaatgaagcttcgtgttgagctggacacatcaggcgcacaacaggctgttgacgaactggatgacaaaatccgtaatagcgatgcattcaaagtcctgaaagatggctggactttcgaaaagaacggggtgctgattattaataacggcgaggtgttcgttaccgatgcgaagatcgacgatgccgtattgtctaagagctacagcgttaaattaaacgtcgccggcaaaggcaagccgcacgaagctggcatgaccctcggtgttgaaggtgagaatagcaaggttgagtttctggccgatcgctataaggtgcatgaagccgctcaatcagccagcaataatgaaaagacgacattcaatgttggtttgtcttttggtggcttccatggagcaattagtcatgataaggctaatcccgctgatggtaataatgccaccaaaaccagcctcaatgatgagatgtgcgaagccattatctccgctgtacgcgaaagcgatttgttcgcagccctccaggcaaagattgatgcgcaaacagcttcagtagttggcttgcaacaggcgatgcacgaagcggtgaacgacgctcttcgcaatgcgctcaagccaggcggcatcctctggaatacacggtcgagtggactctga

SEQ ID NO: 389954 - DNA, 228 bp, Salmonella enterica; identical to SEQ ID NO: 129887

SEQ ID NO: 389955 - DNA, 327 bp, Salmonella enterica
atgattgaacttgtgacactttctgagattaaggaacacctgcatattgatcatgatgctgacgacggcccgcttaaggaaaaaatacaggaagccagttccgtgttactggcttttattcagggaagccgtgacaaggtcgttgatgagacaggaaagttaatcgaaggtgaagcgctaagccggatgaaggccgctacgatgcgtctggtgggcatgctgtaccgaaaccctgatctggctgaaaaagaagatttactgcatggagagcttcctttttctgtgtcgtttttaattcatgaccttcgacttccgacaattatttga

SEQ ID NO: 389956 - DNA, 189 bp, Salmonella enterica
atggaaccactggtggtagtgtttgggatattcggctggctgataaatttaattgtgattttttatttattacggtttagcacaagggcaaatgaacaagttgaagcccttaaagagataaataaaaagcaagatgcgcaaatagatttattaatacaagtcgctcaccaaagaaaagattgtttataa

SEQ ID NO: 389957 - DNA, 465 bp, Salmonella enterica
atggtaaaaacattattttttattttattttatagtgtggtggggtgctcaatgacacattcggttaatttacaaggtgaaaatagaagtttacctgacaatataaaatctggtgggtttgatagtgtagacattctttgcattccttcaagcatacagagtgccatgcggataaatcaagaaaatattgaggatggttatttctacaaagtgtccatacaaaaaataaaggcgtctccttattggagtgagttaatcaaatcactgaatgcaacagagataaagcagattgacgatttaaaagatttgaggtgtgcggtaatatttttaaaagaaaatataaaagttgcctctatatattatgataaaaatgggaagtacggggctatcaatgcgaccccagtaatttttaaaggggggttgtatgattggataaacgacaatttccctaaattaatagactag

SEQ ID NO: 389958 - DNA, 993 bp, Salmonella enterica
atgaagattgtgagccttttcactaaaaatgtttttttgcttgttaatatatttccatttctgcctttgggagcgttttttttaatatcagggtgtggtgttcatgaaaatccatataatagtgtagaggaaagtatatgggggtataaacgtactcttattcagggggttccagaattacgtatcacagaaaactggccgaaagtggatggtgctacggcattatgtccgttatatgcttcagcttattatgctctaaatgttccaccaaaaaatagcagcatggggcgagattacactgtgcccgtatcacgcacctctgaagcatataatcgtattataaatggtagggctgagattatttttgtcgcccaaccttccgaaggtcagaaaaaacgtgccgctgatgccaacgttaaactaatttatactcctttcgccagagaagcctttgtcttcattgttaacactaacaatccagtaaattcactcaccgaacaacagattcgcgatattttcagcggtaaaattacccgatggagtacgattggtggtggtggtgagcgtattcaggtatggcctcgcccggcagactctggtagccagacaatcatgttggcgaaagtgatgaaggatacaccgatgctgccagcgaaagaatctacgataatcgatctgatgggaggggttattcataaagtggctgattatcagaatacccaaccgtctattggttatactttccgttactatgctacacagatgaacaaaaatatcagcaaaaatattaaactactggcagtaaatgatatttctccaacgattgaaaatatccgtaacggcagttatccatacattgttgatgtttatatggtcactcgcgaaaaaacgactgtggaaactcagaaaatggtgggttggtttttaagcccgcaagggcaacagctggtacaggatgtggggtatgtaccactatataatacgttacattga

SEQ ID NO: 389959 - DNA, 327 bp, Salmonella enterica
atgacaattggttcctttttaaggaaaatcattccgttgccttttgtttttatttgtatatacacgacattctttctgtatatattgattaaggcgcctgatatatataatgcagtattttttgtttattattctggtgttccatcatctattttatatgtcttttttgatgcttatttttccctgccaacacatggaagtgtctattttgatgttgctattatgtatcttttgggagtaattcagtatggggttattggctggatttgccagaagatctttcaggctggctgttttgttataaaaaaatatttcctgcataaataa

SEQ ID NO: 389960 - DNA, 324 bp, Salmonella enterica; identical to SEQ ID NO: 29644

SEQ ID NO: 389961 - DNA, 144 bp, Salmonella enterica; identical to SEQ ID NO: 29645

SEQ ID NO: 389962 - DNA, 1086 bp, Salmonella enterica
atgtccattgaatttatggaaaaactaaatacattgacatcaaaaataaaacaacaatctggtgctatagaaaccgaagaagccacaaaaaatgcttttgttatgccatttattaataacgtgcttggttatgatgtttttgatcctaccgaagttattccagaatttgtatgtgatattggtactaaaaaaggtgaaaaaatagactatgccatattaaaaaatggtgaggttcagatattgatcgaatgtaaaaaaattggcgaaccacttaatataaatcatgcttctcaactgttccgctattttcacgttaccaatgccagaatatctatattaactaatggtcaagaatataaatttttcacagacttagatgcacctaataaaatggatgaaaaaccgtttcttgaaattaatcttaccgatttagacgaaacggttgttccagaaataaaaaaactaacaaaaacagcgttcgatttagaatcaataataaatgctgcaggagaattaaaatacgttagcctgattaagaaacttcttcatacccaaatgaatgctcctgaagaagaatttgtaaaattttttgcatcgagaatatatgatggcatgttaacgcaaaaagttaaagatacttttacattattaacaaaaaaagcagccagtcaatatattaacaatcaaattaatgaaagattaaaatcagctatgggtgggaactctgcactacatatagatccatccattcaaaacgatgcgacagataactcagttataagtaaagaagagattgatattacaacaacaatggacgaaattgaaggattccatattattaaggcgatcgcaagaacagtaatagatgctcccagaatcgtacatagagatacaaaaagttattttggtatattgatcgatgacaacaatagaaaaccactatgccgcctgcattttaatcgcacgcaaaaatatataggtttatttgatttagaaaaaaatgagacacgtcatccaattgaaactttagatgatatctatgcttttagtaatgagctaaaagcaacggcggctttatatagctaa

SEQ ID NO: 389963 - DNA, 510 bp, Salmonella enterica
atgtcaaatctctctgtttcgactcgctgtttaattgaatggcaactcctgacgcttgtgcgcccttctgaggcctccggtgctcgttgggcagaaatcgatctcgatgcaaagctttggactattccagccgaacggatgaaagctaagcgggaacacattgttcttttatcaccacaggcattagagattctggatgtaatgaagccaattagcgctcaccgagaacatgtttttcccagcaggaatgatccaaaacaagatatgaatagccagacggctaatgctgctttaaaacgaattggattcggaggtaagcttgtagcacatggtttacgttctatagccagtactgccatgaatgaagcaggattcaatgctgatgttattgaggcagcactagctcatagtgataaagatgaagtacgaagagcttataatcgctctatatatcttccgcaaagaatagaattaatgaattggtggggtaataaaacgtccagtctttaa

SEQ ID NO: 389964 - DNA, 1986 bp, Salmonella enterica
atggcagagaaatcatttaatgtagaagtacagatagattatttagataaggtttctaaatcttctgcattacaagcaatcgctgagttggtatggaatgccttagatgctgatgctgaaaatgtatatgttgatttgacagagtctgagttaggactctcgcatatatttatcagggatgatggtaatggtattccctatgagaatgcagaaaagttatttagttcactgggcgggtcatggaaaaaagacaaggttttatcagaaagaaaatctcgttttttacacggaaaagaagggcaaggacgttttaaggcattctcaataggtcgatatattgagtggaatactacttatttacttgatgatgtatattatgaatataaaataaaaggaatagctgataataagaagaaaatttcagtttctgataaggttgtatcaagtgaaactaaatcaggaacagttgtttctatattggaattggtgaaaaacttcacctcattgacacctcaaaaactatctgagtttctttccactacacttgctttatatcttagtaaatacccatccgtaaaagtatttgtaaatcgagaacaaatcgatccaacagcacagattttatttgatacaagctataaattagacgatgtggtttattgtgatgaattacattcatatgagttacaagttattgaatggaagtcagctaaagaaaatgagatttttttatgcgacaaggaaggttttcccttaataagttatgagaagaaaattagagggactagtacatattcttattctgtttatttgaagtctacacatttgaccaaactttcccatgagggtactttgtcgctcatggacttagagccttctttaagtcctgtattaaataaagtcgaaggtttgataaaggaacacttcaggaaaagagatcatgaaaagtcaagggagctaattgataaatggaaaaatgaaggtgtttatccgtatgtgggtaaggccgaaaatattgttgaggatgctgaaagaaaagtattcgatattatggccatcaatgttataaaatacataccacaatttgataatggcgaccttaaacttaagaaatttcagtttaaattactcaggcatattgttgggagttgccctgatgacttgagaactatattggaggaggttctctcgcttcctaaggaaaaacaaactgaattggctgagatattaagggatgcctcattgtcagctgttattagtgtttcaaaaataattactgatagattgaaattcatatctgggcttgaaaatgtattatttcatccgaatacaagaaaagtattcaaagagagaagtcagcttcataaaataatggcggataatacatggttttttggtgagtcttttacattgagtgtcaatgataagtcactaactgaggtattaagagtacatttagaaaagcaagggattgatattccagttgatgaaaaagtaacaaggatagatggtagtgtaggtattgttgatttaatgcttactagaagtataggcaaaaattacccagatgagcgtgagcatattattatcgagttaaaggcacctaaagtaaatataggtcaatcagaaatagaacaggttaaatcctatgcgtatgcagttgctgaagactcaagatttaatggtttaaaaacaaagtggaacttctgggttatatcaaatgagctcacaacttatgctctcagagaattaaaacaaaaaaatcttcctgaaggtgcaatatatcaagctgaagaaatgactatttggataaaaacgtggtctcaacttattcaagagaacaaacatagattgggttttctacaaaatcagcttaatatatcgtatgaccgtgaagatggtctacagttcttaaagcaaaagtatgctgagtacactgaaggcgttgtatttgaaaatgaatcacaggatgagtatatagattaa

SEQ ID NO: 389965 - DNA, 402 bp, Salmonella enterica
ttgcgtgacctgattgacgtaaaaaaatgggaggtgaatcaggccgccggtcgctacatcttctcgcatgaggaggtgcaacttaaccggctccatgactttatgcagcagcacggtgcggagctggccgccacgctggcacctgagctgatggggtataacgaacaaattcccgcagtaaaacagagcgccatgcagcactcagttgattatctgcgtgaagccctgccggtgtggctggccgcaggtgaaaaaattaattattctgcgcaggacagcgatattttaacggccatcggattcaggcctgatgccgcttcgcgggatggtaatcgtgaaaaattcacccctgcacagaatatgatttacacccgtcgatgcaccgaactggccgcgcagtag

SEQ ID NO: 389966 - DNA, 168 bp, Salmonella enterica
gtgagctcctccctgaccttagagcaggcgtttgaagcctgtcagatgaacaaaacggcgtggctggaccgtaaagccgaactgaccgccgcagagcaggaatatcaggaattattgctggatgacacgcatcaggttcccgcagattacagacattgcgtgacctga

SEQ ID NO: 389967 - DNA, 3777 bp, Salmonella enterica
atgatgaacaaaatgaataattactccccaaattggtatcttttgcataagttattggttgatgaaacacctgtgttcactcgggatagactctggacttacaaagagcatcagcatgccagagcgctcgcgatctatcttgcgcacgccactttggcaacccctgtacttaacaaaacaactatagctgaactattatctggatcgagaggctggccatgtaaagatggtaagcaccattttatacaaactaactgttcgcttgatttcctcgaggatgcgggatttttgtcattttacgctgactggtgtagcgtacattgtcaacatccttggcaaacagaagtgctcgatgacagtattatcgatattttgaacacagcggaacagcttaaacagatacggcttggcttgaatgattttattgaaccacacttttgcataaatgttaacgaacttacagcactattaagtgaagaatttggcaacgtttctctggaaacattattaccactatgtacgcggataaacgacgctgtcagtgttgcacctgagacctcaaaattcactcctcttcatagtacttatctctggcaaactctacttgagaagtatcctgcgaaggaggcgtttagacgctggatgctatgtatacaagtacagggaagggctattgttcctgtactatttagccttctggaaaagaagcaagaggaaatgttttttgaagaaattgaaaggctcttatcatcagaactctcatcgtcatattcattgaaaactatattcaaacaagttacaaattctcaatatttccggcaacttgttgagtctcgaactatacaatttaatgtatccctgaacgaggatatgcctgaaagtgtaatgaagtcaggaatatcagctactggaaatataacggctcaggatttagatgcgctatatatgtatcctgcaggagatgaccccgatgaaatggaggcttttgaaaaatgggaacaattcgggtatgaacttggactgtcgatgcccttaacatggttgatccaagagtgtttgattcattcaatctatattgacagacgatgcctcagaggttcgtctttttcattaaatctgcttgtaatggctaaaaacaatctggttttaaggcacatcttgtttaatatcctaccacaacgattcaactggacgtatatgctatttctgttatcccgtgccgatacttgtgatacagccttagttcatttgatcagtaggggaacgcttcattcgctcttgagcagttattctggggctgcgggtattgagaaaacctacagggaagcgcttttaaaagagtatttacgaacaattgagggctgtgatgccaatgggcaacgtctactgaagattgcatatcatatcgctgatttatgtggtttctataatgacaattatattgattcgccagaatacagaatattaacttgcctactgcaacgtcttgacgatgcgagtgtgctgcaattggtcagttctttcattaagcaattagaagagcaactacctcgacgagttttgaggcttaaagaaagaagtatttactatattgggttttggctcgctgagcgtattgaaaaagtggagggaaatcataaacaaaaggttcagcaagaattgtgtacctgtttgtataccttctatcaaacagcctttgaagaatgttttagtggaaagcgccgagatcttgaacctggcgctttttttgcctccttaccatgggcaagtctgattgcagtaaaaggagctagtcctttgctttctatgtcagtgaggatattagattggaaagattcactgacatatgaaaataaaaactggtcggcagttgcttctgctataaggcattacatgcagactttgatgtgtgttgttaagtgcaaaattgatgtcattgagcacaaaagggtttggcgaaaagtaacagaaatagtgtgttcgtatgggtttggaaaacaggaaggtagggtatatatatttgataggtatattactgataatactagggatttatgggtggcctttagtgtttttttgaatagtatccccgatgatctctatgttgattttatcgaacagtgtaaagagagaattccagttagctccttgtacatcatgcttgaccattgtcatatcttggctagagagcaggttttgcaggatattattttagctcgtcgagatctggataaagaaaatttaggtctcaatgatcttgaattagcattcatatcggcatgtgacaataatcatttaaaattagcttggggggtcttgcaggcagcaaaacctattcttagtcgacttagaagtatgaaaaacattgatttgctagagcgtatttgtcgatgggaaggatatgcttataagtatgaacatttaagattatttatggagttaaaagataatcctgatgaatatattagggcctctaagttaatatctttcaagaaacctgatatagatttatctgaaaacaacatccactttaagaatttgtcttatgaatgtgaccagtttagtcgttacatttgtgcaatagccttgtataaaagcgatccggagaaaagtgtaagtataatggagtccctttgtaggactagtaagagccttcaccattcctttgccctttttgtggcaagaattgaatatggcgagaaagtgggggatctttcacttctatctctcgctcttgataaatttctcatatctattaaagagacgaaaccccaagatattggaactcagtgggcaagccaaatactggatgctatgcggaaactgaattttcaacatcaggctgatattttctggcgaaaattaacgcctgagcagcgtaacaccaaagaaataatgctgccatattgccttgctcttgtagaacgaaacgaagtctgggcagcacagcagatcattgataattatcgaaaattaaatgctgatatcggcgacgataccagtctaatgccacttcttgagaagttaaataaggctcttcctgaagaacctgttgtgactggtattttcagggctatggttgagtcacagaagaatagtacattccaactcgccaaacaatacggtttgatcgttagtcgtaaatttaacgaatatgtcaaaattattgggaatggccaaactactgagattttcttgaaagatgtggttatcagcattggtcgtgaacttctgatgcgcaaaaaaaatcttcagcttcaagctagtaggagagcaaaaggtacaataaccagccagattactaatgaggatctgattaatgattggtttacgtcgttgtttgatatgcgtatgtctgaagccaggattggttttggtgaccagaaaaggatggggcgctcagcatcgggtcaaagtatcggagaaatagatggtgttattaagcacagtgataatactagaattgctatttttgaggcttttcgccttttctcacttgaaaaaaggactattagtgggcatttggataagatttcatcttatgataatgaggggctaagtccggtatttattatagtttactgtgatatcgacgattttacgcaactgacaaaagattataaaaaatatgtttcagatattagttatgctggttttactgataaaaagaaacgtgttgaaacggtagagataactgaccaattatggcttggcaaggaagttcgataccgtgtgaaagatatagttttctatcatctccttctgaatatgagataa

SEQ ID NO: 389968 - DNA, 150 bp, Salmonella enterica
atgaccccggtgggtggtccgatagtccaggggggcagcgggtgtgctgattggcgcgccgacggacgtggcctgttcggtgtagtcctctctgaatatataggagataaatcagaggagatttttgatacagaggagacgaaaaaatga

SEQ ID NO: 389969 - DNA, 246 bp, Salmonella enterica
atgaaaggaataattaaattcatactattgtatttttatgtgtacttttcatttttccttatgtgttttgtgggagaatggattctaagaggtatctattatttcagattttcgacatggccaaaaattgattttaatattaatgatatttttgctcctgttttcttttatgccactggcgcatggttgctatgcgttgtttatagaataaatggatgggatacaggacgaaagaaaaagaaataa

SEQ ID NO: 389970 - DNA, 285 bp, Salmonella enterica
atgcacctggtggagaaagccagcgccctgattaatggcatggtggataacgtcgaagagatggatgtgatattacgtgagattgggcaggccagccgcgagcaaactgacggtatttcgcagattaacagcgcgattggcctgattgacgccgccacgcaacaaaactcctgccttgtggaagagtctgttgccgccgcagcgtcgctgaacgaacaggcgttacatttaaaagagctggttaacgtgttccgcgtccgcgaagaggacacgcagcccgcttaa

SEQ ID NO: 389971 - DNA, 1425 bp, Salmonella enterica
gtggaaacattcaaatttacgaaaactaagctcgaaaacctcccacctgccgaacgtggccaggttgagtacggcgataccatcgttaatggtctgcgcatccgtattggcaccagtggtgtgaaaagcttctgtatctcacgtaagagaaatggaaaattcatccgggccacgctgggccgttttccggatcttactattgataatgccagggcaaaggcactcgaaatgttgggtgacgtagcgaccaccgggaaaaatcctaatgtggaaaagcgtgtcaatgagaaggcatctgtcacgcttgctgatgcgctggatgcctatattaagaaccgtggccaccgccttaaacccacaaccgaaaagcaatatcgcgctatcttgcaaaattactccggcgactggatgaaacagtccctcgctactatttcgcgtgatcgtgttgagcatcgtcacaaagcagtaactgatggttcagtctggtttggcgctgataaagaaacgctcagggctggggtaggaagcggtagcaaagctcaggctgacctgtgggccagagctctgcgcgccgtatatcgtttcgcacatgatcattatcgtgatgaagaagggagaacgctgttacctgacccgccaacacaggtgctgagtacaaagcgtcagtggcatggcacgatcagaaagacagagcgcatccgcacccatgactttgctcgttggttaaatgccgtcgctgtagttcgtgataaggccgaagaaggacgagatgatgtagctgccgcaatatgtgacgctgtagaaatgtcgatgttcaccgggctgcgtaaatctgaaatattcgaactaacctggaatcgggtgaatattggcggtcgttatttctggatagataccaccaagaacggcgatccgctcgagcttccgatcactgaaactctgctgaatctgttccggcgccgactgaaaatgaaaaacggaaatgaggctttagtgtttcctggagttaaaggagtcattaaagaatatcgccatgtaattgatcgaatcagtgccgccaccgtcccagaccccaatcctgatttgctccagccaatcccattcaaatggcacgatgcccgccgtacattcggtacagttgccgagctggtgggcgttggtagttatatcctcaagcgactaatgaaccaccgaacgatgagaagtgcagatgttactcagggctatcttcattttggtgctgatgaactactcgagccagctatcagaattgaacgggctgttcttgaatatgctggcttggtggaaagtaaaagaggaatagatgctcagttactgtccgtcatggaaaatttaagtgatgaagataaacgtaagcttttatttgatctgctgaattctaacaatgctgaggaaaaatcatga

SEQ ID NO: 389972 - DNA, 648 bp, Salmonella enterica
atgagcctggaaaaatacttagattctggacggctaaattttgttgatgttttcatgcgcactgctagaaattttggagatctacaatttaactataaaagagacttaggtaacgaactaaaaaaagatatcaacagaatatctcgtgggcatttgaagtctattttacaaaaaatgcgcaaagataaaccgtcaaaggatgatgctgattttgaagagcaaacactggccaaggtgttttttatattggaggctcatgattttactacattagcggaagatatggctttagttattgaaagaagaaatataaaagagcgctgtcagaaaattatatataaagaaattgctgagggctcagcatttaagcagcgtagcattgcggcatctggcccacgacaccgcctatatgatgaaatcgtggcaattatgaaatctacctggaaacataatccggcactttcaaaaagaaaaatgatctcaaaattattgatacgttatgaagataaagtggatgaaaaaacgctaaaagattggataacaaaaggaaaactggctccaccaagacccagacagaacaaaaattcagatctggttatcccaccagaatatgccagcaaaaaaatatttgagggaggggggaagtag

SEQ ID NO: 389973 - DNA, 840 bp, Salmonella enterica
atggcacataaaacaaaggcggccatgccgggccgctatttatctaagatgttcatttctatttataacatcttatgcatccataatgagataggctcaatgatttttatgtatcctccatatgcccaaacaaatgtgccaaatattgttaaaccgacaccgatgacctctgcttttatttcttctcgtacttcaatgcgagcttttgaaatattttcttctctcattctcttagattcttcaggacttagcggaggacctgtaaccccactacgtgagttaatttcagcttcgcggttagatagtttttttaaagttgtgaattttattgtatacagtaatccgaatactgaaatgatcgctccagagcttgcaaataaattcatgtcattaagatattgcccaaataaaaaacttgcaccgcagaatacaattaataggattagtgatgtttttgcaccaagtatcttgaaaaagatggttctgaattttttcattactaattatctcaatattataagcgtgattcaattttttggctcaataccacgtctccgtaactccgctctacctaactcctttagccagttactggtactggtgttttcagcttgcgctagctcatcaaattgtttgcgtagttcagcaggaatgcggattggtagcattggtgacttgccgccacccttaggttgtttatctcgagatattgacatgtatatgcctataggtttatggttaactcaaataggcatatacaataacatgtgtgagtctataaaaacaacgccccgtagtgctcgcaacacatacagggcgtctaaccaaaccgttagttga

SEQ ID NO: 389974 - DNA, 219 bp, Salmonella enterica
atggctaacaaaaccaccctgataaatgacctccccatttggcaggaagttgatagcgcgttggggcaggttttgtccctacaaattgcgcttgagctggctgctcatgaaatggataaggacgatgttgttgccgcgatgtgtggcatacggcatctggtttaccacgtggctggggaactcgagaatgttggcaaaatggaggtgcgtcatgcctaa

SEQ ID NO: 389975 - DNA, 225 bp, Salmonella enterica
atgcctaaccagccacaagtttacgaaatttttgacgtggttcgtcggtctgatgggatggttatgaatcatatctcatctggcaatcgctatatggtctatacgctaaacggattggtatcggttaggacattaatggcagacgaaattgtgggtactcctaaactctttgagctgattcttgaacgcgccggttatcgcgtaacaccagtcaaaaaggactaa

SEQ ID NO: 389976 - DNA, 267 bp, Salmonella enterica
gtgaaaaactgccgctgtggaaaatggctggttgaaggcggcgcgtctgtcgacgaatggcggtcgtttggtatgctcgctcggtatgcaggaattacacgtcagcctggtttccgcattcgagactggctgactggaggttcacagcttcccgatcaatataccaaacatccgctggtggtcgacaattatcgcgccgtggcaccagacacctacggcattggcgtagagtttgactgggataagctgagcgtttacgaagcctga

SEQ ID NO: 389977 - DNA, 129 bp, Salmonella enterica
atgatattgctcttttttgccgggatcgcaacgctcctggccatcctcctccacgacatccatctgcttaaaacgcccccaactgacgctatttatggtaaattgcgcttctttttgtgtgttttatag

SEQ ID NO: 389978 - DNA, 633 bp, Salmonella enterica
atgcggatatggctgacgtgcaaaaaaacagaaaccacaccatccgacggcaaaccgagcgccacggagggatggctgcatcctgaatccgcgcaaacgctactggctgaaactacccgccaacagctgatccagtttattcgccagagcaccgcccttcccgcctcactgtttgaacgcttctggctgataccacttcatcgtttcgcagaactggcgcagtcgtttccggccccagaaaaccaccaccacgcccatgcaggcggtctgctcgatcacagcctcgaagctgcctgctacgccgcacggctgcggcagagttatcttttcctgcctgatgcagcgccggaaaatcaggccgctcagtccgaacgctggacgacggttattatctacgccgcgctgctgcacgatctgggcaaacttgtcaccgatattgaggtggaggatgccagcgggaaacgctggtttctgtggcatggcccgctgaccaaccttatcgattccgctatctgccgcaacgtgattacctgcgccatccggctgcggcagttcttctgcttacccaactgctccctccggaaagcctcgactggctcgccaccgatgccgctgcgttatccactctgctga

SEQ ID NO: 389979 - DNA, 1068 bp, Salmonella enterica
ttgattgtaatagattttttttgtggttgtgggggggcgagtgaaggactacgtcaggctggttttgatgtagcgcttggtatcgacatcgatccacaagcctcagagacttatcgtgctaattttcctgatgctgcctttatttcggatgatattcgaaatgtaactgtggaaaaggtagcaaattctatagcattcaaaagtgcggatggattacttttaagtgcttgtgctccctgccagccattttcgcaacaaaataaatttaaaactgaagatgatgaaagaatttctctactagatgaaacacacagatttgtgtcaacacttttacctgaatatataatgttagaaaatgttccgggaattcaaaagatagatggcagtaaagaaagtccttttactaggtttattgctttgctagacaagcttggttacgaatatgtttactttgtcgcgaatgctgaaaaatatggtgtgccacaacgaaggaaacgttttgttttgctggctagcatacttggcccaatttcaataccggaacccacacatgatattgagaattctccagtaaaaacagttagggattttataaaaaattatccccggcttgaatctggtgaggttgacaaatatgacgaattgcatcgggcagcaatgctgaatgagttaaatctaaaacgaataaaaaatactcctgaaggcggggatcgtaggaattggccaaaagagttaataaatgagtgccataaagactattcgggtcataccgatacctatggtagaatgtcatgggataagcctgctcctacattgacaacaaagtgtaatagctattcaaatggtcgttttggtcatcctgatattacacaacatcgtgcaattagtattagagaggcctcaagattacagacatttccagctgactatatatttaaaggtgcatttaactctatggcaaaacagattggaaatgcagttccttgtgaactggctcgtcaatttggattgcattttattaaacaccatgatttttccaaagagagggatagcaatggcaaattttaa

SEQ ID NO: 389980 - DNA, 612 bp, Salmonella enterica
atgcttaccgatatccagcttaaaagacttaaaccgcaggaaaaaatctacaaagttaccgatcgtgatgggctctatgtagccgtatcgcccaccggaactcactcatttcgttacgattatcggattaatggccgtcgtgaaaccctgaccattggacagtatggcgctgacggtatttcactggctgaagcgcgtgaacaactcattgccgccaaaaagctgatcaagtcaggcgtgtcgcctgctgtgaagaaacgtgacggtaaaaatcagatcagaaatgcggaaactttcgcaaattttaccgtcagctatatgaagcgtgcctcccttgcggacagcacgagatcgatgaagcaggccgttattgaccgggacatcattccttttctgggtaacaagcaaatggcggagattacgccgtcaatggttcgaaccctatgcgatcgcatcgtggatcgtggcggtaatgccacggcggtacaggcgcgtgagattatcagtagcgtttatacatacgcgaaaaaccgggggcatgactttaagaatcccgctcaggatatcaaggccagttcgatagccacattttttcctcgtgacagaacctga

SEQ ID NO: 389981 - DNA, 1242 bp, Salmonella enterica
atgaaaaaacatgaccgcggctgggccatggccgagtttgcttttgtactgctcatttttatgctgatagcgggttatgcgtcaggatactggcaggactatatccaggccaaaaactggcgaacagaagccgcccgcaccggaacctatgcggcggcggcccggagctatattggccggaattacgcgacgcttcttggcgcaagctccacgacggcaccgaccgtcatcaccacaacgatgctgaaaaataccggatttctgccgtccggcttcacggagaccaacacacgcggccagaagatgcagacaaatgtcatcaggaatacacagaaccctgaacttctccaggccatggtcatctcaagtggcggtacgccttatgagctgaaggcactggtgacgatggcaaaagacatcaagcccggatttggcggctacattgatgacggaaagacggccaccggtgcactgcgggcatggaaaataccgctgagtgcctacggtgcttcgtccggtaacgggcatattgctgtactgctttccacggatgaactcaccggtgcaatggaagacagcgatcgcctgtatcgtttccaggtaaatggccgtccggatctaaataaaatgcacacgtcgatcgacatgggtgccaataacatcaataacgccggaaatgtaaatggcacgaacggtatttttaccagtgaagttcgcggggcgaacggtaatttcagcgtcaacgtaacggcagctggtcaggtaaaaggaaatacagtacgggcagacagtgatatatcggccggacggaatattgccgcgagcggaaatatctcagccagcgggaatatcactgccagcggacaggtaaccggcggtacagttcgatcgaacaaaaacctctcggtgggcggcatcattaccctcgatgaaatccacacagcgaacaccgcctgtccggtaaacggcgcggtaagccgcgatgcgtcaggtgccatactttcctgtcaatccggtgcgtggaaaggggcaggtattggtgatatttctttttctcaaacggtcagacaaggacagacaatcaacattggagcgcacgctttttgtgctctatcacaagcatcttacgactacaataattggcgttcttgccaaattagtcgtaatggcgatggttcatggcagctaactggggcaaacgtcggtaatggtgaagccacctgccgagcagtttgcttctga

SEQ ID NO: 389982 - DNA, 666 bp, Salmonella enterica
atgcgcacagtcattgccacggctgtggcaccggagcatgccctgccgctgatccttgtgctgatacctgccggtgtgctgctcctccggcgggtgtcggtgtttcttcatgaggtctctgtgccgtttcgccccagccatccggcggtgatctcaggcatctggctgttcagcctggcaggcatgctggtactgatggcccctgtccccctgacagcacggctcaacgccgtgttgatgctgggttttctgctgcagatggcggtgaccgacgccgtcagcggctaccttcccaggacgttcacgctccgttttctggccgcggggctgcttgttgcctgccttccgttatccggaggcctgcgcctggtagaaacggcggcgacgggcgtgctggtatgtctgtttcatgtactggtcaaccgtcatggtgacaggatcggccggggcgacctctggctgctgacaggcctgacggcatggacgggctttgacgccaccgtgcagacagctgtctgggggactggcggctttattctatggcactgcacaggacgcctcaccggtaaaaaagagggaccgctgggtccctggttttgtttcagctgcgccgtgttgcagctgaacgcgttctatcaacctgtttgggtgtgggtatttcaatga

SEQ ID NO: 389983 - DNA, 531 bp, Salmonella enterica
atgcaggggaaccgattctccctctgcgcactgttcctgaccgccctgctctgcttcctgacctcatcgccgtcacgggcctcgtccccgctcaccatcaccacctttaacgactgcttcgtccgggccggtatccgctaccagattgagccgctgctgctcagggccattgccataggcgagtcgtcgatggatccggtgataaccaacacgaacagggacaaaaaggggcggccggtcagtacggattacggtctgatgcagattaactccacccatattccgaaactggtccggatggaggttatcaggggggccgacgacctgctgacccgtccctgtctgaacattcagataggggcgtggatcctggctcgtcactttcaggtctgtggcgtaacgtggaactgcctgggctcctataacgccgggtttcgtaaggatcggcatgagacgcgcgaacattacgcaaaccgtatctggcggatttacagcaggctgaaaggcctgcccgccgtgcaagggaggtga

SEQ ID NO: 389984 - DNA, 603 bp, Salmonella enterica
atgtcattccacacaacagacaataatccggcataccatcgccatcaggatcgcgggtgggggctgctcgaacagggctggatcgcccttgccgttatttttgtcatcgccgccgtactcggcaccgcgtatatgatcaaaagccgtaccagtgtcgggctggagtcatccaatattcagtcgctgatcaccggcgcgcagaacctgatgaaggcctcggacggatactcctttaccagctcggccaaaatgactggtgccatgatccagatgaaggcggtgccgaaaggcatgaccgttcgtggtaccccctcttccggtaccgccacgctttacaactcctggggtggggctgtcacttttgcaccgatgaccatctctggctttaacaatggcttcacgctgacgtacgagcgcgtgccgcaggatgcctgtattcaactgaccacccaactgagccgttctggtgtatccgatggcatcaccattaacagcaccgcccatgatgatggcaaggtgacaacggagcaggccagcgcacaatgcacggccgacagcggcaacaccggtaccaacaagctgatcttcaccgtaaccagttaa

SEQ ID NO: 389985 - DNA, 1098 bp, Salmonella enterica
atgcgtgaaatgaacctgttccgccggatacggcattttatcgtgcggaaaaccttcgccggcccctaccgggtgcagttctatgaggcactgggttttctgattgaaaaccgccagcagctgaaaaccgctctgcagcagatgcgcgatgcgtggacggacttcggccggcgctggcatccgttcgcagagcttaccgatgactgtattgaagccctgcgtgaaaacgccggtgagaagacgctggaaaaaactcttgcccgctggttaccggaaacagaagcggccgtcatcatcgccgggatccacagcgacaaactcccccaggccctgaaatacgccaccaccctgaccgatgcgggcaaacgcatcatggagtccgtctggcagatgtccatctacccgctggctctggttgtcatgctggccgggacggtctgggtgctgaatgaggaactggtgccgtcgctgtcggaaatcatcccgccggagcagtggaccggggcgctgggttttttatacaacttttccgtcgcggtgaatgagtacggtctgatcggcggcatcgttctggcgattgcggggtgctgggtggcctggtcgctggctcactggcaccggccggatgcgctgcggcgtgtcatggacggctttatgccctggtctgtttaccaggatattcagggggctgcctttttactcaatattgccgcgctgataagggctggcgtacagacaaaaagcgcgctgcagatgctccgtaaccaggcctcgccgtggctggctgtcaggatcgacgccattatcgccagcgtccgggaagggggaaaccttgggcatgcgctgcgcgagtgcggctacaacttcccgtcccgcgaagccgccaactttctgtccgtgctccagggggacggcgcagatgagctcataagtaactatggcctgcgctggctggagcagacgcttgtccgtatccggcgacgggccgttgttgtacgtctgatcatgctgaccgtgcttgtcatgacgctcatgctgctggttttcgcggccatggacattatttcagtcagtgacccgggtatgggcacgttttaa

SEQ ID NO: 389986 - DNA, 1566 bp, Salmonella enterica
atgacagacactctccaggacaacggcgccctgctgcttatcagcaatgaggggcggacagaaatcctcgtggacattaaccagcggggtaaccccggcgtgcaggtgacgctgctgaaactgctggaacgtaaccccggcgcgaaggccagttttgtcagtctggaacagctgcgggacgcgcgggaaaaggcgcttgtcctgacgccacagcatgacggtaccggcgggctgacgctcagcgacctgaaggacgtcagcggcagcgaaaagaaaattctcgactactttaatgtggcgaggacgctcagcgcctccgacattcacttcatcatttcgtcctctctgtttgtggtcaaaatgcgtatcttcggcacgcttcatacggttgacgcgcgccagccccgtgaagggatgtccctgtgcggaacggctgtgctttccatgtcagacattgccgagccgacgttcttcccgggccgcgagcaggatgcgcgcctgtctccggaactgatgcgaaaaatagggttgtggggtgcccgctattcccatcgtccgacggcagatggcctcattgccgtaatgcgacttatccctgacgacggcagcgccgtcccttccttcctgcaactgggttttctgccggaacaaattcggctgctgacgcgcatgctggcgcgaacggaggggaaaataatgctcaccgggccgaccggctcggggaaatccaccaccctgcgtaccgcctgccgttattacctcgatcacaatgaaggcaagcatctgctgtccattgaggatccggtcgaagggcagatgaaggatgccgtacagaccccggtgatagcggacaagtccgatgaggatgccatcaatatcgcctggacgcgggggatccgttccgggatgcgccttgatccggatgtgatggttatcggtgaagagcgtgacctgatttccatgctcacgggcatttatgcctcccagaccggacacctggtgctgagcacgatgcacaccaactcagcgctgagtattccagaacgtctcatcacacagggcgtaaacggagagctgatttatgacgcccaactgatggtcgggcttatcagccagcgactggtcccgacactctgcccgcactgcagggttccctgggagaagaaggtggccagcctgaccgtcgaagagcgggacatgctggaaagatactgcaacgtggacggggtatgccgtaccgaaaacctcttcttccacaatccggacgggtgtgaggcgtgccgtcatgacgtggtgatcaacggacaggttcgcgccgtggtgggacacgggcttaaaggtcgaaccgtcatcggtgaggtgattgagacggataaccgtcttctgctccgtctgaaaaaagaggggaaaaccgccgcccgccagtactggctggaaaagatgaacgggatcagccgcgtccgccacctgctgcacaagctgaacgaagggcttgtggatccactgatggctgaccgcattgtccccctcgacgaagatgaaaggttgaaagtggatgatgagtaa

SEQ ID NO: 389987 - DNA, 495 bp, Salmonella enterica
atgccagtaagccataatcctcaccacggccgggcagccctgctgcttgcggccatcatgcttgccaccgtgtccggtggcgcacctgcatcggactccacctcttcacaggtcacgcccgccctgaccaagggagagctcgaggcgctcaataaccgcaatatcctgttacaggcacaggttcagggcgcgcagctggagcgccagctgaaggagaaccgtgacggcaccccgtcggccaccgcgccgggctccccggtctggccacaggtgcccggcgacagcgtaaatccgccttcagcccggaccggcgggcgtaccaccgtgcttgagataaccggccgggaccgtgctctccgggccaccctgatgctggcgaacggccagctcaccaccgtcaccacggggagccggctccccggctccccgctgaccgtaaaaagcatatccctcgccggcgtgatgctcagcgacggcaccacactgactttctga

SEQ ID NO: 389988 - DNA, 1302 bp, Salmonella enterica
atgcaacatgacgatcacgtcaccctgcttcgcgatcccggcctgccacgccacgactgggccgccgggctggaatggaaaccccgggaaacaggaggcggagtacgccggcttctgccgttccggttcgcgggtacagctcgccgccaggggcttcccgtggtggccacgccgcgcccgaaaacccgtcgcaggtcgcccctgccggaaggtcggggcgtcatcccgttccactaccgcagccacacgctttactccctcgcgctggcattctgcgacaaggtggcggacgggtacggcgtctaccggctcgacagcacggacttcgtgtttctcgcctccatcaacggtatgccggccattgtggccgacatcaccggtaacgcagggaagatgcaggagaccctggcgctgtttctggcgctgaacgacgaacccgaaaccggctgggtatgcccctcagcgcctgacgcccctctcgactggagcagtctgatccacggactttccccgcgtcagcgccgccgctgccggcttgtccggccggatcgtgccgcccggcaggccgccatgaccctgctgtcgggcctgctggtttgcgggggcatactgtggtgggttaaccgggcgcccgccgtggacgccccgccaacggctgaagagctgcgggcccgggcgcgggaattcatgaccgagccggcaccggttccacgcctgccccatccctgggccaccattcctcccgtcagcgacctgctcgccgggtgtacggcacaggacgaacgggcaccggtgatgctggatgggtggaaactcacctccggctactgtcggccggacggtgtgtctcttgtctatctgatccagcccggcggaacagccgaagggctgcgccagcgcagtatggagatattcggtgtggagcccgtgtttaatgtccgtgaaggcggccgtgaagccaccattctcctcccgctgccggagatggccctgcacgatgaagccgtgccggagccgtcagcccagatgatgagaatactctcctggttccagcgccagcagatcctgccgaacctcaacaaggtggcgcaacccgatcccctgccgggcacagacggcaggccgcctgcgaagcaggactgggaggaataccagttcagtttcaccggaacggtgccgcccctcgtacttttttcgggatttgatggcagcgggatccggctgagcagcgtgaaatttgaaatcaacggcaccgtgttcacctacaccacagaagggcagatgtatgccagtaagccataa

SEQ ID NO: 389989 - DNA, 1686 bp, Salmonella enterica
atgaagaatcttcccttccgactccggcgcctcctgcaggcgtctttttttgcgctggccccgtccgtcacgctcctgtccggatgcaccttttccgaaatcaacaaaatgcaggaaaaggcgcagtcggatgccattgtggcccgcgcacaggcgcagttgccacgcacacagcatgcccgtccactgacctggactgagcgccagtggatcaacacgcagccgcttccgtcagaggtgcgggacaccgcccgcaaggcaccggactgctatatcacccaggcaaaaccgcagataacccttcaggaactggcccagaatatctccgaaatctgccgggttccggtgatattcacgccggatgcggcgggagccacccggagtacgggcgggggcgtcacccgccagataaatggcccgctgccggtcccggatgagagtggccgcctgccgctgaatgcggccacgccggccacctccacggtgagcgacggggccccgcttgtcctcactaacctgatgtggcagggggaactggagggcctgctgaaccagatggcctcccgcagcgggctgtactggaagcaggatcacggcagcatcgtgttctacctgctggaaacccgcacctattcgctggccatgctgaacacgaagacgaccagcaactccagcgtcagttcgggcacaaccagtacgatgggggcctccggcggccaggataactccgcctccggggatgcgacctcgtcgcagagcacccgcatcgaccaggaatacgatctctacgcggatatccgtaaggggattgaagccatcctgacgccggagaaaggccgttactggctctcggcatcaagctcctcgctgatcgtgaccgacacaccggccgtccaggacgcggtggcgcgttatatcgatgaacagaaccgggtaatgaaccgccaggtggcgctgaacgtggaagtgatgagtgtcagcaacacccgtaatgagcagttcgggatcgactggaacctggtctaccgttcactgggcacggcaggtgcggcactgaacaatgcgagcggagaaatcaccggcgcaacatcggccacggtatccatccttgagacggccaccggcaaggccgcgaagttcaccggctcagaactgctgttaaaagccctgtccgagcagggggacgtcagcgtcgtcacctctcagtccagcgtcgtgaccaacctgacgccggtgcctattcagatggcagaccagaccgtgtatgtcgcccagtcggccaccacaaccaccaccgatgtcggggccaccaccacgctgacaccgggcatgatcaccaccggctttaacatgaccctgctgccgttgatccagcagatagggaaagtgcagttacaggtgaacttcaacctgtcagatccaccgaccatcaggaacttcacctcgaaggacggcaacagctatatcgagatgccgtacaccaaactgcgttccctgagccagaaggtcaacctgcgcgcggggcagtccctgattgtgaccggtttcgaccagaacaacacacggaccagcaagtcaggcaccttcacaccggctaacccggtatttggcggctcacagagtggcaacaatgaaagaagcaccctggtgcttgtcatcaccccgacctttcctgcggggcagtaa

SEQ ID NO: 389990 - DNA, 438 bp, Salmonella enterica
atgggctggctccttctggccatctgtatggcctttctgaccatcattggtgatatccagctggaagagcgccagaccgcccgtaccgcctggcagcagcagagtggccagctgtatgccacccagatgctgatgctggcgaaccggatcaacgactaccgttacaacagaaatcccggggacgggacgctggccctctccctgctcgcgctgccgttcaccccggatccccgtattcagcaccgcctcgtccaggggcgcctgtgggtatggatgcccgaacagcccggcctcgtcgatgccctgcgcgaccgtagccgcggctcagcgctgattggcacacggcgaaacggtcagctggtctggctttccggcacagcatcgggactcagcgcgcctgccggcattcccgatggtgccgttgtctatctcaactaa

SEQ ID NO: 389991 - DNA, 1146 bp, Salmonella enterica
atgaaaaaaatcaccctccccctgctgctctcccctttcctggcagggtgcaccgattttatggccagggagaccggcgcacagacgccagccctggtatttgttgacggtcagatcagtgaaagcgcggacattattgcgcagacccagcgcagactggcacctccacgcccggccagcacacatgtggtgccggtgcaaaagtccgccccggctgctgtaccggcaggcaattcagtcccgctgccgtcgccatcactcgcgggaaccgtgacaccggcggccaccgcgtcgtcggccccggcattaacgcccggcagccagccggcattaccggcgctttccgtcaccggcacgccgggtacggttgccgtcctgtcgctctctcctgcccggaacctcacgcttgagcagtgggtgcggcggatcatgccgtccggctggaagctggagtatgagaatgccctgcgtacagcgcttaatacccgcatcgtctcggtctacaccaacgaccagtggacgcgggtactgaaccggttactggcagagcagtccctgcacggggatctcaactggacaacgcagaccgtcacgctgcgccgtccggggcagcaggctgctgcacgcgtgcagccagcggataagccagcaacgccggcagcaccgcgtaatccgttcagcagcacccgtgccaccgtgccggccgcagtggccacggaaaaaacggagagccgtccggccgccacaacagtgtcgacaggtcagcgacaggcacaggccgcctctgtcacgccgcccgtcccgtcccggcctgccgcgcctgtgctgaccggcacaccggtcccggtcagcgactccggcgggaaagtctggcgggcacagcccggcaccacgctgcgcaggacgctgatgcagtgggcaggcgagacccggtgcgaaaccgctgacgggacaaaatggacggttatctggcccgcttccgtgaccgactatcgtcttgatgcgccgctgaccttccacggcagctttgagtccatgctgacccaggtcttcgacctgtaccacaccgccagtaagccgctctatgcgaaagcctcgcggatgcagtgcctggtgtccgtcaccgacacaccggacgaaccgtaa

SEQ ID NO: 389992 - DNA, 534 bp, Salmonella enterica
atgaaaacactgatatccgtccttctcccgctgctgctgagcggttgcgccgtggcgcattcgtccttcactgagaacacacctcgcctcacggccactgtggttcccgcgtcgtcacatgatcctgccggaggcaacatcgttctcccggtgaatgcccgtgccggggaggtcacaaccctgcgcagtacccggtcagtaccttacacccgggaaaccgtcttcacgaatgacagaaaaacgcaggaaatacgcgatcgtgtggagtccggtaccgtcatcacggcgaccgtcactcaaacagacggtggcaagaaggcattaactctggacgttcagcatacctgcccgccgcagatgaagaccttcacgccggacagcaatcctgacgccaggattgctttgccgtccctccggtcattctccctgcaaaaaacactggtggtgcaggaaggtgaaagggtccggatccgcagcgaggggctaacggcagactgcgcttttccccgtattgatgttcaccccactgcataa

SEQ ID NO: 389993 - DNA, 528 bp, Salmonella enterica
atgaaacaaggtcctgccgccctgcttctgccgttacttctgctgctgaatggctgtaccggcagcaaccggcctgacgctacccggcatatcacacagctggaaatcacggtctggccgttgaaaacgcagcaggacggtaccacggcccctgacttcagcaccccggaaacctggacgcttggtcttccggacgacagacgcgccaggctgacgctttcggacctggacgatgacgttcagccgtcctccggtagcagcagggccagtgccgtaaccctggtgatcgaatcccgtggccgggggccggaagggcacacgctggatgtgacactgtcggagttctgcctgaagttcactgatttcagcgtcactgacagcggaatggtgctcatgccgtctcccgtgatcccgaaaacagaaaaaacgctggtcaccggcgttcatccggcgtccccgcttcgtattcaggcaagtaataatgggtgcccctccaccctgctggttcaggttacccccctggactga

SEQ ID NO: 389994 - DNA, 636 bp, Salmonella enterica
atgagaaaatctctttccgtcgccgcccttgccctggctgcggcgttaaccggctgccactacgccatgcccgacacctcaccgtccactgtcccggcaggagaaaccccgtccgacagcgccaccaggaaaatcccggcagataccgacaccgtcacgctgcaaaccatggtggttgaggtaaaaaaatcaccgaccgtgagctggaaaaccctgcttccggaatggcacgccggaaaggatatcgccgtactgcagggcgacggtaaagccatttaccagcgcctggcagccggtggacaggcggtgattaagtacaacaatagctcggtcacacccaatatggcggcgctccctctcctgtaccgcgattgttccgacaccacaggctccgcccggagctgcagcagtatgggactggttctgcgtccggggtttaagcacaccgaaggcccactgagtcttatgctggatttgcatatgcaggatccaaagcacagcgtcagcattcgccagttcgtcagtatgcaacccggtcagaccgtactggccggacgcgcactggaggagaacacgctgcaggtcgtgctgatcaccccatacattcattccccccggcatggagaaaaaccatga

SEQ ID NO: 389995 - DNA, 579 bp, Salmonella enterica
atgtataaaaaactcccctggctgttgcttatactgccggccttctctgccatgtctgaacccgtaataacctgtgagccggagagtgcgttttctacgtattttttaccagctgtcggtttttgtgttctgttaattgtcttcgtattttcaataacagatttattgttagatgacgcttctactttcagaaccggtaaaaaaccgtggttattcgtcatcgctgtgaattctgtcgttaccgtactgggtatactgctgaccagctatacccttcatcttgttcccgagaaaaaagccgtcgttaacgaagccgtcctgatgtcagcccccgatgtgaataaaggcctccattaccagaatgactgtattctggtcagcaaaaacgacactgctgtgacgctgaactgtagcccggatagccgaactgaaatcgttccccttgccgactatgctcacgcgaccagtgcactggaggatgccacagcgcatctgttggaactgaagatcaaagtcagccgaaataacatctgtcgcccggacaaaacgtcattttttgacgatctgttttcccgttag

SEQ ID NO: 389996 - DNA, 879 bp, Salmonella enterica
gtgaaaaaaaaccgccatcctccctgcccaagattttccgctttcctgcgcatcgccggagaaagactcagggccgtttcgcttgtggcactgctaacaacgacactcgagctgactgccctcataatcattgtgtgggtatcacaccaggccgcgacagagcaggaaccgttgttgttacctgtagtgcagacagcatgcatccttctggctgtcgcctggatttgccgcttcgccggcggatggcgtgatgagccgacggtgcaaaagtccgccacagaaaagcctgctgtaccgcagggtggtgaaattacggcacgggatcggcgcgttatctcgtcgcacgaagccggacatgtactggtttacgccgcctggacaccatttcctgacagtctggaggttgtggtgaaaaacagcgctgatggcagttactcactggggtttgtgaatgacgggcaaccgcgccatgtgtttaccgataaggtgttcgctgagtgggagatgttgctgtcactggcggggagcgcaggggaacaatgttataccggcagtgtttctctgggcgggcttagtgacaccatgcgctggcagtcggtggccagatcgtatctaacctgccacctgatggagggcatttactatgcggagccggtttcacagctggagctggaaaacaaccagcgacacctggtggccctgaaaaatgcacaaaatgccctgcttgagacattctttgagcacaaccgtgagatccatgccagcctgactgaaacactgctgtccggcaaaacgctcaccgctgctgagttacatccgtaccttggcgccgtgcggcttccggataactttccccgtgtgcagaacccggccaactga

SEQ ID NO: 389997 - DNA, 240 bp, Salmonella enterica
atgcctgatatttgcgatcgtgcgaacgaggaaatgatgtttctggacagtctgcgccagcagaaccacagtgccccgccgcgcccgtcagccacacactgtgtatcctgcgatgcccccatccctgaaaggcgccgggaagcgctccctggtgtgcagacctgcgctgactgccagtcagcgtcagaagatgttctgaaccaccgccgccgtctgtttgccatcacgccggccagatag

SEQ ID NO: 389998 - DNA, 462 bp, Salmonella enterica
atggcgtggcttagcggtctctccccctggcagatctggctgatggtggcgggtctttgtctggctttcgaaatgatgacaggaacgggctggctgctctgtctgagtctggccgcgctggccacgaccggactggtgcagataataccgctctcagtcgcctggcagtggctcttttttgccgctgtgaccattctgctcgcctgcctgcgtcgcatcaaaaaaatgatttaccgcggacagcacactgacggaacgccgccactcaatgaccgtcttgcgctgatgaagggcatggtactgacactggataacggattaatcaacggaacagggcaggcccgtatcggtgacagtgtctggtttgttaaagccgacagtgattatcccgccggcacaaaagtacggataaccggcacggaaggtatttttctgtgtgtcactgccacagagcagcagtag

SEQ ID NO: 389999 - DNA, 930 bp, Salmonella enterica
atgtatgaactgatttccagcctgctgccggcaggcatctgtgtgtttgtcgctttcgtctttgtgtcctcggctgtcaaaatcgtgccacagggtttcgagtggaccgtggagcgttttggccgttacacccataccatgaaacccggcctcaattttatcgtgcctttcatggaccggatcggccgtaaaatgaacatgatggaacaggtactggacattccgtcgcaggaaatcatttcccgcgataacgccaatgtctccattgatgccgtctgttttgtgcaaatcgttgatgccgcgcaggccgcttacgaagtcagcaatctcagtaatgccattgccaatctggtgatgaccaatatccgcaccgtactgggttccatggagcttgatgagatgctctcacagcgagactccattaactcccgcctgctcagcgcagtcgaccatgcaaccagtccctggggcgtgaaggtgacccgcattgaaatccgcgatatccagccgcccaaagagctcattgacgccatgaacgcccagatgaaagccgagcgcaccaaacgcgccagcattctggaagccgaaggggttcgtcaggctcaaatcctgcgcgcagaaggcgaaaaacagtcgcagatcctccaggccgaaggggagcgacagtctgcgttcctgcaggcggaagcccgtgaacgttcagctgaggctgaagcacgtgccacacagatggtgtcggaggcgattgccgccggcgatatccaggccgtgaactactttgtcgcccagaaatacaccgaagcgcttcagcagattggcgcgtcatccagcagtaaggtcgtgatgatgccgcttgatgcctcaagcgttatgggctccattgccggcatcggggagctggtaagctccctgaacacggggaaagcctga

SEQ ID NO: 390000 - DNA, 729 bp, Salmonella enterica
gtgcagacgccattccggatactgataatgaatgaggcgattcacgtcatgacatcaacagaaaacccgctgacgcaccttctgtggtgcattctggtggcactgcggaccgccagtaaaaccgaagcattccgttccgaaaccgcccgccgtaaatttatcgccagctggctggataacgcccgcctcatgccgtcattcaggggaatgggggacgattttgccaccctgcgcagtctgcttgaaaaggacagggacatccccatcgagggaacactcaacacactgctgatgttttcctcccgcgcggatgactgcgatttgttccgttttcgcatggccatcagctcactgctgaaaaaaggctggcgtaccgggatatgccgctggcctgaagaaatcatgacggagatccttcagcgccgggaaggccgccgtaaccaccttctccagctgacggccaccgcggacgcctttcttccgaccggcgtgatgtgcaggcccgtgacgttccagttgctcatgcaccagacccggggcaacaacgatcgggtggaagaagcgttttacgatgcccggtttatcgtcatttccgggcgtgaagaccagctcgaccgttccacgtggatacgtacactccacgtgggcacaaataccctgcccgagaatgaatgggatccagaccaccgcgatatctggaaaccagacagttaccggcgttctgcctga

SEQ ID NO: 390001 - DNA, 504 bp, Salmonella enterica
atgcaaatattaaatgaccgccagtggtaccttgcgcagtatattaccggtggcaaaaaccgggagaatttgttcggctggctccatgagcaaaaaataacgccatggacgccgctgacggtgaagaccattaaacgttccgacaagattaatggctaccggaagcgtattaccactgtatttccgggttattttttccttaaggcaaattttgaacatcacaatatcactcatatccggatgcactctgcattctccgattttgtggcctttgggcgtcagataaaacctgtggattctggcgttgttgaacgcctcatgaagtacttcccggagcctgactcacatactctggccaaagccgaactcgaagcagcctccgccatctggctgaccagagcacagtatgactttatggtgaatatggaaaacgaccccaggcccctttcccgttcggccatgcttatggacctggtctttcacgctggcaagtacggtttttaa

SEQ ID NO: 390002 - DNA, 249 bp, Salmonella enterica
atgctacagcccaatatgctggacacactggaaaaatcttttcctgagctatccaagaaacaattagaggtgtctatcctgtatgccttgggggcttcttacgacgttatagctgaaatttgtcacttgtctcctgagacagtacgaacttatctcaagcgaagcacaaagaatttaaatatcgagggatacgatgcactacgaacggcaatactgcttcggtccttccttttcttgatcaataaataa

SEQ ID NO: 390003 - DNA, 624 bp, Salmonella enterica
atgaccatcaaaaacggcagattgcagtatgttgccgtcaacaatgctttccttaagttactcaaactaccaagcaactaccccattttaggcaaaactcttgatgagttgcccacttctctggcttatctgtcgcgcaatattcaccgtcaggaagaacttgtgatgaggcatagggaaaaattttcatcaatcattacccatccagtgggagataataactcgctgcacgccctgtgttttgatacaacaccttactatgacgatcatggcatatgctcaggtacgatgctgcaggttcggcaccttgatatgttctgcccaagttatctactggaagatgacgtccctaagcctttgatttatcaaaccccatctcatttcttcacgaatgctgagtgggaagtgatcttccttatatcgttgaaatacagccgtaaagcaatgtccaaaatactcaacctctcactcaaagctattgagcgtcgcatcagtaattgtttacagaaaacaggaacatgctgcggtgaagacctgttgcggttttgccgtcagaaaagctgggatacgtatgttccaccaaggtttttaaagccaagattccgcttgtttaaatctgtttaa

SEQ ID NO: 390004 - DNA, 225 bp, Salmonella enterica
atggcgaatacagcacagtcctcaaaagttgcaggcatacactgctcaaaagtcaccggtatcactgaatttaaacgtgatccactgggtgctgttgacgctgcagagggagaagctatcgctatcctaaaccgaagttctccggctttttattgtgtacctctcgagcttttcgaacaaatgaaacgagatgcagaggcctaccgcgcacagctggctggctga

SEQ ID NO: 390005 - DNA, 1017 bp, Salmonella enterica
gtgtctgagagaccccagtccattcactggagtgaactgagccctgaagagcaaatccgctactggcagggagtggatgacggcagtattgattctttcctggtttcaccggagaagaaacaaacccggcgtcgtcgtggcgatcactccacaaaaccaaaatgcgagagtcctgcatggttccgtcctgcgcattacaaagcgctgggtggccagctcggctatgcctacaatcgtcttgtcaaaaaagacaaagagacggggctgctcagtcttcgcatgcacatctcccgtcacccgttttacattaaacaccgtgaaaaggcagggcgcaggtatgcgttccgtccggaaaagcgtcgtctgctggatgctctcatgccactggccatcagtttctgtgatgccggtaaacacaccactgtgatatgcgtttccaggctggccagagagctcagcccgaaggatggcaggggaaaggtcattcctgaaacggaagtgaccgtatcccggctgtcacgtctcatcaatgagcaggtgctgtttggtgttttcggcgttgccgagaaaacctgggatcgtgaaagtaaatcctggcttcccaaatacatctacatcaccgataccggattcaggatgctgggcgttgacatgcagaagctgcacgaacagcagctgaggaagctgaaagagagtgaagagcgccgcgcgctcatccgggaaggtattcttggtgaggatgaagagctttccgttcatgcggccagaaagcgctggtatgaacagaaaagccttgaggcactgcgctaccgccgtcagcaggccgcagcccgcaagcgggctaaccgcctggagaaactgccccgcgaccagcagattgaggatatatccagctggctgctgaagaccatgccggcggaagaagcatattactgttcagatgaacggctccggaagctggccattcagcatctgtaccagctgaagctggcgcttgaggagccaccgccctggtag

SEQ ID NO: 390006 - DNA, 444 bp, Salmonella enterica
atgagcgattccgggcagccgtccgcacctgaaaagatgacaaagaaagaacggaaaagactcgcactcagcctggcgctgaagaaagtctgcacccgctggccggagctgtggccgggatggaaaaaacgggagttccggcctgtcgcccccggcataagccagctgatgcacgaccagctgaaagctgatccggctcctgacctgacccataccgaaattgcccgggtcatgttttatgtgacgggaagcctgagttacctggagcagattaaggccggcgcttaccgctacggcctggacggtcagcccgtccaggaagtgacggcagaggatgagaaatactcgcgcctgcgcattaaggaaatacatcagcgcatcaaggccagcgccgccagaaaagccgcagggcaggatagttctgaagggacgaactcaccgtga

SEQ ID NO: 390007 - DNA, 606 bp, Salmonella enterica
gtgacagagacgaccacactgacatccagatccggtcgtatggcctggtgtgccctggttgcccttcatctcgcccgcaaggacggcgtggtaaacggtgagtcccaggaaagcctgttcctgacccgctggcttgccaccgcgctgaaacagaaacgtttcccgcgtgaagtggcaccggatatcgagtggctgctgaaacagggacgcctctacggcgtcagggcgaagctgaccagcaagctggaatacctctggcactcctgtacgggtgaaatttcggcacagagcgacctgttccgcctgacctacgccattgaaacagcgaaaagcatgcaatggacataccgcctgctctccgatcgcgaatggagtggccgccatgccgtgccggtgaaccccgtgctcaactgtctttatctggctaaatcctcgctcgatgccgcgtttgatgacgacggcaggctgaatggcaacctgatggccagaatcaccggcaatcttcccgggctttccgtcctgctctcacgttgtggctgggaggcggtggcggcagaaaatgtcagctctgaccccctttaccgtctgtgtgttactgcagtctga

SEQ ID NO: 390008 - DNA, 1020 bp, Salmonella enterica
atgtcacttcttatatccgaccctgttgaggctctgcaggcttgtgtgaacgtcctgaaggcccgcgggtatgactctcagaaaccaggttcgtttccggacaagacgcgcctgcgcgcagatccagcccttcaactgccggtcattgtcgctgagggggaaaagctgctgaaactaagtcccggagagacccttttcgggattgaatgtcactatgacgatcggcgcacgcttatcgaaatgttcatggatgatcttgtgcagttcaccactctgcacaggatttcactgggcataaacatcatgcattttgggcagacgagaatagcggaacatgccttctggcatctgtccctttcgccactgttgcccgcgacttatggcgacattcagcagaccggcggcaacgggcggatctttgatatgtactccatcccgttccggatccgtatcgcgctcgagctgaaactcagcagcataaccgggtttgaaaaatacgagatttcagtcccgggaaagtcaaccatcacgtcagaggaattcccgtttacacgccttgtccgggaacttaatcgcctgaattgccttgagcttccatgttcgctggataacatccggaacatctatcggtgggcgtccggcttctgccataccggagaaaaagagtttgtctggctctcaatgagagcgctgacgctgattgcaccattgttcctgtatgaagaacaacgcaggcgtgaagtcagcctgatcagccggtggtcagaagaagggctgagtgaaggggaaatactggacaaagtcacgtcctggcccggcccgcttaatccggtcagtttttacagggaagggtggtctcctgtgaaactgcagcaaaggctgaacagcgatgaacaaaaacgcataaaaacggaacaaaaaaagaaccggaggaccaccggctaccggtattttttttcagacacgaaactcagtgaagcgcactgctgcttctgcagccgtacaggaaactattactga

SEQ ID NO: 390009 - DNA, 636 bp, Salmonella enterica
atgaagacagaaaataaaaagcagtacgcatctcagctcagacactggtacagcatgcttaactggcgtatccatgcgaaccttgccgaagaatattttgagacagttatccggcaggcggaagagagtcattaccccgaaaaaatatatgtccagcgtaatgacagtcaccgtcagatacagctttccgccggctctcatccgattggggaactggaagaggtttatgatgcgtcaggtgcgaggatcagccgacgcttccccacggaaaaaggcgccgcgctggtgatatcacagcatgctaatggcagtgtggccattttcatgtatccgtacgcatccgataaaatgaagatgaaaatgccacttatcacctgggcgatatattctgagccgaccaggctgacggagacagtattgcgctccgctacgcgcgatttttttatctatatgcgagtgtcaagcgccattgccagagagagctttacagaccggctccggatacagttccttgaaatcaaagcccggaagtatgacggcaaagggagtatggtgaaaatcattttcagccactggagtctgctggccctgggcgcagcaggctctatcgccagtctctggtccgtatataaatag

SEQ ID NO: 390010 - DNA, 768 bp, Salmonella enterica
atggcactttttaattcggaatttcgggagcaaattaaggatttcttttctgtcgcggacagttatacgctaaaaaaattaaaaaagggcatagctgttgatgaaaacgactgcacatctcagttcacttctgcggtcagagagcagttcccgaatcatttcccgataacgataaaggcgtattcgcaaaagctcccggccaccatcgaacaagagtggggtgtcgatggggtaatattgttagtggatcatgaattaaatcagggaaaaatttgcttatttgaggcgaaggttgaccgccaaaactgggattatatacaaaaaaactcctcgccacctgtttctcatttttcaacgcaactgaagagacaaaaagtaccggacgcccggggctttattgtctgggagcagttttataccgcttcacaggccaactctttatgttttatgcataacattgcgatagagcacaaaggagaaccaacatatgacacaatatggcgcgatgcggatataagtgcagcttgtgaactgcagcgtggaaaaggcctgccggtgaatgttggtgagataattcagttagtatgtgagtgtacagttggaacgccattttccattgacgatgttgtagcgcatctccgtcagatcccccctgttgcaagtgcgttgctcgtagaaagacaagcccccgagctggatcacacactggatgaggaactgaagaaagtattttcggagaagcgcacgttgaaacatcgccgcaggtaa

SEQ ID NO: 390011 - DNA, 267 bp, Salmonella enterica
atgaaatcagatgttcagctcaatcttagagccaaagaatctcagcgggcactcattgatgctgcggcagagatccttcataaatcccgtacagactttatcctggaaatggcatgtcaggcggcggagaatgtgattctcgaccgccgcgtattcaattttaacgatgagcagtatgcagagtttatcgttatgctcgatgaaccggttgcggatgacccagccatcgataagctgttggcaaggaaacctcagtgggacgtgtaa

SEQ ID NO: 390012 - DNA, 492 bp, Salmonella enterica
gtgggacgtgtaacagcaccagaaccgctatccagttcacaccagctcgcagaattcgttagtggcgagagtgtactcgatgaatggctaaaacagcgagggcttaagaatcaggctctcggagccgcccgaacgttcgttgtctgcaaatccggcacgaagcaagtcgctggcttttactctctggccactggcagcgttaaccatacggaatccacaggtagtcttcggcgcaacatgccggaccctgtaccggtaatcatacttgctcgtcttgcagtcgatgttgcattccgtggaaaagggctcggcgccgatctgcttcacgatgcggtgctgcgttgttatcgggttgctgagaatgtcggtgtacgtgcgatcatggttcatgcgcttactgaggaagccaaaggcttttatctgtaccacggctttaagtcttcaaatacacaggaacgtacattgttcctgaaactaccatatttaacataa

SEQ ID NO: 390013 - DNA, 303 bp, Salmonella enterica
atgctccacttccacggttcaacgggatctgggtttgtccttagcgagcgcgaatggagtggccgccgtgccttgccgctgaatcacgttataaactgcctttatctgtctaaatcttctctcgatgcagcgtttgatgaagacggcagacaggaaggtgagcttctggccagaatcaccggtaatatcgccggtctttcaaccctgctgttacaatttggctggaaagtggtacccacagagaccgccgggactgacttcctttttcatttccgcgccgaaacgaactgcacgtttgaataa

SEQ ID NO: 390014 - DNA, 576 bp, Salmonella enterica
atgcagctttttcacggaacaagacagcgttttgataagtttgatgtggcatacaaaggaactggtgagtctggaaacatcgctgccagctggtttacggataattttaaaggggccagcaatcatgcattattaaaaaacagaaatcccggactgccactggtttatcggtgtgaactgaaagccggggcgattatcgctaatcaccgccagccgctcacagagcaacccgaaattgtggaccgttttaaatcaggattgcctgcggacatcgagttcggaaatggactaaaccgatttgtcctaaaaaaacattgttatacaacgtacaaagggaagatggtttactccggacacactcctgtggaaactgatgaacttattcgtctttatcttacctgcggtattcagggggtttatgactgggagggggagtttacggacagctatctccacgggacaactacagtgatatttgatacggatgcagtgagtattattgaccgtatcgagtacggatctgacgactggcatcgctggctgagtgaataccgggagaagaattgtgctctgtaa

SEQ ID NO: 390015 - DNA, 528 bp, Salmonella enterica
atggctttacaaggaaaatttgttgttaatgacgctacctttagccctttgacgttctatggcataggcacatttctggcttattccggtaatgaccaataccggaatcgtgcagggtgtatcggtgtccctgataatggtccaattcctgacggccgttatcacatagtcaatcgcccttccggaggatggaaaggggttattcgtactgatctccatgatttttattcatggccgacttcaaggccggtgatcaagtatgagtggtttgccctgtatcgcgatgacgggaaaattgacgatcacacatgggttaatggtgttgaacgggggaatttccgtttgcatcccccaggtcctcttgggatatccctgggatgcattacgttgcaacatcgcactgacttcattgcgattcgacaggcgttaatgtcaacgccgcagatcaggctgtctaatggtctgatgtcttatggaacgattgaggtgatcttgaatggccgcgagacgtgtcccgacgggatttag

SEQ ID NO: 390016 - DNA, 258 bp, Salmonella enterica
atggccgcgagacgtgtcccgacgggatttagaattctgatttgtgtcgctgtatttgcactgacgtttcttttggttcggccgtcagatcctgcgacgcaaagccagattgaattctggaagatgttagccggactgtttggtgagcgggatattgaagggttcgttggtatctctctgcttgtcatttgctcagtggttatggttatagcatacccacttatcgtccgctttattgaaaaacggctgaacaaatga

SEQ ID NO: 390017 - DNA, 489 bp, Salmonella enterica
atgatccggcaactcagtgccatggtcctgctcgtggtgaccttttcggccagcgcagatatcagcggccggatcgttcgcgtgctggacggggataccgttgaggttcttgaaacggggaaccgtctgacgcgcgttcgtcttgccggcatcgatgcgccggaaaagagccagccttttggccagcgctcaaggcaggaactcacatcaatggtggcgcagcgtaacgtaaccatcacgggggaagaaacggatcgctacgggcggcggctgggcaccgtgtggcttggcgcaacggatgtgaatgccgctcagatccgcaaagggctggcctgggtatacaggtaccacggaaaaccggcccggactgactacgcacagctggaagacgaagcccgccggcagggtgccggactctggtcagttccgggtcagacagaaccctggcgctggcggagccagcatcaggacagaggttctgtcagatga

SEQ ID NO: 390018 - DNA, 681 bp, Salmonella enterica
atgagcacaggcaacgtccatctcatcgtcgcctgcacgcgccgcaaaaccgtatccgccggtgataccgtctttccatatgaacacgacgccgaaaatgcttatgaagtctggctggaaaggctggccagggcgcggaacgacggcactgccataacagccggagaactgtatacgggccagcactggagcagggcagctgcggctgcaaaacgtaccggcgcagagctgtgggtgatttcagcgggtctggggctgctgcacgtatcagacgctgtagtcccgtacgaagcaacgttttccttgatgccgttcagtcacagcagactgtgggaaagcctgacggcttgcccgcctgcggaacgacggtatgcctccctgagggcgctgatgcaggcgaggcctgacgatcggtttgtggtggccgcctctccggtgtacctgcgagccgttgaatcagatctgtatgcaggaagggaggcgctctgtaccccggaacagcttgttgtggtcacgtcaaaaggttaccagggaatcctgaagaacagcgtccggtatacgagcagagacatgatgaaggagctgaataccaacatgaccgggctgaatatcagctatgccctgcagttcatcggtaatgaaaaactgaacagcggtacagcaggtgaggtgtatgcatga

SEQ ID NO: 390019 - DNA, 1224 bp, Salmonella enterica
atgacaacggtgaacgtccgccgtccgtcgccgcttcagcggcgggtgctgattgtcctggccgccctcgaggcacgccatcccggaacacccgtgcctacccgcctcattgaacgtctgctgaccgacggggggcatggtccggtatacgggccgaacctgcgcgcctcctgccggcgcatggaagccgcgggctggctgcgcaccctgcgcgcgcaaaacatgcagctggccgtggagctgacggatgccggccggaaggtggccactcccatccttgcagaagaacaggccagccagttggccgaacagcgtgccacggaagtgcgggttctgcccctggtcccgcacagccaggccgatgaggctgacgaccggccggtggaactggacgatcgctggcacctggcatgccggggggactatgttatccgcctcgacggcaccacctgcctgcagctgtggaacacggccgggcagctgacgcgcctggtgggcgatcccctggaggtcgccgcctggctgcaggcctgccacgatgcggggattgcggtgcgggtgcaggttaatgaaagcaccacgccggaggagggcacgaagcacggtaccgcgcctgcagaccggacggacatctggtaccgccagctggacaccgcgttgcaggcgcaggggatctccggcctgactgaggatattcgactctccgtggtcagtcctgaagcgtccctgcgggcgctgccggcaccggcgcgcctgctgcacgttctgcgcgacagtccggaggcgttcccgctcgcggctgccggctgtgaggatgacacggaggccgcgctgaccgacctgctggcccgcgcggggttcacgggcgaccaggcgcgggagttgcagtggcaccgcatccgctggccgcagatgagtcaggaagacgctgaccggcgcgaactgaacagcctgctggacgaactggagcagcgccagctgtactgcaaccgcgagcagctggcggagattgtgttttcgccggtccgcaaacccggtgagcgctggaccgaacgtctccggtggctcctgatgacggatgcattcgggttccgctgtccgctgtcccgtgaaacgggctcccgggcgctggcgatcctggccagctacacggggcgggaggtggcggaacatctggccacggtgatcgtctggaacgacgacagcgcggggacgtcgtcatga

SEQ ID NO: 390020 - DNA, 249 bp, Salmonella enterica
atggatgagaaagaagtgaatttttcactcagctatgagcagctgacccggatagcggaagagcgtatccgtgaatgcaatctggacaagaatggttatttgtacggccgggaactggagaaagcctcagccttactgcttttctggcaccggctggcaattgctggatatacgggtgtgaccggaaatgaacgagttgaggccgacctgttgcgcctgaaaacccttatagtcggaaaagaggcctga

SEQ ID NO: 390021 - DNA, 273 bp, Salmonella enterica
atgccttactataatgccgctgacaggcgggcaagagccagtgatgcatggcactcagaatggatcagcaaaagcgggctgaaagcgcggctctggacggataaagccattacggaatttctcggcaagcctgagaaagcgggccccataatggcctggaggcggaaggacgtgcagaaggccgagaggtcgcctgaatttcagaactggctggcaaagcgccgtgagtggcttgcggtacatggcagactgcctggtgaacaaaagccatag

SEQ ID NO: 390022 - DNA, 807 bp, Salmonella enterica
atgaatgcggacacccgggcccgggtggaggccttccgccgcgcgctggagctggctgcttatgaacggtccgctgagccggtaccgtccgtctggcgtgactttttaagggcatttccgctcggctgctgcgagctggccagccagacgctggcggaatatctgacggaagacggcagtaacctgcacccctatattatcggcatggactggagagttaatgcgaaagactatggccacgtcattgtcgccctcgacggggagtacatcgacctgacgctggaccagtttgacgggtatgacgaccggattgtggtggagcccgtcgagtccggcgggcagatcgcgggatttattcagaacgtccgggcccacggcgggacactcagcacgcgtgaacggacgttcgacggcattccggaccaggcgtggaacctgtatgcctggctgaaggaggtggcggacgatctgctcgctgcgtcaggacagggcagggcacctgacagtatgcccctgctggtctccacggagatccctcctcagtaccgcgccggaacagttgccggtgcgtcagatacggccactcaggtcaccgggcagaaaaaacggcggccaatgacgcacgtggggatcattactgaatgctaccggccccgcgaggtcaggctgcgggaaacggacacccagtgggtcagtgagtgcggcctgcgcttcagaaagaccaccggcgcggcggccggaagcggcgtctggagtgcaaaccgccttgatctaaagagcatccgggaaattaagcctggtgaataa

SEQ ID NO: 390023 - DNA, 621 bp, Salmonella enterica
atgaccaccctttccccggacaccgtccgccgcattgaagacgccgcagccgccctgatcgccgccggcaccccgaacccgaccaacgagcaggtccgtcagcacctcggcggcggctccctgtcccacatttccccggtgatgcgcgcgttccgcgcccgccagcgcgagctggccgctgagcagaccacgcccctgccgccggagctggcgcagctgctgaccggccagctggggctgctgtggcaggccgcggtaaaacaggctgaagccggagccctggcggcgcgcgagcaggccgacgacgacattgcccgggccgaccaggagcgggatgaggcgctggcgaacgtggccgcgctggaaagcgagctggcggtgctgcgcgaggtggtggccgagcgtgaccgcctgctgcaggaggtgcgcgagctgcgcgcggaggcgctgccgctgcgcgagcaggtggcccgcctgaccgccaccggcgaacacctggcggcgcagctgcaggacacgaaagcggagctgaaggaagcccgggaggacggccgtcagctccaggccgaactgctgaccctggcccgggcggagccgaaaggcgggaaggtgacgaaatga

SEQ ID NO: 390024 - DNA, 609 bp, Salmonella enterica
atgaaaaagaaaaaaacgtcagaaccggggttactggcaagcgacagcgactggcacaacaacgcatgtttgaattacatgcgtgatcacggcacagcttacactgaaggttacaggcgggctgctgacattctgattaaacacattgatgaatccgggcgggaccaggattttctggtttatccggtgttgtttctctacaggcatcacatcgaactccttatcaaacagattatcggactggctctggcgctggcagaagagccagataaacaccagtacaaaaaagatgaccataacctgaataccttatggccgctggcacaaaagctgatcctggatgttgatgacagctaccgatcttccgattttaaaatcgtcaaagaggtggttaaagctcttcaccaggctgatgaacgggcgacagatttccgttatgcccggagaaatgacggcacccggagccttgaaggaattcattacgttaatacccgtcgctttggcgaaaaaatgggtgctgcatccgatttgctgaacgggatagataacggcctccggtaccttctggactgtaaagcggaatggaatggcatcctggacagcttctga

SEQ ID NO: 390025 - DNA, 360 bp, Salmonella enterica
atggatgatgtggtaaaaccctgcggagctgtgcgcaagtacggtatgaatatcatcggcgcttcgcatttaatggaggttaaggccttcactcagtcagacccgcggatgccagtcacgcggctgcgccggtatctgggtcagtacgggctgcgcggtgaagcgctgagcagggaggtcaggcgtatcgtcgctggccctgagcgaccggataacacgctgaaagccggaatttactgtacctggccctatggctgggagcctgcggatttcacgccaatgatgcgccgaattcttggcggaaaacgtacacggcatgtgatgatgttcgatgaattccatcaggtgttcagaaaatga

SEQ ID NO: 390026 - DNA, 1338 bp, Salmonella enterica
atggcaatgaaacttgtccgcaagaaagccccccggggcggtcttatccgctggctggacgacgatgaagaaacggccatcaggaacgtgtccgggcggcgggtttccggcgggcgtgagcaatacctgctggctgaaaaggtactgcgggaaatgcgccagcgggaggcctggctgcagtgtgactgtgtcccaggcgattcgccggcgatgaacagcgccaggcttatgcaggataccggtactctttttctggccgggtttaatcatgaacacgcaccggattgcccgatgtaccgtaagttcagtggcgatgatggggctacggcaggtggaaccaggaaaacggcaggcagccgccgcatcagttaccgggattttctgccgcctgacgacaccgacacccggattaaggcaccgggacgcccggtcactccggcagatgaccgcacccgccgtacgcgccgttcgcggattgcccgccttctgctttcacttattgaggacgcgggtcttaaccggctggccacgctgcatccccttccctcccggggtgtcatggaatccatcggcgcattgcggaccgtcgcggaaaacaccgagtttatccgcggacgtcagctgtcagagattgtgcgtttttcaccggggatgagtgagaacggcagggagaagctgatgcaggaactcgagcgtccggacacgcactggccagcgggcaagacgaggatgttcttccagatttttatgtccgatcaggtcacacgtgatgaagtcctgttccgctggccgggtggccagctgccgttcagtcctgagcgcggagtcagtattaatggcgaagcgcaggacggtgcaagaccgccctactgggtcattcttgccttccgccgggggatggacggcacggttatctgcagcgaagggtatgcgcatgccctcttccgacgtggctgtccggtaccggtagacagcggtcttgaacgctccaccctcgaaagtctgtcagaagtggccggctggcttgcccggaagccgggggcaccgacattgagtgtggataaaccgctgtttgatatcgaggtcagtaccgacggcgagaaagggttcgtcctgccggattttatcgtgacggcccgtatgccggatgggaaacagcataccgtggtggttgaaacgatgggatacaccgatgatgactactgtgagagaaaagcggaacagcataagggaatgcggcagatcggattacttcagaccgacccacctcggtggccacaggtagtggaaaaaaccttcgctcgccaaatatacggtattgctttgcatttacaatag

SEQ ID NO: 390027 - DNA, 285 bp, Salmonella enterica
atggccatccagaaaaaacccaaaactccagtcccggatacaaaatctgaggctgtagacaagttcatcaactctgccccagacgccaggcaaccagtaaagaaaggagtagctaaagggaagaagcagcagatcacaataacaatggatcctgaactgatagagcgcatagatcaagcggccgctgagaacggtcaatcaagggctgcatttatcaacatgtcatgcatcaacgtgctcgactatgggctccaaatcgccggcaagaaaaaaattagtgaataa

SEQ ID NO: 390028 - DNA, 654 bp, Salmonella enterica
atgatactaacaattgctaacacaaaaggcggtgtaggcaagtccacactggcagttaacatcgccgtagccagagcccttcagggtaaaaaagtatggctggtagatggcgacaagcaaggctcttcacagctggcgattctcgtgcgttccgagtcaaagacagaaccaggcatagcctgttcgcactatcctgatggacccgtactaagaagtcaggtactgcagcagaaggacaacttcgatgacatcattatcgaatgcggtggtcgtgactcgacagcaatgcgcgctgcactgacgttaacagatgtgcttgttgtaccttcctcaccaggcagttttgaagcatgggctatggatacaaatgttgagcttatcagggaagcgagaagcgttcgtgatggtttaacctgctatgcactgttgaacaaagcggatacacaagcgaagtcatctgataacaaagatatgctcgagatgatgaatgagtacaaggaagacattcctattctcgatacaattatttatcaaaggaaagccttcggtaacgcggcaggcagcggacgcacagttagagaacttaagctccgctcccatgagaaggttgccctgaacgaactggataccctcatttcaatgctattcaaatag

SEQ ID NO: 390029 - DNA, 972 bp, Salmonella enterica
atgaacgtgttctgcgatgatggctcaacaacagtgaaacttgcctggtatgagggtaaaaatctaaagacctttctttccgctaactcattcagaaatggatggaaagtcgagggcataggtagccgtcagactttcaattatgaacttgacggcaggaagtacacatatgatgaggtcagcaacctggctatcaatactactcatattgagtatcagtacagcgatgctaatgttctggcggtacatcatgcgttgctctgcagtgggatgagccctcagcctgtatccctgactgttacactacctatcagtgagttttatacctctgactgtcaaaagaatgagctcaacatacttcgcaaaatcaaaaaccttcttcgcccggtaaagctgaataaaggggaagtgttcacgatcgagcaggttgaggttctccctgagtccttgccttcagtctttgctcaactggttaaagatgaggtcggtcaattcgagaagtcactggttattgatatcggaggaacaacccttgatgccggcgttatcgtcggacagtttgatgatgtaagcgctgtacatggtaatgccactattggtgtatccatggtcactcaagccgcgcttagtgcgctgaaaatggcctccagtgatacgagcccactggttgcagacgaattgatcaaacaacggcatgaccgtgatttcgtcagtcgagtggtcaatgatgagcggcaagttacgttagttctggatacgattgattcagcgatagctaagctgggagagagagttgtcgatgatctggctgatttccgccatgtcaatcgcgtatacattgtaggtggtggtgccacactgattgaacccgcggtgaaatcagcatggcaccacctgggaagtaaagttgtgatgatggattcacctcaaacagcgcttgtacaagcgattgcggcattcaaaggagaataa

SEQ ID NO: 390030 - DNA, 384 bp, Salmonella enterica
gtgagcgatcagcggaagaaattcactctctacctgcacccagataatgatgcagacaggcaggccctggaggttatcgagtctgtggctcgattaggtcgtggtgagttattccgcaacgcctttatagctggaatagcactgcatcatctggacagtcgtttacctgtattactatccacgctgttccgggctgatttaaagcccgaccaattggttgggcttattgggcaaacaacaggatggaaaccctcgcaagctgatattcgcatgattctggaagaactgggggcagggaaggggagtccattgcctgaagacgctcccaaaaaagaatcagacgagctggaaggtgtgcgtaagaaacttaagaatttcgtctga

SEQ ID NO: 390031 - DNA, 1278 bp, Salmonella enterica
atgcccatgtttggtttggccgacgttaactccttctatgcgagctgtgagactctttttcgtcccgatctccggggtaaacctgtggtggtgctcagtaacaacgattcctgcgtgatagcccgcagcgcagccgcaaaaaaaatcggcatacgtatgggagtcccgtggttccagatgaaacacactgattttcctgaaaaagtacacgtcttcagttcgaattatgcgttatatcatagtcttagccagagggtgatgtcttctctggaagaaatgacaccaaaagtcgagcagtacagtatcgatgagatgttcctggatgtatccggcattgataactgtgaagattttgagcacttcggccggcgcctgcgcgagcatgttctgcgtaccaccggactgacgatcggcgtgggaataggccccacaaaaacactaggaaaatcagcgcaatgggcttctaaagagtggcctcagttccgaggagtgctggctctgacgccgggtaacccgaaacgcactgaggctctgctcgcgcgtcagccggtggaggaaatctggggcgtcggacgccgcatagggaagaggctgaacacgatgggcatcgaaactgcactgcagctggcgcgcacccaccctgcattcatccgtaagaatttctctgtcgtcctcgagagaacagtacgtgagctaaacggcgagtcctgtattcctctggaagaaatgccgccaacaaagcagcagattgtctgctcccgcagctttggcgaacgcatcaccgcaaaaacggtcatgcgacaggcattatgtcagtacgcgacccgggcggcggaaaaactccggggggaacggcagttctgccggcatgtcagcgtgttcatccgcacttcaccccatgcggtcaatgagatcttttacggcaactgcaccggagaaaagctgacactgcctacacaggatacccgggacattatcgccgtggctatgcgctcactggatcggatctggcaggatgggcaccgctacatgaaggctggcgtgatgctcgacaatttcacgccacacagtgtcagtcagttgaacctgtttgatgaggacagaccccgccccaacagtactcaattgatgaaagtgctggacggcataaatcagtctggtcttggaaacgtatggtttgctggacagggggttgaatctgaatggaaaatgaaaagagagatgctcagtcctgcttatacgacaaactggggacaacttcctgtggccaggttttaa

SEQ ID NO: 390032 - DNA, 426 bp, Salmonella enterica
atgttaaagattcttacccctgcatccagccctaagttatctgccattccactgttcagcgacctttgtcctgctggttttcccagcccggcccaggactatattgagagcgaactggatctcaatgagctttgtattcgtcacccagccgccacttttttcgtgcgggccagcggcagcagtatgcaggaactgggtttgtttgatggggatgtcatggttgtagaccgggccgaagaggcctcgcacggtgacatagtcatcgccgaggtgaacggtgaattcacggtcaaacgcctgcaactgcatccccacctcgccttgctgccgatgaatccggcctacgcgaccatttatccggagtcgctgcagctgttcggcgtcgttacctggtttttcaacagcacacgtgcacgcaggaggtaa

SEQ ID NO: 390033 - DNA, 933 bp, Salmonella enterica
atgccgaactggtgtgcgaaccggttatatttccgcggtcagtctgaccgtattaatgatattcgccgtctgctggagggacagatagttccctggtaccgccgcgcagaaagggaagggatccagttatttctggcgggatgtgccggtattttacaaccctcggagaccgtagcgttttcactgtacccgtctatcacgggcagcggcagcggcattatgtccccggaaggaatggcttatgcccgctggctcagaatgttacaggacggggtaatactggatacggataactgccagctgttgcatgaactctggctggcctgcggtattcaggaacgtcgatggcagaccctgacagaggcgcaaaaatcggtgattgaagcgctgtactggcagaaatgccatgactggggaacggacttgcggcggaagagtatagctgagtggtgggactacctgtgtgatggtgtggatgacgagaggactgaggaactggatatgctgctgatccttccaacccggctggacgtagaaatcaatggctttaatggtggtttgctggttgatgttccctctgcatatcactggtatgtggagcattacggggtgaagtggccatccgggcatggaatggatgtcaccaacatcgggcacgattttattgtggctgattttgacaccccgtggtctcccccctccgaagccctgttggcagcactcagcctgcaatggcaatgtgatattgagcactggttcgctgagcagggatgtgatttttgcggctatgcccggtatttgcatggcgatgtggtggaatcgatgacggacacgctggaatggagtgagttgcctgatgatgaactggaggcgtttccggaagtgatcggcccggactggattatcgataacatggcacattttggtggctga

SEQ ID NO: 390034 - DNA, 234 bp, Salmonella enterica
atgaaacgagaaatgacagttcgggcgctgaaagaacggttgtcccgctatcctgatgaagcacagtgttgcggcacgttttggctggctgatgactttctggcgctggacagcactctcactgaagacgatatcgactcggcaatggagttggcgcaggacagtcatgatgctaatgacggatttaactggagccacctgcaatgggcaatcaatgaggtgaaacgcgtatga

SEQ ID NO: 390035 - DNA, 222 bp, Salmonella enterica
atgaactacagcggacacgagcagcttcgcgcggaggtggcggaactggccagcagcatgtgcgacctgcgcgccaccctgaaagtgctggaagagcgctggcactggcagcacgacggcctggccgaacgcctggccgggcagagcctgcggcgcattaacaccctgctgaatgaggcttacaacgaaacactgatgctcgacgagagctttaaagactga

SEQ ID NO: 390036 - DNA, 411 bp, Salmonella enterica
atgatgtatggcacccgcaaggaactgaataaaaaactcaaacgtatgtttggcaacgacgaacgctttgccctgctggtctggacaaagcaggacgtacaggcgcaggtggagaacatgacggaacgtgaggccgacgcaattttgcaggacattggtcgcgccggcactggcgggcataccgaagagggcgtttcataccgcacggtacaggcgctgtatgcaggattacgggtggatgtcccgacagtcagtgttcccgccgacctgctgacccgcctgactgacgtcgccgggctggcgctggatgcaggggatgctcaggcatggccgcttgttcgccgacattatccgaccgtggctgacgctcaggcggatattgctcgactcaggcaacaactggcggcctga

SEQ ID NO: 390037 - DNA, 768 bp, Salmonella enterica
atggataacgaaaccctgaacgccctcattctgcgccacggtgacagtcttctgcgccggtccggctggcctgaaagtgtcggtgtgatacaggtggccccgcaggaggttcccggctggctgtccgtctgcggcgtgctcagcgcggatgaaatcctgacgctgaccacccgcctttgtcagaccctcagtggcgggcgggcgcacctgttgatcgccagcgcgcagcgactgacaggaacgcctgcccgccttcatctgtacccggtgcaggcttacccccgccccgaggcgttgccggactgtacgcgcatcagtctgccttacgcgcaggaatggctgacaaaagccgaatgtgacgacctgctggccttcctgaaagattttactgaccgggtatgcgaaatcgtccgtcaggactcgaaacgcctggcagcggcgctggctccgtcagccgtgccgcgactgatggagaagcagttcggagactggcggctgctggctgatgagtatgaccatgagaactggctggacaacgacgatggtgagttactggataaggtgctggacgcggtactggtccgggatgcgcggttctgtccggttctgctcacactggtgaatgaacgccgggaagaaattgaagccgccggggtgatgaccgacattctgcgtttcccgggggaaccggtacgccgctggtttgaccgccgcgtgctgcgggatgtggtgaacgaggtccgcagcactgacccggccgggaagtaa

SEQ ID NO: 390038 - DNA, 438 bp, Salmonella enterica
atgtacggaactgtcagtgatatctgctgtaatttactgaaagtctttgagaataacgaaaaaattgccgtgattatctggaatgaagaagatgtgcgggaagtgggggcggcttttaatccgactgttcccgacacgcaggcggttctgcgcgccatcggggacgcggacagcgatgcactctggcgtgacggtattggccggaagtttgttgaaggagaactgcgacgcctggccgcgctgcggccaccccgtcagattgccattcctgaagatgcgctgcgcacacttcttcccctgatggaagccggaatgaatatcccgcgttatcagacgcaggacaggatcgccgaagaagaggccgcgctggatacgctgcgatacctgctctccactgataccacggcgcataacctgaccggaggaaaccagccatga

SEQ ID NO: 390039 - DNA, 255 bp, Salmonella enterica
atgtccggatttaatctcgccacaaaatccagagaagaacaggataagatcgcggtggacctgatggcatcaggggtggcgtataaagaacgtctggccatgccggttgttgctgaactggtggccagggaacagcctgaacatctgagagagtatttttgggcgcggctgcaccattatcgcctgctgagtgcgcagctgccggataaaaattccccggaatatgcaaaaaatgatgatgaggttaaaaaatag

SEQ ID NO: 390040 - DNA, 195 bp, Salmonella enterica
atgtcactcatgccggttgacaggtttgtctggccagtgtgtggtgttttctgcctgccggtgataatacgtttcctgttcctgttcctgttcctgttcctgttcctgttcctgttcctgttcctgttcctgttcctgttcctgttcctgttcctgttcctgcttatgattatgctccctgtctggtttcgctga

SEQ ID NO: 390041 - DNA, 135 bp, Salmonella enterica
atgtttcgcgggaacctgctgctgtcttccctctggtatgaacttcacccgtttgagaaccttcgccgcaagggcgtaaacgagcacggcccggtgcagatgtccggggtgagcggtcaattttttacggtctaa

SEQ ID NO: 390042 - DNA, 231 bp, Salmonella enterica
atgatcgtcactattgtttcaccttccgcagaggctgtaaagccccgccggcataagcgcatcagtcgccccgagctttccgtgtcagagattgacccggcgttaaaggcgttcgggcgacatatcgccaggagtatccgcaaggggcgcggcgttcacattcccgcgatgaaaaacgccgctatcgggcaggtgctccgcacccttgaactgaaacgcgcatttaactga

SEQ ID NO: 390043 - DNA, 1383 bp, Salmonella enterica
atgacacagaccaccgcacaggcattcagtgccgacctgaccccgccgacatcctgcgaagatgaccacgctcagacgtaccgggcgacgtactccccggatgacaacaaattgcgcctttacgccgcgctgcgtctcgatgaggaaacctggaaaaaaatccacgatgtgggttttcgctgggcgccgaaacagaaactgtttgtcgcgccagcctggacgcctgcccgtgaggatatgcttctgtcccttgccggagacattgaagacgatgacaacaccctgtttgagcgtcaggagcaacgcgccgaccgtttcagcgtctacagcgacaagcgcgccggagagtcagagcaggaacttgcgcatgtggatgcgctggcatcggttattccgtccggtcagccgatcctcgtgggccaccacagcgagcgacgcgcacgccgggatgcgcagcgcatcgagaacggtatgaaacgcgccgtaatgctgtttgaacgcgcggaatactgggcggaacgggcgcaggcatccctgcgtcacgcgaagtataaagagcgccctgatgtgcgttatcgccgtattaaaaagattgaggcggatctgcgcaaatccgaaaaggccattgcacagtcgcagaaatatctgacgatgtggcaggcggagacgctggatctgaaaatagcgcagcttatcagtaattacgaccatattactgcctgtttcacgctcgataagtacccgcgtccgccggaaaaaagccagtacgaaggccggatgtccctgcattcggcacttgataacgggattatcacctttgaacaggcccgcgatattgcggttcgctgtcacaagcgttcgatccgtcatcagcagcgctgggctaatcattacctgaaccgcctggcgtatgagcgggccatgctggacgaaagcggcggtgtggtcacccgtacgcaggagtttgagcagggcgggcaggttcagagccggggtgagtggctgaccatcatccgcatcaataaaagcaacggcgcggtcagttcggtcgtcaccccgtcttaccgctttatgggctacaaagggacaatgacgctgacgcctgaccgtatcaccgactataaagccccgaccgccgaagaggccatcgctgcgaaacaggccgcaaaacgtccgccgatcgtcaactatccgggtgagggtttccgggagatgacaaaggccgaatgggctaaaaccccggcagattataaggccgtccggggtgtggcggaaaatgatgagcatggcgcgtaccggttccgccgcatcatgaccggcggttatacgctcgatacggtgtacatcaccgacatgaaaaccgtcgaaattccgaaaaaataa

SEQ ID NO: 390044 - DNA, 564 bp, Salmonella enterica
atgcatagtgaactcagggaccgcattcaggcgatgcgggccagactcgatgggcgcacacccgttaccgaaatccgggccagctcacagcttttcgtcacccccgatccggtctgtcgtcagctggtcgatctggcggatattacggattcagaccggatactggagccggaggcggggacgggggctattttacgggccatccgggaggcagcaccactggctcggtgtgacgccgtggagcttaacgcggcgttagccgggcatctgcgggcggcatttccgggcgtgactgtctggtgccgggattttctggactggcagccggaaacccgctacagcaaaattctgatgaatccgccgttcagccatgcgcaggatatccggcatatacagcacgctttaacgctgctcgactccggcggggcactggcggcgatttgccccgacgggccacgccagcagaagatactccgccccctgtcggatgtctgggaaccgctgccgcgtggcacgttcacgtataccgctgtttcaaccgttctgctcagaatacaaaactga

SEQ ID NO: 390045 - DNA, 243 bp, Salmonella enterica; identical to SEQ ID NO: 152070

SEQ ID NO: 390046 - DNA, 729 bp, Salmonella enterica
atgatccactcatcacacgcccttgtcacgctgaagccagcccgtcaggcggcattacaggccattatgacggtagaagagtcccgcaaccgtggggctcgtctgccagccctgccacatgtgcgcacctttttgcgcgtgctgacaggcagcagccggattaacacagcggtggcgcagcgcattcctggtctgaactgggagccgaagaaccgtatgaccagcctcaaacaggtggaagaagcactcgatcgcctgattgccagcaagggggaacattgcccgctgccgttatccacggatgtacaggccgaactgttcccggaggtgatgcacacgcgcacggaccgccggatgcagcgcgagaaaattgctttcacccgtaaaatgcgccgggaggaaagggcgctggaacatacctggctgctgcgccagaacctgctggggcaggccatgacggagcttaattttcagtcgccggaaaccgtcagtacctggtaccggcgctgggctgacgagtttgacgcgcgggagctggagcgtggattctggcaatggcggacgcggttttcttcgctgaagtcgctggactggctgcgcgacagcggagagccgctgtatggcgtcatgcatgaaatccggtttatcgtcagggacaccccggagcatgtgcggcagggtgaacgctggctggttccgaacaagctgacagaccggagccgggtatga

SEQ ID NO: 390047 - DNA, 213 bp, Salmonella enterica
atgcctagacaacatcaggatagcctcttagatgccgcaaggcaaggagaagaaggccatgaaactgccacgaagtaccctgatctggtgcgtattaatagtgtgtctcacactgctgatattcacttacctgacccggacatcgctctgcgaaatacggtacagggacacgaacagggaggtggcggcttttatggcttacgaatccgctaa

SEQ ID NO: 390048 - DNA, 264 bp, Salmonella enterica
atgacaggttacgaactgcgcttatggcgaaaaggaatgaactggagcagtgacagggcggccgaagaactgggtgtcagcctgcgtacatggaaagtttatgaaaagtcagaaaaggttacacgggtcgtagagctggcgaccataacgctgtctctcgcagcagcactcccctactttgaacaccggaaaacctctaaagagaggattgtaaacaggatccagacgctgaccgggtcggcaggactcagagggagacaatga

SEQ ID NO: 390049 - DNA, 243 bp, Salmonella enterica
atgaaaaacccgttaatcgtcaactgttgcgaatattttgtaaaggcgcgggctaaaacctgtcacccactgaaaatccgcgaaacgctgaagcctgacgctattatgccgcatctgaaaaatcctggtacatcgctggtccgttgtggacgtgttcagaagcccgtccacatatccgctcttaacgtggctgaacgggagcacgtcctgagtacgctggaacttttccgcgagtatgcctga

SEQ ID NO: 390050 - DNA, 567 bp, Salmonella enterica
atgcctcactacatcccccgcgcgcctcatggcgtcacctgtatccgactggataacggtgatgaagctctttatgtgaacggcgaactgatttcaatctgctgcgccagtgaacctcacccgcgtattattgcatcaggagtcaatctttcggcggtacttagtctgccatttcaacagatcaatgctaaggttcctgatgtcccagaatggacgtgggaaaacgttatcacttcgttgggatggggggaacgcattgagttgagtaacagagtgctgcgttctgtactggaatgtagtctgagtcatattacgcgacgggacagcgatattctgagcgaactctgccacgcagagtacgaaagcgaatggatccatgaatccgatctgggttacatcatccgtgttgatgccgtcagctatccgcttctggtactgaagcgacatggtatttcaaaagcggcaagaatgctgatttacacagctatggtaaaggctgatatcagtatggttcattttacatcatggggagaaatgctggcagacgtgccgacgtttaactggtaa

SEQ ID NO: 390051 - DNA, 309 bp, Salmonella enterica
atgagtaagaaggcgttttattcagatgaagatatcgaattggcaaaatctgcgctggcaggattgccggatctgacaccccagcgtaaatcacaaaaggaatttctggatgcaatccgtgatgatcttttagctctggtaaaaacgaaaggttacacggtttttgatatcagagagacgttaaaaacaacgggatatgaaatcagtgagagggcgcttcgtgaaatcgtccgtgatgccgaaaagaacaaaccagcacgtaaaaagcgcaaatcagccgcaaattcggcatccaccgaatcgaagtaa

SEQ ID NO: 390052 - DNA, 336 bp, Salmonella enterica
atgagcgacagagcatcccgaagaggcagtgagaaacggcagaaaaccgtcataaagaccctgagatttacgccggatgaagtcgaagagattgaacagaaagcagaagcagttgggcaaagcgtatcggcttatatccgaaacgcagcaatgaacagaaaggttactccggtcatcgatgacagctttatgacggagttactgaggctggggagactgcaaaagcatctctttgttgaagggaagcgagtgggggataaagaatactccacggtccttgtagcaataacagaactgtccaccacgctcagaaaaaagctgatgagcaacgattaa

SEQ ID NO: 390053 - DNA, 2700 bp, Salmonella enterica
atgatcgccgtcattccaccgaaacgtaaagatggcaagtcctcatttatggacctggtctcctatgtttccgtgcgtgacgaagaacgggatgatgatctgatggaagcggtgaaagcgtccggaatcaaaccggaaatgccgcatcgcagccgtttttcccgtcttgtggattacgccacaaaactgcgggatgaatcctttgtctccctggttgatgtaatgccggacggcggtgagtgggtaaatttctatggggtgacatgctttcataactgcacgtccatcgaaaccgccgcagaagagatggagtttattgcgcagaaagccaggtatgcgcatgacaacagcgatccggttttccattatcttctttcatggcaatcacacgaaagtccgcgtcctgaacaagtttatgattcagtcagacattcactgaaaagactgggtatgagcgaccaccagttcgttgctgcgatacatacggacacagataatcttcatgtccacgttgcagtgaaccgtgttcatcctgaaaccggctatcttaactggctttcctacagccaggaaaaactccataaggcctgccgtgaactggagctgaagcatggtttctcgcctgataatggttgctatgtgatcgcgcccgataatcgtattattcgccgaacttctgttgaacgcgatcgtcaaagtgcctggactcggggccgtaagcagagcctgaaagagtacattgccgacacggcaattgccggtctgcgcgaatcccctgtgaccgactggtcctctctccatcagcgctttgcgaaagaaggtttgttcctgtcggcggataacggtgagcttaaagtaaaggatggctggaacagtgaacgccctggcgttatgctttctgcatttggtcacgccttcgataccgataaacttattcgtaaaatgggtgagtttattccacctgcacaggatattttcgcgcaagttccggctgttggtcgttacgaaccagacaaggttattgtgccgtcgcgtcctgaacgtatgacagagaaagaatccttatccgactatgcgatcgcccgtttacgcgcgccgctgattgcacttgatcaggacccctcgcagcgaactatacagtctgtacatacgcttctggcacagtctggtctgtatctgaaagaacaacatgaccgactggttatctgtgatggatatgatccaactcgaacaccagtcagggcagaacgtgtgtggcctgcgctaacgaaagcgatccttgactcgtataaaggtggctggcagccggtaccgaaagacattttccggcaggtgatacccacagaacaattcaccggcggtggtctggaagctactccggtttccgatcgggaatggcgtaaattgcgcacaggttcaggtccgcagggggcgctgaaacgtgagattttctcagataaggaaagcctgtggggatacgcaatctcacactgccgtcaggaaattgagacgcttatcggaacagggcagttcacctgggaacgttgtcatgaacagtttgcacggcaggggctgttgctgatgcgggagcatcaggggctggttgtgatggatgcgtacaatcatgagcagacgccggtgaaggcgagccatgtgcatccggatctgacgcttgcgcgggcagagcctcatgccggcgcattcaggcctgttcctgcagatatcttcaaacgggttccaccagaaagccggtataacccggagctggccgtcagcgacagggatataccgggcatgaaacgcgaccctgaactgcgtcgccagcggcgcgaagcgcgcgcagctgcgcgtgaagatctgaaagcgcgttatgcggcgtggcgggcaaactggcgtaagccggatctgcgcggtcgtgaacgctaccaggagattcatgagatgtgccgccggcgtaaggcgtatatccgggcgcagtaccgtgatccgttgatccgtaagctgcattaccatattgcggaagtgcagcgcatgcaggcgctgattaaactgaaagaggcgatgaaggatgagcgtttacagctgatcggtgaagggaaatggtatccgccgtcgtaccggcagtgggtggaggtggaagccctgaaaggggacaaggctgcgatatcgcagctgaggggatgggattaccgcgatcgccggggcgacgcagtgaaagtgaccacagataaacgttgcgtagtgatctgcgagcctggtggcacgccagtatatgccggtgttccggggcttaaggccgcgttgcagaaaaatggccgcgtgcagttccgcgatgaagaaaccggggagcatatctgcacggactatggcgatcgggtgatattcgggaacagccgtgattacgacacgctgaaacggaatatggtaaaagtgtccccgattttgttcagccgttctccggacgtggcaatgtcaccacagggcgacaatgagcagtttaaccaggcgtttgcgaaaatggtggcctggcacaatgttaaccgacaggatggtgatgaatacaggatatcgagagccgatattgacaggttgcgtgttgaaaacgaacaacagtttatggggatgtcgagccagggtaatgattcccggtatgatcgggatgagccgaagcagacctggaagccaccatcgcctctctag

SEQ ID NO: 390054 - DNA, 303 bp, Salmonella enterica
atgccccattatatccagtcagtcccctgcaataaaaaactgttccacggtatccgggtaattaccggttttatgctggctgttgttttcaggagcattacgcatttgccagcggcgctgctggccaccgtatcggtaatcatactgctgaccggcaatgagcgtctgttatccgtacccgctgaattatcatcagcctccccggacgccatcattatcatgctgaagaacctgctgttgtcagcatggtcacttgccattctgttaacgttggtggagcgcctgtacggtttgcataactga

SEQ ID NO: 390055 - DNA, 336 bp, Salmonella enterica
atgaaatctaacagacgtgaaggttgctcagaggaactccggtggctgatccatctggaaagtgagctggtgatgaccgccgcatatcttcgggtattcggttcacttccggaaggtcagaacagtaccatcattgcgtactgggctggctataaattcactgtccatgggctggagcaccgtgagtggcaatcagcaaattatgcggatgtggccgcgtcagtacgcgctatggcggccagcattaatgagcagggctggacggatggatgtcagcaggctgagtatgaactgagtcagcttacgtcctcacggtacgcttttttcaaaaggtga

SEQ ID NO: 390056 - DNA, 747 bp, Salmonella enterica
atggaagttattgtcggtatttgttgttcagcccctgccaaaaaccagggagttgggacggttgaaagcccgaaggagccaccagggattctgtacctgatcccgggcgtgtatacctgcggcatggtggctgatggccataacgaccgtgtctgttgtcacccagcggtatgcggtgatgatgtcgtggtaatcaagaagctcacgtctgatcctgtcaatgtgcatcttccgctcactgctgtagtcagacggaatgctgataaaaatggcggggcgctgttgtaccgctatccattccacgacatcaacagcgtcgaggtagcggccacattgctggaaaatacggccgttataaccgaaacgggcaaccacgccgggttccagatcgcgggactggccggtttccggcattccctttactttctgcagggcgtcaacctgagactgggtgatggtaacgtcagggcgccgggagaggtcaaaaccgtgggtggaaacataatactgatcgttatttttatatacccaggacggtttgaggtattcatccgtgatgagccgggcctgcttcatggcttcttttttcgaggcatggccgtttttgtcactgaatgcgcgctgcaggaggcggctttcaattatgtcccgctgctcctcttctgtcagatccacggtgtgcgtttgcgtggtggtgacgtgtgctgtgacttctgttcggtgtcctttaaaaaactgttccggtga

SEQ ID NO: 390057 - DNA, 291 bp, Salmonella enterica
atgcccaaaaagacagaggccggtgagcagtacatcagagccgcaacggatgccatcaaaaatgcaggttcgctccgggaactgtatgtggccattcatggtactgagccagggagatcggaactgcagcgttttgctaaccgccttaacccgtcacgatctaatcctggtactgatatgcttggcgtttgcgtggcgcatctgccatccctgcatgacgtcactctgaaggaatttttcggtataacggaaaacggggaaagtgacggtgcgcagcaggtgcctggttaa

SEQ ID NO: 390058 - DNA, 288 bp, Salmonella enterica
atgaaaaaattacttttagctcccctgctttgcgtcccttcactggcaatggccattcagccggtctctgacacggaagcgacgaatcagctccggctgatgaacagccagcttgagttgattgccggtacgctggccagcaatcagcaaaaaatattcacctgcactgatggagagaagacctatacggtcggactggatattacacgcggtgcttcacagtacaggtgcatactgaaaggcgatcatgctgaatgggagcgacaaccccggctttcgttgaagtaa

SEQ ID NO: 390059 - DNA, 624 bp, Salmonella enterica
atgacagtaccggccataaaaacaggaacgtcagattatgagcaactttgcgtccttatcgcattcgaaagcaagatgctctgtctcctggcggaacaacgatgggggatactgaccgcttcagatgcagaactggtcgcctgggaactgggatgggaatacgccagcgatatatctggcttatcactctcctgcgctgacgtcctctcgtccatcaacataatgggggaagaactgcttccgggtggatgggttgatgcagtgcagaccggcagtgatgaccgtatcaggtatgaacgacagttcaggaaagctgagaaaaaataccctgccggtgacaacaacattgaacgccataacatgacgttcaggcgattgtatggctcgccagatgactcagcaggctatgtctacatacagacggcattgccgcgtaatgcaaactactgcgtcagtcagacagacaatgaagaaaaggtcatcgctgttctggactcccttaatgatgcgatagcagtagcacgctatgccgcatctcatgatggtggttatggtgatgtctgtatcgcaacatcagctcaccccaccacacattcggactttgacagctggtttactgactga

SEQ ID NO: 390060 - DNA, 2289 bp, Salmonella enterica
atgcagaacactcccgttaaccaggcgatgatcaaccggaacgcctggggctctccgctgattgagctgctgcgtgaccatctgttgtatgccgtcatcatggcgggcagcatggtggccggtttcatctggccgctgtccattccgctgtgcctgctgctggccatcgttgccagcatcagcttcagtacccaccgctggcgcatgccgatgcgtatacccctgtaccttcaccgggtggatccgtcggaagacaggaaggtgcgccgcagcctgtttaaagcctttccttctctgtttcagtatgaaacccggcaggaaagcatcggtcgtggaattttctatctcgggtaccagcggcttcgtgacaccgggcgtgagctctggctctctctcgatgacctgacccggcacgtcatgttcttcgccgggaccggcggcgggaaaaccgagaccatctacgcctggatgctgaattcattctgctggggccggggattcacctttgtcgatggcaaggcgcagaacgacacggcaaggacggtctggtatctggctctacgctttggccgcgaagacgatgtggaattcattaacttcatgaccggcgggatgtcacgcagtgagataatccacaagggagataaaagccggccgcagtccaatacctttaacccgttcggtctcagcaccgaggcctttattgccgaaaccatgcagtccatgctgcccacgaatgttcaggggggcgagtggcagtcacgggctatcgccatgaacaaggcgctggttttcggcaccaaattctggtgcgtgcgggaaaacaaaaccatgtcactgcagctgctgcgcgagttcatgccgctggagaaactggccgaactctactgccgtgccgtggatgaccagtggccggaagaagctgtctctccactacataactacctggtggatgtgccgggatttgacatggcgctggtccgcacaccatcggcctggacggaagaaccacgcaaacagcactcctacctgaccggccagtttcttgaaacgttcagcaccttcacggaaacttttggcgatatctttgcggaagatgcgggggatatcgatatccgcgactccattcacagcgaccgtatcctgctgacgctgatcccggccatgaacacctcccagcacaccacctccgcactggggcgtatgtttgtcacccagcagagcatgatcctggcccgcgacctcgggtaccggctggaagggctggacaccgaagcgcttgagataacaaagtacaaaggccggttcccctacatgaattacctggacgaagtcggtgctttctacacggaacgtattgccgttcaggccactcaggtacgttcactggaattcgcgctggtcatgatggcacaggaccaggagcgtattgaaacccagacgtctgccgccaatgtcgccacgctgatgcagaacgccggcacgaagatcgcagggaagatcgtcagtgaggacaaaactgcgcagaccatcagtaacgctgcaggcaaggaggccagggccagcatgctcaacctgcagcggcgtgatggcgttatcgggacgtcatggattgatggagaccacatcaatatccagatggagaacaaaatcaacgttcaggatctgatgaagctgcagcccggagaacactacacggtgtttcagggtgacccggtcccgggagcctcgttctatatcagtccggaggagaagagctgcaacattccgctggtcatcaaccgctatatcactgtgaatccaccaaagctggaacgactgcgcagactggttccccggacggcacagcgtcgtctgccaacaccggagaatgtcagccggatcatcggtgtgctcacggagaaaacctctcgtcggcgtaaaaagtcagacacaatgccatggaaagtgatcgataccttccagcagcggctggccaaccgtcaggaagcgcataacctgctgacagactttgacatggatttcgcagggcgtgaaaaaaatctgtgggaagaggcgctggataccatccgtaccaccaccatggccgaacgcaccattcgctatgtcatgctcaaccggcccgaatcctccacgccttcccgggaagatgacgcgccagcccccaacgctattctgaaaaatctgacgctgcctccggtcacccatgttcccgttgtcaggaaaaggaatgatgcgcccccggtacagattccctcgcccctgaaccagatggagtggcctgaatga

SEQ ID NO: 390061 - DNA, 1149 bp, Salmonella enterica
atgccctcagcaaacacttattccgcttttcactgtaacgacagcatcgtggtcctgcatcagcatggacaggatacgccgcagaccctgaccattttccgcgaaccacagcggctggccacgcatgaaggtaaactgattgccttttacaccttctcaaatgaggccgtcacgctgctcgacgatccgcagcacgatgccggagcggtcctcaatgccattgcattgccgctgaaaaaacgcagtaacgccgccctgtcccgttacctgaaatacctggcctgtgccgccggcggcgcgcttctggcgtctgccatgtggtacccgacctccccggaagagttcgttcccgtggcgttcaatccggccaccgaaacaactgtcccccgggctgccgacagtgctcctcttgctcgcgcagccgctgccgaatcgcagaacatgcaacgcgcgatgcaggataaccgcaatgcgttaccggcatcgccatcagcagcgctgcagcctgtaccgtcggaggtccgtcccgccagttcttccgtggcgcccgccgggcatgccgcacctgaggcggcaccggaaaccgccgcacgccttcagatggcagaagtgcttaaacgcaacgctgaccgtggcatgttcaccattacgctgtccgccggtcacgaacgtacgctctacgccttcctcgatccgacgtgcagcgtctgccgggcaatggagccggccattgaacgtctgacgcaggagtacaacgtgattgtcttcccggtttcggtggtaaatgacggcggcagtgccgtggagaaaatcgtgcccctgctctgccagaaagacgcggcaaaacgcgccgctggctggctggcactgttccgtgccgacgccggaatgtccgttccggggagcagcagcgcacccgtcgatccggaatgcggaaaagccgcagaagcggccgtcgccgtaaacgacctcggtttccgccagttcggttttgaaggtaccccatgggtactgaccgacacaggtttccgtctgtcaacggggttactggccgaacccgccaaaatcgacctgttcctgaaaaccaccgaccagatgcaacctgaacaggccgatcgcttcctgaaaaccgtcaacactcaggagtaa

SEQ ID NO: 390062 - DNA, 1215 bp, Salmonella enterica
atgtattcttcccgtaccggtacgtctgtggaccccatggactactggggtgtccttgccgtgctgggcctgatgatgctcctggttgcctggctctttctcccggagtttgtctactggtcctgcttccttcttcatacgctgtggggcatggttgacttcgggccgttccatacctgggccgctccccgttataacctgctggccaccaccggtaacaatgctgaaaacgtcaccctcgaccagtggataagcgtcatggagcagaccaccggcatcctgatgatttttctcattccgttatctgccgcatccctgtggggatggatacgccacccggccagaaactggtacacacgtcgcccccttgatattcactccctgccgttcgcgatggaaagtatctcaccggctatcgcaccggtgctgcaggaaggcgatccgaaacgcctgttgctcgtaaaacgccgcccgcaaagacgtccggccataaggccggaagagttcgccgacgaacataagctcatcagtaatatgcagctcgatgtcgcccgctgccgtgaggttttcatggcgcagctcggcaaaccactcacctcctggaaaagccttgcgccccatgaaaaagccctgttcgccatcttcggcctgcagttctttctcgatgaccgccctgccgcgaaagcgctgatggacaccctgaaccgctcctgccgtatcaaaagccgtcgggacagtggccggttctccgtgccggtatacgcgctggcaaaaccggcttttatccgggtgatcaatagtgaaggcgcaaaacgctggctgaaagagcacaggtatgtcagaagtggcctggtctggctgtatgcgcacgacctgcgtctgacaccgcccaactggctctggcttaaaggcgtcgaccgcacactgttctatggccttcaccgggcaaataccacaaagggatttatcgagggagccggcatcgtggccgtggcccgcacggagaacgaagccatccgtctgggtctcccctgcccgaaaccctgtgtggaggaagccatcgacggttttcgcgccgatatggtcgctctgggtcttatctgggatgagccgcaaccggatcgcgaccgtaaacgacgcatccgcaataactggtcactcactgacgacgtgctggcgcggccagggcaggaggatgacgaactgcctttctga

SEQ ID NO: 390063 - DNA, 333 bp, Salmonella enterica; identical to SEQ ID NO: 84379

SEQ ID NO: 390064 - DNA, 1206 bp, Salmonella enterica
atggctgaccacagcatgacattcagcaacaccctggcgcaacttggcggcgaggattttttacgtgagctcaccgagtttatgctcaaccgcatcatggaagctgacgtcactgcgcgcatcaacgcagagccccatgagcgcagtgatgagcgcgagacctaccgcaacggctaccgtgaccgtcagtacaacacccgcctcggcacgctggacctgcgtatcccgaagctgcgggaaggcacctacttcccgcccttcctcgaggcccgcaggctctcggagaaggcgcttaacgcggttatccaggaagcatggataaacggcgtctcgacccgcaaggttgacgccctggtccagtcgatggggatgaccggtatctcccgcagccaggtgtcatccatctgccgcggcatcgatgagcgcgtacaggcgttcctgcagcggccgctggaaggggaatggccctacctgtggctggatgcgacctacgtgaaggttcgcaagaacggccgggtggtcagcgtggcggtaataatcgcctgcgcggttaactcggacggtcgccgggagattatcgggatgggtatcggtgagtcagaagccaaagcgttctggctggccttcctgctgagccttaaagagcgcggtctggaaggcgtgaagctggttatctccgactcgcacagcggcctgaaggcagcgatacagcaggtgttctccgccagctggcaacgctgccgggtccacttcatgcgcaatgtgctggggcgcgtcagcagggccagccagtcggtggtccgcgccgctctgcagcaggtattcgtacagaccgaggagaaaagcgcccacgccacctggcgcgaggtcgcggcccagctggaaaagagcttcccggcggtcacggagatgatggacgaagcggaagcggacgtgctggcgtacttcggcttcccgaaggcgcaccgtgtgaaaatccactcgaccaacacgctggagcgcctgaacaaagaggtgaagcggcgtgccgacgtggtgggcatcttccccaacgaagagagcatcatgcggctgctgggagcggtcctgacggagcagaacgaagaatggctgctgcagaaccgctacctgccgcaacacagcatggcggagatagagtcggccgctgaagacgacgttatcgaggcgctgccaatcagcgcataa

SEQ ID NO: 390065 - DNA, 162 bp, Salmonella enterica
atgaaactaccacgaagtcccgccatctggtgcctgctgatagtgtgtctcacactactgatattcacctggctcacccggtcaacgctctgcgaagtccgtgtgagggatggagaaagggaggtcgctgcgtttctggcttacgaatccaacggtaagtag

SEQ ID NO: 390066 - DNA, 150 bp, Salmonella enterica
atgcaggggataaaaacaaaaacattaaaccaaaaggcgatccatatcagatccactcaatacattttcaaagccgatcaattattagctcaggggaaattccactgccgtaatatgtgcgttgattctaaaacttgtgggattaattaa

SEQ ID NO: 390067 - DNA, 618 bp, Salmonella enterica
atggtcgatcgctatcctaaatggtggtttttctatcttgttgcaaaatcattattctatgtcgctggaatactaagccttatcttttatggaattgtatatatcaccgtagccaatagttatgatgaatatataattggtttgggctgctgggtcctgcttgttgcgccgtttgctgtaaattattttatagcgaaaaaacgcaaacagaagatccagtcagctttagctgaaatcaaggctactggccatttcaacccaacgaaagagtcagaagcatggttcttctggaaaaacacctatcttggctttgactaccacaagggcacgatcgtgtacatccggatctacccaggcaatgtcatggacgttataggctttgatgcttacagcctcacccgcactgaggttgagggctctaagctacgcctgtacacgaagttagcatcactgccaatgatccccattgatacttatgcagcttcaaacctggctaaccacatccatgcgatgaacaataaaggctactcatacaacttcaacttcccggagatcgtgaagcaaaaacgtcagaaactcgaatcgcttgccggaatgcctgtacctgatttagtgtaa

SEQ ID NO: 390068 - DNA, 2157 bp, Salmonella enterica
gtgaaaaaacaccttcttgcgctctgcgcaggccttcttgcgcctgtcgtaactgcacgggctgccgtcacctatgaagatatcgtgtcggcggccaccaatgcccaggatttatcgcgccaggctctggtgaccatatttggtgacgtggtcaccaacccgctggccgggggtaacaccacgatggtaggtaatctgtttgccctgtttaacggcatcatcgccattcttgccgtcgtctggtttatcttcatcggtctgcgccatatcaataaaaccggccatcagggcaaggtgttcagcgccgatcgtgacatcgtcggcaccatgagcacggttgctggtttcctgatgattatccccacggcaaatggatggagtctggctcagctcattatgctctggggctcctccattatgggcgtcggctctgccaatctgatggtacagaaggccgcagatgacatagccagcggctattctctcactgtccagcccacgcagtcctccacccgcacggccgcccgcggcatttttgagatgcagctgtgcaaatacgccatcaacaatacgctggatgatttcaacagcacgatgccctcttccacaccgaagatgacagaatcgtccggtaccagcggcggtaattataccttccggataagcaacggcagcggcgtgtgtgggacggccagcattccggaacagcagagcagcgacgtttcgtcttccagtggcttttttaatccgttcagttccgcagacacccgagaagttgtggatgcgcagcacacagccatggatgcgatgattaaagacatggacagtgtggccagcgagtttgtgaaagcgtttatggacaagcgggcaaatgatgccggcacgctgccagacattgaaagccgtatccagcaggcagcaaacacttacgaacagacggttcagaaagcccttccggcgcagaatgagcagaacggcatacaggacaacctgcgtaactatctcgatacgtatggatgggcatcactgggggcctggtaccagacgtttgcaacggcaaaccagcgtctgacggaagtggccagtcgctcaccatcgaccagcggcatgtccgccctgggggaagtgggtaatgcagagttgttcacggcaatgataactgcctaccgcacccagttgcagaactctacctacgcacctccacttggcataacagtatcagaagacgaacaaaaggctgtagatggcaatgatccaaacagtgttttaatgaatacgatagcaggaccaatgcagcgattcaccaataaaatagcaacaatagccagtgggacagggacagatagtaatcaagtcaacccattgataaaaatgaaaaacataggcgattatacactagtagcagcagaagggacgcttactgcatttactgctacaagagtgctagcagcgatgggggaaggttctcttatcggtaaagcgctcaaccttactaccggtacagtgagtggagtaaataaaggcttagacgctatatcccccgccgtgtatttcctgctcttattgttgtttacagcaggtttcacgctgtccatttatcttccttttatccctttcatctactggatgaccgggattggtaactggattgtcagcgttctggttggatgtaccgcaggaccgctatggggggcgacgcacctcgggacatcacaggatcgcggtagcagggctgcctatgggtatatctaccttatcgatacaatgatccgtccaccactgatggtgttcggatttttctttgcttcggtggcgatcattgctgtcgggacgattttgcatgctctgtttggtgcagcacttgtgaatgttcaggccacctcgttgacgggactgttcagcctgattggttttttgatgatctacgcccgtctctgtactgcactggtttccagtatgtttgccctgcaggcctatcttcctgactacgtcatttcgttcctgggtggacgcgatgcagccaatactctggggaatatggcgagttctgttagagatatatttgcggccggaggacaaaatatgcgtagaacaccaggtgttgatgtaaaaggtctgaataacaaaccatcagataaagatggtattaatggataa

SEQ ID NO: 390069 - DNA, 879 bp, Salmonella enterica
atgtcgcggccggaagccgtcagggattttatggatatccatcttccggcggaactgcgcgcgctctgtgatttcagtacgctgaaactggaaaacacctcttttgttgaagatgaattacggggctactacagcgatctgatctggtccctgcgcaccacgaaaggcggtgatggttacatccatctgctcgtggaacaccagtcatcgccggatcggcacatgggctttcgcctcatgcgctacgctattgcggcgatgcagaagcaccttgaagcaggccataaaaagctgccgctcgttataccggtgctgtattacgcaggaaaacgcagcccctatccctacccggttaactggctgaaagagtttgatgacccggaactggccactcagctttacagcaacgattttccgctggttgacgtcactgtcattccggatgaggaaattatgaaacaccgccatatcgcggcactgacgtggctacagaagcatataagggaaaggactatcctccagaatgtggagcatcttgctgttctgttacgttcagagtatacagacggacaaactgtaaccattctggtaaactacttattgcaggctggcgaaacgcccgagggcggtgaactctttcgcgagcttgcacagaaagtgccacaacacggggaaatgctgatgaatattgcagaacagttgaaagacgaaggacgacaggaaggcatgcagcttggtcgtcaggaaggtctgcaacttggccgtcaggagagcctccaggacgttgcagcccgcctgctaaaaatgggcatgtccacagaaacagtgaaacaggcgacaggcctttccgaggaagacctgaaaaaactacgccactaa

SEQ ID NO: 390070 - DNA, 480 bp, Salmonella enterica
atgcacatgaaactggtcaacggaaaaccgatcaaacacattgcaaagcgctttatcgacagggcatcagaatgccggggaaacatccttctgaccggggcttccggcacggggaagacgctgatactcgcggattatctggaagacaaaccggctgactggcatgatttcagcggagttgtgcccgtaccgtcaatgctgacgccggagacactcttccccgcgcacagcgtcgccatcattgacgtgccgtatcttgatacggcatgccaggaagtcctgctgaatgtactgagaacggcccgccgcgacgggcggcggcttatcctctcctgccagacggccccctactggctgatgctttcgcagtttgagatgctgttccgcctgaaacgccttcgtgatgggcacggcatcagcattgaatgtcacaatatgaacttactctcatgccgttacgctgaaagccttctcgactga

SEQ ID NO: 390071 - DNA, 540 bp, Salmonella enterica
atgataaccgatgacaaaccgaagaaaccccgccgcctgtggcgtatcacccgcgggctgctgagccttttcctgccggtgcaggagacacagtggtatctgcgcagctctcgggatgtcacctcccgcaacctggcgcgtatccggaaggcctttccggaactggatgtgatggaagaacccccggcgtctccggactgggcggcggccgtggccgcctccgggcagacgccggaagcgctggaaagcaactaccttgcgcagcgccggcgctggcggctcatgttctggttgctggccattccggtgccgctgttcaccctgggaccggtatacgccggcaacggcctgacctttcatcagttcagcaccggcctggtgttgttctccggtgctggcgtggcctggtcaaaagcgctgattgtgaccttccgactgtggcagttgcgtaaccgccgggtgagcgaggccgaacgcggaaccttccggcactttatcgcggaaacccgcgcagtacgcgatgccattcgtggcgactga

SEQ ID NO: 390072 - DNA, 1203 bp, Salmonella enterica
atgcaacgatgccgactttccgcactgatgctgctcattgctgcgggtctgccgcagctcgcctgcgcctataccgtgaatgtgaactccagtgtcccggtgaccacgcaaatcctgcccgagatggccaccatccagggtacgcttgccgaaatcctgcgtatgcagcaggccaccggcacagccatcaaccagaatgcggacaagctggccaccataatcagccaggacgggcaggccacccgtcagcagatgatattcggcaacgagacgcagcggctggaagaggcccggcggagtttctccgtgccggactccatctgcagtgattccgcgtcaggggtggcagccaccacccgtagcgctgcgggcagcaccgcctcacggctctcgtccggtggcggcatcagcagcaccccggtccgtcagcgcatcgccgcggtcgcggaatcccaggcccgtgaggcctatgacggcgcgaacgtacatgcagactactgtaccgccgccgaatatgcgcgttacggcggcacggatgtctgccccgccgtcagcgacctgcccggaggagacagccaggtacgctcgatctatgacggtgccggaccggaaggccaggcaccggccggcacctggacacaggagcagatcgacgcggccatggcctacatgaaaaataccgcccgtccctctgccgggcgcactcccggcaaaggggaagtgaaaaccctgaccgggcgcacctatgtcggcctgctgaacgaatacaacggcatcattgatgccgcctcggagccccagctgtcgctgattgcggacagcaaacccagtgaggccacccgggatgcgctccaggaagccctccagtccccgtctgccgctcagtattttgatgaggtcgcctctccggaggcaaaagcgaaggggtacatgagccagcgggaatttgagttatttgaggcggggcgacgctacgccaacacggcgtatatttccgacctgcagcagatggacggggataacctgatacgggagcttattcgcaccacctcgcagatgaactggcagctgaacgacatcaaggagcagttgcgcaaggggaatgtgattaacggacaactgctggccaccaccgcccgccaggcgtatgccccgaggctgcagcagctggaatccgcaatgaaccaggggactgcccgatga

SEQ ID NO: 390073 - DNA, 573 bp, Salmonella enterica
ttgagatgtctgatccacctgacccctcgctgcaggcgaccagcacgcggtcaggtcagtctggcacgcctgctgcttgacactggtgacgcgcagttcgccctgccgtccggtcatttccggacagataaggcgccgggcaaccgtgccgtgttcgccacagatgcccgagcggcaccggacgccaccggggtcctgctgagtctgcctgaacacccggcgcagcttgtcaccaccgccatctggcgcgtagatgagcctggcgaacccgtacgggaagcccggcatgtggtgcagtggctgctgcccgtgtcgcacgcaggcctgctgagcgacgatgtctggctctggccggtacagcctgaccgcccgcagctgagccctggcgactggcctgtgatggatatcacgccgccgtcctttccccggatacaacgccgggggctgacggtcatcgatacccgtaacacccgcggccggatcatccgccgtttccagaccttccccctggtggcactgcctccggaaactgtctccgtacgcctgcccggccagaccacacaactaacctga

SEQ ID NO: 390074 - DNA, 3054 bp, Salmonella enterica
atgaatattaaacgcatggtcttcgccattgaagatatgatgaacacgttttcccgttttgccgtctcggcagactttgttgactactgtgacctgcgcacggttatcggcctggataaacaggatctggaactgcgcccctggctgcaggcgccgtatatcggcgtcacccaccaggggtattacctctccgccttcgagattgccggcgcgctgcgggacatggatgaagaggccccggcagaccatccggatgcatttgaaggcctcattgcacacctcgccacgacgctcagtaccagctacaaaaacaccggccacaagatggcgtttatctttgagcgcgatcaggaaaagggtgagagtgagatcagcacgatgatcgccccgcaaaaacgggccatccgccacacggccattcagcttgatgacattctggaagagaaaatcaccaccctctccccctggctggtccgggagcgctgctggctggccgtctggagttcaccgctgctggtcagccagcaggaacgggcagactttaacaaaacggttcgtgaagtgaatgataaagccccgctggcccgtttcggtcagcagccctggcgctggatgatgtccggcctcaaaatccgccatgacagctttatcactacgctggagaaggcacttgtccggggcggtgaaggcctgctggtacgcctgatggacatcccggaagtgtgcaatgaaatccgccgggaaatggcgcgcaacagcacctcatcgcagtggcggccgctcctgcccggagacaccgcagtcgccggggtgcgtcaggacgacgataactctgccctgcttgcgccgtacctcaaccttcaggtattcggcaactcgccggaaaccgtaggcaaccttattcacaccgggggactctggcacgggatggtgaccctcaccctgccgccacagcacccgaaaagttttaatgaactggtcaaagccgtcccccgggccgtcccctggcgcatccgcatcgatgtgatgcccggcggcatgaaggcgctgggtggaaagaagtttctcgcctccttcgggcagtttattccgtccatccgcccgctgtatgacgcctgcacgcagctggcccggacggatgagcgcgatccggtgtgcgtcatgaccatcgtggccaccacatggggcccgacgcgggaaatctgcacccgcaatcagatgctgctggagtcagccctgcagggatggggcgtgtgcagtaccaccaccgcgttcggcgatccgcgccggggatgggtgaacaccatgctggccgcctcggcgggctccggccctgttcctctctatcctccgctgtcccatgccctctcgatgctgccctttaaccgcccggggaccgtctggcggggagaaggcaacctgatgctgcataccgaagacggctgcgcctgggaggtggggctggcatcatcacggcagaacaagcacaccgagctggcccccggggactccggtctgggcaaatcggtgctcatcaacaccctcacggagatacaggtggcgtcggcacaggcgtcgctcccctatgtggcccatatcgacaaaggcttcagtgccgtgggaaccattgagcttatccgtgacgccctgccggaagggcgcaaggatgaggccatcgcgatcattctgagcaacgatccgtcccagtcgcgcaacatcttcgacatcctgtacggtgcccgtgagcccgttaccccggagaaacagttcatccgcgccatgctgacggcgttctgtatcgagccggataagggaactccaccgaaccctacggacacagggcagattatggatcgcctgattgagctggcgttcgatctgcgcagtggcgaagaacccaacatgtaccgggagcaggttgaaccggaagtggatacggctttgcaggagtcgggactgtgggaacagcatgatgcagactggtggcaggccacgccatggtatgaagtcagggatatcctgcacgggaaaggactgctccaggccgcccagcgcgcccattaccaggcagtaccggaactcgcggacatgccgtcctttctgaaacaccagtccatccgtgagagttttggccggatccagcgtaacggctctcaggagcctttactggaatatatcgagcgctgcctcatccaggcccggcaggaatacccgatgctggccagccggacgcgtttcgcgctgaatccggacacgcgcatcgtgagcgttgacctgaacaacgtggccggggacaaaacgccggcgggtcgcctgaaaacggggatcatgtacctgtttgccggtcacattaccgccggggatttcaccctgccgcagtaccgcgacgaagtgctgaaagtgctgccggcggcgtaccatgcgggcattctgcgccgtattaaccagctcgacagcgagatgaagaccaaaatctacgacgagctgcacaacgccaaaggcatcgacttcatctgggacgcgctcgatacccaggacagggagcagcgtaagttcggcatccgcaccgtgctgagcacccagttcctgaccgattacccgaaaagcctgctcgattccgccaacactctctggctgctgcgctaccgtcaggaagacattccgctgttgcgtgatgccttcaaagtgccggagcacacactgcaggcatttctcaggatgcccgcaggcccggccgctgacggcagcggggtgccgttgctgtgcgtcatgcgcaccacacagggcacgctggcccggattgtccgcttcacgcttggcccgctggaactctggtcactcaactcggacaaaaaggacggtgcgctgcgccgccacctgaaggagagcctcggctctgcccgggcgcgccagattctggcttcgaccttcccccgcggctcggcgaaaaaatacattgagcaccgggaacgtaacgccggcccgcgcggcgaaaaaggtgtcatcgctcagatggcggaggagatgattaacagtctggggtacaacctttga

SEQ ID NO: 390075 - DNA, 819 bp, Salmonella enterica
atgagcatcgctaaaaaaacgcaggagcccctttacctgcatccgcttcccctccccgacgtggtccacaccacggagccgatgctgcctgcgccggagaaaactgaaggggggcgctgcatctgctgccgggctgacgtgaaacatcgctttgtgctgccggagtccctgccgctgacccggctgtcacagacggcagaagacgggcttatccgtcttgaccgggcccgggatgccctgctgcgccttgagtcccgccagccgccgcaggagccggcagaacggcagaagtacctgaaaaacctgaaagccgccagaaccagcctggagcatgccaccctggccgcccgtcgtctcgcactgcgtcatattccctggcgtagcatcacggaaacgggcgcgctgtcagcacaggagcggacagagctcagcctgccggcagcgccgttccatctctgttatctctgccatgcctggcatgcgctcaacggctatgcggccgcgcagggtaccatggtctggttgcctgatttgcatccccgcagcattgtggcactgaaccgcaaggccctgcgggccatcttcagcaccagtcccgcagcggcgcgggaagggcgaaaggttctgtcagaactgctccgccaccgcctgccggtagaggagcgcttcggaggatttcgtccggccgattttgccgatgccctgcgccgtttcccgcccttgatgcgtgatgaactgcgggagaaaatggcgggcgtggcacttattctgacgccggattcggtcacggaccgggaatatctgctggagaacaactaa

SEQ ID NO: 390076 - DNA, 135 bp, Salmonella enterica
atgttgatatcccccgcggttctgctgcccttacaggacctcatcgtgctgcgtaccgaccagggtaacgtcatcgccggttgcctgctggcgctgatcagacatgcctcaggaggtcagaatgagcatcgctaa

SEQ ID NO: 390077 - DNA, 405 bp, Salmonella enterica
atgtcactgttccgtgccctgacggcgcgtctgtatgccgtcgtcttttatattcagctgaccctgatggccctgcgcgaacgggcggttcgtgccctgcttgcgctcatcgccggtttgttgcctggtattgcgctggctgacggcgatatcgccgacatgtttgacagtgccgctgccggtgcgaaacgcgccaaaacatccgggctggatatctttcagatggtcggtctttttattttcggtgcctccctgctggcgttcaaaaaagtgggtagccacccgcaggttaccctggggcgctgtgttgccggccttctcattggcgccgggctgtttattatcccggaactgatcagccgctcccagaaacagatgggaacaagctcagtcaccatcagctga

SEQ ID NO: 390078 - DNA, 528 bp, Salmonella enterica
atggcgctcgatgcgctgaccgccatcgagaactttgcatcgggaatattcagcagcgggatcaacttcctgttcacctggggtgaaacgctgggatttatctgcctggcgcttctgttaacccgggcccgctcgacgacagccgtaccgctgtcccccgggaagttctttggcggcctgtttgcctgcgcggccatggtatcactgccctccatcatcaatgccagcggcgcgcagttcggctttcattccaccacctttgatgccatcgcctacgtccagccgtcaaccttcggggaggcggccggcgcggcaaacgccgtgctgtcgcttgcccggcttgccggtgtgggttttgttcattccggcctgaacatgtaccgcatggccggtctggaaggccacacagcgctgagttccagcgaaagcatccgctcagccaccgtcaaggttgtggcgggtacagcccttgttttttcaccgcagcttatcgacaagctgctggccagcattggcctcgctttttaa

SEQ ID NO: 390079 - DNA, 765 bp, Salmonella enterica
atgagtcagcaagatgaacttatcaccgatgacgacgcggtcgatttcggtgaagccgatgtcggggagaaaaagcccttctggaagcgcgagctgctgtttggctactcgctgccctggcttctgggggctacgctgcttgccggtgccgggatctggtatctgtatggcccctccctgtcaggcctggtgtccagtcccggcagcgccgaattcagcgaggtggaccacaccctgaacgacacggccgggacagcacaacccgcagtgctcccgcagagcgggactcagacagggacacagcctgcggtgaccacgcccgggcaacccgccatgcacggcgacactgtggcgatgatgacggatatccgcgatgagctgaacgcgcgcgacagcaggataaacaccacccttggcaccctgaaagacagcgtcagccagatctcagaggccatcaaacgggacgaggcgtatgcggtggaaacccgtaaccagctgatggcgctgacgcagcgcctggctgcgctggaaagccgtctcgcggcgagcaccgtggccacgcccaaatcctcgcccggcaaacggcagactgccagccctgttgccggcatgaaggtggtctcactggaaaacggaatggcctggatcaaatggcagggcagtacctgggccgtccgggagggcgacacgctgggtaaggtcaccgtcagccggattgatccggccagccgctccgtcaccacctccggcggaacgctgcgctga

SEQ ID NO: 390080 - DNA, 1308 bp, Salmonella enterica
atgagcgcagaacaggatgccgcggataacggcaaaaaaaccttttccatcatcatgctgggcctgcttatcgcgctggccggggggtactggctgatctcctggtggcaccatgacgataatgcggactcggccgtaaacctgaacggcacggcaacaagcgcgggatcacaaaccaccgaaaccccgcgttaccgcgagctgctgaaagcgtccaacgaccgcggggcggcagaggcagcacgcaacaacacgacgtttattgccagcctgccggtcggccttgacagccgggagtcgcctcagacgcgtccgcctgagcccgacaggcccccaccggtacatccggtgccgccacccgcgccccggtcacaggcttccgcgaccgcggagcagcaggcgaatgaaaaacgccaggaacggctgcagaaactgctgacccgcatcactctcacgcagggcaagggcacgcgcccggaacgggcccggttacttcatgagggtgacactgtcacgtcatcagccatgtccctggccaccgccagcctgtcgacggatgtggggcagacgccgacgccacagacgcttatcccggcccttacccgcgtgggggccaccatggaaaccgctgtcgactccgataaccccggttctcaggtggtggcggagatacccgcaggcttccttgcaggtgcccgtcttcatagtgcatcggtgaaacttgccggcaacggcgtggaaatccatttctcccgcatgagctggcaggggaagacgttcagtgtcaacgcatatgcccagagtgaacgcaccctgatgtcatctgtcgccagtgacgtcagccaccgatgggggacgcacattgtcctgcccgccatcctggggggactgggcaacgtgggtagtctgtacaaagagtccaacacgcagatccttcagaccaacatgagcaccgtcaccggccgggcaggtaaaccggatgcaggcaccgtagcaggcgttatcgccgggggaacggcccagaaaggcgcggaagtcatcagccaggaggtggcccgggagcccttccgtcaggtcaccgtcaaccaggatgaggtgatctcgattctcttcgtcgatgccgtcacccctgacgacgttgtcggacaaaaaaactccgcgtcacccgcagccagcacgcctgcaccgtccggtatggccgccgcggagcagctctctgaaacccgcctgcaggaagccattgctcgccgtcaggccgaaatccgccgccagtatggcggcactgaacccagtaaggagaatgaatga

SEQ ID NO: 390081 - DNA, 1002 bp, Salmonella enterica
atgacattccgttatctcctggtcacgcttctgctgtgtggcccggctgttgcggcagccgcggacgacagcggctggcagaaggcccggtcgccggcggccgcctcaacgagcacagcagcagccggtgcgcaggccgcacagccggcgggacatcagggtgccggtgtgccggccagccagatgagtggcgaactgccggcacccgggcaggcgtctcccctggtggaggaggccgccagtctggactccccgctgtcgcctgatgagatccgcgaactgcgcctgcgcctgacggataacgaacgttccgtcagcgcgccggtcatcagcgtcgttccgcgtatcagttccctcaccctgaacctgtcaccgggtgccagcctgccgctggtccgcacagcgatgaacaaccagagtgtggtcacgctgacggatattcgcggcgcgccctggccccagtcagacgcgccgctgaacgccagtccggagaactttgacgtgcagtacaacaagggcagcaacatgctggccatcactcccctgcgtccgtgggcgtcgggcaatatctcggtctggctgaaaggtcttgatgtccccgtcatgatcaacgtcaccagtggcgagaccgacacacggaccgccagccaggagattgacagccgcctggatttacgggtgccgcgcacggggcccggctccgcgcttcccggcacgccagtggacaaaatcgccctgcacgatgccactctgcaggcgtttcttgatggcatcccgccgaaggacgcccgacgcctgaaatttcagggcaatgtgccggacaccgcgatctggcagaccggcgatgatctgatggtccgctcccgcgccatgctgcgcgacgagtttgaacagacgctctcgtccgccgatggcacacacctgtggaaactgccggtcaccccgctgctgaccttctcggtgaacggccagtccgtacacgtcaccccggagctggaataa

SEQ ID NO: 390082 - DNA, 699 bp, Salmonella enterica
atgacaaacctcacgcaaaaagcccccccggctaaggggcgggcacctgcccctgcgtccgatccgctgaaagacgctgtcagcatgatgcagacggcagaaaaacggcagcaactggtgccggacatgatgcagtccaacctccggctgggactcgccctgctgatcagcctcaccctcaacgccgtgctggtctgggggatcttccagaaagaacgggactactttgccacggacaatggccggctggtccggcttgccccgacaactgagcctgcatggagccaggaggacgccacggcgttcggcagcaaggccctgatgcaggccttcaacctggatttcgtccattaccgtgagcaggtctcttcggtagccccgttgttttcagaagaggggcacgccagttatatccaggcgctgacagcctccaacattctggaagccctgaaggcccgcatgaacctgacggccactgtgggtgccggtgtggtcgtacgccgcggacgcctggctgatggcatctggttctggaccatgcagtacccggtacgcctgcgcctggtcggacagacaaccagccggccggaacaggcctttacgtttgaaatcaccatccagcgggtggatccacggcagaaaccggtcggtatggaaatccgccagatgatctcccgcaatgccccccgcaactactga

SEQ ID NO: 390083 - DNA, 354 bp, Salmonella enterica
atgcgatatctcatgctgaaagccggacttctgtccggcttcatgcttttttctgcagcggccacagcagcagtcacctgccgggcgggcagcgccgcccaggcaggaagccaggccggttatgaacgggccaggacagccgcgaccgcctggtcgcagcgggaaaataatgtctcatcctccctgcagtcctgtctgtcccgtatcaaaaaaatcacggtcaccgtgccggagtttcccagcctcgacgatgtgctgtcgaagctggaaaacgaaatttgtgatgctgctgtggacaaagtaaacgagcagatccccggcaatattgacccctggaaaaactattcttcctga

SEQ ID NO: 390084 - DNA, 4500 bp, Salmonella enterica
atgattagccatcacagaacatggcttgccgtacctgttgaagaaaaggacgccgccgtacaggcccatcccagactcgaaaacggacaacaggccatcgtctgggataaagaacacaaactgtggtatgcccgccccggcgtggaactcgaccggctggaacgctggctgccccgcccgcacacgctgtccatgaacgcagacgatccggtgacagaattcgcacagaaactggaagaagcaggtctcgtactgaaaggtcttcctgtcatggacggtacccgtcagcgcgtcccgacccgtgatgacaggaagggcgctaaaagcggagtttacaaggccttccttgatggtcgtccggcaggctggtaccgaaattaccgcacatctgacgagaagcccacacagtgggtatattcgggcggaaatgaaatggatcccctggcccggcttcatctgcgcgcgcaggcgcagcagacccgcgaggacaatgccaggaagctggaacagcagtatgaccgccaggctgcttatgccgaacgctatgtttcccggctcccgcaggccaccaccagtccctacctgatccgcaagggagttcaggcggcagaaggggtgcgcatcacccccggaggtgaactggttgtcccgttcagtaatgcgcagggacaaatcagatcctaccagcgaatccctgaaaccggcggcaaggatgcccgcatcctgaaggacagcgagaaaaccgggaactggtttgccttcggcacaccggttaatggccagccactgctgtttgccgaagggtactccaccgcggcctccgtgcatgaagccaccggcctgccggtgctgatgaccattgatgccggcaacatgattgccgtcgcccggaatgcccgtgccgtctggcctgacagtcgtttcatcttctgcgcggataacgatcatcacctccggaacccgcagacaggtgagccggaaaacaagggccttctcagtgccacgaaggctgcggagctgacgaatggccagatcctcgtgccggtttttacgtctgccgaactcgaccagaagctcactgattttaacgatctcgatgtcagccggggcagagaggcgttccatcaggaaatcaacgttcaccttatcgcaatgggcgtgaccacgcctttcagtgactctcccgggatacgtgaggcgcttacccgcgccggtgtcggactcccctctgttcaggaaaccaccatggaaaaagaagaaaataccgggctcacgccgattcccgttacagaactggaacaacaggctacacaggattatgcccgcttaaagaaaagtgaactggatcctgccacactcgtgcgcaaggcagaagcagaccccgcctacaaagccggactcctgtcagccatgtcgcaggatgccggagatatgcagctcaacggccagaaagttgacgccaccgcctatgctgaagaaagtttccgcgccctgacggtatttgcgcagactgtttcggatctctctactcgccatcaggcagagggcgattttgcccgctacagcaaccaggaactggatgcggccaccctggtgcagaacgctgaagccagcccggcctaccgggaagggcttctgtcagcactggcgcaggatgccggtgacctgcagcttaacggccagcgtattgatagcgccgcctttgccgaaaacgccctgcgcgccatggcgacggaggtgcagacgaacgcggagaacaccacgcgccgtcaggcagagagcgattttacccgctacagcaaccaggaactggatgcggcaaccctggtgcagaacgccgaagccagcccggcctaccgggaagggcttctgtcagcactggcgcaggatgccggtgacctgcagtttaacggccagcctattgatgccgccgcctttgccgaaaacgccctgcgcgccatggcgacggaggtgcaggcgaacgcggagaacaccacgcgccgtcaggcagagggcgattttgcccgttacagcgccgatgagacggctgtacaggggccgttttcctcagaggtgcagccgcaagcaccacagccccctgctgaaattcaggcaggaaccggacatacggaagagaccgcggaacgctcactgcccccggactccgcgcagccggcagcggttgcgacagcaggagaaaccgatacggccactccggctcttctgacggaacagggacaacaggccgccagcgatcttgcccgtttcatccgttcagacctcgacgctgccacactggtgcagaacgcggaaaccgacccagcctaccgtgctggtctgctggccatgtttgaacagaccgggcgtgacctgcaggctcagggccacgatatcgatatcgccacatacgcggaaaaaaccctgcgtgaccttaccggggagatccggatggatgaatctgttgcggcatcctcccctgctgcgtctgagcccgtgatgcctggtcaggagaacagcgctgaacaggctgtcgtatccgggctctcccggggaaaccccggtgacaccccaccggcatcgctgcagacaccatcgatgtctgatacagcgggcgaacaggaggttgtggtaccgcaggtgagggatgacgccgttccggtcatcgatctcagtgcgctggccatggccgccggggacaccagagagccggagccccccttcattgacatgaatacattcgtgaaggaaaaaccggagccgacccgccctgctgccggggagtcacaggaacaggcggccactcagtctgctgaacggccagcggccaccgccgaagcggccggcccggcagaagaggctgacggcatcgtctggggtccccgccgtccggatgtaccgcagaaagaagatcttgagaagatcatcaagtcactgacgtgggaagagcagcgtgacaacaccctgctgtaccggcttgatggcgaggatgcgttccgcgacctcggtaaccgcctggagatgtgcaacggggccagtcaggacgatcgtaaggtgctggccgccctggccgtcgctgcaaaattctacggtggcgtgattgaactgaccggcagccctgagtttaaggaaaaagccatgcggctcatcatcgagcatgacctcgatatccgcatgaaaattccggcccagcgcgcacagctcgaagagatgcgtaagcagatgggcgccacgcaggatgccgtggtcccgcatcaacccactccggatctgaaccgccatactccggacgctacgccgcaggcggcggcagaccagaccacacaggccactcaggagaagaccccggccggtccgcaacctcaggtgccgattcccccggaaccggctgcgccgggcaatacgtcaccggaggcagcggaacaggccgccccggtaccgccggctccgggtgaggtgccggctccgtcaaccccggtctctccggatgcaaacgccattaaggtaccggatatgcccgaagagcctgcgccggcggcactgtcgcccggagagagcgtcacggccgtactgatgaatttcggtgaagccatgtatgagaacaaagagcagcgcggaaacagcttctttatcgagctgcagaaccggggtggcagccacacatactggggacaggatctgcgtaagctcgttcaggaccataaggcgggcgacgtggtgacgctgaccctgaactcccgggacacctgggttgtcgacggggaggagcgtgagcgggtgaaaaacaactggtccctgacggctgcgtccaccggcatcgccgtggcccatgaccgtccggaacagggacagcagctgcagtcgttcccggttgataccttcggcaaactcacgcagcacatccgccaggcctggccggagtacatggccgacctgaaactgcctgcccgtctggaagaacgtcagttctaccttggcgaagatcgtcatccggtggccgcaccgcagggggcggcaggcatcacgccggcaggccaggatgtgccggagaaactgacgccggtcatggcctccatggacagccagtcaaaacagatggatttgctgctcgtccagtctgccggtgaacacctgcagggtgttgttcgcctcaacggcacactctatccggcactcgcctcccccacggcggataaccgccagctggttatcaacgccatcaccgaccagggtccccgctttgcgggctacggccaggcggtgaacttcgaaccggacggcgtcacccctgccgcccctcagctgatgacgtttcacctgaaaggtcgtgaagaggatgccccgcttcccgcccgcctctacaccccggaaaaacaggatgatgccctttttcagcgcctgggtttcgaacagacgtggaaacagtgggacgacgcccgaaagccggagggcagacaggaaaaagtgcttcatcaggaacactcccacagccccggccgctga

SEQ ID NO: 390085 - DNA, 576 bp, Salmonella enterica
atgcttgccgtcacccaaggtgatatcacccgcttcaacgttgatgcgattgttaatgccgccagcactcatcttcaccatggaggaggcgtaggtggggcgatacacaaggccgccggctctgcgttattgacagcctgccggacatacatcaggcaacacggtcatatccgaacgggggatgccgttcttacccctgcgggcctcctcccctgccgttatgtgattcatgccgtcggtccccgctggctgttcgggctgagagcccgtcatcaggataatttgcttgcaaaggcctactaccaggccctgatgcttgcccgtaaaaatgcactacaacgtgtcgcctttccctgtatcagtaccgggcattacttttacccgcacgaacgcgcggccaggattgctatcaacacgatcatcgcctttctggcagaaaccggcactgacatggacgtgttgtgcgtctgctacaacaaacgtgattttcgtatttaccagcgcctcctggcgcaggcacataaaccggggttagtcatgagccccccagagatgcccagaccaatggacatgtaa

SEQ ID NO: 390086 - DNA, 447 bp, Salmonella enterica
atgcaatccttcaaatgctggctgtcatgcagtctggtaatgatttctggtttcgctctcggttttctggtctgcatggcatcaccgctggttgataaatacagctttactctcccatggaacagcgagtacacggaccatgacaggatgatacgggcggccattttttctgcgaaagatgcgtgtgcctaccttacgcctcgtacctccttgcaggaaaaagttcccgacacggcgccctggtttgcctgcatagccacacagtatgaggcgtattcagaccagttttataaatttgctgtgacgaataaatatttagcctgtaatgcggaactaactcgcaacaaatcctgccgctttattgtccgggatgcgtttatggaagatggtcgcccctccaggaaacttccgccactcccccaggcgtcccccgatacgaaggaataa

SEQ ID NO: 390087 - DNA, 288 bp, Salmonella enterica
atgaaaagagacggattctggcgctacgccaccccgcctgtcagcgtggctggcattccactgccctttctgctgatttacctcacctggttccgctggcccgaatgggtcacgttttacatctgcagcgggatcctggtgttttttatggggctgaattttttcggctggggtgtccgaaccatcctccggcgcattgtcagcaccttccgcggcaaagtcgcttcaggccgtccctggtggtaccgacatttcactgaaaccccacgggactggacagggctgtaa

SEQ ID NO: 390088 - DNA, 1161 bp, Salmonella enterica
gtgagtcaaccggccttacccgatgaattcgggatttttccgttcagcggcgcattcagcgctgacgagttcaggaccttcttcgcctggtgtgcaaaacacagcgtcagcgatgtggatctggtcggcggctcgccggtctcggtcagccgctacggccgtcgcgtacgctgttctcaaagcgttctccccaataccctgctcggcaatatgctggacgatctgctgggccgggaaatccgtccccgggttcagggcggcatcccggctgaccgcgccattcagattgacggagacatgcatggtcgctacggtctgggccgcggagagcgggtacgcctgcgcacccattcaatccagggcacctccgcccgagaggaccgggccttgtccgtttcactgcgggtgatcccccacgccatccccgatttcctcggtatgggaattgagccggatctggccgccgccatgctgccggacagtggactcgggttcatttgcggccagaccggctccggtaaatccaccctgcaggccgcactgtaccgttattgccagaacacacagccggatcgcaaaatcgtgacctacgaagatccggttgaatacatccttggccggacggatgacctgctgccgccccatcaggcgcagataggccgcgatgtggccagctttgccgaaggtctgcgttctgccgttcgtcgtaacccggagctgattgggatcggggaaatcagggataccgaaaccgcagaagccgccgtacaggcaggtgaaaccgggcacctctgtatcggtaccatgcatacccgttcgcccggcgaaacgatcccccgactgctggggctgtttcacccgcaaatccgcgatgcgatggcctgggcggtactgggtatcatgcggtttattgtgaaccaggtgctggtccgcaccaccgacgggaaacgacgtgccctgcgtgagtacattgtgtttgacgatgccctgcgcagcaaactgcatggcctgccccacgaacagtgggcaagccacctcgatggcgttctgctcatggaaaaacgccgcatcgtcgaccaggttcgcgcgctgtatcactgcggtgatgtggcccgtgacgaagcggcgcgttacctgcctgccggagagctgaccgcatga

SEQ ID NO: 390089 - DNA, 846 bp, Salmonella enterica
atgaagatcctcctcgctgtcattctccctgccgtcctgctgaccggatgcgccagaacacccccgcccgcacagcccgactcatccgcggctccgccggatcttaatacctggctgcatccgcaggagaagcatcacggcgggatttccgacacacgctggcagatgctgacggaagccggcaaaacactgggcttccggggtggtaaggcacagcgctcatgggagctgactcaggcgctgatggcgcgcgactccaccctcagcgccctgtttgactttcgcccgttgattagcccggaaggctggctgccgccggtggtcgatgaggcgcaggatgtggcgcatatcacgccagaccagatacgcacctcttcccgggtctggagcatcattcgtcctgagcgctttgtcagtaacccgccgggctggcgggactggctgctgaaagggctggccaccacggccacccccggaaccgaaggccgggtagtgcctgaggacagcgcccagcgcgacgtctgggaaacggccctccgccagggctggaaggaggggcgggaaaatgcggacatgacgctggaagccaacatgaaccgccttacccgcgattaccggggcatgatgctgtatgccctgctctggcgtcagggcatgatcacccgtcctgaagtcgcagagcagatgcagaccgtcaccggcaccggacagaagatgatcaccggcgaccgcgtccgccgtctcaaaacccatgccgcgtttgagctgcagaagtcacgctggcgcccttccgtcacaacacaacccaaaggagcctctggtgagtcaaccggccttacccgatga

SEQ ID NO: 390090 - DNA, 468 bp, Salmonella enterica
atgaaacagtgtattcctgcagtcatgctggccggcgtcctgcttgccggctgccagtccttttcccgtcaggttcccgcatccgccgtccctgaccgctacggtgccgcatccgccgttgccgtcacccggcatgcgcagtaccggatgtgggataaaggcatttattcatccaccatcccgcagccctccgccacgcagttcatccgcgcgaacagcgatgcgctgtccttcgactgggaaggcgatgcgatcgaactgctggcagagctggcccgagtacgcggactgacgtttaactacagcggtgtccgcctcccgctgcctgtcacgctgcatgtgcgcgacatgacgttcgccaatgtcctgcgcctggttgagtcccagaccgcctggcgcgccacgcttcatcagtaccctggcctgctgcaggtcagtttcatgcaaccggagtccggaagaaaatga

SEQ ID NO: 390091 - DNA, 474 bp, Salmonella enterica
atgaaagccatttctgttcgccagccttgggcctggctcatcgtcaacggatacaaggatattgagaaccgaagtcgtgagacgaactatcgtggcccggtgctgattcatgcttctgcccaccgacccacacaggctgaaatccacgaagcccggctgattctggaaaaaacacacggcgcggtagcggcgcttcgtttgccccgtacggcagagcacttccatctggggggcattaccggcatggcgaccatcacaggaaccagccgtaacagtgactccccctggttctctggcccggttggctggatgcttcaggacgcacagctcgtcactttccggcctctcaggggaagactgtcgttcttcgagaccggatatcgtaaacacaggcttttcgggtttacggttcctgataattacacggatgccacagaggctgccatggccggtagcctgcctgttgcgccgtaa

SEQ ID NO: 390092 - DNA, 258 bp, Salmonella enterica
atgataaagccccccaaacgcctgtgcgactggagcggcgcgaccgtgaagctggtacacgaaaccagaaatagcctggcaacattacctgccgggaccacagggaaaattcgtgtgggatacaaaagccgtaatggtctgactttcatcagcaatccgtgtgaatgctgcggcgttcaggtgcacataacccgtatgcgtccggagcatttcgaattacttgagcttgtacagggtaatgcaggagaagagcaatga

SEQ ID NO: 390093 - DNA, 648 bp, Salmonella enterica
atgcaccaggttgatgatatcttccggcgtatcgccgaaacgcaaaaggtgatcacccgccgtaaacgttccgtagagcgtgcagagcgtaatctcgaggaagcagaagacctgctggcagcgctggaaaatgaacgtgatgaacacctcatttccggctggggcgacgcccccaactggcatgctattttcagtgcttacgagcccacacccgcactgcaggcataccgggacaaatgggtgagcaccgtacccgggcttcgtacaaccggatacaacaatattgagacccggcaggccgtattcgcgatttgttttgaaaccagcacgcaggcagaactcatgcagactgtccgcatggtggaatttgtcatgccgtacctgcatgcggacagtcgtggtgagaaaaccatgatgatctacaacgtgccggcacaagactgttcacacagtttcgtgttcaacacccgtaccggccagtacggtattggcacggaccgctatatgcaccgcgacgaaacacagtcgttcccgtcactggaggccgccctgcgtcacctgcagagcatgtcggacacggatatcgtgccagaacatcagcaggagttaatcggctacacagccgggaactcaggagaggagaaatga

SEQ ID NO: 390094 - DNA, 1191 bp, Salmonella enterica
atgaataaaaagatgacagcaaaaagccttattgccactgccgtactgatggcatttaacgcgaccgcagcaactagttattttgaagcccgtaacgatgcgatgggcggtaccggggtagcttcatcccattacagcgccgccgcgctggcgaacccggccctgctgactaaagcaaaggcaaatgatgacttcgcccttatcctgccgtccgtcggtgcccaggtctctgacccggatcatctggaagacggtgcggatgacgttaaggatgcatgggaccgtttcgacgacagcctgaacaccggcaactcctctgcacaggccgctgagctgaaacgccagctgagcaagttcaaagatactcatgcgaatgcgcaggccggtgtctctgccgtggccacgctgccgaacgacaccctgccggccgccctgttcgtgaaagcatggggaacggcgaccgtagacggaaaagtctctcagcacgaccttgattacctcgaccaggtcgctgccggcgcaacggccgacaaggacaacctcacctcaaaagcctacggccgtgccgcggtcatcaccgacgtcggtatcgccctggcgcatgagtttgaatccttaggccacacctggtccgttggctttacgccgaagtaccagcgtgttgacctcttcaactacaacgttgccgtgaaggactatgacagcagcgactttgacggtgaccagtaccgcaacaccaaaaacggcttcaacgccgacctcggtctggccgctgacctgaccgggaactggaacgtgggcctggtcgcgcagaacctgatcccgcgcagcatcgacagtaaggaagtgaatggagaaaaagccactttcaaagtacgtccgcaggtcactgccggtacgtcatggaccaacggcttcttcacgggcgcggttgacgtggatctgaccgaggccagcggcttcactgacgacaaaaaacgccagttcgccagcatcgggggtgaaatcaatgcctggagctgggcacagctgcgcgcaggttaccgccagaacatggcctcctctgacggcagcgccttcacggccggtatcggcatctccccgttcgatgttgttcatctcgatctgaccggcattgccggtaccgaccgtacttacggcgccgtggcacaactgtccttcactttctga

SEQ ID NO: 390095 - DNA, 849 bp, Salmonella enterica
atgacaaacagccttacgggcatcttcgcctcattactggcgcttccgggttttgagaaagagaaaattgccgcgctgctgagtgagaatagcagtaaaaaacttttatcgccgacaacgttaagattccggcccggtaccaaagctctggttgacctgatttcggaaaaactcggaatttcggcgtcggaggtgataaacctgattcttgagagcacgctgagggagatttacttccccttcagccatacggcagaaagtattgctgaccgttttgaatacctgctgaagtcccacggcctgagcccgccagatgtcgcgcagttgctctccccgtggaacctgcgtctgagtattctgcgggaccgggaacggacgatggactacctgacgcctcccctgcttgagacactggccagatggttttatgtctcgcaggactggcttttcgggcgaagcgattgccctgttgataccagcctgccgatccaccggtggccacagagcgaggaggaattcaggaaacgaataattccgtccgatgaaaatcacaatattaaaatcatattctggactaacgtaaattcgcccgacaatgaatatgaaaaaagaacaggtattttaattaagaaaaaagaaacgtccggcaatgttatttatcaccctgtattgtccatcacaccacagtgtttaaatagcgagcaaagagactgggtaaccagccttaagacttccctgaagggtgcagcgagtataaggtttatcacgctcggtgaccgtgcagccactgcacttgaacagggaacgacgttaccggcatttattttaaataagtcagtgaatacctga

SEQ ID NO: 390096 - DNA, 549 bp, Salmonella enterica
atgaccggactcctgattttcacagcagtattttcgttgttgttagcactatttcgcccggtggtgttaattcgggcgcggttttcccgccatgctgaccggggattttacaccgtcggaacaacactcaaagggaaacgctggcgcaccatgcacctgacttcttatgacccggtgggcagattcaaccgaatacgggcagctcatttccatcagtgctttctggtcgcactggagaaggccctgcgcggtttccgggagccgctttattttcgttcgcacctcatgcgccctgttcacctgcgcagcatggaagaatgtctggcagcgtttccggaacggcgctggcgtaaaaagcgtgttcgtatctcacgggcagagctctggggtatacgcctgcagacactgtttaacgaatggcgctggattaccccgcaggaccggggttacctgattgtcattggcccgcctagaaccagaggaagaagcaaacccaaaagtgattcggagcgaatacacgaacgtattcgatctgacagatcgaaataa

SEQ ID NO: 390097 - DNA, 1161 bp, Salmonella enterica
atgtcgtcagttgttcgtattcgaaaattaacgttgagtcgtgcacttgataaatattacgaaaccgtttcggttcataaaaaaggccatcggcaggagttctaccggacacaggtgataaaacggcatccacttgctgataaattcatggatgagatcaccactgttgatattgcggcatatcgcgaccaccggttgacgcaggccaccacccgatcgggtaaaccggtttcggggaatacggtccgtcttgaaatggcgctgctctcctccctgttcaatatcgcccgcgttgaatggggaacatgccggactaacccggtcacgcttgtacgtaagccaaaagtctcccccggacgcgatcgccgactgacatcatcagaagagcgccgtctttcccgctacttcagggaacgaaatccggaggtttacatcatttttcacctggcgctggaaacggccatgcgacagggtgagattctgggactctgccgtgagcatctcgatttacagcacggcattgcgcacctgcccgaaaccaaaaatggttcatcacgggatgttcccctttcccgtcgcgcacgtaatctgctgcagtcactgcccgcgcagctcagcggtaaaatattcagctatacgtcatccgggtttaaaagcgcatggcggacggccattaaggaactgaagattgttgatctgcattttcacgacctgcgtcacgaggccatcagccgcttctttgaactcggcacactgaacgtcatggaagtggcggccatttccggtcaccgttccatgaatatgctgaaacgctatacccacctgcgcgcctggcaactggtcagcaagctcgatgcccggcgccgtcagacgcaaaaaatcgccccttatttcgtcccctatcccgcaaggatagaagagcaacagggacaggaagagggtatctgtgtgcacctctgcgattttgaagggctgaccgcgtccggtccgacccgcgaaaccgcattaagccgcgccagcgaacttcttctgcgtacgctggccatcgcagcgcagaaaggcgacagggtaccggcaccgggcgaactgccggcagaaacccgggacagggtcatgatttgcccgcttaaccccacgatggcactgggccttacccgttaa

SEQ ID NO: 390098 - DNA, 342 bp, Salmonella enterica
atgttgttcaggaagtctaagcacctcatctgtaaagtaatgctaaacatgctgtcaatattttttattgatggtgccactatgttgccagtccgtcttaaaattgctcgcttacgggccaatctcactcaagaaaaattaggtgtacttgccggtattgaagaagcgactgctcgatcccgtatatctcagtatgaaagcggcatacaccgtccgacatttgaaacgatgtgtgcctttgccagagtgctcaacgtaccggagtgctatttctatacggtcgatgatgattttgccgaagcggtgctggatctttatgtccggtgggaaaataaatcctga

SEQ ID NO: 390099 - DNA, 261 bp, Salmonella enterica
atgcttcctgttcgtctcaaaacagcccggttacacgctcgtctgactcaggaaaagctaggtgttcttgctggtattgaggaagaaaccgcacgttctcgcgtatctcagtacgagggtggggtacatcgcccgacttttgaaatgatgtgcgcatttgcgagggtgcttaatgtgccggaatgctatttctatgcagttaatgataactttgctgaaatggttctggagctttatcagaaatatcagaatcagtcctga

SEQ ID NO: 390100 - DNA, 2034 bp, Salmonella enterica
atgggaatacttcctcaagtctattcaacacatcaacaagaaaccgatagctttagaaaaatagaatcaataatcccatctgaaaaatttattcttcgtaaagaaagcggtggggattatggtgtcgattgtatccttgaaattatcgaggatggttttgcaacgaatatcagaagccacattcagctaaagagtaaacaaaatcaatttctcgattctgatggatactttaaatattccgtaccaatcaaaacaatcaattatctatcaaatacactgagctctatatttcttatttattccgaatctgaggacgttgtctattgggagtggaactccgtaattttagaaaaaataaatcaaagtacaaaaacagggacaaaaagcttcaaatacgctttctataaaactcttgatgataaaagcattgatgaaatatatctcaccataaaaaataagaatgagattataattaatttagggttaaactctttagagaaaggtgtgttagagaatctaattactgaagatattagttatgatttattactgaatttcttcaagaagaatgactacgattctatagtgggtaaattaaagaatataaaagatcctacattaggtgaaataagtttattatcactaagttattataatatgtatcagtatgataaggctttgatggttattctaagatttgaaaacaaaggatttaaaaacaatcatctattaaaaattaaagcgtgtattttttgtgagaaaggaataaaagaaaaaaatcttaatcttgttaaagatgcgaaaaaaatacatgaggaagctttaaatggcgaatgctgggattggctagactactataattatgcaaatatggatttagcactcggtaattttaaggatgccattaacaaatacaataaggcattaaaaataaatcaaaaagatgcaagaacatggaaaaatttggcacaatgttactatgaaataggtaaaaacaaaaaagcattttcttgtcttgatcaggccctaattattaatccagaattaattgaagctattctaactaaagcagcaatgcttcgtgatgttaaaaaagcccctcttaatgcagtagaactttatgatcaagcaatgaatatcgccactcaaacaggtttcgatatgaactctattttctatcaaaaatcgctgtcttttttccaggcagataaaaatttagacgctatatctacaatacaagatggactcatatatttccctggcgacttttatcttactaatctcaagctatcaattttagcccagagatggtcaactgacactacattagccgaaatggcaattcaagatttctcacaacagcttgaaaaatatccggatgatattgaagctaaaaaaatattagcagaaatttttctaaaaaataatgatactaaaaaatttgaagacactattaaattatgtctcgaacaatatgagtttccatataacttagatgatttgattgatcacaatatcgaattaatatttatttttattaagaatattgataaaattcataaatatagaaaaaacagcaatttatgtggggaattattttccatctatgaactgaatatagctcacgctaatgaaattcaatttcatttcgatattctatatgctgatctgtatacaaaaatagcaaaaaaattaaataaaaagaatttcttgaatattcttgataagcatctcttatccgggattgaagtttcaaaaccagtatctcgcatactttctaagcaccaatcaagcaaaatgaaaagtaaagaggaaattgcagataacattgctcacttaattatatccatacctgaaattacaatcggagaaatatcaagacaaataggtcatgcagcgggtatccttggatacgactcttcccttttggatacaaatattgatacatcaaagaaaattagtgattggtttgccctttctgttgaaccaataataattggagcaaatgaaacatataagatatttaagaaataa

SEQ ID NO: 390101 - DNA, 960 bp, Salmonella enterica
atgaaagatgaggaagataatttatctgtgtttatatcctatgcttggggtggggcattggaaaaaaaagaatggatcaggcaacacattgtcgaaagtctgaaatggaaatacccagtcttctgggatcgtgacagtattggtttcggcgagtcaattgatgcttgtatatcaaaagcacttgaccagagacctctaatggttttttgtatttgcgataccgattatttggtttctgcccaaaaagttggatcaggtctgtaccgggaattgcagttactgacaaaaattgccacattggaaggtgtgaaaataattccgctaatttttgatactgaatgtgctcagaatcttcctgaacctcttgatggtaggacttacctcaatttggaagagatgcatcatcgcggtttgtaccttggagatgctatgctagctttagctgatggtagaactcagtcatggatgactatgtggttaaaaaaaaggattgctcgggatgatctccatagatatgcaagtagctattttcagatgcagcaattaagcatttgggggaatgcgagtactcatgaggtaacgattagaccgggagaattgttgctagccccgcaatggatgtgggatagtaatgagtggaactatatgctatcggacgaaaatgctactttttgtccccttaaagggcgttggcattgggattattttacgccgtctcgtggtatgagagctcttggtactgctgtcatgtcagcgttttttccacaatgtactactcaagttgagcgagctgcattgcaaaatgcaggagtagtcttagctcagaaagtttttgctatgacgtatatgacggaatcgtttattcttgaatataaggagattattagtattttacttaacgatagcaacggctataaagccatagagttattattagaatcaacaagacgattgaaataa

SEQ ID NO: 390102 - DNA, 876 bp, Salmonella enterica
atgcggttatcaagatccttatgcaaagtagttggcgatgttattgctaactcaggctctcatgcagctttagacatgttattcctatcgtcaggtgcaccgggagagccccctgctggatctcatagtacaaaatggaaagattggctattccttgcgggacaagatccagctactgatagtttgtctgtactcggtggagtcattgaggagtttatggatcttcctccgaaagaagaaactccagaatatatagagtggaaagaaaaacgagaaaaaatagaagccgtattacaagataatgggcttagatattatcgctttggtcgcgtattgcctcaaggccaaatcccgccaaaccaagtggattatcctgatagtgtaatcacctatcaacaaccggttatgccagaaaaggttgagagcttactagaaagactgattaaaggtttgcatcgtgcaatgcacccacttactcacagaagaaaagggagtcaggtattatctttcaataatgaatacgatgtgcaagaccttcttcatgccttgcttagaccatgggttcaggacatccgtcctgaagaatttaccccaagctatgctggttcaagcacacgaatggattttttgttacctgcacacaaattagttctggaaacaaaaattgtccgagatcgtaaccatgcaaaaaaaataggcgatgaacttattattgacactgaacattatcggcgtcatatggactgtaaaaatctctggtgtgtgatctacgatccgaacaagttcattacaaattctgaaggtcttaaatcagacctagaagggaaaagaatctctaaagatggtgaactaatcgttaaagtttttgtactttag

SEQ ID NO: 390103 - DNA, 147 bp, Salmonella enterica; identical to SEQ ID NO: 85749

SEQ ID NO: 390104 - DNA, 276 bp, Salmonella enterica
atggcctgtagcgcgaatctgtttccgcagattggcacgcttcgtgagcacaataatgttttttatgttcagggttattccggatttggcgtcacgccttcccatattgtatgcaaaatcctggccgaaggaataaatggcggttccgagcggtatcgtctgatgagtagcattccccacgcgacaatttatggtcgcgacagtttacgtctattgctggtcagtgcgggaaaactgatacatcaaacagccggtttctggaaaggccggaattaa

SEQ ID NO: 390105 - DNA, 609 bp, Salmonella enterica
atgcttaaacgtctggcttacctgatagcaggcagcgctctccttctgctggtagcggcgatgttctggggcttcaaccgcctgaatgccctgacgctggcgcagcaacagacacaacggcagataacacagtggcgcgaccagccacaacacaataacgattaccacgagttacaggctgccgtaaaaaatattaccggacgcacggaaacccttaccaggcagcttaacgatgccgccagcgctcaggccgaacaacttcaatccattaacgaacagatcaaggcgctggagagacaggtccagaccctgagcaccagttatcaacacctgcaacaacagaccgccacgcgcagccgcgcaaaggcaaaaagccccgtcccatctccgctttgggccgcaaaggcccctttttctcttatcagcagcgagtttcgcgccgggcggcagttcgccgtcattgccccatccggatatcgctcgctctcacagcttcagcttgtggcccccggcgacagcgtgcagggctggcaattgctgcaactggacggcagtcacgcgactttccgtaaaggcgggcagcggctgacgctgaacgccggaggataa

SEQ ID NO: 390106 - DNA, 1527 bp, Salmonella enterica
atgattgagatttacttaaatgatatagatgtcgatgatataaaacatatccgacagtcagatgatattgaggtatttattcctttagagagtgttggtttctcaagctcatattttgacttatgcgatgactatcttgaggctatatgggcaggagaacgattggcaagcacttgtcaacacgccagggcagtctcatattacaacagggaaaatcataaatcgttcattaaattatctttaacaaagccaaacaaaaaatttcatgaagcgctaagggattgtatagtactttataaacgatatgatgacagtctttatagtgaacctcccttagaatacagtaaaatcatagatgcagtactctctatagaaaatgatctagataattttaatataaaggtacctgccttgcatgatttttattatgcaaatttaataggaggtaaatattttgagatgatgtctgatgttccagatgaatatcgaagtgaaataaataagtatcctgagagagctttgggtttctggaagagcgcttacagtagcaagattggtggtagatgttatacatcaccagattcttggattttaccaaatactgttgatataaataacttttttaaagtcaccgagcaaaactacaattttgaaagttttataccctctagcattgtagtgttaaaaggggtctcttacactacctctaatgtcatcatttcttatttcccaatgaatcattactttaaatctaaagtttgtagtagtattgagttgtcaagagatgaatataggtggccacccgatccatttgattggtctaactctacatttacttattcgccctataataatgctttgagggagcagatagaccatcacagtagcttactctcccaaaaaccgactcatgagcaatgttatgttgatccaaacggaactttaataatagttgatgatggtaatttttaccatctcctttacgataccgctgagttgaatttatcccagataaaaaactttaacgaaacattaggtgaagtccttttatctaccggcattaatataggattttccgctgggttaacatataattggtccgaaattgatgacgagcaatttgaacagctttgctatgatataatctatagccatccacgttttaataatgaaacgatcagaaagttaggtaagtctcgttcacgtgatggaggtagagatatacaagtatatgatattcctaccgaacgattaatggagccaaaaaaatggattttccagtgtaaattggtcaccggagcaggatcactttctgcaacgaaacttacagatgttggtgatatgttagattcttacgatgtcgaagggtttggtgtttttactaacactataatcgacgcaactctttatgacaaacttgataaagtatgttcaaaaaggaatgtagagcaactcaatttctccgcccttgaaattgagaaagaattaataaggaagccatatataaggatgaagtatttcaaatag

SEQ ID NO: 390107 - DNA, 978 bp, Salmonella enterica
atgagtcagaaagcatggtcttttaaagcagtaggtcaggatgatctccggtacttcgggaataacggttatcaagatgactcaactagtttttatcgatatgacaactttgtgccaaaccataagcaagtcaaaaaaggagatattgtcatagtaactgatagaaaaaatgttcagggtatatcagttataaccaatttatcttcagccccatacataaaagctcgtaaccgatgcccatatgaaaattgcacgccagcaaagttaatccttcggaaatctaaaaaaccaaagtggcgctgctgcaatggacatgaatttgaacagcctaaagtagaagacgttcctgcatttgaatttaaagctgaatataagcaaaactacatgcccattaattctatctccataatagatttaatatctcatacaccgcgctacaacgttcaaagttctattcaagaagttgattttgaatgggcaaaaagtctattttgtaatgtcattcagttggattctactgaagcggacattgatgatattcctctcgatgtagatgatcagcgaaagattattctacggcaaattaagcaaaggcgtgggcaaaaaacttttcgcgacactctgatatcccaagcagcaaaatgtgcaataagtggttgtgaaatcattgatatcctcgaagccgcacatatcaccgcatacaaaaatgatacacataaccatataagtaatggactattattgcgttgtgatatgcatactctttacgatctggatttatttgcaatcgatccggattcgttcgttatttactttgctccacagatccaagataaagagtatgtaaagtatcatggaaaaaagctacatgtagcgtacaagattaatcacggagctcttgtcgaaaggtggaaaaggtttactgaaaaatatgctttgactgtagtcaattcgctaaatcttaccatgcatgtttaa

SEQ ID NO: 390108 - DNA, 1296 bp, Salmonella enterica
atgtcagaaagtctgcaacctaatgtcactcaaacgttacctgacgacagggaagagctttaccaccttgtctggcgcgagccagcggagagaatcgcctctctctatagcatcagtaaagaacaactgacaaaacgatgcgctgaattacgaataccgagaccgctcgccggatactggaaggcgctggcgaaaggaaccgcaccggcggtacctgctttgcctgatttgaagagtggcaaggtagtaaaatcccccagaaaaaccagccagaacattcctcttcccacaaaaatatcatcgaaagtagcagcgccagcaccgcgaaagcgagcaaggacagcgggtagtggctatgcactgatcgatgatctcaaaacttaccttcccgtctcttccgtcacaaaagacggctactacaaaccaacgaaaaagaagctactcgatctgaatgtttcagaaactggattcaacagtgctatcgattttctgagtcgattctttgctgcactgggaaagcaaggttattgggtaaggttagctgaaggaaatgaaggacttcattgtcagggcatagatatcaaagaaaacccaaaagagggggggttgcgctatgacagtttatggcgtccttgttcagccagtattatctgcgttggggatatgctgttcgcctttaacctggctgaaatgacggaatatgttccggcaaaagaggttaatggccgatacatccgcgatgaaacaatgatccgctggatgagggggaagtatgacaagccgtttcgctatgtcattaaacatgccttacctaccggacgattctttctacagctctactcgccatactcgtcaactaattggcaggttgagtttcgccagacaaaacagtgcgggcttataagccagatcccgaaaatcatttccgcggtgcgtgatgctgttccgttgataaagaagcagcaggaagaagccagaattaaagcagaagaacggcgaatccagtgggaactggatgaaaagagatatcgggaaaaggagcgggtcagaagggaaaaagaggcatacaacgccagcttagccgaactggaagttattatggtgcagtgggcagaagataagcgtatagagcagttttttcgtgaagcagagttggatgcggtggattttgatgagcaacaaaggttaaagattatggagcgcttacaactggctcggcagttcttgtcggtagataaggcggctgagcgtttgatgaaatggaggattccgcaggaacggttagataaagcgtag

SEQ ID NO: 390109 - DNA, 738 bp, Salmonella enterica
atgattactccagacgccaacatccacagcatctctacaccagttcaggttcagcaggcggccataccaccgccagcagaaatgccgtttctttctgccccggttcataaccacaccgcttttcactacacccgatttacccgccacactctgctgcgccctatcgcccgtgaaacgggaagtcgaatctaccttcaggaacaacccacctgtggtttctggtatctgaaccatggcgtcattggcctgcaccacacattaaaaaacggcaaagagctactggttcgcgcctgccagcaaggtgaatggtttggttatctggggctgtttggtacggagttctatcactgccatgcctgcgttttgcagaccgcatcgctgtgccacgttattccacattccaacagcgagttcctgcatcattacccgcagtttgctcatttcctgctaaaccaggtggtggcgaatctgtccgatgcggagcatcgcatgacctggatcacccgctatcgcacccgccaccgggttctgagtagcctctggtatctgacgagttatttttccggctatgactggacgtggcgtgaagtagccgagtttgcgggatgtgagacagaaaccgctttacggttcagtaaggaattaagacaggccggaatactggatgactcacagcgccgcttgcacgtatgtcacccagaacaactggcggcactacttgctggcacccataattag

SEQ ID NO: 390110 - DNA, 468 bp, Salmonella enterica
atgacaaaaccagtatcaaccatcaaaaagatccgccagcagttccgtctgagttgcgacagcgccgtgcaccaggctcttcaccgggcaaaacagcgctacggggcactgcgtctgaccggtgaactgcatgctcagggttactgcttcaacgtgaagaccgtggcagccagcctgcgtcgtcaggcgctgcgggcgaaagcttcgcggaagtttatcccggtcagttaccgcgagcatggcctgccggtgtcggagaacctacagaagcaggatttttacgccagcggtccaaaccagaaatggtcgggtgataccacctgtttacgtactgatgaaggctggctgtatctgactgtcgtcattgacctgtggtcgcgtgccgttacagtgccagtggcggtctcagcccggaacagtttgaaaaccagaacctcgcttaggtctgtgtccacattacgtgggtaa

SEQ ID NO: 390111 - DNA, 1416 bp, Salmonella enterica
  misc_feature (436)..(445): n is a, c, g, or t
atgaaacgtgctccgaacttaaaatttctgccaaaggaaaaattcacagaggcaatcatttttgccggggctgatgcttacgctcatgcaaagggatgggaagagggcctgggtaaacaaattgccgaagatacaacgcctcctgtctggctggggcctaagcaactggcggaactggataacctgcaaattattgataaggggcggcatagtgctcgtgtatatctggcagggaacattgaaccgagactgataaacgccattggcgagaagctggcgcaggcaggagtgcaagatgccaagctatacaaggggattcccgaccaccagccggagaactggaaagagtatctttcacgtttgcgcgaacggattgaggattctgtactagaggattctatgcgtcatagtttgccgctgagcgttggatctgatnnnnnnnnnngcctgagcagtatttacggccccagtggatcttacaaaagttttctagctgtatcctgggcctgccatgttgcggggggatttaaatgggctggaaaatctgtctcaccaggtgctgtgatgtacgttgttggagaaggggggatcggtgttccacgccgtattaaagcatgggagaaattgcatcatgtgaagctggataatctttttctggtcaatcgtcctgtcttcccggtgcgtcgtgaggaaacagaagagatgataaaagctgcaaaggatgtgaaataccgaacgggacagccggtacgcctgatcgtcgtagatacgctggcccgttgttttggcggtaatgatgagaatgatgcccgggatatgggggcgtttattgaaggctgcgacgttataaagcgtgaaaccggtgccacattactagtggtccaccattctggtaaggatgatacaaagggagctcggggctccagcgcattcagggctgcacttgatgcagagtttaacattcggcgtgagggggaaggtggggcaataattcttacctgcaccaagatgaaagatgcagaagaacccaaacaagctgctttcgatttgcgtacggtagaactgttcaccgaccgcgatggtgaaatagtctcgtcgctggttgttcgtgatataccacgtgaagcaagggagttggaccctgaactggcggagattaagaatctgacgggcaatcatgcagcactctggcagagtattcgcagcaggaaagcaaaaggagaaacatgcaacaaagctgttttgcgtgatgatatggaggccatgatgggagataaggctagaaaatcctttcaccaaatggctggagaaactgatccgcgatgggctaatagaggtcgattatcaaggcgtgattacactactctcaggcgaataattgcggcagcaaatgcggttggtgcgctaattatttaa

SEQ ID NO: 390112 - DNA, 492 bp, Salmonella enterica
atggacttgtccaaggctaacttttacagttttatcgaccaatatgctgacataactggcgcgtcgccaagtactgcaggtaacgtccgtagcgtttgctatttggttaaagagtccctttctgacagtgtacctgcagataagtgggatacgaccggcattattaacacttacgttatggccaatggtattgctgaggatacgcaaaaatcctacatcagccgctttaacggagctgtcgcaaaatttattgcgtatgagaaaggcgaagatgtgacagtgaagcagcgtagatcgcctgtgaaaaacagccaatcatcgccggtcagtttgcagaatactttagtcaaaacctttgaactgccgattcctcttcgtgacgaacttaccgtaatcattggtaatcttcctcgtgatttgaccaaagacgaggcgagaaggatcagtaccattattgagtcctttgcggtttcacaaccagcaaacgactaa

SEQ ID NO: 390113 - DNA, 261 bp, Salmonella enterica
atgccaatcacaaatgaagaacgtattgaacatatggaaaagtttaatctaaccagtttggacacaatgcctactgctgattaccgggaggcattagaacaagaagcttttttttgggacgatccgcacggtttcattatgcataccctttctggggaacgtatcgtcacaaatacagaacaacttgatgccttacttgagcatttggaaggatacagggctctgttaccagatcccccgatgtggatgagcgagaagtaa

SEQ ID NO: 390114 - DNA, 474 bp, Salmonella enterica
atgactgaaaatgacgttatgggtgccttgttcgctcagcaaaggatacagattcttcacattggcaagcatcatgatgaatttagcgacgcatatctccacgcctgggagtccggcgtttacccattgatgagcgataccgatggcagcgtcccccgtaaacctcacgagttttatgctcagtatttcaccgcatcaaaagagaaagtagagtttctgttaaagcgtcttgatgatgcttggcgtaaaaatgaagggctcacattttatgacctggaggatgaattaggcgttcgaggctacagctctaaaggatggaatagaggtgatttaatcgatatttgccgatatctgtaccttgacggttgctacgataatgagttttggtctgcgctagttgagaacgggaaatgcccgagcgaggcgcttagtctaacttcaaaatttcaaagagaagttgatatcgacttctga

SEQ ID NO: 390115 - DNA, 1155 bp, Salmonella enterica
atgaagaaattactcgaattacgtcagcaaaaaaccgaaatcaaaacgcagatgcgtaacctgcttgaaaaagccgacagcgaaaaacgcagcctgaccgatgaggaaggcacgcagtttgacgaactccgcatccgcgccgggacactcgatactgaaatcagtcgctacgaagccatagccagcgaagaacgtaaccagccaggccacccggtgaacgaaaacggcgtaagcaacgacgaactacgtacctacattctgaccggggaagcccgcagcctgtctaccagcgttccggaggacggtggctataccgttattcctgaacttaacaaacagattatgcagcagcttaacgatgagtccgttatgcgcaaaatctgcaccgtgaaaaaaatcggcagtaacgagtttaaacagcttgtctctgtgggcggagcgggggtgaaccacggcgaggaaggaaaagcccgtggtgagacaactacgccgaaactggaagaagtcagtatccgcctgttcccggtttacacctatccgaagaccacgcaggaaattatcgatttttctggtgtggatatcatgggctggctgtcctctgaaattggcgatgctttcgtcgataccgaagaagcggatctggcatctggagacggcgtgaaaaaagcgaagggttttctctcttacccactcagcccggacggtgacaaaacgcgtccgttcggcacaatccagaaggtcaccgtgagtgtacttaatgcggattttctgattgacctgaaatttaaacttcgtgcgaagtatcgcaaaaatgccgtatgggtaacgaactccaccacggcggcctccgttcagaaactgaaaaacggtaacggggattacatctggcgcgaccgtttacaggcaggtgatccagatacgctgctgggcctcccggttgaatatctcgaaaccatgccggacgacctgatcggtattggcgactttaaacgtggctatttcatcgttgaccatgagacaggcacccgcacccgcccggataacatcaccgaaccgggctttatcaaaattcatacggataaatacctgggcggtggtgtggttgattccggcgccatcaagctgctcgaaatctctgcttcctccaccaaataa

SEQ ID NO: 390116 - DNA, 561 bp, Salmonella enterica
atggataccgttaattttgaaatccgcacctctgaacttatcgccaaagagcgcaggctggtgggctatgcggtgcgctggaacagcctgtcagaaattatctgggacgaattccgcgaacagtttacgccgggagcatttgctggctatctcgcatccggtaatgatgtgcgctgtttatttgaacatgactatacccaactgctggggcgtaccagatccggcacgctgatactgtcggaagatgatacgggtctgcgatttgaactaacaccacctaatactcagttaggtaatgatgtgctggagctggtggaacggggcgatatagaaggcatgtcgtttggattccgggcgttgaaagagaactgggatattacccagtcgccttatctgcgtatcgtcaccgctgctgaactgcgagaaattacgatcacttctctgcctgcttacccggagtccggtgtggaaattgcacaccgctcgctttattcccagtatcctgagttacgccgcgctggcgataaccgccgacgctgggccgaactggtggagatctga

SEQ ID NO: 390117 - DNA, 1230 bp, Salmonella enterica
atgtggactctctggcctttcagccgtaaggcagaacaacgcagcatggccatcgatgaatggctggcgatggtgggcatacctaataccggatccggcgaatatgtatctgcggggacggcggaatctctgccggctgtcatgaacgccgtatcggtcatcagtgaagcagtggcaaccatgccctgttatctctaccgggtaacgaatgataaagggcgtgaggcgcgggagtggctgagtaatcacccggttgattatctgctgaatgagcagccgaacgactgtcagacaccgtaccagtttaaacgcacgatgatgcggcactgtctgctgaacggtaacgcttatgcggtgatccgctggggccgtgacggacagcctgaatcattgcatccatatgcaccggggaccgtagttccggagcgtctgtccagacaccgttacaaatacactattactgaaccctttagcggaatcacccgtacttatcttcaggaagagattctgcatctgcgttatgccacggacgatggttttctggggcgctcaccgataaccatctgccgggaagcgctgggccttggactggcccagcagcgccacggcgctaacatcatgaaagagggcatgatggcggcgggcattgtcaaagcaaaagactggcttgacggcgtgaacggtaaaaaagccctggatgcactggagcggtacaagggtgcacgaaatgccgggaaaacgcccattcttgaaggaggaatggattacgaaaaattgggcatgagtaatcaggatgctgaatggctggcttcccggcgtttttccattgaagacattgcccgtatgtttaatgtttctccgatctttcttcaggaatacagcaacagtacctacagcaactttagcgaagcgagccgcgcatttctcactatgaccatgcgtccctggctggcgaatttcgaacaacaaatcaaatccgctttgctggtggcccgtcctgcatccggtacccgttaccaggttgagttcgattctgctgaccttctccgcgctacaccaaccgaacgctacgccacttacgaacgcggtattaaaaacgggattatgaatccgaatgaagcccgcgaacgtgaggggatgccaccgcgtgaaggtggggacgaattcagccaggcatggaagcagcagatcgaagtaaataacaataaaagtaaggagggtagcgaatga

SEQ ID NO: 390118 - DNA, 339 bp, Salmonella enterica
atgagagccggaggattaaaacatcgtataacgctgcagcgctatgaacaaagtcaggggccattgggagaaccgataaaacgctgggtggactacgccacgatctgggctgaggtaaaaggtatctctggccgggagcttctggctaccggttcgtggtcctctgaggccacagtcagaatatggatacgctatcgcagtgatgttaagcagggacacagggtgaaatatctgtcacccgcagtcagtggtgatatttacggtatagaggcggcccttccggataacgaccgcaccagtcttgagctcctttgtaaaggaggcgtggccaatggctga

SEQ ID NO: 390119 - DNA, 291 bp, Salmonella enterica
atggctgaattaataactctggaagaagtaaaactgcattgccgcatcgacggggatgatgagaacgccctgataaacgggtatatcgtcgccgcgctggagatttgccagaaacatatcggcaggcgttttgatgacggactcgagtttaatcctgcgctgaaggtcgggtgtctgctactggtcggtcactggtatgagcaccgggaaatagtggcggaaaaaacgtccgagcttccctttagcacttcgtcattgtggaactactaccgggaacctggagtgtattaa

SEQ ID NO: 390120 - DNA, 444 bp, Salmonella enterica
atgccatggcaacctttacgacgctgtacagagcccggatgtaataaacgggtaaagtccggcaaatgtgatgaacacaaacggaatgcacaacggcagagtgatagccgacgaggcacacgcacagaacgcggttactccaaccgatggggagaataccggctcctctttctgaagactaatccgctgtgcgcccactgccatagtgctggcgtctataagcaggcaactatcgttgatcacatcatacctattgagggcgaaggtgatgtgttgttctggccatccagtaaccaccagccgttatgtgctgcctgtcatggtcgcaagacagccacaacggacccgctaactaagcagcagcgtaaagccggaatgttccgggaacaggaagaagcagcgcagcgccgcaacgactgggtctatgaggttgctcatgagtga

SEQ ID NO: 390121 - DNA, 183 bp, Salmonella enterica
atgagtgaacaggaatacatgagtcagcgtgaacggggtgggggaggtttcaaagacaaccccctcccggcgaggaaccacccgctccctcaaatttttatgcacagtgatttttttgaaaataaaacgaaaaggaaaatagtgatttatgccaagaccaccgaaaccgcccgcttaccttga

SEQ ID NO: 390122 - DNA, 357 bp, Salmonella enterica
atgccaagaccaccgaaaccgcccgcttaccttgatgaaatcgcggcgcagcagtggaaagcaaaggcgaagcaactggcggaacgtggtgatctgacgcctgccgactggaacaaccttgagctttattgcgtcaactattcgatgtaccgcaaagctgtggaagaccttgccacacggggattcagcattgtgaacagccagggcggtgagagccggaacccggcactgagcgcaaaggctgatgccgaaaaaattctcataaaaatgtcgtcgttgctgggctttgatccggtgagccgtcgccgtaacccgcctgaaactgaagaggaagacgaacttgaccgtatggaatga

SEQ ID NO: 390123 - DNA, 1662 bp, Salmonella enterica
ttgaccgtatggaatgattacgccagcgctattaaatctggcgaaattccggcctgtaagcgggtaaaacaggccgtcgaaaggtacttttcagacctgaatgatctccgttatgagtttgatacggcgacagtagagcggtttatcgcgttctcgcgactttgccctcacgtcaaaggtccgttgcgcggccagccaatcgcgctggaaccgtggcagcaattcgccttcgctaatctgctgggctttaaggtcagggagacaggtcgcagaaagtacagcagcgcctttatcgaagtgccgcgcaagaatgccaaatccactgtggccgccatgctggctaactggttcctggtaatggaaaaaggccagcaggatatttacacggcggcggtgagtcgggatcaggcccgtatcgtgttcgacgatgcccgccagatgtgcctgctgtcaaaaccgctgaaaaagcgcgtcaatattcaggcgcacaagatcattttcccgaagagcaacagcctgttaaaaccgctggcggcaaaagcggccactattgaagggactaacccaagcctggcgattgtcgatgaataccaccttcatccggataacggagtttattccgcgcttgagctgggtatgggcgcacgtcctgaggcgattttgttcgccatcactactgccgggagtaacgtcgtttccgcctgtaaacagcattatgactactgctgccagattctggccggggaagagagcaacgattctctgtttgtcctgatctacgagttggacgacgaaagcgaggttgaacagccggaaatgtggagcaaggctaaccctaacctgcatgtgtccgttgacgccgcgaaactggaatccaccatccagaaagctcgtagcataccgtcgcagtgggtggaaatgctgaccaaacgtttcaatatctggtgtcagggatccacgccgtggatgggggccggggcatgggatgcctgtgcactcgattatgctgaagaagatctggccggaatggagtgttacgccgggtttgatctgtcctcaaccagcgatattaccagtgtaagttacgctttccagttcgacagggagatccgacttcttacccgtcattatctgccggaagcgcagctgcttaacgtcgctaacaaaaaccgcaccatctatcgccagtgggtgaacgcgggctggatacgcaccacgcccggcgactgtatcgactatgaccgcatccgtgatgatatcctgcgagatgctgaaaaattcagtatccggctggtgggctttgatacgtggaacgcgacgcatttgcgtacccagttacagggggcggggctcgatgtggagcctttccagcaaacttatctgcggttcagcccggttgctaaatcttttgaggtgttcgttaaccgtaaggtattacgctatcgtggcgatccggttctgtcctgggctatgggtaacgtggtgatggagtccgacgctaacgccaacataaaacctaacaaaaagaaatccggtaacaagatcgatcctgcggtcgcagcgttgatggcgttcggtactttccaggcagagcatgaagaattcgcttttgatatgagcatgtttcacaaagaaagattgttgaagttcaatggtatatag

SEQ ID NO: 390124 - DNA, 573 bp, Salmonella enterica
atgtcattttcggcaactgtgttgaatgtgctaattgcatctccatcagatgtacctgaagaaagggaagctattacagagagtctttatgaatggaatgccttaaattcacaaacgactggttttgtattgttaccagtaaggtgggagtcccacagtgctccaacaatgggggataggccgcagggcatcattaacaatcaggtggttagaaactgcgatatgttaattggtgctttttggactcgtttagggtctccaacaggtgttgaagaaagtggcaccgttgaggagattaagtggtttttgaaacaacaaaaaccagtgatgctttactattcaaaaaaacaagtggatctcgatcttattgatacacaacagcttgagaaattaaaagaatttaaaaaaagcatcagagacaaagggatacaagagcaatatacgaatgttgatgagcttaaaatgaagctatcgcgtcagttaacaatcgttttgcgagaagtttcagttaacacagtggtggatgtgaaagctgttgtaagtatcccgcataatcgtgccattcacatttag

SEQ ID NO: 390125 - DNA, 741 bp, Salmonella enterica
gtgccgcgggacacgcgctgtacggcttcggccaccgccagcaccgcaatccagcaggccatcgccatccccaccgccgtcatggcgatgattttatcttccagcagccatggcaaaagtaccgacagcaccagggtggagaccagggcggtgagcagcagtttcctgatgttacgcggccggtcccggccccagcgcactaaaggccccacccccagcagcagggcaaaggggaccatcagccaggtgaacatggtgttaaagaacggctcccccaccgaaatgctgcccagccccagctgtttgtgcaccagcggcagcagggtgcccagcagcaccaccagcatggcggccatcagcaggacgttgttgccgagcagcagcgactcgcgcgaccacagcgtgttgttcacccgcgaacgcaccctgtgcccgcgcaccgcgaacagcagcagcgagccgccggtgaccagcaccataaaggcgaggataaacattccgcgcgccgggtcggaggcgaaggcgtgcaccgacaccagcaccccggagcgcaccaggaaggtgcccagcaggcacagcgagaaggcgcagatggacagcagcagcgtccacgccttgaagccggcgcgctgttccgtgaccgccagcgagtgcagcagggcggtgcccgccagccacggcataaaggaggcgttctccaccgggtcccagaaccaccagccgccccagcccagctcgtag

SEQ ID NO: 390126 - DNA, 357 bp, Salmonella enterica; identical to SEQ ID NO: 389939

SEQ ID NO: 390127 - DNA, 234 bp, Salmonella enterica; identical to SEQ ID NO: 389940

SEQ ID NO: 390128 - DNA, 405 bp, Salmonella enterica
atgcgattagtacttgaagaatcagaaaaaaaattatcttctgatgaattgaatgaattcaaccgatactttgatgaaaaaattccattttcgtttattgatttttattccgaatttaatggtggatatccacctgataatggcgagagtaatttatttttattaggtggttttaatccaataaagtatggggatttgcctatagaaaatatttattctgatttaattgatgttttttctaatttaaaaaaaatggttccttttgcttatgatgaaggtggtaattgttttttactttcattaagagataaagactatgggaaagtatacatatggttaatggatgaaaaggaattagcttttgtatctgaatcttttgatgaatttattaatgaattatcataa

SEQ ID NO: 390129 - DNA, 1527 bp, Salmonella enterica
atgccggacgggcggacgctgcggtacctgtactacgggagcggccatcttcagcaaatcaacctggggcgtgatgtcatcagcgagttcacgcgcgaccacctgcaccgtgaggtgcagcggagccaggggcggctggacacgcggcggatgtacgaccggacgggtcggttaacgcggaaactgacctgtaaaggaatgcgcggtgtggtgccggagacgtttattgaccgggaatatgcgtacagcggccaggacgagctgctgaaaaagcggcacagccggcagggggtgacggattatttttacgacacgacggggcgcatcacggcgtgccggaatgaggcatacctggacagctggcagtatgacgcggcggcgaacctgctggacaggcggcagggagagaccgcgcaggcgggtgcaggcagcgtggtgccgttcaaccggataacgtcataccgtgggctgcattaccgttacgatgaatatggccgggtggtggaaaagcggggccgcaacggcacgcagcactaccgctgggacgcggagcaccggctgacggaagtggcggtcacccggggggacaccgtacggcgttacgggtacgtgtacgacgcgccgggcaggcgggtggagaagcacgaactggacgcggaaggaaagccgtataaccggacgacgtttttatgggacggaatgcggctggcgcaggagtgcaggctgggaagaagcagcagcctgtatatctacagcgaccaggggagccacgagccgctggcgcgggtggacagggcggcgccgggcgaagcggatgaggtgctgtattaccatacggacgtaaacggcgcgccggaggagatgacggacggcgggggcaatattgtctgggaagcgggctatcaggtatgggggaacctgacgcatgaaaaagaaacccggcccgtacagcagaacctgcgtttccaggggcaatatctggacagggaaacggggctgcattacaatttatacagattttatgatccggatatcgggaagtttatatcgggcgaccctatttcgatccggggcgggataaatctttatcagtatgcgcctaatccgataagctggatcgatccgttaggacttgctgtagatccaatagctaaattagaagatcgcggttatacaggggttacaagaacttctggtggcggtttagactattcagatagtaatgcgttatataacaaacgacccggagttaaccctgtagttactattgaatattcaggtgattatcttaaagattttgaacgggcaaatacggctgctaagttgaaccaaaaatcgacaccaagaggttatgtctggcatcatcttgatgattacgatcctgtcacaaataaaggtacaatgcagcttattaaacagggtgcacatcaaggaataagtcattctggtggtgttagtcaatataaagcagcaactggtaaaagctatacgttcccggctagaaaaggtggtagattatgcgattag

SEQ ID NO: 390130 - DNA, 342 bp, Salmonella enterica
atggcaaaacctccatcagctacaccaccggatacaccatcttcatgtgatgttagtgctctcccaggtattatccaaaattttggcttaattaactttaacgtatcctgcaataacggtgagctaacggtaacgggtacggatcaaaatgggaaacacataagagttaacagctaccaagggaacggctttaccgaaggtacaatgtcaacgtttcagcccggaggtaaagaggccagaagacttgaggctgttcgtttaagagaaagtgggcttacacagcaagaaatagcaaaccggttaggcgtttctcaaaaaactataagcaatgatttaaaatga

SEQ ID NO: 390131 - DNA, 144 bp, Salmonella enterica
atgaacaagcttatcgagaaaaatataaaacaaaaacaggttttccaggaaatgttattgaaccaatcgataagagccgcactgattcacgaggtaagtctcattatagaaactatcgtgcagcagctaaagaaatcggtataa

SEQ ID NO: 390132 - DNA, 579 bp, Salmonella enterica
atgaaaccattaataaaacctgaaccaggtgatttgttctatattcctgctctcaatatatcagatgttaatggttttgttctggctcgctacattgaatttattaagccaaatttaggttatctcatagaggtttttgatcatttttatactgaaccgcctgaaaaaaaatctgatgtagatatgagtgatagactattcagacctatattttgtagcatgcgattttcagatataccaaaatggaaaatcctgttcagcgatcttgattatgataagtcaaaatcaggatatgagcgcatatcgtttgcatttgatggaagcatctggataggaggtgtaagtaaaaaagtaaaatcagaacagttaataaatattgagccatcgatttgttggcgtatggatcatattgtatttagaactatagctcatttaaaaggtttggtacaaaaaaatgatgtgatggattatcatcagcttcctacagaatatagagtcgataatgaaattgcaaagagaagagtacgtgaaatttcggagttaatggataaaaaatttaaagcttgggatagagtttga

SEQ ID NO: 390133 - DNA, 522 bp, Salmonella enterica
atgccggaacttaatttttttgctgataaaaatttaatatttgaacactcacttcatgggttatcgagaaatcaaatagatactcttgttcctcatgattttaaaggtaaagatttttttgtgaaattctatctttctaataatggtggatactttagtggtggtgcatatttttatagagatattttttataccataaaacctaatgattataatttaatggaaattgaagggttcaatttcattcagagttccccagatgaagagtcgccatttcttctttcaataaatgaagtttgggatatcaaacgaaaatactcgaagagtataaaggagtttgcaaagcgacatttcccatttgcaggtgatgcaggtgataatgactattggctagatatggaaagtgggaatgttaaatatattaggtgggaatcagatgataatcctgataatgcgataatagtagccccaactttttatgatttttgtatgagcatacaggcaactcgcagaattaattag

SEQ ID NO: 390134 - DNA, 126 bp, Salmonella enterica
atggtcgccccattaactgacatgtttttgccttttaacagtcactgcattatcatcccggttccggttgacaaactcctcaccactgatcgctacttattttccttaaaacaggggagtctctga

SEQ ID NO: 390135 - DNA, 1401 bp, Salmonella enterica
ttgatagagcaagatattaatagtattttgattaatggcgaacaaaaatttaataatgtgtattcaataaaaaatcctgatattgcaagtcagaaaattattgatattgagtcacagattagagatgagataaatatatataaacgatctgttttagttcctgcacctagaggttttataataagaggtgaactgaaagaagattataatacatatctgaaagcaatgactgaattggagactagatgtttccaaccggcaatagatagaattgataaactggttgaaagagctataaatgattatcaaattaaaataagcaaacgcaaacgcttggaacaagctgttgattttatttctgtcgaagcaaaaaaaatcaatatagaaaagagaaagagtacacagcaagttgttctggatataaataaacgagtcaaagaactaacgtctgaacttatgattgatcttgataatcaaattcgtatcgtcaaggataaattcaaacatatttctgtcgagaatgaatcagatcttgatttagtaacaaaaagaaatgaattagcagcagaaattacagcagttagtgaaagaaacactaatgttttggatgccgttataagacaacttgaaggaatatattgggaaaaagacgaaaataacaactatatcactagtgagcaaataacggatgctcttggtgaagagttagaagttcttagagacagaatacatgctgatgttgagcttagccaattggggttggctgttagtattatccatcatgaatttaatagtactgttcgttcaatacgtactagtcttcgggatttgaaagcatggtcggagataaatgaggatcttgatggcgtgtataataatataaaagttaactttgaacatttagatggctatcttaatctttttactccattaaatagaagactccaaaggaaaaaagaagaaattaatcttctggaaatcaaatcatttcttattgatttgtttaagaacagaatggatagacatgaaatatccttcaagcatactaatggatattcaaagggtaagctttatggattccgttcatctttctatcctgtttttgttaatgtgatagataacgccatttattggctaaatgaaagcaatattggtaataagacaataagattacatgcggatgacagtggtgcagtatatatttcgaataatggctctgaaattgatgctcgtgatagagaaagaatatttagtttaggtttttcaagaaagcaaaatggtcgaggaatgggattacatatcagcaatgaagctcttgagaaaattggatataaattatcattagatgagccaagagatggttcaacagtaacatttaaaatttccatggtggaagaataa

SEQ ID NO: 390136 - DNA, 780 bp, Salmonella enterica
atgagcacaccggaagatgcactattggagttagcttggtatttgtcaaagtttggtaaagataaaccgccttctgcacttggtgtagataagtggaaagatgtagcagcattattttatccgcgttttggtgtaggcaaaacatctgtggagttttacaacagcctgaaaaaccacagggaccgtttcgattcatggttaagtgacagtcgtactggctggcgtaatcaagatgggacacctagaagtttacccataacgtctcaacgtgtattacaacgtatgaataagctaccggagtcagttattgaacaccggattttatctcagttagccacgaatccgctggagcaaacacagcaagacatactatttatccaacaagataaaagtatagatgcaacaatgaggcaacagttgattgcggcgcgactagggcaaggatattttaggaaaaagtgtctagaactttatccaacatgtccagtaacaaatatttctttcgagccattattaagagcaagccacattaagccctgggctgcctgccatacaggaaaagagcgcctcgatccatttaatggaattatattggcggctcatattgatctgttatttgaccaaggatggttatcatttaatgatgatggagaaatattgttaagcaatgaacttaatccaaacatagcatctcaacttgaattgccaaaaaaaataaaaaagttccctttagagtcaatttattatttagagtggcataggaaaaatattttaagatag

SEQ ID NO: 390137 - DNA, 375 bp, Salmonella enterica
atgcataaaatcgacagaccagctctggttcagcgcttccggtgtggccagtggcgaggggttacgcaccggcagccgttgtttgcccttacggcgaaaattcagcttcagcagacaataaatacggtggatccttttgtgattccacatgtatccctgccgccgcagaacctgaaaaagcttcggaaaaccgtatcgtggataccgttcagctgctgcctgcaatgcggtaataacgggttcgtcacgtgtgttatccggacggtaatgataaaccgttctgctcaggttcaggctccggcaggcctgacggatactgagtccgaatgccgttatcagatgagtgaccagctcacgcttaaaggctggttttaa

SEQ ID NO: 390138 - DNA, 183 bp, Salmonella enterica
atgccaaagaaagccagagaactgtccgccttagccgtttccaggcttaaagcggaaggtcgctatgctgtaagtggtgttgacggattgtatctgcggatcgccggacgctcacgcgcatggggccttatttatatgctcatagactacatcaagttctgtaaaggaggattttgcttctga

SEQ ID NO: 390139 - DNA, 333 bp, Salmonella enterica; identical to SEQ ID NO: 19940

SEQ ID NO: 390140 - DNA, 1107 bp, Salmonella enterica
atgacaggtagtgtcccagtagtgctttctgagtctgagttaaagtcgatcttgaccttaactgaacgtttcacatggaacgttgcaaggccaattattgcgtctttagggctgccaacaggtagggggcgtgaagcaacaaacgaaaaaatactagaaagcctcattgatcttaaaagtaaagataggcaaaagtttgatggcattatggcaaacgtaaatgacctaatttttggtcaggtcgtttatggtgaaaaagcaatatttagtttgactgtagataatagtgtaattaaaacactaaatgacagatttaattttcaatggaatttgatgaatcaaccatcattattggttgattcgatccttgatgatgtccaattgcaaaatgctgtaaaaaatcaacctgaacttgttaattattctattcaaaacacccagtcaatacttgttttttcatctgtcagagaattagttgtaagagaaaaaattcccccgtcagcacttgcgcaatacaagcagtttgatgaaattattgcaaagcgaaaagaaaagcgacaatgttttgatgtctgtatattagactctgttactaataaaattcatgttttggtagatactaatggtaatattattggtgataatgttacttttgcaaagagtaacattattcgtgaattgtataatcatgtcggttatgaatttaaatcatcggaaaaagatttttatccgttaattgagccaattttcaaacaaaattcattgccttattcaaaattaagctataaagtctttgatttgtcatttttgacgaatgaggggactacgcataaagaaaagaaaaatgtggccactaaagacttacgtgatgatttgtttaataaggaaggcatcaaagcagtaggcagtattggtttgtatcgtattggaattagagttgatagaaataatccaaaactgcaattagcggataacgtagagcttatcattccgggaacactccgcaggcatctaggagggagtagttgctctcctgttaactatgctatattaagtaaatgtatatccaaagatgatttcgaaaccctcacaaagctgatattataa

SEQ ID NO: 390141 - DNA, 435 bp, Salmonella enterica
atgaaggatggtgatatgcccaagatcatcaaagaaatgtgtgcagaacgccctgaaattggggcgttagcttgctatttgtacgatgaaatcgaggcaagggctaaaaaatcatcaaatatagctttaagttataaggatttatttaatatagctggtggttataataaggttttacagccagaaacgtatgagcaggttatctatccggccatacaaattctttgtagcccaaaggttgattttttaaaactcaattattggttcattgatgattttcatgaccctgtagaacttgaaatagaggaagttattgaggcggaaatcagtcaatctttagcaaacccatttacaggggagcttatgtatgactataagtcattcgtatttcctttttttacattagatgaatctaaatcaaaggatattatctga

SEQ ID NO: 390142 - DNA, 666 bp, Salmonella enterica
atgttaaaaatgtctgcagcaatgagtttggctgatattgataatgatatttttcttcagcgtattaatgcttctattactcgtgttagatttgcacttcaatcgtacgataatttcaaacaatttgtcaggattgaacttgattctgctgtaaaggaaatagaagagaattcaaataagttaaacttcgatttaacagaagatcagcttactttaattttattggccaatatcaaaaataaagatatgggcattgaagcatttcatgaaaataatcagcgcggacattgtgatattacaataaaactaaaggattatatttggcatggcgaagccaaaaaacatacatcttcatatagttatttatttaaagggtatgctcaactcactgaacgatatagtacagggaccgtagacagcgcaagtggtggattgattatctatactcgtaatagaaaatgtaatgaaatgatgagcaactggaaggcgcatttagataaattcgcaccaagaattcatgcctgtaaatctataacgattactccttgtcaaaaaaatccattggttttttatagccagcatgttcacacagttactcaactgaattatgaagttattcattaccctgtaaatctatatcatgagcctgtagatccggatctttaa

SEQ ID NO: 390143 - DNA, 675 bp, Salmonella enterica
atgaagaagaatacccgctttgcttttaacgcttacctgcagcagctggcgcgtctgaacggtgtggcagttgaagaactgtccagcaagttcaccgtggagccgtctgtgcagcagacgctggaagaccagatccagcaatccgccgctttcctgacgctgattaacgtcacgccagtgaccgagcagtctggtcagctgctggggctgggtgttggcagcaccattgccggaaccactgataccaccgcaaaagagcgtgagcctgtcgatccgacgctgatggtcgatgtggaatacaaatgcgagcagaccaactttgacacggtgctgacctacgcgaagctggacctgtgggcgaagtttcaggatttccaggtgcgtattcgtgacgcgatcgtgaaacgtcaggcactggaccgcatcatgatcggctttaacggcgtgaagcgtgcgaaaacctcaaaccgtagcgaaaacccgctgctgcaggatgtgaataaaggctggctgcagaaaatccgtgaggatgcaccggatcacgtcatgggcagcaccaccacgggcggtgaaaccacaccgggtgcggtgaaagtcgggaaaggtggcgaatatgccaacctggacgccgtggtgatggatgccgtcaatgagcttatcgacgtggtctactag

SEQ ID NO: 390144 - DNA, 1485 bp, Salmonella enterica
atgagcacaaaattttataccctgctgacggatattggcgcggcgaaacttgccagcgccgccgcgctcggtgtgccgctaaaaattacccatatggcggtgggcgatggcggtggagtattgccaacgccggacgcaaagcagacggcactggtaaatgagaaacgccgggctgcgctgaatatgctttatatcgacccgcagaacagcagccagattattgccgaacaggtgatccatgaaaacgagggcggttggtggatacgtgaagtgggcttgtttgatgagtccggggcattgattgccgtgggcaactgcccggaaagctataagccgcaactggctgaaggtagcgggcgcactcagaccgtgcgcatggtgctgattaccagcagcacggacaatatcaccctgaaaatcgaccctgctgtagtgctggcaacccgcaagtatgtggatgacaaggcactggagctgaaggtgtacgcggatgatcagatggcaaaacatcttgccgcaccggacccgcattcacagtacgcgccaaaagccagcccgacatttaccggaacccccaaagcgccaacgccagcggcggggaataataccacgcaggttgcgaccactgcgtttgtacaggcggcactgacggcccttattaatggtgcgccagccacgctggacacgctgaaagaaatagccgcagccattaacaatgatccgaatttcagtaccaccattaacaatgcgctggcactaaaagcaccgttgtcgagtccggcactcaccggaacgccaacagcccccacggcggcgcagtcggtcaacaatacacagattgccactacggcttttgtgaaatcggcgattgcaggaatggtgggttctgcacctgctgcactggatacactgaacgaactggcggcggcactggggaatgatccgaactttgccacgacaatgcttaatgcgctggcaggtaaacaaccgctggacaatacgcttaccaatttgagtggaaaggatgtagctggtcttctcacataccttcaattgggagaagcggcaaaacgggatgtcggaaccggtaataatcaactcccggacatgtccgcatttggtatgtcgcgaaacggacaaactgcctgggatattctcccaaatggtatgattcgacaggctggcactgtgacactgacaccagttggtaacttcaacgcgcaggtgcttggtggggtgacgtactacacccattactacagggttaatttccccagacaattcccaaatgcacaaatagcaacgctggcaacactagcgagctcagagttttcgaaacagacaacaatggccggaaaatcactgtcaacgcatcgcgatactgattctggcgctgacgtatcaagaacgcgattcactgtggcgtatacgacacccaatctcggcgaaacaccgacactgcattttgaagcaataggatactaa

SEQ ID NO: 390145 - DNA, 234 bp, Salmonella enterica; identical to SEQ ID NO: 31831

SEQ ID NO: 390146 - DNA, 441 bp, Salmonella enterica
ttgttgttttatcgcgctggggtattaagaatgaataaattttataaaggctctttctatccgaaagcactaaaaggggtatatatcagcgccggttcatggcctgaaaatggcgttgatgttgatgatgaaacaatggcaatttacacaggcgtagcgccacaaggcaaaacgctgggggctgataaaaatggtaatcctgcgtggattgatatcccgccactctccgctgaacaacagattattcaggctgaacagaaaagaacggtattgcgttctatggctgataaggaaatagtctggagacaggatgcttttgatgcggaaatcgcgacggcagaagaaaccgccgcgttatctgaatggaaaaaataccgggtcttgctgatgcgcgttgatacagcaaaacccgtatggcctgtcaatccgcaggatatttaa

SEQ ID NO: 390147 - DNA, 291 bp, Salmonella enterica
atgtcagggaatggctacatctacattccatgcattgcgacgacaggaaacccggtgaaacttatgttgcagtggggaacggtggcaacacaaaagggagctgatgctggatatgccttaccatttgcttttccctatgcaggcttatttgcgaccggaaaccgtggaacatctggctacaatgccgcgatgaatgtgcgtattgccagcagaacgcatatcagtattcagaactggtcgccatccggagagggcaccgaagattgttgttttatcgcgctggggtattaa

SEQ ID NO: 390148 - DNA, 222 bp, Salmonella enterica
atgaaacgatttaaagaaatggcaacaatttttctttttgcacattgctggctgcggggttcacgtcgtctgctatggcagcgtcgggtagtgatagtccgtgggattttgatttttcgggtccatggcttttttgcaaactacaaccccctgattctctgcaattaccgccacctcctggtgagtattgctggcattaataaatccatactattccagtga

SEQ ID NO: 390149 - DNA, 1056 bp, Salmonella enterica
atgaaaaaaagtaaagcaatgttatttatcgctccggcgctgttttcatacgccctggctgcacaggcctgcacaacccttgctattcaggataaacaaggcgatatttttcatgggcgtacactggaatatatgcaggatttaccctcatggttaacatattatccggcgggaacgcagtttgataaaaaaacgccggatggccgtcagggagtaagctatcaggcgaaatatccgatactggctattacctccaacatcactgatggcgatagcagagacatacttgaaggcatgaatagcgcgggattgtcatttagtgaaaacatgatcatgaatgcgcagttgccgccattgcccgcgagtgaatataaacaggcaattcctgtcacctcgttgggagaatgggcgctggcccgttttgctactgtcggcgaggtaaaacaggcaataaaagagggcaaattctggtcaccggagctgcatcggtttggcgatctgaaatcgccatttcattacgcgttttacgacaagaaaggaggaagcattgtcgttgaagtggaatatggcaaattccatgtctatgacaatcccactcgcgtgatgacaaatggtcccgcattcccctggcatctgacaaatctgaataattatacgcaattaaccaatgtggaccgctcttcaggcacattgggcgggataaaagtgatgcagcctgatagcgggattgctattgcagacttgccatcgtccgatacgtcggtttcccgttttatacgcggcgtttattacaccacatatgcgccgcaagcgacatccgcccacgacgcaatgaatacgcttgcacatattatgagccgtttcgatcgtccgaaaaatattacggttgattatatggggagtgaaggggaaggcaacgccacccgcaaaccggtctcagaatatacggtctggacaacgctgtctgacttaacgcacggtgagatgatggtgcgcggctacaatgatatcaactataaaacctggtctctttctcagtttaagaacgcgacataa

SEQ ID NO: 390150 - DNA, 1116 bp, Salmonella enterica
atgcgtattctgtttgtcggtccaccactgtatggactgctataccctgtgctgtccctggcgcaagcgtttcgtgttaatggccatgaagtgctgattgcaagcggtggaaaatttgcacagaaagcagccgaagctgggttggtggtatttgatgctgcgcctggtttcgattcggaagcgggttatcgccgtcaggaggcattgcgaaaagaaaataacattggaacaaaaatggggaacttctcattcttcagcgaagagatgactgacccgctggtcgcgttcgccgggcagtggcggccagatctcatcgtctaccctccccttggggtcgttggaccactgattgccgctaagtatgacattccgatagtgatgcaaaccgtcggcttcggtcatacgccctggcacatcaaaggcgtgacgaaatcactttctaacgcctaccgccgccatggggtcagcgcgccaccaagagatctggcgtggatagacgtcacaccgcccagcatgagcattctgcaaaatgacggagagccggttatctccatgcaatacgtcccgtataacggcggcgccgtctgggaagaatggtgggaacgtacacctgatcgcaagcgtcttctggtcagcctcggcaccgtcaaaccgatggtggatggcctggatctgatttcctgggtaatggattctgccggcgaagtagatgccgaaatcatcctgcatcttccggcaaacgcccgctcggatttacgttcactgccgccgaatgtccgtctggtcgactggcttccgatgggcgttttccttaacggcgccgacggttttatccaccatggcggcgcaggcaacaccctgacggcgctgcatgccggcattccgcagatagtctttggccagggtgccgacagacccgtcaatgcccgcgccgtggtcgagcgcggatgcggaattattcccggtaagagcggacttacgagcagcatgatcaataccttcctcggtaatcacgcgcttcgcgaggcgtcgcaggaggtcgcggcggaaatggcggcccagccttgcccgaccgaggtggcaaaaaaactgatcgccatgctgcaacacggctaa

SEQ ID NO: 390151 - DNA, 1107 bp, Salmonella enterica
atgcaggcggagaaccgctttcttcagcagtggaatagctatatccgtattaccggcgagtcgggtctacgcacccgcaaactcacgcaagggcttatcagttgggggatgtcggtacaaagtctggtgtatgccgcagtgattatgttcggcgcgccgatggtcattgaaggcagtatgactaccggcgctgtggtcgccgcgtcgatgctcggctcgcggatgatcgcgccaatggctaacctgtgcggcgtgctggcgcgctggcagcaggtgaaagcggcgaagatgggtctcgacaacataatgcaactgcccaccgagacacagcatgacgatagcctgatacaccgcgacatcctccacgggcattacctctttgaaaacgctcagtttcgttaccataacgacgatcaacgcataccgttgcgcctcgtgcgtctggagatcatgccaggcgagcggattgcgatactggggcgtaacggtgcgggtaaatccacacttttacaggcgatggcgggcggcctggagatgattcagggagatgcccggcttgataatctcagcttgtcgcacatcgatatggcggatttacgccgcaacatcggctttcttagccagaacgcgcggcttttcttcggcaccctacgagagaacctgacgctcggcgcgccgcacgccaacgatgaacagatttttgacgcgctcgaagtcagcggcggcgccgtcttcgtcaggcggctggcaaaagggttggatcatcccattatggagggtggtaacggcctgtccggtgggcagcgtcagtccctgttgctggcgagaatgctgctgcgctcccccaatattgtgctacttgacgaacccagcgcctcgctggacgagcatacggaacgagagtttattcagcggttacatcagtggcttggcaatcgtaccctggtcgtcgcgacgcaccgggtaccaatactggagctggttgagcgtgtcgttgtcctgaaagaaggacaactggtgatggatgcgccaaaagcgcaggcgcttaacgcggatcggatgcaaagtcaccgtcgggagtggaaaaatgaaaatcaatcagcatga

SEQ ID NO: 390152 - DNA, 1230 bp, Salmonella enterica
atgtctaaaatttggtcaaaagatgagactctctggagttttgcattatacggaacggctgtaggcgcaggcactcttttccttcccatccagttgggatcggcaggcgcaatcgtgctatttattaccgcgctggtcgcctggcctctgacatactggccgcataaggcgctgtgtcagtttattctttcctcaaagacttctgcaggtgagggaattactggcgccgttactcattattacggcaagaaaatcggcagtattattaccacgctttatttcattgcgttttttgtcgtggtattaatttatgctgtggcgattaccaattccctgacagaacaattagcgaagcatattcagatagatattcgcatccggatggcagttagcttcggcgtagtacttatcctgaatatgattttcttaatgggaagacatgccactcttcgcgtaatgggctttttagtctttccacttatcgcttacttcttgttcctttcgctctacttaaccggaagctggcaaccctcgttactgaccgggcagatgtctttggatagtcacacgttgcaccaggtatggatttctattccggtgatggtttttgcttttagccatacgcccattatttcgacgtttgccatcgacagacgggaaaattttggcgatcaggccatggataaatgcaaaaagatcatgaaggtcgcctatctgattatctgtctgagcgtgctgttctttgtctttagctgcctgctctccattccgccgtcatacattgaagacgcgcgcaacgaaggcgttaccatcctttccgcgctctcgatgatgcccaatgcgccggcctggctctctatttccggtattatcgttgccgtcgtggccatgtcgaaatctttcctcggcacctatttcggcgtcattgagggcgcaaccgaaatggtaagaaccactctacagcaggttggcgtgaaaaaaagccgggcgttcaatcgcgcactatctatcatgctggtttccgggattacgtttattatttgctgtattaacccgaatgccatctctatgatttatgccattagcggcccgctcattgcgatgattctgtttattatgcccacgttgtcaacgtacctgataccggcattgaaaccctaccgttcagtaggtaatttcattacgttggtcgtcggtttactttgcgtatcggtgatgtttttcggctaa

SEQ ID NO: 390153 - DNA, 195 bp, Salmonella enterica
atgatgatatttgtgatttggttagccaatttagacaataaggttgacatgagaaaaattttggttgaatttagggggcagaacgggtttacaaagcacgtttcgatgttggccggcaatgggtcaaccacgaagacgttatcgcaagaagaggaaacgagatatgaaacaaacctggcgctggtacggacctaa

SEQ ID NO: 390154 - DNA, 348 bp, Salmonella enterica
atgaagcgtatgaagttagttctgacaatttcgttactgttttcctgctcatcggctttcgctgatttgcaatgcgggggataccgacttcatgcatctgataacgggtggacgaaaatcaacggcgaacaggtaacatctcagaaaattaagtttcttggtcagaaagatgactgggacaacgttaaaaccgacatgggcctgatgccttcccgcgatggcaacaattacggctttgagtttgtgaagcgtaacggaaaagctttcctgaacgtccagctactgcagaacagtatggacgcgccgagaattatcggttcattcccgtgcaagaaggttgatgattag

SEQ ID NO: 390155 - DNA, 336 bp, Salmonella enterica
atgagtcgtttagtcgtagtatctaatcgaattgcccccccggataataaaggcggcgccggcggcctcgccgttggcgtgcttggcgcgctaaaagcggctggcgggttgtggttcggctggagtggcgagacaggtaacgaggatgagccattaaaaaaggtgacaaaaggtaatattacctgggcatcgtttaacctgagtgaacaagattacgaagattattactgtcaattttccaatgcggttctctggcctgcgttccactatcgtctggacctggtacagtttcagcgtcctgcatgggaaggctatatgcgggtgaatgcgttatag

SEQ ID NO: 390156 - DNA, 723 bp, Salmonella enterica
atgcaggaaaatgatttcttcacctggcgacgcgcaatgttgttacgctttcaggagatggcggcagcagaggatgtttatactgaattgcaatatcagacacagcggctggaatttgattattatgccctgtgtgttcgtcatcccgtcccctttacccggcctaaaatatcgcttcgtaccacttatcctccggcgtgggtaacgcattaccagtccgaaaactattttgcgatcgatccggtattaaagccggaaaatttcaggcagggtcatttacattgggatgacgtgctatttcatgaagcgcaggcgatgtgggatgccgcccagcgtttcggattacgcagaggcgtaacccagtgtgtgatgttgccgaaccgggcgctgggctttttatctttctcccgtagcagtttacgctgctcctcgtttacctacgatgaagtggagctgaggttgcaactgctggcgcgggagagtctttcggcgctgacaagatttgaagacgacatggtgatggcgcctgagatgcgtttcagtaaacgtgagaaagagattctgaagtggacggcggaagggaagacctcatcggagatcgccattattctgtcgatttctgaaaataccgttaacttccatcagaaaaacatgcagaagaaattcaatgcgcccaataaaacacagattgcctgctacgctgcggcgacaggtctgatatga

SEQ ID NO: 390157 - DNA, 426 bp, Salmonella enterica
atgaaatttagtgatgtttttgacaaccgcttatacgtaactcagattaaaaccggaatgaaaatagccattcccctctccctgacacttcgggcgacggggttacgtctgggaacggtaatcgatcgctgccgactggtaagccgcactgatttcatgatcagtgccggaatcaggaaaaatagcccgaccgggaatattcatccggatggattgacaaagacatttgtaaaagcaagaaaagcctccggcgttaacttcagcaataatccaccgacatttcacgagatccgaagtctggccggacggctgtacaaaaacgagcacggcgaggtgttcgcccaaaaactcctgggccacacatcagcgaacaccacgaaactctatctcgatgagcgtgatgataaagcttatatgatgctctaa

SEQ ID NO: 390158 - DNA, 192 bp, Salmonella enterica
atgaaaaaaatcagcttaccgaaaatcggtatccgcccggtgattgatggacgtcgtatgggcgtacgcgagtcgctcgaagagcaaaccatgaacatggcgaaagcgacggcggcgctcatcaccgagaaaatgcgccacgcctgtggggcacaagtggagtgcgtcattgcggatacctgtattgcctga

SEQ ID NO: 390159 - DNA, 1101 bp, Salmonella enterica
atgaataaagttgtattgctttgccgtccggggtttgaaaaagagtgcgctgcagaaattaccgataaagcgggaaaacgggaaatatttggttttgcacgcgtaaaagagaacgcaggctatgtcatttatgaatgctaccagccggaagatggcgaaaagctgatttcagaactgccgttcagttcgctgattttcgcccgccagtggtttgtggtgggtgaactgctgcaacatttaccgccggaagacagaattacgccgattgtcggcatgttgcagggcgtagtggaaaagggcggcgagctgcgagttgaagtcgccgacaccaatgaaagtaaagaactgatgaagttctgccgcaaatttacggtgccgctgcgcgcggctttgcgtgatgcgggcgtattgacgaattatgaaacgccgaagcgtccggtcgttcatgtcttttttatcgcgccaggatgctgctataccggttattcgttcgcgcataacaattcaccgttttatatgggcatcccgcgtttgaagtttccgtctgatgcgccgagtcgctcaacgctgaaactggaagaggcgctccacgttttcatcccggaagatgagtgggatgaacgtctggcgaacggcatgtatgcggtggatttgggcgcctgtcccggcggatggacgtaccagttagtgaagcgcaatatgtgggtctactccgtagataacggcccgatggcgcaaagcctgatggacaccggacaggtgacctggttgcgtgaggatggcttcaggtaccgtccgaaccggaataatatttcatggatggtctgcgatatggtggagaagccggccaaagtcaccgcgttaatggcgcagtggctggtgaacggctggtgtcgggagacgatttttaaccttaaactgccgatgaaaaaacgctatgaagaggtgtcgcataacctggcgtatcttcaggcgcagttggatgagcacggcgttaatgcgcagatccaggcgcgtcagctttatcacgatcgcgaagaagtgacggtacacgtgcgtcggttgtgggcggctgttggcggacgtcgcgacgagcgataa

SEQ ID NO: 390160 - DNA, 141 bp, Salmonella enterica
atgaaaccagaactgatcgaggtactccgcatgcgctggcagcgcctccgcatttaccgccgtccggggtcggtgttggttgactaccgcatcctgcgcaattttgttcgtatttatcagttcacaggatttactcaatga

SEQ ID NO: 390161 - DNA, 270 bp, Salmonella enterica
atgtatcagcgaatgatttttgaagaaggaaaagagccaaggttgtattcaagccaacaagactccaaggttatcccaataagtaataacaatggaaaagttcaagaggttcctgttagggagttcatagatgccagaggagatgttttttatgcttacaaatttgcttattctggtaaaaaaccatcaaatgacgaaatctataaggctatagatgagctaaagccaatcggtgaaaaattcgaaatgtctaatactataagcgattag

SEQ ID NO: 390162 - DNA, 510 bp, Salmonella enterica; identical to SEQ ID NO: 388682

SEQ ID NO: 390163 - DNA, 447 bp, Salmonella enterica
atgtatcccccaaaccaaggggggatgagaaccaccgaccggggttcgacaactggcgcagccagttggacagaccgggcgcacagcgaacgggctgccccgaaggggcgagcaaagcgagtcaatcccccccttactgccatattcaagttgagagcctgtacagaagtacgggctttttgcttatatgtatcccccaaaccaaggggggatgagaaccaccgaccggggttcgacacaaaaacgccgggagcgtttttgaacagagcttgctctggccccgaaggggcgaggcccagggatgggctgagtagcggcgcagccagttggacagaccgggcgcgcagcgaacgggctgccccgaaggggcgagcaaagcgagtcaatcccccctcaccgccatattcaagaaagagctcgtacgaaagtacgggcttttgtatctaa

SEQ ID NO: 390164 - DNA, 3516 bp, Salmonella enterica
atggatgacaatgctttagggtttgcctcatactggcgcaattcgctggcagatgctgagtcaggaaagggcagttttgaacgcaaagatgccaaaaatttcactcactggcatgggatagcggcgggacgtcttgacgaaacgatcgtcggtaaattttttgagggagaaaaagacgacgtcgaaacagtcgatgtcatcttgcggccaaaggtttatttccggttactgcagcgtggaaaggaccattccgctggtgcgcctgatattgttaccccgatagtgacgccagccctgttgagccgtgaaggttttttatatccgacgccagcgacctccattcccagagacctgcttgaacctttgccaaaaggagcgttttcaattggtgagattgggcagtatgataaatataaaacgatacatacctcattctctatcaactttgatgacagcgttgataggaccgccgaaacagatgaagaacgagaagcacgatatgcagcctggcagcaggattggcgtcaatatctggatgattcagaaaggctgctgaagaacgttgtcggcgactggattaaaaatcctgagcaatatgaactcgctgagcatggttatattgtgaaaacggcgcaatctggcggcgccagtttccatatcctttcgctttatgatcacctgcttgtttgcaaaaaggatgtgccgctcttcaatcgtttcgcctcgcgagaggttcatgctgcagagtcattacttcctcccgaagcaaaattcagcgacaggcttggacactccggggataagtttccgctggcaaaggctcagcgcgatgccttaagccattttctggatgcgaggcatggcgatatccttgccgttaatggtcccccggggaccggaaaaaccacgctggtgctttctatcatcgccacgcagtgggcccgagcggctctcgaaaaatctgagcctccggttattatcgcgacttcaacgaataaccaggctgtaacgaacattatcgaggcgttcgggaaagatttttcccagggcactggtgcaatggccggacgatggttgccagagctgaaaagcttcggcgcttattttccctcaagcactcgtaaagccgaggccgccaaaaaatatcaaactgaagatttcttcaaccaggttgagtcaaaagagtatgtagaggatgcactgctgttttatctggagaaagctaaggcagcctttcctgaaaaagagtgttcatcccctgaaaaggttattgaactcctgcatggtcagttggcagcaaaatccgagcaactggtaagactgaacgcaacatggcaaacgttaagccaggttcgggcaacgcgagagcttattgataacgacattgagcaatatctcgataatttaaataaattactctccgggcaagaacaaaaagttactcaactaaaaagtgctaaagcggaatggaaaaaatatcgggccagtgaatcactgatctatccattattttcatggctaccagtggttcgcagtaagcggcagtaccaaatacaactgtttctcgaagataaattaggtgcgctgattgcgggaaatcagtggtctgatcctgaaaccatcgaacgtaatatcgataggttgcttaattccgccgagcgcgagcaaacaacctaccggcagcagattgactccgcgcatgaaatcgttcttaaagaacagcaggcggctcaggaatggcagaggttggcacttgatttagggcatgagggcgacgaggaactgagcttctcacaggcagatgagctggctgatacgctgattcgcttccctgcattcttactgacgacccactactgggaaggtcgttggttgatggatatggccggcattgatgatctgcagaaagaaaagggcaagaaaggtgctaaaggggtaacagctcgctggcaacgccgaatgaaacttaccccatgcgtggtcatgacctgctatatgctgcccggcaatatgcagataagtgaacataaagggcagcgtaaattcgagaaaagctatttatatgacttcgccgatttactcattgtcgatgaagccgggcaggtgcttcctgaagtggctgctgcatcgtttaccttagctaaaaaggctttagtgattggtgatacggaacagatcccgccaatatggagtattactcccgctattgatataggtaacatgctggcggagaaaattctgtcaggcagtacgcaagaagagattactgagaaatatacggcaatcgcagagcttggtaaaagcgccgcatctggtagcgtcatgaaaatagcgcagtgtgcttcacgctatcaatatgatcccgaactggcacgtggcatgtacttatatgaacaccgccgatgcttcgataatattattggatactgcaatacgctctgctatcacggtaagttgttgcctaaaagagggtgtgaagagagcaatttaatgcccgccatgggttatctccatattgatggtaaaggagagctggcaagtagcggaagtcgatataatttgctggaggctgaaacgatagtggcctggctgacagataaccagcaaagtattgaagcgcattatggtaaatcgcttcatgaagttgtcggtatcgtgacgccttttagtgcgcaggtatcgaccatcaaacaggcgctggataaacaaggtatcagcgcaggcgcgaatgaaaaagcgctcacggtgggcacagtccattctcttcagggcgctgaaagagcgattgttatattctcgccagtctattcaaagcatgaagacggcgcgtttattgatagcgataacagcatgctgaatgttgctgtctcccgagctaaggacagtttcctggtcttcggcgatatggacctgtttgagattcagccagcctcatctccgcggggattactggcaaaatatctctttgagtcagagaagaatgcgctcacttttgattataaagagcgtaaggatttaaaaactgccgagaccaaaatctacacactccatggtgtggagcagcatgataatttcctgaatcagacgtttgaaaataccgataaacacatcacgatagtttctccatggctaacctggcaaaaactggagcaaaccggttttcttgattccatgattacggcgtgttcacgtggtattaacgtcacggtagtcactgacagaagctacaacactgaacataatgattttgagaagcgaaaagagaagcagcagaaccttaaagcggcgctggagaaactgaacgcccttggtattgcgacaaaactggtcaatcgtgttcatagcaaaattgttattggtgatgatggtttgctgtgcgtgggatcgttcaactggtttagcgcgacacgtgaagcgcgatatgaacgatacgatacatcgatggtttattgcggtgataacctgaagggtgagattgaggcaatttacaatagccttgagaggcgtcaggtttag

SEQ ID NO: 390165 - DNA, 1473 bp, Salmonella enterica
atgtattttttacttcaaaaagtaattttaccaaacattgatctatgcacggaagagcagctttatttcagaactcagggcgggaagtataactatacctcacgtaacttacttgttccgcgtcataaggttgcatattttgatactttttttaatgcattctcaattaagaaatggaaaaaatatacaaccttaacatcacttttcttgcgggttaatataattggtcgcggaactataactgtaaggcataaagagaatggtgtcattagagtattaaagcaaattgattttaaatcgtcatgtaatattagtgatgagattgagattgatatatcaaaaataaattttggatatatctatgtggagtggcaatcagacgaagactctgttttaaatggatttgaatttctgactaaagatcatgttagtaaatcatctatggctttagttataacaacttataatagaaaagaagctgttactaaaacaatcaatagaattaataaaacactcttaacccagagcgaatttaaagatcgttttaaattgattgtcgttaataatggcgaggcgattaatcacccgtcaggaaacggcattatagttatcaataatgaaaacctcggtgggtcaggcgggtttatgagaggtttgatagaggcagggaaaatcaacgatgtcaaacatgtcatatttatggatgacgacggctcatgtgaaattgaatcgatttgtcgaactcatgcttttttactgatggctaaagacaaaaatacagttgttactggctgtatgctttttgaagataacccggcaatcatacatgaatctggtgccatatggcatagagattttttacattacccggataaacattatctggatgctcgggaaatagattctttagatacttttgataatgaaagaaaaataggctacggtggatggtggttttttgcctttaatattaacgctattgaatattactcatttcctttctttgttcgtggtgatgacctgctatttggatatatgcataaaaaacataatattgtcacacttaatggtgtggcttcgtggcaaatggattttgaaagaaaaatatcggttctaaatagctatttgaacttcaggactgttgctgtacctgcattaattagtaaaagaaagtttgctgcactactgttaagtgttttctttgtgcgggaagtctttcttgcgagtttttcatgccgctatgaacttgccagagcaatgattatgtcatataacgattgtctttctggacgggagttttgggaagataatgtagatcttctggagataagaaaaagaattaatgcaataactcataatgaaaaattcaatgtagaaggtattgatattgttaatggttgtgttgattacccatgttctggtaaagaaaaagccatctacaaattttttagatgcataaccaatcgtggttga

SEQ ID NO: 390166 - DNA, 168 bp, Salmonella enterica
atgttaactgatagcaagatctgcgccgcgccccctcgcaaaaccctacacaatcaccaattcacaaattctgtacctgacggctctaagctatggtatttccgctatcgcttcggcggtaaagaaaatcgtctgactttcggcccctatccgcaggttagtacatag

SEQ ID NO: 390167 - DNA, 267 bp, Salmonella enterica
gtgtttctggtatcgcctggtatttttcagctatatgttcagtcggttacgggtgagaccgggacggagtggaaaaaagtacagctgagctttcagcggctgggtctgcatatacggggcgacgacgggattaatatttttaactgtgaggtcaaagggccacgtaaaactcgtcaggtaaaaggctatcttctggataggccggaggatatatttagtagcaatgtaccggaagataacccctatttaaccatcatgacgcagtaa

SEQ ID NO: 390168 - DNA, 222 bp, Salmonella enterica
gtgttattttgctgtctgcctgcgatactaccggacgggacggtggaggcgatggataatcgggactatcaatatcaccggataatgccgcagccgctttttccggtacagcggcaggcaaaacaggacggttatcttcacagggtatttccggctggaaagtatgggctgctggcgcggcagtttcctgtggggcaaacagcgaaaaagcagatcggttaa

SEQ ID NO: 390169 - DNA, 210 bp, Salmonella enterica
atgagcgacaaacctaaaatatccccttatagaaccatagagcgcgtcgtcactcacctacgcggcgatctcaccaatacagattttgtgctgctttatgcctataacggtaccggtaaaacacgcctgtcgattgcctttaagtataaagggaaacagcagattcgtcgcccggcgaccgtcaatgaccacgtatcattgaagaaataa

SEQ ID NO: 390170 - DNA, 531 bp, Salmonella enterica
ttgcgcatcaattcagaatcaaaattttttgccggattgcgggaactggctctggaagataaaatttttgggtatctagaacgctacgccagttttaattttcgcattgactacgaacagtggactgtcaccttctatcgtgacgaaacagcgcatattaaagtctcgcgcggcgaagaaaatatctttatctggtgcatctatctggcgatttgtgagctggcaattgacggtgacgaagctggcccatatagctgggtaaaatatctgtatatcgacgacccgatctcctcgctggatgacaacaacgccattgctgttgccagtgatttggcgaacctgctccgtcgcggaagaggtaagctgaaaacggtgatctcttcacaccacggcctgtttttcaacgtgatgtgtaacgagctaaaaaaaccaaacccaaaacctacttcttttattgtgaaaaaagcgcaggcacttattcgctacgggccaccgacgatacgtcattcttccaccacgtcgctatgttga

SEQ ID NO: 390171 - DNA, 369 bp, Salmonella enterica
atgttgagtgagttacaacaggcggttgcgagcaataaaatctatacgcatcatttcaatatgttgcgcagcattctggaaaaaacgtcaaccttctttggctatagtgacttctctgactgcatccacggcgtggaggatgaaatgctgtactcccgcgcatttaacctgttaagccacggtaagcattcgacttatgaacccagagaaatggtcgacgacaaccgaaccttatttaaaaatatcctgagtgcgtttctggcaaaatatcagtttgcactgccggaactgctggccgaaaaaccgcagccgcccgccgcacaaccagaaatccccgttgaactcattgaacccgtggatcaagcatga

SEQ ID NO: 390172 - DNA, 1608 bp, Salmonella enterica
atgactgaacaagaccaaaaacaactgggcgacacgctctggaacgtcgccgacacgctgcgcggctcgatgaataccgacgacttccgtgattatatgctgtcgttcctgttccttcgctatctgtcggacaactacgagactgccgccaaaaaagaactgggggcagattaccccgtatctccagaagaagagcctgttgcgccgttaagcctctggtatcagaataatcccgcagatgtgaaagagttcgaggcgatgatgcgccgcagggtgcattacgttattgaaccgaaatacctctgggtcagcatcgccgaaatggcccgcacgcagaataaagagttactgcgcacactggatgccggttttggctacatcgaaacgcagtcatttgaaagcacctttcagggcctgttctccgagatcaacctgacgtccgacaagctcggtaaaacatacgaagaacggaataaccgactgtgcgttattattggcgccatcgctaaagggatcgcgaagttttccaccagcagcgatattctgggcgacgcctatgaatatctgatcggccagtttgccgccgggtccggtaaaaaagcgggcgagttttataccccgcaacaaatttccagcatcctgtccgatatcgttacgctcgacagtcaggaccccaccacgggcaagaaaaagcgcctggataaggtattcgactttgcctgcggttccggttcgctactgcttaacgcacgtaataaactcggcgctcacggtatcggcaagatttacgggcaggaaaagaacatcaccacctacaaccttgcgcgtatgaacatgctactgcacggcatgaaggattctgagtttgagattttccacggtgattccctgctgaacgattggccgatgctcaaagaggctaacccggccaaaaagatgcattttgatgcggtggtagctaacccgcccttcagctatcgctgggaacctaacgaagtcatgggcgaggatttccgtttcaaaaactatggacttgctcccaaatccgctgccgatttcgccttcctgctgcacggttttcattttctttccccagaaggtacgatggcgatcgtcctgccgcacggtgttctgtttcgcggcggcgcagaagagcgtattcgtcgtaagctactcgaagacggcaacatagataccgtcattggcctgcccgccaacctgtttttctcaaccggtattccggtgtgtattctggtattgaaaaagtgcaaaaagccggatgacgtgctgtttattaacgccagtgaatacttcgagaaaggtaagcggcagaaccgtctgaataaagagcacatcagcaagattgtcgatacttaccagttccgcaaagaggaagatcgctattcccgccgcgtaccgctggaggaaatcaaggctaacgattacaacctgaatatttcccgctatatcagcaccgccgtgccggaggagaaaatcgatctggcagcagtcaatagccagctagtcgagttagagcaggaaatagcgaaagcgcgagatacgcataacgcctttcttaaagagcttggtctgccgccactgccctga

SEQ ID NO: 390173 - DNA, 564 bp, Salmonella enterica
atgcgtataacagtaagtgatatatcaaccagagaatcacagcagacggtacagatacaagctatcagaagttgggataccataccgtacctttcaatgttggatggactttatcaggacgatatctttcatgagcaaatatctaatttaccagaagaatatattaagctggatgagatggccaaagatgaagaaaagaacagcttaaatatttatgaattcttctttgagccaacacatgaaattatatgtgaagaaatccaatcaacattggatttttattattcaaatagcgcaaccttccgtaggctggttaattataaagtagagcgcagtatcaatgacgatgtagataccaataaatgcgaggtaaagatatctctaaattacagttacgaaaatattgatggggggcgaggatgtttatcgcttccatttgatcaaaacggctatccaattccccctgactttcacaactgtgtaaatggaatcacatcaaaaaaaattgttgttagatctatttctaaaacatattttgcacgatcatttaaatgcaagcggtga

SEQ ID NO: 390174 - DNA, 279 bp, Salmonella enterica
atgaatgacgtcgacctgccagtcggtgaggtgtggaacaacatttacgccgcgtttttccagcagcttaacctgaaccaggggaaccatctttataccgacggctggctctatgattacgggcgacagtctgagcaggagttgcaattcattacctatctgcggaatcgcacgccgattagcgcctggggcgtccgaccccgtctgcaatttctgatgctgatgttatttaaaggcggaacagaagccttccgggtgtttaaccagaactaccgctag

SEQ ID NO: 390175 - DNA, 891 bp, Salmonella enterica
atgacgttatcacaaagcaggatgaaaaagacggtgcaaaacgtttccacaaccaggaccatgccaaaaaagacgttgctcgcgatgtgctgtgcgttgttttacagtcagcccggcctggctgcggacatcgttgaatacgacagcacatttctgatgggcgatggcgctacgtctattgatgtcagccgctattctaatggcaaccccacgccagcgggaacgtacaccgtgagagtgtttgtcaatgagaaggccgtcgccagccagaccatcccgtttatcgatatcggcaaaaaaagcgccgaggcctgcctgaccatgaaaaatctggcgcagctacacattaagtcgccgcaaaacgtcggcgaaaaagccattttgaagaaaggcgacgacgagagcagcgattgcttaaacctgccagcgctgattgaacaatccagcgtgacgtttgatatgggcgaccagcgcctggatatcgtcgtgcctcaggcatgggttaacaaaagttatgacggctatgtggaaccgtcgctatgggaaaacggaatcccggccgcgctactctcctacaacattaacggctatcacaataccaatcacggtgttgataacgacaatatgtacgccgctttcaataccggtattaacctcggagcatggcgttttcgcgccaacggtaactataactggaacaataacagcggcagtaacttcgattttcagaaccgctacatccagcgcgatctcactgcgctgcgctcgcaactgatgttaggcgaggcgtacaccaccggcgagactttcgactcggtcagcattcgcggggtgcgtctgtacagtgactcccgtatgctaccgtcacagcttgccaactacgccctgtga

SEQ ID NO: 390176 - DNA, 132 bp, Salmonella enterica
atgattcatgatgtgaataatttcgcgccggtttttaaaacggcgcgtacttttttagtcgcacaaattgataactccttgattttagtagcacaaatcattaaaaaatacacaacacgtaaggttttataa

SEQ ID NO: 390177 - DNA, 1266 bp, Salmonella enterica
atgccatttacgaccgttttctgcattttcataaacctcggtttagaagaaacgataaatcgcgccgccgatgcgctacaaaaatcgcagaatggcggcgatattccggacaaaaaacaatttgcgagaactatcggtgctgtaacgtcaaccaccattacacttggcgaatcaggctggttcaaaatcgccacagtcttcatgccgcaggccacatcaactgcggtgattaaactgtacggtggggcggggtttaacgttggttattttgaacaggcggcaatcagtgaactggtgctgcgcgccggtaatggttcacctgctggaataaccgccacattatggagacgttcaccttctgctgctaacgaggtcgcatgggttaatacatcaggcgacacctacgatatttatattaatatcagccagcatgcgtactggttaattgcacagtacgattacaccggtaatgcaaatgtcacgctgcacagtacacctgaatattcatcagtacagccgggaaactcaaccagcggtcagacatatacaatttacagtagcctgatgaaacccacagccggtgacgttgaggcactgtcagttaatggagggcggctaaacggtccgttaggcattggtattgacaatgcacttggcggtaattcgattgtgctcggtgataatgatacagggtttaaacaggatggcgacggcattctgggtatttacgccaataatgcccgggtcggttatatcgacaattccgggctgcacatgtcagtagatgttctctctaatggtgccattcgcgccggcaacggaaaaacactgacgttatcgagtgctaacacttctgcactgaatgccggtttcagtctgtggggaggtggagaacgtccaacagtcattgagctgagcgatgaacagggatggcatttatacagtcagcgtaatactgatggcagtattcagtttgttgttaatggacaagttattccggataattacggtaatttcgacacccgttatttaacatcaggaaacgtatatacaaaaggcgaatcagataatcgttatgtccaaaatatccagcgcggcgctcctgtatggcctggcaaagtagatgaatatggaccagcagaagcgcctgctggttgctttttaacacaggccagacatgacccaacaacatcatacggtgtgacatttgcgtacagaccgctacaaatgtgggtgggtaatggctggcgtacaattaatggataa

SEQ ID NO: 390178 - DNA, 408 bp, Salmonella enterica
atgagcgattattattacagctttaaagagaaaggttttttttggcagccggataccgaatccgataattaccctgatgatttaattcccctggccgatgagcattaccatgaacttatgcagggccaggtggacggaaaatatatcgagcacagaaaggatggcccggtactggttgagcatcgcgaatatacgcctgaagaactggttgcacaggctgaagccagaaaggcagaacttcttgctgaagctgagtcagttattgcaccactggcacgggcggtaaaactgaaaattgccacagatcaagaagttaaacggatggaagcctgggaactctacagcgtaatggtcagtcgggtggatacagctaacccagactggccggagaaaccggccagtcattaa

SEQ ID NO: 390179 - DNA, 411 bp, Salmonella enterica
atgagcgattattattacagctttaaagaaaaaggttttttctggcaaccggataccgaatccgataattaccctgacgatttaattcccctgacagatgagtattatcgcgagctgatgcagggccaggtggatggaaaatatatcgagcacaggaaaggcggcccggtactggttgagcatcgcgaatatacacctgaagagctggttgcacaggctgaagccagaaaagcggaacttcttgctgaagctgagtcagttattgcgccactggcgcgggcggtaaaactgaaaattgctacagatgaagaagttaaacggctggaagcatgggaactttatagcgtaatggtaaaccgtgtggatacctcaaatcctgcctggccggagaaaccagccagtagtttataa

SEQ ID NO: 390180 - DNA, 495 bp, Salmonella enterica
gtgttgacaaataaagtcgttaaagattttatgcttcaaacgctcaatgatatagatattagaggtagtgcgagtaaagaccccgcatacgccagccagacccgtgaagctatactatcggcagtttacagcaagaataaagatcagtgttgtaatttgctcatcagcaaagggatcaacatagcgccttttcttcaggaaattggcgaagcagcgaaaaatgcaggtctgcccggaacaaccaaaaatgacgtttttacgccaagcggcgcaggggccaatccttttataactccgttgatttcatcagcaaacagtaagtatccacgtatgtttatcaatcaacatcagcaggcatcctttaaaatctatgcggagaagatcattatgacagaagttgcaccactgtttaatgagtgtgctatgccgactccacagcaattccaactgatactagaaaacattgctaataaatatatacaaaacactccctga

SEQ ID NO: 390181 - DNA, 582 bp, Salmonella enterica
atgccacatgaggttgcattggcaatgtatggatttgattacgatactaatgagaatgatttatcttctgaagagttaaaagaagttcataaattaagagcagccataacaagaaacttacagttgttagatgagtataaaaatgttagtgcgaaaatgagagttgaggcaagtcttgttttgaccgcggcttacatttttcagcgtgaagattgtataccatttgaagttaaagagaggattcataacgcattgcaacaacaagttcaacgtaagggatgggatgatattttaatgaaattaggaggtgttgaattgtacgatgtggggaaaagtttaaaacataatggtaggggacaatacagaaaagaagacgaagataataataattggaaattgattgcattgttgattgaacttctaggggagcatggaaaggcaagctataaagacttaagtgtaatttataatgatattatatcattgtgtgaaagtcggggtatctccctagaaggtataaaaaaagctactttttataaaaagatcaagatggcgaaagaaatgattaaatatggaggttga

SEQ ID NO: 390182 - DNA, 873 bp, Salmonella enterica
atgaatacacatatcattaccggatggaataataacagcgtccatgccagcggcaaggacgaggatatgaatacaatccttggctatatcgctgtaccgttcaccattgaacatggcagcgctggcgcaatttcccgtattattgaactggcacgactgaaagaaatgcgtcccctgtttgaaaaatttaataatcttacctgttattgcgctggtctggatcgccctagtgtggatgaacttaatttactggctgtaacagtgactacgttacataaaaacatcaataattatatttcaaagcaggaaagtgagattgcacagtgctctacggcgctggctgccattagtaaaggtagcgttaccggtagtggtttttatatcaggcaacaaatacaacaaaatgaaaataaccgggaacgtagtcaaaaccagattgcagtagcggaaaaagaccgtctgtatgtggagtccattatttcgttactgcgttcactggtgcggagtgaaagagaatctaatcctgaatttattctcaataccgaactgccacaaactgatactgacaatagcggatggtattttttcaggcgtggtaatgaagcaggtgagatggtcctggcgtcgctggaacgggtccagaaagcgctggacaacatcattgttaaatgcacccgtactgccagtaacatcagacacaaagaagagaaaaatgcacttattaaagcatatacttattattacagtagagacggtgaaacattacgttttgcaattgatcttagtgattatattggcgcagtcatggaacccgtaaggaatacgataaaaaaagaatataaaatgacatattcttttagcacaaactactga

SEQ ID NO: 390183 - DNA, 990 bp, Salmonella enterica
atgaacgaattaacggttaatgaaagggcttcaatcagtcgtttttctgcatatggaggtagtccgaataaagaagactggatctatttagaacggtcagacggacggctgttaaatactgccctgatggagtcaggctggatgatgaaaaatatcaccctgttacccgtcaaggatgccagaggacaggcttatacggttgggagtcgccagttacataccggacgtgaaatttccgggcgttttcgctgccgcattgctgccagcagtaccccattcgaactggctgaaaccgaaactaacgcctttctgccatacccggatctggtcgccatgattaataccagcaaagagggggaactcgaaagaatgatggagactttttttgaccgggccgtcgctctcgacatgctccgcgtcggatttaacgggctgcgtgtaggctggccgaccaaacccgacgagaaccctaatggagaggatatcaataaaggctggcacaccattgcgaaagactttaataacggctcacaggtactgacagacgcaatcacgctgggggctggaggagattttccgcaccttgacgccctagctaatcacattatccagacaaaaatccctcaagggttacgggaagatccacgccttgtggtgatggtgggttccgaactggccgccgctgaacggctccgcctgtttaacggggctgacactccggcaaatgccgcagccgcgcaggccgcgacaagttcgattgctggtcgttttgcgtttgtaccaccattcatgcccggtaaacgtctgactgtcaccacactgtcaaacctgcacatctacacacaggatgggacacaaaaagctcgtgcgggcttcaacgatgaagaaagcgcctatgagcacagctatctgcgtaatgaggggtatgcattgcaggacggtatgatgtacgccgccgtcgatgaaagcgcaatcacactaaaaagctga

SEQ ID NO: 390184 - DNA, 603 bp, Salmonella enterica
atggttcgtaccgggaacaaaaacactatggcgcagcgggttgagagcgtcaacggccagaattcggttattattctcttgcgtcgccgtgaaaaggcgggttatagttttcccgttgctgcaaaatcagcaaccgggcgtggaaacccgtgttacatatcggcgacatcagacgccttaagcgtcttttttattgtcgcagcctcagtacatctatattcagcggtattgatccgcaccgaatcaatggtggctcaggcagggctgacttcggtcaggccggttttcgatatggccggtatttccacccctgtctgggctaccaccaatcaagagcgtggaaactctggtggtagcaaatatagctacatatcggagattgacgcatgtcaacgacccctacccaaacttacccgcaatttacctggctttttctggcggttcgccgttctgatctacgtgataaacctcaccgcagacaagttacagctcctgattatcaaactgcacgtcgccttattgcacgtgattttgtggctgcctttgcaggtcgtatgccatcaggaacgctcccccattaattcagggccggagatacgataa

SEQ ID NO: 390185 - DNA, 435 bp, Salmonella enterica
atgaaaactcaggcgaatatacagaaatgccccttgactggttccgtgaagtctatcgaaaaatcagtgataaaggtatctatccacaaattaaaagaaattccgaccgaatcccattatacatttattacaggggtgataaggcttctgaataaaattggtgatctgataacattcaataaacgctactttatcttattgggtggtagtcgggataaaattcatcccgttacaggttatgcggtgatcgatgctgtaagtaaaaccagtgccattaaacagatccgtgaaatccttaatgtgacgtcatcaaccggatatggtgtttattacatttcattagttgtacgtgttaacacgtatacacgcgatttaaaagcatttgcagctttctgcaatgctgaatggattatgagtgaggttgagtatgaataa

SEQ ID NO: 390186 - DNA, 240 bp, Salmonella enterica
atgaataagccacaaatcagcattgagtgctatcacaaattaaaccgctcaagcgctgttgctcagtactttcatcttgacctgcacaggcaggagcttaacggaatgcatcagttatatattccgcatattttcagttacatccatgaggatatatcggctgtacttaaagagcttaaggataaagggttgtgcgacgactggttgaatcagagcgataaacattcagataaagagtaa

SEQ ID NO: 390187 - DNA, 411 bp, Salmonella enterica
atgaatattatcaagttaattaacatgatggaattcagaatagcactgatgcgtaactatattgcgctggcatttattgcagaaactgaatgtaaaaattcatcacctgattttatccaggacggtgtcactgttgagttaacgccagataaagtcagtgcaaacattgccagctatatcgaacgggaaaatattcagcgttgtggtgtccatttaggacaactattaaatgctgaacagttaaagaatatgctggaaaaagactttatggcagaagatgaaccgcaattatctgattatggtcaggctgtcatgatggatatttacagacatattgcgcgtggcggtttggacggtgttttaccagtagaagccaatatacaagtactggcgggagaggttgacgtatga

SEQ ID NO: 390188 - DNA, 2697 bp, Salmonella enterica
atgaaaaagcaggtgactgaaacaatgaaacttgcgcttaatcgctggccgtttgttctccagacgctgggcatcacagttcctgttaacggcaggcatggagcatgtccggcatgtggtggaaaagatcgttttcgctttgacgataaagacgggcgcgggacgtggttctgtaatcattgcggcagtggtgatggtcttgacctggtcagtcgggtgatgaagctggacgttaaagccgcggctgaaaaagtggccagcactgttgggaatatcagtgctgcaggcgtaacaccggtcaaaatgccagccagaaaagaagcctcagacgcgcagaagcgggcgcagatggtgaaaacctacgccgcactggtgagtaacaccactgccggggagagtgcatatctgagaaataagggtttgcccggtcatcaatacccgctccttaatcagccgcttacagcgggcggaatgacgttccctgacggttcactgttattgccgttgacgggcatcgatggcagcgtgtcgggtgcgcagcttatcagcccggacggtaacaagtgcctgctggcaggctcaaaaatgaccggcgcatttctggcggtgacacccgtcccggaagagtacccggaacgggtcattattacagaaggttttgccacggcgattacggtttccggccttgctgatggctggtgtgtggctgccgtatcggccaataacctgcttaacgtggcgcgggtattacgtgataaatggccggatacccgtctggttattgccggggataatgacttcgctgacggaaaggataatccggggcgtgaaaaagcatatcaggcggctcaggccgtcaatggctgggtgacaattccaccggggcagtttaaggccgactgggacgatttccggcgcgaatttggcatcctgcgggcgcgtgatgcattcagtgacgaaatggtcaatccgaacgatacggaaacccggcttcctcatggtttccggctgacaaaggattttctctggtttgataaaccggcaggtgacgacggcgacagcagtcagacgcgacaaatcaagatttgcagcccgctgcgggtcacggcaataacctgtgatgcagacggtggcaagtttggccgtctgctggaatgggaggattcaaacgggatcaagcatgaatgggcaatgcccatgaccgtgctggccggtagtggtcaggaactgcgggaggtgctgcttgataatggtcttcactttatcagcgttaacggcgcagcgcgtggctacctgatggaatacatttcgacgtgtcgccctgttcgtaaagtgacatgcgtcaacaaaaccggctggcatggctctgtgtatgtactccaggacgaggttattggcaccggagcggggtcggttattttacagtcggcctactccacaaaaaatgatttcagggcatcggggacgacaaaggaatggatcgagcaaatcggccgttactgtgtcggtaactcccggctggcgttctgtgtgagcctttctctggcggccccgctgttacatctgattggcgccgctgcgggtggctaccatctcaagggagaatcaacggacgggaaaaccaccacaatgaaagttgccgcgtcggtttgtggtagcccggaatactggaagacgtggagagccacaggaaacgcgctggagggtattgcactacgccgcaatgatgctgcattgatgctcgatgaaatcagtgaagttgacggaaaggaagccagccgcatcgcttacatgctgggcaacggtcagggtaaatcacgaagccgggttgatggtagcctacgcgatccggtcacctggtcagtgttatacatgtcaaccggcgaagtttccatcatggagcacgcggctgaatccggggaaaaacgtaccggtgccggggttggtgttcgtatggtgcaaatccccagcgataccggcaagcacggcgcatttgaagaattgcatggctttgccggaggcaaagagtttgcggaacatcttgaacaggccagcaagcaatattacggggcggtgtttagggactgggttcgctatctcaccggtaatctgctggacgtgacaaaccgtgccagagcgatgaaaaaagagtttgaaaaatcactgttgccggaaaatgccggtaatcaggttggccgcattgtggatcgttttgcgttgcttgctgtggcgggagaactagccaccgaagttgggattaccggttggggaaagggcgaaagttaccgggcggcagagtcctgccttgcatcctggttgacggatcgtggtcactcttcaaatcaggaggaacgcgacgcactggaacgggtacgccagtttgtcactgcaaaccagtttacccgctttgcagactggcacgacgagaagagccgcccggccagcatggttggctatcgtcgcactatcaagggcaatgacagcaccagaactgaacccgagacaactttttatatgctttcaagcggctggaaagaaatgtgcgggaattatgacccggtgaaggttgcacgactttgtcgggctgcgggctggctgatagtcgatccagacagcacacggaaccagactgctgtcagactgccagaaatcgggcttaaaaaagtgttcgtgctgagtagtgaagttatcggttaa

SEQ ID NO: 390189 - DNA, 489 bp, Salmonella enterica
atgagccgacagattcacattttctgccctgagtgtggcgaacgctcgacgattagcaaagtgatttattcaggtgtgaccggcgcaacgctgacctgtcgatgtaataaccttgattgcgggcatattgccgtctgggaatgcgagtttgctcatactgtaaaaagcccgatgcagattttcgacgtaacagaacggcagataacacccggcagaaataagataagccaatttgtattaagctgtacaaactgcgggcggcgggcaaccataacgagaacggcccgcgtacatgatgaatcatatgttctgtacgtccgttgctcacattcagactgccagcatcgctttgtttcccgccttaacttcaaaaacgctgtcgtgcctggtgccggggttagtgggcgacttattcaggatatcattaagtaccttcccgcctcagagcgacaaaatgttatcgatgcgctgcgcgaggcgggtagataa

SEQ ID NO: 390190 - DNA, 318 bp, Salmonella enterica
atgaattcgcttgcaatacaaaccattaatgtacaaattcccgtggagttgaccgcagctattgaacatcttgcaattgaattaggctgttccaggaactgtattattaatgaagcgctgacccgttttctggcagaaagagaacggcgtcatcagagcatccaggccggtcttgccgatgtggatgctggtcgtgtggtgagtcattcggatatggtagattttgccaaccgtttaaaggaaacctgccaggcaaagatgttgctatccgagatagtcgcctctcattgccatttgcttaaatattccccatactag

SEQ ID NO: 390191 - DNA, 621 bp, Salmonella enterica
atgcgcgcgcggcagcggcgcgacggcagccagctcaccgtgttttttgcgcagttcgtctatcggaccaaagtccagcgcccgcagcggacaggattccacgcaaatcggtttcttgcctttcgccacccggtcataacagccgtcgcacttggtcatatgacctttggcggcgttgtactgcggcgcgccgtacgggcaggccatgtggcagtagcggcagccgatacagacctcttcattcaccaccacaaaaccgtcatcgcgcttgtgcatcgcgccgctcgggcagactttcgtacaggccgggtcttcgcagtggttacaggagatggagagatagtaggcaaagacgttctggtgccagacgccgttatcttcctgccagtcgccacccgcatactcataaatgcggcggaagctgacatccggggtcaaatctttgtagtccttgcaggccagttcgcaggttttgcaaccggtgcaacgactggaatcaataaaaaatccatactgggttgtcatcggttactccttacgccttttcaacctgaacaagattactgtgtgacggattacctttcgccagtggggaaggtcggtgcgacgtcagaatgttaa

SEQ ID NO: 390192 - DNA, 426 bp, Salmonella enterica
atgaaatttagtgatgtttttgacaaccgcttatacgtaactcagattaaaaccggaatgaaaatagccattcccctctccctgacacttcgggcgacggggttacgtctgggaacggtaatcgatcgctgccgactggtaagccgaactgatttcatgatcagtgcaggaatcaggaaaaatagcctgaccgggaatattcatccggatggattgacaaagacatttgtaaaagcaagaaaagcctccggcgttaacttcagcaataatccaccgacatttcacgagatccgaagtctggccgggcggctgtacaaaaacgagcacggcgaggtgttcgcccaaaaactcctgggccacacctcagagaacaccacgaaactctatctcgatgagcgtgatgataaagcttatatgatgctctaa

SEQ ID NO: 390193 - DNA, 702 bp, Salmonella enterica
atgtttttaagctttccgagtgtgagtctgaattcatctaataggatatgtgacttatctgagaatgatttagagctcattcgtgatgcagttaaacaaaatgacagaagagaattacaaattgaattacgtgatttattatttaaagtaagtaatcgttctgttgacggtggagaagttgaattcaaggttaaacctgatctttcttcatatcaagccactaatatggagcgtagattagaatatacaagatactttacaattttagaaaaacaattaaataatacattggacacttcacctgaagatcttcgaaataacctgaccgcatcacactcaaataacttacaggaatttgctagtcaaaatttaacaattacacctattgtttcagcaacatctaaacaacgattagtagataaaattgatttatgcagtttttcaccaaatgctgaagagctttcatgttcgaaagacgatttgatatgccctgtaatgttagccgttcctgaaaaaggcatttttgtgaaagctagttcagagtcaaatatatgccaattatttgatgaggtagcacttatccaacttattattgagagtgccatacatcctgtaaacagggctccgttaacagcagatatgataatagataaaaatgaatgttatttcgatactacaaaaggtaattttgtaattccataa

SEQ ID NO: 390194 - DNA, 1338 bp, Salmonella enterica
atgtttcggttacgtcgcggtagcggtgattttcactttcatgtaacagactctcaggggttgccacatttaacgttgacggtttatgcgtgcagagccgacaggtaccattcaccagccacagttaaggcttatctcaggcatcttctggcttttttttcctgggctggacaggatgaaacagtaaaacgccagcattgggatttgctgggcaacactggtcaggtccgtgctgtgctcgaacatttcctgacaacccaactgcattgtactttatttttcgcacgagatttgtcaggagaagatattcgcaaggttcaggttacttggggaaaagcccaccggattaatcatctgttagctgcgctgcgatctttttatcagttgctcatctcgatgcagctgtattcccatcttcaccctcttgatttaccccaagccaaaaatatgattgcagaaatccggctacagcatcttgatgactttgtgagaatacaccagagaccgccgatgccatcagacagtggcattgaccattggcgtcctctcagactgagctcttcgtattacagaattaaagataatcaatggatccctgagtatctggacgatccggaactcatggggcatgtgctggcctcaggcgaacagttcggctggaagctacaggatatagcgctcgtgagaatacttttcgatactggctgcagaatacacgaggcctgcgcgctgaccatgcatgactggaaggtcagcgattttcgcaacatgttcatgtcgctgagtaaaggcagtcgtgggaagcgggtcaagaatatcatcatcacggataaaacgcagaaggtgctgctgcgctatatcagaaatgacaggcctgagctgctgccatatctcaacgggcgcaccgctttgcctcccgaaaatgttcaccggcttcctatcttctgtacaaaaagaggtcatccactgacagcggacaactttagacgttaccgatggacgcctgtactggccgctgccggacttaagatacgcacccaccaggttcgacactggtttgtcacgatggcactgaacgagatccaccatagcgccgtttcagaggctgatcttttgcagaaacgcagtgccctgcaggtattaatgggatggagatccgatatgttgccagcttatgatcaagcccgacagcgtcatgatttgcctttgctggcaaatgcaatacacacgtacatcgaagataagcagttggaggctcaggctgcttgtgatgtgcccgatgacaaggaaagtctgggctcgctgatgctgaaagaaatgctggagggtaaactatga

SEQ ID NO: 390195 - DNA, 2934 bp, Salmonella enterica
atgagcgttgatactcaacctgctgcacgacgcagccatacattattttctgaacttacccagcgtgaagaacggggaaactggttcaggattgaagatttaccgggctcccgtaccgggcggcctgcactgaaaagagcgttgatgccttacattgataatgttatggctcagctgcttggtactatgccgatgagcgatcagtcgtttctgggatgggagcagaaatacctgacatttgattttttcatccgaagcagtagctatgcactggagattaaataccggtacattatttattgtattgaggacggactcagaaataacaatgaagcgtatatattaaaaataaaaaaacagtgttgcgctgaagatgaagatattttcaattttgtaaaaaaaattaaagccagggagcccgctaccgaaccctctgcattctcgagctcaattccattcctgtctcaggatgagcgtaaaaaggttatttataaattatatgacttttataaaatgcaggccgagccctttaaaacctcagagatatcagaacaattcggcatagatttgcatatcatttctaggtatggacgctcttacgttagcgaactggctgatcttctccttgacgaagatgtttctgatgatttagcctactttgaatggaacagaacggtaacgaccttcaagaactcactgcaaaatacagcaagatcaaaagaaattggcgagaaaaaagtggttcttgccattgattacttaagccggaataaccgtgaagtgacatattcagaaataaccaccatagtctgccttgaccacaggctagttaaaagagtggtaggtcaatgggaaaagtgcactgataccaaattggtgaaaaaagatgcctggaaaacaatctctctggatgagctcatcgccacactcgacccggttcttcagacaataccgctgacgtttctggactcgcctgcaacaggtaaaccaatgaccaatgcacagatacgtatgatttacgagattaagcaaccgggtctgagaaacacggcattttttatcatggcgacctgttacagtaacagaagaaatgacattacttttttttattacatgccccggtttcttaacgcaactggcctggatgacataggccagtttgactgtgataccttttttgaggcgtatcatcaaggtgaccttatcccggaagacaatataggacagagggctagaataattcagacatattttcggttactcgttaagcaaagcgattatttcagcaaacttaacacagaccagcgagaaaaatttgccccctttgcactgccgcgagtgtccgacgatttattctggaaaaaatctaccctgcacagagctgtctcacaggaacaaaaaaataaaagaaagtctaaaacagccgtcctgcaccagaagttttattttcttcgagattttgtggaaagaaggaagttgcagatcaacaggctacatcaggagatacaaaaggcgtttaagagatttgaaaagtcggggaaaaagacgccgctggtttttgagtatacagaatctgttgtcatggaaaacagaggcgaacagtcatatacgcacaggtttaaagtctgggacgcaaagctattgaggcaggcacatgagcatgtcgctgaagccagaacatatcgatatcgtgatgctaatccgcatcatactattcatgactccgatgtaaaattcactacttatgagggaagctacgataaacatcaccagcccgttgaagggctgtggttcactgaactgatcacgcttgccgcgctcacaggcactccttcggctgaaatcactgaccgatacggggtatcaaagacgtcttttcagggtcctatcaccactccctacggatatacagccagtcggtggcaatacctgttgagtaaagagttggggctgatatttattcctgttgaaattttgatggtcgatgctctgttggcgcattctgttgtacaaattatgtcaaagaccggggccagggcacatgagtttttacagataaggttagtcccggagcatctttatcggatcaatctggcagaaaataaagagtgcattttatttaacgcggttcccaaagggaggttaaaagaggagcctttttatattgataataagtgcatggaaagtctttatgaatggtggggttaccaaagaagcagatcgcaggcttttcccgttattaaagcagcagcatgcctgggacccaaattaaaacctgcgagctacctctggcaaaacgatgaaagacattttacacagaaagacattaacggcgcactttccgttatgctccatgggctttccttgaaaacgcccacagggcaatctataaaagtcactagccatctgctcagacatagctttgcaacagagatgcgtacactgaatacgccactggacgtactggctttgttgatgaagcaaaaagatgtcaacgttacagaatattatgccaggcataccccctctcagttggtcgaactgcagcagcaaattttcactcagcgacatgacttttccaggcaacatatccgcacgaaaggcgatattgctcagcaactgacagaagctgccggtaaggttggagcactgatccctgttacgggaggatgttgtacgattgcgaatgcgtgcccggccaaatttgcttgtattggctgtgcagggaatgcccccgatcccgccagacgcggtgacgtccttgtatacagagatgcttgggtaaagatggctgagctggccgggcagcagaatttaccggcggaaaagagaaaagctcacgaaattattggcagctgtgacgacatgctggaagaaatggatttgattgagcaggtcgatactatcaggcgtaatctgcagtcctcatcctga

SEQ ID NO: 390196 - DNA, 447 bp, Salmonella enterica
atgacaaataaaaacatgagcggtattcatgcctggcaacgcaatcgcgttgaaaacagtgcatcattggttaaacgtgcgattgatgtgctcctatcaggggggctaagaatcagcctgacgacagttgttctagcttcaaaaagcgtagatcctacgggaaaaggcgtatctgcttccaccatcttgcggaacaggcaatgccatgcgatgtacaaaaaacatgcaacactgagcggaagtagccagaaaaaacttaccatttcggacactgaacttaatgatccaacagcgtcagaattacggagagcttatcttcttgcgagtaagagcaaaacagccctgattgcgaaggttattttgcttgaacgtgagcttgaaaactgtgaaatacagaatggcaacctgcgagagaaaatactgtcactacagctaccgcacctgtaa

SEQ ID NO: 390197 - DNA, 1269 bp, Salmonella enterica
atgacgatgtttgctctggccgacgtcaacagcttttatacgtcctgtgaaacagtgttccgcccgaatttaaagggaaaacccgtggtggtggtctctaacaacgacggctgcgtaatttcgcgttcagcagaggcaaaagcgctcggcatcacgatgggagaaccattttttaaattgaaaaataagacattcccctctgcagtgcacgtattcagctcaaactatgccctttatgccgacctcagtgcacgggttatgcagacgctgacggagatgtcgccatccatcgagatctattcaattgatgaagcctttatcgacttatcgggcatagccaactgcatgtcgctgacagattttggcaaaaacgtgcgagaccaggtgtttaaaaataccgggctcacgatcggggtcggcgcttcgcaaaccaaaacgttagcaaaattagcaaattacgcagcaaaaagatggcctggaacgggaggcgtggttgatttatccgacatatcacgtcagcgcaagctgttagagcgcgtacctgtagaggaggtatggggggtaggaaggcgcataagtaaaaaactgaacgctatggggatcaatacagcgctggacttagccaatagctcaccgtgggtaatcaaaaagcatttcaacgttgttctggaaagaacgttgcgtgaactgcgtggtgaaccgtgtctggatcttgaggaattcccgccaaataagcaacagattatgtgcagccgctcttttgggtatcgtattaccgagtatgccgatatgcgtcaggctgtctgcacctatgcagagcgcgctgcagcaaaattgcgtagtgaacaccagttttgtgcttttgttagcgtttttctacgcaccagcccgcacgcagataatgaagtttactatggaaatcaatcgtcggtgaaattactggcaccttctgatgatacgcgtgacatcattcgtgccgcgacagaatcactggatcgaatatgggtcgaaggttaccgttacatgaaagcgggtgtcatgctggctgacttttttagtcgcggcacagcacagcttaatttgtttgacaatttcgcccggaaagctaatagcacggcactcatgacggtaatcgacggcattaacgcgtcagggaatgggaaggtctggtttgcgggtcagggcatccagaagccctgggcaatgaaacgtgaaatgctgtcaccggcttacactacgcgctattcagatctgcctgtcgctaaatga

SEQ ID NO: 390198 - DNA, 408 bp, Salmonella enterica
atgaagattttttatcccttcgagattgccccctctatccctcttcctctctttacggagcgggtaccttgtggctttcccagccccgcgcaagactatgttgaagataggctgaatctcaatacgcttttgatagcccatcctagcgccacgttaagtggcgactccatgacaggggctggaattggggatggtgaccttctggtagttgaccgttctctgtctgcaagccatggcgatattgtgattgctgctgtcgccggcgactttactgtcaaggagttacgaactcatcctgtcttacaactagtaccgcacaatagcaattactcacccattacgtttcatcatccagaagatttggaaatatttggcgtagtgacattttcagtgaagtcacatcaatga

SEQ ID NO: 390199 - DNA, 1494 bp, Salmonella enterica
atgaaatcatctgttaaatcaatcatcgctgtagctgttatctctaccatcggcgctaatgcttatgcgcttgaaggtaatgaaaaaaaagccgctgaaaactatttttctcaacacccagacattgcaagccttgcaccgtggattaaaaacagtgttatggaagcacctacattaaaagatgctaactattttctgaaaaacaatacttattacactggttataataacggtaataagcttatttatgctgatccaattcctgattatcagccagctaacaccgactcaaaccatgaccaggcgttagctcaacctcgcgtagttaaagaccctattgataaatctaaagggcgtgtagctcatcctgtagccttgggggattctaaactttccactactcctggtgctgataaatccgctcctaaaggtgtagcactgcctgtagtgattcatgatagcaccgctaagcgtgatcacgttgcaatgataagtaacatcactacaactgtgcaccaggtgcaaacacaagatgtaacaagcactgaaaaaatcaccgctcctgtgattgctcctactacagactttgaaacgcaagatgtaacagctattgaagaagtagttgctcctgctatcactcctgtagcggttgagtctaaacaagcgcctgagactgaaactcaagatgttagcaagattgagaaaatcactgctccggttatcgctcctgttgaaacagtaaaagctaccactattaatgctcctgtggtaagtgccagcaagatgaaaagcgtagagcttgcaagccaggttagcgcctctaccgttaaagagaaagaaattgcagatcaagccgctactaaagcacctgccattactgcttctgcttatcgtagtgttgttacagaagagcaatcagcacttgttatagaagagcctcatagcaccgccgcaaagcgccctgctattcaggctacagccattacaacgaaagcttcagcaccgattaaggctagcactctcacacctgctaaacatgttgtagcggcttctacgctcattgcttccactaagccagtggagcaagtgaaacaggtgcaaccaactgtaacctacgttaaccagggtatgacggctaaagatcgtggtgaattgctcgctacttctcacgctgtaagaaacgttgctaaacgtcaatcagattttgaacaaaacactaataagcgcttctctgatctgaataaagaagttagcgacaataagaaagaagctaatgcgggtatcagtgaagctatggcaatggctaatatccctcaagtaattcaggggcaaactgtagctatcggtgctggcatgggtggctataacggtgaaaacgctgtagcggtcggtgttagtactcgcctctctcaaaacgtcattatgaaagctactgttagcgacgatacagaaagcaatgtaggctacggcgctggcgtctcgataggttggtaa

SEQ ID NO: 390200 - DNA, 534 bp, Salmonella enterica
ttgttggcaattctagtttcgatggtagctatcagtgctaacgctggtactcataccattacaggcggttacgctcattcctttggtgatgatacagatcttaatggcttaggcatccaatataactacggttttgataattcaccgtggggcattatcagcactgtaacggttaccggggatgaggaacataatgcagcaggttatgacaatggggaagcggtaaaatctaaagatactatgggttatgcttcaattactggcggtgcttcttaccaggtagctgatcctgtgtgcctctatgctgttgcaggtgtagcgcgtggtgctggtaaatctgaattaccaggcgattatttatgggataacggcgatgattctattacggttcgccgtactggttttgtttatggtgctggcactcaattcaccgtttataaaaggcttacctttactactggtgtagaaaatacacacttcaaagattttggtaatctcaccactatcaatattggcgctggatggaagttttaa

SEQ ID NO: 390201 - DNA, 219 bp, Salmonella enterica
atggtagttgtagctgttgctatgctggctggatgcactacacaagctgagagacttgctaagtgtcaaagcttaggtgttagcttagatgcttgttacgctgctgacatgcagcatgaaacagctattcaggctaattatcacaaacaggctttagaagatatttctaaagattattacaactctcaaaacaatcacaagcaccatcaccacggatag

SEQ ID NO: 390202 - DNA, 189 bp, Salmonella enterica
atgaagaaaatgattttaacaattatgctatctgtatgctctgtagctcatgcagcaccaatgatttgtaagttaaaaaatcaaaatataacatttaatctttttttaattactaacattaaaaaggatataataggtgttaacgtcaatggtgtgcaggtcaaaaaatcttcaatcaaaattttataa

SEQ ID NO: 390203 - DNA, 360 bp, Salmonella enterica
atgaaaaagatgattttatcgctatctttttttatggtgagtaatgtttatgcaattagtcataagcaccgcgaagaattagcgaaatctggctgtacacaagtacaagaagctaatggcacttgtaacgcaatcggatctaaaaattatattgatgaaacatttgtaaaacattacaaagggatgaaaattgtatgggtgcaaaatgaaagcgttacagtagagggtaaacccgcctctgtagttgattcaggcggctatggtgcaacctggcaacaaggaatttataaaatcatcacttacaaaaacaataaaattgcagtgatggaaaacgatattttcaaaggtcatgctaaataa

SEQ ID NO: 390204 - DNA, 171 bp, Salmonella enterica
atggataaaaacaggcaagaaacgccgcaacaagtgaatctatctaatctgcttcacataaagaattgtgttgatgctgtaaaagcctgtctgaaaagaggagtttggaacgaaggcgatttaccaacgtttagcacgttgctagatgaagcggtgaaaagttgctattga

SEQ ID NO: 390205 - DNA, 471 bp, Salmonella enterica
atggaaaaattatttaccccgtttcaggccggtgacactgacctggtaaaccgcgtcgttatggcaccgatgacccgctcccgggcaatgtcgggtgatactgcagatgaactgaccgcaaaatattaccagcagcgtgcatcagcagggctccttatcacagaaggttctcaaatatccgtccagggacaggggtatcttttcactcccggtatctacagcgatgctcaggtgcagggatggcaaaaagttaccaaagcggtccacgacgccggcggcaaaatttacattcagctctggcacgtcggtcgaatttctcacacaagtttgcaggctgacggacaggcccccgtcagttcggtggcggttaaagccaataattcaacctgctacgcacgcgacgaaaacggcaaactaggtccggttccggtaccatacttccctcagaaattgccattacttattaactga

SEQ ID NO: 390206 - DNA, 579 bp, Salmonella enterica
ttggaaggaattattcaggggcacagcgatagctccttgacctgtcggggtttgcgtgaaacgtccgtcctactagcagcgtttagtgcaagtgagtatcaaatagagcgtgtttacgcgtctccgcttggacgtgcctggcaaatggggcaaagcctcgctgaacactttcgctgttcactgacggctgaaccggcccttaaagagcaggcctttggtcagtttgaaggtatgccgttagaactactcagacgaaaacatccgaacgatgcaaatgcgttattcaggcttgatgcagagtattgtccacctgggggggagtcactggcgcatgcttctcagcgagttatgcgttttttacaaaacctggaagatacttcatcacatcaacaaacaatatgtattgtgtctcacgggcatgtcagtcagggcactctggcaattcttaaagaagggactgtgaataatttccctcgctatgctcaccccaatgcaagttattctgttatcgacctgattaatggaaaatgtatcggcctaaagtgggggattgctacacatttacgccacctgaattag

SEQ ID NO: 390207 - DNA, 486 bp, Salmonella enterica
atgtcttatgatatttttctgaaaattgacggcatcgacggtgagtcgatggatgacaaacacaaaaatgaaattgaagtactgagctggcgctggaatatccatcaggaatccaccatgcacgccggtagcggcctcggctccggtaaggtctccgtcaccaacctggattttgatcactatatcgaccgcgccagcctgaacctgttcaaatactgcgcctccggcaagcacattccgcaggccattctggttatgcgtaaggctggcggcaatccgctggagtacctcaagtataccttcaccgacctgattgtcgccgtggtttccccgagcggcagccacgatggtgaaatcgcctcccgtgaaacggtggagctctccttcagcaccgtgaagcaggaatacgtggtgcagaaccagcagggcggcagcggcggcaccattaccgcaggctacgacttcaaggccaacaaagaaatttaa

SEQ ID NO: 390208 - DNA, 498 bp, Salmonella enterica
atgaaaaatgtaaaaaatttaattattgcaagtgtattgagtatgatggctgctggttgttatgcaggctcactcgtgccgaatacaagcacttccgtgtcgacgaatataggcttcagtcagcctggacaactacaagcacagcttactccagtggctggcttggcggctgggcttcataaggctgatgaggctattgctacgctttcggcaagcggttcgagcaaacaatacgcgctaacgggagattattctaaacctgaaacagtgggcaacaacagcgatgtgtggacggtaattagtaaaaatggtaatgccattaaagttacctttggggggataggctgtgcctcaaaaggttcattagtggatagtggttatcataagtggtgggtatataacatggcagacaaagtcgctgtgaaattgtatggagcacaaacggtaaaggctgatacttatccagtgacgctacacatagcggagtatcaggcttaa

SEQ ID NO: 390209 - DNA, 510 bp, Salmonella enterica
atgcttactgtttactgtgaaaaaatgactgccggggcgtcaatttcaccgggtgcgtatggtttagcgggtgtagtaattggtgctcttatttcgggggggattgcttatgttattcaaaggcagaactctaaaagtgctattaagttggaaacagaaaagcataaaataaatgtaatatcttcctaccttttgagtgatcttattgattttctaaatgatgaggttgcaaacttgcaaagcgtttacctctcccccaaggatgggagtaatattccagctcctgaacatcatagaaatctaattaatactgagattaatgtgcgcgcgtttcaggatgaagggttgaaaaatttatttgacgaatttgttactgccggtaataaggtcagaaaacttactgcggtggagaaagccatcggtgacgacgacatactttgggctgctgttgatttggctgcaggtattaaaaaacgagcacttgaacttagtcagtttaatattaaataa

SEQ ID NO: 390210 - DNA, 210 bp, Salmonella enterica
atgaaatttaaaaggttaaaaatatctgattggcgccaatttaatgaggtaagcatagacttccataacaaagtaacagtgattactgggtctaatggagcaggaaagtcaacagtattaagaatattagctaagcatttctcttggaattgtgattttttggcaatgccgttttacgatgaagataaagggattaatattattcactaa

SEQ ID NO: 390211 - DNA, 138 bp, Salmonella enterica
atgacattggcacaacagggggagttaatggcttttgaacacccaggtttctggcagccgatggataccctacgtgataaagtttacctcgaagggctgtgggaaaaaggtaaagctccgtggaaaacctgggagtaa

SEQ ID NO: 390212 - DNA, 1896 bp, Salmonella enterica
atggacaaccctttttacgatatggacacgctggttgaggccgggccgcaaggattagcactgatcaaaaactggcagcgcgcccgcccccgctctactcacgcctggcttgccgaggcgcaatactggaatcaccgtgcgtggctgtatcgcagctatggctgggcgagagaaaccacccgagcgatgtggatctgcgctgccgcctgcaacgaacggatggtcatcgccgtgctcaatgctatcgactgtgaaccgcgccagtggatggccgcggccctgaccagcaccaactcaaaagtcttcgaccagcccggctggctggttgagttccttgtgggcgcgaatgttgccgggcagccattaatggaagatctggctgaatatcatcgccattcaccgcaggaggtggacgcgctgatggcccattccgggctgtcgtttgccgacgcggtttgcccaaatttgccgcgcccgtccgtattgccggagtgcgatgacgatgccgggcaaaaatactggctcgccgtctgcctggctattttcccgacggcattttacgtgctggatgaatatatcccgtttcgtatgccgcgctggggagggtctcacgaggaaatccgcgaatttctggaatcaagcgtatgcgatcacctttctgccgcagaacgtgaacatctggagctattaatctggtgggacgatcaccgcgatctgcgcattaaagaggttgactccccggcagaacaggaacgcattatcgccaaagccgaagagattagcctgcgagcgcatatccaggaatcccgccacaacgcgctgaagtggctgcgggtctgctatagcgatctggacgataatgacgcgctctggcgaacccttcagcgttcgatcatggaaaaagttaagctcaacaattatttctctgatgacacgataaagttcgccctgcgtgattttcctgacacctggtggatgtataattttctctgtcagaatgcgcagcaaacgcaattcgcagtgccgaaaatccgtcgtggctacgttcagtacgccgggctattgggtttcgaaaaggatgaggcgcaaggcctcgcctggctcgatagcgtcgccgacattaaatataaccatcactggcgggcggcgattaaaaatttcaactggttcgggctcccggaacatttcgtgccgctggcagagctgggcgcgcaaagaaatatccccgccgcgctaaacctgctgggccttgaacacaataataaagagaacaacggcctactaccttacgatcctgccatcgcgttagggtattttcagcgcgcggcggagattttgcaccggcagttagcgctgcgcgagagcaccccgtacaaattaatagataacggaggctataccgactatgaaaatgacctgcaaaatattcatttcagcatcggcgtctgcaaccagcgtctgagtaaacaagaatttgataccgaaaaacgttccgcttatgaaaaagaactactcgataatctctggctggcgcatcagttcgggcataaagaggcctggggcttgttcctgctgaatatttttgaagtgaaggatattacgctggcgcataagcatctggaactggtgcaacaagaggccaacaaaggcacgctacatgctatggtgaccctatcgcgcctgcacggtaataaacacgatcgaacgctgtttaatatgaagctaagcgcacgctgggcacattttgccttcacgctttacccggataatgaaatcgttatggactgtctggaccacctgcatttcgattctttctggaaacgctttcgtttcgcctggtataccgtccgcatcccgaattcagagctgccgggacaggtcaactcaatggtgtaa

SEQ ID NO: 390213 - DNA, 282 bp, Salmonella enterica
gtgaaggcattacccaccccatcgcgctatcaggttaattttcagggttactggttcggtttaagggggatctacttcggccccaatatcggcgagttctccgcagcggtaacgctggaaaacgataaaaccatcgtggcgcttcgggaaggcgatgacattcactgtgacatttcactggctttttcttctgaaaccattgatgccagcaccgatacgtttgtgggctgcggttttggcgcaaatgtccgcgccgacgggcactatttgcgcgttgaataa

SEQ ID NO: 390214 - DNA, 216 bp, Salmonella enterica
atgtttaatcagggtaaatggctgcttatttgtatcttctgctatcaggatgttatgacacgcccccccaatattcaggatttaaataaagcatttcttgaatatgaaactaatctactaaaaaataaatttgaaattatctcggcaacatttattaaagaaaatacaaaagatcatttaacttattatagcgtcagtgatcccgcctttaactaa

SEQ ID NO: 390215 - DNA, 204 bp, Salmonella enterica
atggagtatgatgagtgggtcaccgtattgatgggaaaatataattgtagatccaaatgtgcattatttaaagacatgaaatattactcaattatatatgtgaataacattattgagatacaacctactcgacatactaaacttgaagggtggagctgggccggacatgacaaagatgtaattagattgcctgttaccagctaa

SEQ ID NO: 390216 - DNA, 438 bp, Salmonella enterica
gtggtagttctcgtctttgttgacgaaaatccagaaaaactggtccagcgccgcagtttcgcagtacatggccgcgctcaggtgatagtcccgatcgatgatttcccggtgcaacttcgcacgcaggccttcctgcttgatgttccacatgctaatagttttcaggtcggcgccaatgcgcaggccgcccatatcgagctcaaggtcagggcgtacccgaacttccaacccggtttcctcatcaatcccaaaatagctaacctcgacagcgcggcttgggtgagtcagcaatttgccggcggtcgggtgctccagcagggctttctgaatgttcagcgcggtgctgagctgttggcgggtgaccagcactttcccttcggtgttctcccgccacgcatccagcaattcgtcggcgaataccgctgccgggttgactga

SEQ ID NO: 390217 - DNA, 219 bp, Salmonella enterica
gtgataaagatactcaccttcacctatgtgctgagcaagaacgcggtgacggaggggcatagttgcgacaacagtcagctcgggggctggggcttttgccggggaagggctgttgctttcgttaccaaaattttcgttgtggtcttccagcacttcgcctgtttcggtatcaacaccgtcgacgatatgctggcgcgccgcggcggcggcttcagatga

SEQ ID NO: 390218 - DNA, 465 bp, Salmonella enterica
atgccggaaaaaaacgttgatgcccgtttgcctgctgcctccatcctcttagcggttttttcggcctttttgccggtattcgcgatggcatcaccggttcgcttccccgcctgttccatacccgcggcagttttatcagcgtcagagcctgttttcttcagggccttacccgtgcgctcaccggcggcttccgtctcacgtgcagctttatccgcatcactgcctgttttcgccagggcattactggcctgtttttgccccagttcgaaaacatccgccacccgctccattgcggcggtcagtcggtccagtgcagcgtgcgcagcctgttccccggcggtaaagtccttactttctatatccagtgccagaaccagctcatcaagtaccgctgccattctgtgtctcctgcatcacacgttcgttatgggcgtccacctgaataatctcaagcagatcccataa

SEQ ID NO: 390219 - DNA, 243 bp, Salmonella enterica
atgaaattcatagcactgaatgataaaacagaatcttcattcgcaactaaaatagtgaccgctatcatcattaactttatttattaccgtcattcacttctgaatgtctgtttacccctatttcaaccggatgcttcgcattcggttttttttaccctttttcagacacacccggctgatttatgctacctgcctaaaactatcacggttattcactacactcccctgctcgaccgttcgtaa

SEQ ID NO: 390220 - DNA, 1611 bp, Salmonella enterica
atggctaacacaaatatgtattcaccaaacgagcaggattacatacgcagggttgccggaaaagtccctgctgacgttatggcatccatcataggaagaaccagaaacagcctggttaacgtatcaaaactggctaaaacaagagctggcagagaagttatcgcacagcaagccgccaatgtttctgacgatgtggcaaaggccgctgagattgctggagtagatatcaatgcattaaccccgggaatgaggtctggaagtcgcggagttgcacaggcagaaggtattctggcatcaaaaccaggtgtcacacaggatgctcacgccaaagcatttagcgaaatacagactaagttcaactcagcactagacgatttaggtgctgaagtcggtagtgccgccgagaagagcggagcaatcaaacagagggttctgtctggaattgacagcatgaagtcatctgagaaggccgcatgggataatgtgcgctctacaatgccagaagcgaaggctcgcatgtcaaatactaattcgaccattcaaggggatattaatgcaggaatgccgcttactcctgaaatgaagcaatttgctgctgcatacaataaggctggtaaagacggcatcacgttcgatgctatgaaggcatggcgcggtaaacttgcagacgcggagcaaaaatacatccgatccggagaggctaatatggctcgccgcatgggtgaattgcgcgatgcggccactgaagatatgagattaatggcgcagaaaggtgacttcattgatcagtggaccagcgccaatgaattatcaaaagccagatttgcggcgcaaaagcaggcagaaacagcgctcggaaaagacctcgcaacggattctcttgttacaaacggggttagagcccttcaaaattccgctaagagtggaactggaaaattcaaccagatgattgggtctctaccagaggcagagagagcgccagcgattgcatctattcttcaggatgcaatgtctcaaggggtacgcggcgggaaatcagaagctgcaggaatctctcacatagcatcaattcttaccccgcagaatgttgctgcaataagtaagcattcaaaggagatcgggaagctcgcagaggcatatggtgagctggcgcgagcagcaacaaagcccctcagatatgttgaacatacaggccgctcaattcccgcattaaactctcttgagcaggggcttcacccggtaatggatagtgcgctatctggtgcattcagagtagccggtagcattggtggttattctggcggtggggtattaggagccattgccggggcgactgctggcggtgctgccgacgccgtagcaagaggcgcggtatctaagctatcagccaccagaagcggtcgttacgctattgaaaaggctgttcaagaggcaacaaaggcagttaaggttggggcaagtgatggcgcattagcggcggcggagcgcagatttatggcaaataaagccgccgtaaaagcaatacgtgatgcagttggtagcgatgaattcaatcgcttgtcgagagctggtattgtcgcctcgttaagcggtatgaatgaatatgaatag

SEQ ID NO: 390221 - DNA, 267 bp, Salmonella enterica
atgggggcgctgttggttcattttttgccacccccacagcaacagaccagcggccaggccgccaagcgccggcgtaatcagccgtcgccagggcgaaagcccctcagccgcattcaccagactgccggtgtcattactcaggaaaatccactccagcaattgcatcgcatgacggaaggcggcgacagccagcgccgcgagaataccaatgagcgtagcgatcagcaggcgacgaaacatcgcgcgcagatccgggtaagcgtgtaa

SEQ ID NO: 390222 - DNA, 648 bp, Salmonella enterica
atggatacgatacattatatgctggataacgcaggctatctcgccagccttacctttcagcatctctggctggtcgcgctggccgtcggtctggcgattatcatcggcgtaccgttaggcgttttgattgtacgccacaaatggctggcaacgccggtattgggcgccgccacgctacttcttaccattccgtctatcgcgctgtttggattaatgatcccgctcttttcgctgatcgggcatggtattggcgttctgcccgctgtgacggccgtttttctctactctttactgccgattgtccgtaatacctatactgcgcttgatagtttgccgcccggtctgcgtgaagcgggacgcggcatcggtatgactttctggcaacggctgcgctgggtcgaaatcccaatggccctaccggttattttcggggggatccgcaccgcggtagtgatgaatatcggcgtgatggcgattgccgcggtgatcggcgccggcggtctggggctgctactgttaaacggcattagcggcagcgatattcgcatgttaattgccggcgcgctgatgatctgtctactggcaattgtacttgactggctgttgcatcgtctgcaagtcgtactgacacctaaggggatacgataa

SEQ ID NO: 390223 - DNA, 615 bp, Salmonella enterica
atgaccacttttttacaacgtgatgattttgcagtaacggcgcgtgttctcggcgcgttgttttattattcgccggaaagccacgaaaccgctcctctggttcaggcgctattaaccgacgactggcaggcgcagtggccgcttgatgccgaggcgcttgcgcctgtggcggctatgtttaagacccacagcgaagagtcgttgccacaggcctggcagcgtctgtttatcggcccttacgctctgccgtctccgccgtggggttccgtctggctggatcgtgagagcgtattatttggcgattctacattggcgctacgtcagtggatgcgcgaaaacgggattcagtttgaaatgcaacaaaacgagccagaagatcattttgggtcgctgttgctgctggcggcctggcttgccgagaacgaccgtcatcatgaatgcgaacaactcctggcctggcatctgtttccgtggtcgtcccgctttctggacgtatttatcgatcatgccgggcatccgttttatcaggcgttggggcaactggcgcgtctgacgctggcgcaatggcaagctcaactcattattcccgtcgctgtaaaaccgttattccgttaa

SEQ ID NO: 390224 - DNA, 858 bp, Salmonella enterica
atgggaagtggatggcatgaatggccgttgatgatcttcacggtctttggtcagtgcgtggtcggtgcgttaatcgttagcggactgggctggctgacggcaaaagacgataccatcgcccgtcagcgcatcgtgcgcagcatgttttttctgtggctggtgatgggactgggattcctcgcgtcgattatgcatctcggctcgccgatgcgcgcgtttaactcgcttaaccgcgtaggcgcttccgcactgagtaatgaaatcgccgcaggatcggtgttctttgccgtaggcggcatctggtggctggtggcggtactcggtaaaatgcccccggcgctgggtaaagtgtggctgctggtcagtatggcgctcggcattgcattcatctgggcaatgacgctcgtttatcagatagataccgtgccaacctggtataatggctacaccacgctggcctttttcctcacggcattcctgtgcggcccggtgtttgcggcgctactgctacgcatcgcgcgcgtcccattttgcagcgtgacgtttgccagtattagcggcctggcattggtggtgtgcgtggcggtcatcgtactacaaggactgtctctctcaaccattcacagttccgtgcaacaggccagccatctcgcatcggattacggtatgctacaggtctggcgcattgtcttgcttgctgccggattaggctgctggctatgtccgctaatccgtcgccgcgaaccgcataccgttggtttgctgctcggtgtcgtgctggtgctggcaggcgaaattattggccgcggacttttttatggcctgcatatgaccgtaggtatggccgtcgcaggttaa

SEQ ID NO: 390225 - DNA, 255 bp, Salmonella enterica; identical to SEQ ID NO: 28072

SEQ ID NO: 390226 - DNA, 255 bp, Salmonella enterica; identical to SEQ ID NO: 28072

SEQ ID NO: 390227 - DNA, 624 bp, Salmonella enterica
atgctgaagcgtttctttattacaggtacagacacttctgttgggaagacggtggtttcccgcgcattactacaagcgttagcgtcgggtggtaagagcgtcgcagggtataaacctgtcgctaaagggagcaaagagactgcagaagggatgcgcaacaaagacgcgctggtattgcaaagcgtctcttcgctggagttgccgtatgaggcgattaatccgatcgcgttaagcgaagaagaaagcagcgtcgcgcatagctgtcctataaattacaccttgctgtccaacggtctggcgagcctgagcgataaagtggaccacgtggttgtggagggtactggcggctggcgtagtttgatgaatgatttacgtccattgtccgaatgggtggtacaggaacagttaccggtattgatggtggtagggattcaggaggggtgcattaatcatgcgctactgactgcgcaagctgtcgctaacgatggactgccattaattggctgggtggcgaatcgtatcaatcctggcctggcgcattatgctgaaattattgatgtgcttgggaaaaaactgccagcgccgctgattggcgagttgccgtacctgccgcgcgccgagtag

SEQ ID NO: 390228 - DNA, 255 bp, Salmonella enterica; identical to SEQ ID NO: 28072

SEQ ID NO: 390229 - DNA, 255 bp, Salmonella enterica; identical to SEQ ID NO: 28072

SEQ ID NO: 390230 - DNA, 315 bp, Salmonella enterica
atgagagatattgagaaagaaattatcgattttatcgatcaggaatataacactaaaaagtactttctctgtgggtcaaagcgaaccatcacgcttgataccagtattagggatgatcttaaactcgtttttgaagatagtgaagaatttctacaagagtacttcaagcgttggaatgtagattcagaaggatttgacatactcaactatctgaatccagagtattttggaagtaaagagcctgatccgcgtaagccactaacagttggtatgctcgttgaaagtgctaaagctggacgttggttatatagttga

SEQ ID NO: 390231 - DNA, 225 bp, Salmonella enterica
atgcgcatggaaccaaaagattttaagtttgatgaaactattgcagctcattatgctaaccctaaagcagaactgatatttaagccccgtgcagatggattttattttaagtgggagtgggaaggtaagacacatgagttgtatattgaaagagagaaattaatttttcctgacctagtacttcaacgattgtttgaggctgccatagacatggcccaaaaatga

SEQ ID NO: 390232 - DNA, 453 bp, Salmonella enterica
atggaatgcaatattaatggcgtggaataccgcgccgcaaaactcaacgtgtttgatcagctcaaggttacacgcaaactactgccgcttctcgcagggatgatgactgacttcgggagcattcgctccctgctgccagcagacggtaaggttgactccaaaaaatttgatgagcttaagccagtatttgaaacgttgctgccgcgtatcgctgacgaactggcctcgatgaaagaggaagacaccaactcgataattcatccttgcctgtcggttgtggcccgaaaaaacgggacggtctggacgcctgttttcaacagcggtgagttgatgtttgatgacatcaatctcctgatcatgctgcagctggtggcgcgggtggtcgccgattcgctgggaaattttttgcccgtgagccttaccagcgagacgccggaccagactcagggttaa

SEQ ID NO: 390233 - DNA, 234 bp, Salmonella enterica
atggacatgatcaatggcgaacgcgtcacctctcaaaagattacaaatttgggggcggacggtatcaaaattgatatgggtctgatgcctgccaaagatggcaacaactatggttttgagtatatccatcgccctggtaccgaaacgcgtttcctgaacgtccagctgctgcagaacagcatggatgctccgaaaattattggctctttcccgtgtaagaaagttgttggttga

SEQ ID NO: 390234 - DNA, 555 bp, Salmonella enterica
atgagcaaacgttcgccaatagatacaacagaagaacaaaaggcaattgagactataggcgctgattttatttcgtcatattataaagatagatatgaggaagcaaaatcaacatatcgtcgtcttgaggacaaagttaactaccttcttgctattttagctgtagaaacttctgctctactggctgtatttgggactgttgatttcaaaagtgggctaaagagtaattggtttttaacactatctatactttgtgcatatctgtgctttgtttgtattgttatgtgcttttttttcctatggcgtacttgggggcttaaagatataccaaaaatgcctattcataagcgaaaagaagagcatgattttttactttacggtgataaaattaaaacgcttagataccatatgtttcagtatggtaaagctgttgaattgatcgaaagtcttcataaagaaaaggcagtttatgctcgttatctttttgaaggaattgcgttatctttcggttttttcatattatcggttacttttcttttgataaataaggcatag

SEQ ID NO: 390235 - DNA, 171 bp, Salmonella enterica
atgacaacatcaaataatgacaactcacagcaaagtaagccaacgcaagcagagcagtccatggcggattatgaaagcagtataatgcttgaagtaccttttgatggattggattacatgacagaaagcgttaaagaacctgagttggacaattttaaacagaaaaaataa

SEQ ID NO: 390236 - DNA, 291 bp, Salmonella enterica
gtgtatccggcgtccggctgcaacgttcttcgtcagggctatcgggattctatgcgggatataggtctgcattccggcgacctgatggtggtcgacaaagccgaaaagccgctgcagggtaacattgtcatcgcggagactgatggcgaattcacggttaaacgcctgcagctgacaccccgtatcgccctgctgccgatgaacccggcctatcccactctctatccggaagatctgcagatttttggggtggtgacagccttcatacacaaaacacggggcatggactga

SEQ ID NO: 390237 - DNA, 294 bp, Salmonella enterica
atgccaaaatttccaaaagaaataatcgaaccaaagggttatgccgtaaatagcacgacactctttgctgtattaggactcttcttctttggcttttcaggcttcattttagttatcaatgccgctgtaaggctttttgcatctgtatggatgtattcattcgagggcagcgaagcaatcagggctgggatggtttttgttcttgccaccatttgttttgcccttgcagttctttgccgtaaaggttttcgttactgcttgttcaaactgaaacagcaccagttaccgaactaa

SEQ ID NO: 390238 - DNA, 225 bp, Salmonella enterica
atgtttacttgcaactatagccacgctcgcgacaaccttgcttccctgctggaactggctgttgatgaaaatcaacccgttgaaattcagcgtcggaaaggtggcgcagcagtgctggtagataaagatgctttcgaacgttaccgcaaagcagcacttgatgctgagtttgccgaaattatgcaaacgcacggcacggcatacacggagctttcaaaacgatga

SEQ ID NO: 390239 - DNA, 384 bp, Salmonella enterica
atgaaattggtcagctcacaggaagtaattgaatttcatgatcgcctaatcattcgcgatggcggagttcctggcatggctgaaccaggccgtgctgatgccatcattcatcgcgtgttaaacatgcattattacgaagggataacggacgtttacgatctggcatctgtgtatctggtagccatcgctcgcggtcacattttcaatgatgctaataagcgaacggctctttttgttgcgcaggtttttttgaaacgtaatggtgtagaaattattagttcacgaatttcatttgatgaaatgcaaattcttactatcaacgcggcgacaggtgagtatacgtggaagatggtttcagatcatttaaaagcaataatccgttag

SEQ ID NO: 390240 - DNA, 396 bp, Salmonella enterica
atgtcctggcagaaactggtactgatgaactataccctaatgtgcttggctgacgcgcccgccgggcttattcaacccctcgtctgtccagaagcaagttctgaacagacgaggggtttgcgatgtaggtcaactaaattaaatacgatcagcagaaatattttctggacactttttccgatagtgccgaaatgtccaggttgcaaagcattttttgtacattacaagtgcttctttggaggtgatagaaagaggcagctatttaactggacagaaaaacctgtacgtccaatcctccggggattaatgagaataggtggttggtatattgagcttgagtccaacattctctatgaaaggataggtgtattctttgctgttctcagaaagtattga

SEQ ID NO: 390241 - DNA, 942 bp, Salmonella enterica
atgaaaaagaaaaacactacgccgactccccacgacgcgacattccggcagtttctgacacaacctgacattgcccgggattttatggagctgcatctgccggcagagctgcgggccatctgcgatctcagtacactgaaactggagtctggctccttcgttgaggatgatctccgccagtatttcagcgacgtcctctacagcctgaaaaccacagccggcgacggatatattcatgtcctggttgaacaccagtcaacacctgacaaacatatggctttccgcctgatacgctatgcggtggccgccatgcagcgccacctggaggcagggcataaaaaactgccactggtgataccagtgttgttctatacggggaaacgcagcccgtatccgtactccacccgctggctggacgaatttgacgatacggcgctggcaggcaaactctacagcagcgctttcccgctggtagacgttacggtcattccggatgatgaaatcgccggccaccgtagcatggccgctctgactttattgcagaaacatattcatcagcgggacctggcagaactggttgaccggctggcgcccattttgctggccggatatctgtcttcatcgcaggtgatatcgctggtacactatatagtgcaggcaggcgaaacatcggacgccgaagcctttgtacgcgaactggcacagcgtgtgccgcaacacggagacgcacttatgaccatcgcacagcagcttgaacagaagggcatcgaaaaggggatccagcagggcatccagcagggtatccagttaggtgaacaacgtggtattgaaaaaggcaaactcgaagttgcccgtaccatgctgcagaatggcattgaccgcaacactgtcatgaaaatgaccggtctgaccgaagacgacctggcgcaaatccgccactga

SEQ ID NO: 390242 - DNA, 222 bp, Salmonella enterica
atgctcgcagacggttcgcggagtcgaacgggccataaagccggtgcggggactctggttgccagagaaagggctgcccaaataatggggctgctggagacagcgaaaatgaacggtctgggcgcatcgttgttaacggatgaactgaaacgtctgccgggctggccggaggaaagccaggatgagttactgccattcccgccatacggggtcagcgagtaa

SEQ ID NO: 390243 - DNA, 738 bp, Salmonella enterica
atggcactgataactccgggtaacggagttatcagtgccagcctcgaccttctgtataactctcccatagtaaacagactggcttataaaattctcttgaattccggttttaccttttttcggatcttactgctggcgataatgctcccagcttacaattggttaaattttatcattactggcaccacaataataaattcgaatttttatttgcgacgaaaatacagcgttgttctggttttattccctttggcgacaggcatgactgaacagaatgaaaataccgaaaaaggattcacacgcacgctgaccgtgcgaaacatgccgattgatgtggacattgaaatcactgagcaggcaagagtgaccagcaagtcaaaaagcgattttgttaaagagttcctttcagcctccttcagggacctgatcggtaactttatgcgcgggaatggcctctccgattactggtatgacagcgccctgacgctggccgagaaccgggcctggtgtcgtttgctgggcatttataaagaagaagcgctgcagcatatcatgcgtaacggcgttcccctgcttgaactgcgcgccgcacagttgcctgacatcacgcatatcccgcatggcatctcactggcgttttccctcttcattgaggccgcgcgtcgtaatttaccgacggtgactgctccccgccgtaaacggcgaggcttcctacctcttaggctgcaactggcatag

SEQ ID NO: 390244 - DNA, 201 bp, Salmonella enterica
atgatgttccagcagatacgggaggcgtttcaaagcgctgcggaaatactggaaattgagattttggaaatgggcggggaagcggatcacgttcacgtactgatagcgtacccgccgaagctgtctatcagtgtgctggtgaataatttgaagtcgatcagtagccaccgtgtgcgcatcctatttacgcaaggcgagtga

SEQ ID NO: 390245 - DNA, 897 bp, Salmonella enterica
atgctaaagataaaacacttagagagtaaaatgccgactaattttagctcatatagcacaaacaatccagtatgtgataaatatattgagacatcattgccttttttttatttcatttatacaaaaggcaatgactttatggtaactataaatggacataagattatttgtaaaaaaaaccaaggtgtatttataaacaagtcagtacctttctccataccatcgcattgggtagaaagcgatactaaacgttctgatatagcggtgattcgttttacatcaaatgatgttagtgaacacaatatatcatataataacgatattgcaactctaaaaataatgacctctacattaaaaaacagtaaggattatttgcttttagattttaactcattagatgatttggagttggtgactatatcttggatgatattacaatatgcacagcaaaacagaagaataaaaaaaacagcgtcaataccaggagaaatatacaacaaggttatgatgttttttttattatccttctttattaaaataaatagcaacatctcttgcttattttacgcggagtcatcagaattaatatctgaaaaaataacaaaattagtcatagatgactattcaaaaaactggtcgataaaagaattgtctagtaagttactcatgagttcctcatcccttaagcaaaaaatgtataaagaggtaggatctgttaccgattttatcaataagctaaagttaaccgaatccttgagaaggctaagaagaacaaatgattcaatatcaacaattgcaaacgctttaggatataagtcaccatcatattttacaaaggtttttaaaaaacatttaaatataaacccagcagacattcgattaaaacaaaggaagtaa

SEQ ID NO: 390246 - DNA, 468 bp, Salmonella enterica
gtgtcagataatctgtttaacgggcggcgttttcgggcgctgactgtagtggataattttagtcgggaatgcctggcgatccatgccggaaaatcgttaaaaggcgaggatgtggtcagaataatggaggcactgcgggtgccggataagcggctgccgggacgaatccagacggataacggcagcgagtttatctcaaaaagtctggataaatgggcgtatgaacacggcgccacaatggacttctcgcgccccggaaagccgacagataacccgtttattgaatcatttaacggcagtctgcgggatgaatgcctgaacaatcactggttcctgtcgctggaagatgcgcaggaaaaactcggcaactggcgcagggaatacaatcatgagagaacgcattcatcattaaatgacatgactccggctgaatttatccgaagtctccggaaagacgaagatctctga

SEQ ID NO: 390247 - DNA, 513 bp, Salmonella enterica
atgaagaaatttgtagctaacgtaacaattatgactatttttggtttgagttcaattgtggcctttgcacagcagggtaacacagggaaagttacatttagtggtgatgttgttgagtctccctgtaatttagcccccgggcaagatggtactgatattaaagtaccttttggtcagttatcaatggcgcgattaaatgacggcaaagtacttaccaaagattttcatattaatcttcaagattgtgatttgggtaatgagaaagctcaaatcacatttagtagcactgatctaataacagggaaaaacttattaggtacccgtggtagtgcaacaggattaggtttggggttatctggaatcgtttttaatacgccagcaaacgtgccattactccctaagggggataatacattgacgtatactgtaacagctcagagggttgataatagtaaagctgttacagctggaacttttcaatctatagctaactttcttatttcttatcagtaa

SEQ ID NO: 390248 - DNA, 2565 bp, Salmonella enterica
atgagtaatcatatcctcttttcaaacaaaaaaaatcctaatcgaaggttttttttatctaaaatcaagacggttaggttgtgtctttttagtgttttcttattatattctcatacgtcatttgcaattgagttcaatacagatgtattagattcaattgacaagaaaaatatagatttttcattgttctctcacccgggatatatttaccctggcgtgtatgtaatgcaggtttatattaacggagaaagtttgggaggtgactattcaatccctttttatatgcgaaatagtgaatcaaaattaaaagggtttaaaatttcagaggcctgtttatctccttcgctgctttatcagatgggtctaacggatattgcaaagaaaaaaattggcacttggcatcatggtgagtgcatggacttttcagagctgaaaggtattgatattaaaggagatatatctaaaagctcacttagagtcaatattccaaaggtttggatgacctactctgatgtttcttgggtccccccttatcggtgggataatggaatacctggggtaatgtttgactataatgcaaatgggggtatgtataaaatacaaggccggagaggtgaacaactaaatacagcaataaatggaaccattggtggtaatatggatgcctggcgattgcgggctgattatcaaggaaaatattccagttatacaggcagcagttatgcaaaacagcaggattttgattttacgaggatttatctttatcgtcccttaccatcaaagaaatctgaactaatattaggagaaaattatattagttcaagtatatttgattcgtggcgttatataggtgttagtttatttaccgatgagcgaatgcttcctcctaagctacgtggatatgcaccagaaattgttggcgtagcaaaaacaaatgctcgggtgattgttactcagcaagaccggatactatatagtagtatagttcctgcaggccccttttgcattcaggatctagatagttctatccgtggaaggttaaatgttaaggttatagaacaaaatggtacagttcaacattttagtgtatctgcgtcatcagtaccttatttaacaagaccgggacaaatgagatatcacttagcttttggccgtccgagtaattggagacataaagtggagggaggggggtttgtcaatgatgaggcatcatggggaattaataataactggtcattatatggtggctctacgttatcaagtgattatcaggctctagcagcagggtttggtcgtgacttacatgagcttggttccgcctctttagatgtaactcaatctttagcaaagctaccacaatataataaacaaggtaaatcttggcgacttagttactcaaaacatttcgacgatactaacactgatctaacatttactggttatcgcttttctacgcgtaattatttgaatatgcaacaatacttagatttgcgtcatagtaatattagttctggttaccagaaggaaagatatcaaattaatatttatgatcgttttaatatatttactctgccgctttcgcttgctctcaactacgaatggcaaacttattgggagcaaggtagcacccgagaatacggagttaacttaggaacttggtttgacttaccctcagttaggttacacaacctcgttctaacagctacagcaacccgcagtcagtacaaggatcgttacgataacaccgttaacttaatgatgtcagtaccttttgggaatggaactctaaattataatggtagttatggccataaaaatattgggcaacaggtaggattctatgatttagtcaatcaacgagatagctataatttaagtgcaggttttgaacagggagagatgcatacaagtcactcgctcttaagtggaatgtacacccataatggctccttagcaataatcagtgctaacgcggcattagttagtggtagttataaatcattaggattgtctgcaaacggaggactgacgttaacaggtaaaggtgcagccttacatgctggaggatataacggcagtacgcgattgatgattgatacggatggaattagtggggttccggttgacgaaggaggggtaataagtaatcaatgggggataggagttatcacaaatgtaagcagctattataaaaaaactgcaaggattaatatgaataacatgcctgagaatatggaggcacagaaatcggtagtggaagccactctaacagatggagccatcggatatcggcgttttggtatattaaaaggtgaacaatcgtttgttatattgcgaatggcggataattcttacccaccatttggtgccattattcttgataaaaaaggtagagaacatgggatcgtaggagataatggcttagtttggttagctggcgtgacaccgggttcagtttttgatgttacttgggggggggggaagcattgccaaattaaaccccagtcactgcttaaagatcaaaatacgtcgttactgtgtagtgtgtcggtaaacgacaaatag

SEQ ID NO: 390249 - DNA, 729 bp, Salmonella enterica
atgaatgaattacaccaaaagttggtaaattttatattatgtattacgttaactaacgtctattctatagcacatgcgtcagtgacactagatcgcacacgagcaatatttaatgctgatagtaaatctataagtttaaatattagtaataataataatagattaccttatctggcacaagcttggttggaggactctcagcaaagaaaaatagttgggggagcattagtagtaataccgccaattcaacgtttagaacccggcggaaagagtatgttacgtatattagcaacacaactagctaacacattgccgcaggatcgagagtcactattttatttaaacctcagagaaatacctccacgcagtaatgagcaaaatgtgttacaaattgcacttcaaacaaggattaaattgttttaccgacctaaaaatatcatccctaaacttgattatatatggcaggaaaaactgattctgcatgaaaataagaatggttatgtaatagaaaaccctactccatattacataacaattacaggtctcggaaataatcagatacaatctgaaaaaggacaatttaatgttacgatgctttcaccaaagagcagcatacagattaaaagccaacattttaaagaaccatatctaacttatattaatgattatggcggacagccaacgttaagattcatttgttcaggacagaactgtacagtaaaaacatag

SEQ ID NO: 390250 - DNA, 543 bp, Salmonella enterica
atgtggttgagatacttttgtggctcgtgcttagcagttgcatcgataatatattgtagaactgtaacagcagtagatactaatctaatgattagaggaaatattttagatgcagggtgtattgttactggcagtgatgataatggggtaatagaggtcagttttggtgagatcaatataaataaggtaggtacaccagaaactgaacgtttagtgaacctgaaagtaagttgtgataactctgtgcaagagaggaaaaccttacaaatgtatgttcatccaacaagttatggaatattaaccagtgtaggacaaaatgttttggagacatcattgccggggttaggaatcgcattgactgtaggtactgatgctaaaccagtgaacttaaatacgtggactccagttcctggaatgagttcaaagaatgatacctggacgagatcagttaagattcaggctcgattagttactccatctaaaagccagctacaagctggcaaatttaaagccacagcagatatcataatgaactatcaataa

SEQ ID NO: 390251 - DNA, 1110 bp, Salmonella enterica
atgcttactaacttttgcaatcacctttcagggtggtcgaataaagaaaaatgctatcatatagtgaaatttactctacttgtatttttttgttttcactcactcaactcatttgcctattattacgttcaagagtctaaaaatccattgtataaatggaatttgccatctgagtccgttatattaatagctggcggacctgcgcagaacctacatattttattaaatatctctggaaattattatactcataaagagtttgtgacctgtattgctggatgtagtgatggtgttctttattatcacccgggtattgaaaatgatccgtggaatatgggcgttgcgataacagcgcccgagagcataaccgcatttgatcgaagcggacgcgccgcaaattttaaaataaatggggatttatatgatggacgtaactatattgatgaggggggcgcttcaggtgatgttaggagtatttattttactgatgggattgctattcatacaagcccgtggattagctattttcaaacatcgataaacccaacctatttatggcataatgaaacttataggggtattatttctttaactgctcctacgggaacacctgcaggtatttatacttacacaggtccattagcttattttaatctccagtattgtggtacacgttgtaatcctttattttctcaaggcaagtattggttttcatatacaggcagtatatcaattagtgtatttggtacctgcaatttctctagcggctcacttgatataaattatggagatatccagccgacagatgctcaaaataacgtccgtaagacttctgttcaattaaactgtaattctgatacaacatctggtacactcaaacttgtatcgacatctggcagttatcagtcttcaactgttgggactagtattaaggtgaaggacgggatggatgcgattgttacggtaaatggtaaagatgcatctcatggaattcattttaaacctgacaacctacctattgaaatagtttcaaaattagaaacttatggtgttcctccgcagccaggatattttcaaggtagtgccgtattgagttttaatatagattaa

SEQ ID NO: 390252 - DNA, 1119 bp, Salmonella enterica
atgttatattttataagaaaatacatttctgacatcagtattcatattacagatatcggtactcttaataaagagcaattatcttcagcattgactcttcaggcctatgcaataagtgccttggagcaaccagatgtagattttggtaaaactcaggaacttttggtataccaaaaacgaatcaacaagagcctcatagccttgagagctcatgccgccatctatctatactttcttcaacctactattacctgtaatatgaataatataaataactatcgcaacttgtatagcgtcctcccctccaccctaccattggattcatccgttgaaaaatggagtcaagagcttcaggctgtactaactgaattagaaaaatataaatctgctgctcaaaagatatgcgtcgagttacaaatctttcacgatagtctcgtcaccaatgcaaaagcattccaaaatgccgtaacagacctcaatatcgtagttagtggtaataatgaagtattggaatcaatagaggggaaactgaacaagatccaagccaatatagatagctcgattaggaaaataaccataagtggtttaggtattttggggaggaaactcttcatttgtgtgggacctatcactaattttatcacagcaggtacaataacatcggctgttatgggagggataggggtggtaatgacaggccctgtagctgaattggattcaatcacggccttggttaacggcaataaggagaaagcccggttactggctgaagaacatccgcttgagccagaagtgaaactggctttagctataagcagttgcagtagctctcttgaaaaacaggtaggggatgccattattgctgccagtgctatggtggattcatggaataatattgccagtgattttcgcaagattatattagatctacagagtggagtattgagtacagctcaaacccggcaactgtttatcactattgctaatggcgacatagatatattgtttgagaatattcagacaactaaagaacaaatatcaaatacaggaaccaagattgcctctccaggtcagacggtaaatgatgttattatgtgtattagtcgcgacttgatctga

SEQ ID NO: 390253 - DNA, 894 bp, Salmonella enterica
atgaataaagtaaaaactgtgaggaatgatatatcaataggtttttactcatctaatatagatgatttaacacaagatatatatattgaaacaccgttgccttttttttatttcatatatacaaaaggcaatgactttaagttatctattaacggacaaaaatttttttgcaaaaaaaatcaaggggtatttatcaataaatcggtaccttttgctatactgttgcattggtcagatcataatattctaagatctgatataaatattgttcgtcttacatcaagtgatattagtgagcataatttatggtttgatcacgattttataagattaaaggagatgtcttcaggagtaatcgataaaaattattttttatttgattttagtgaattggatgacactggtctaatggctgtatcttggataatttcgcagtgctcacaggagtacacatgcagagaggaaatagcatcagaaaaattatatagaaaaattaaagtgagttttttgttgtcatacttcatgaatatcaacagtgatgtttcgaatatatttcattcagcgtcagtaacactaacatctgaaagggttgccagcttagttatgagtgattactcaaaaaattggtcgttggaggaattagctgataatctacttatgagttcctcatcccttaagaaaaaaatgtataaagagataggatctgttaccgcttttatcaataagctaaagttaaccgaatccttgagaaggttaatcagaacaaatgattcaatatcaacaattgcaaactctttaggatataagtcaccgtcttattttacaagaatttttaaaaaatatttaaaactacatccaatggagattcgattaagaaaaaaacgacatagttag

SEQ ID NO: 390254 - DNA, 318 bp, Salmonella enterica
atgcaaacaatgcctaaaaaacatatgtgccgacggcttctgcccggcctgctcggtctggttctgtgcgcgccagtaccgaatacttacgcagccaccgttgaggcaggattttatccggaaggtacagctctccagcttgttcttaagacaattgagatcgcgcaacaggaaatccgtctgatgggctattccttcacctccctggaggtggcggggcacttgtcagggcaaaacaccggggtgtcgatgtgggcgtggttctggactggaaagctaatgccgggaagaacaacaacgccagtaaagcagccatga

SEQ ID NO: 390255 - DNA, 561 bp, Salmonella enterica
atgaaacgttcagatctggaaaaggatgctgcatacattctggataattttaaacagctagactatgagattccatcaaaccgccaaattctgaaggttattttttataagttggtgattgtttatgtatttcagttgctgtttattgtttctgatatttttataaattcaaatattagtgagtatcattactttgatacatttgtgctatctctgggggctaatgctttttttagtcttgtttttttaatgtcaacatacaatcttgttagcctaaaactttctttaggcagcgaaatcacagaacaatcggttttgttaaaattggttgagagaaaaattaactcttatagtctatttctcctggcagtgaatgctattgttggatgtattttactgtcatcgggggagcggtttgtagcaggacttggattctcatggtttgtaacgtatttaattagcatgctgacgctacaaacatctctttctcgatatatgactcctgcggtggtaagcagtttatctaaagtgaaagagttgctttctgcctcccaaaaataa

SEQ ID NO: 390256 - DNA, 369 bp, Salmonella enterica
atgatcgtgagtaaaaaaaagtatgactttctgctcgaccgctacgaacaggccgcctcccgggcggacctgctggagcggcaacttgccgagctgaacggggcgattgataaacatggcacaccgtacaagtgcactctggagtgtcgtgaagcggcgatggtggtatccacgccgggcagtgaacaggtgtggctgacgctggagcgcctggcgtttattgaccggtgggtaagtgccctgctgccgtccctgacacgacggatgcccgaccgggagcggctgatgtgggaggacatgctgaaaactcgctctgcagatcacgcttatggaatcgtgcgcgacaagtcacagggagaaaaacaatga

SEQ ID NO: 390257 - DNA, 1362 bp, Salmonella enterica
atggccaacgttaataaagtcgtccgccgtcgtcaggttgccctgcttatagctcttgttctggggattggtgctggcggcgctgggacatggatggtctcagagatgaacctgaagaaagcgccgcccgcaaaagcgccaaaaggagaacccgcgccggatatgaccggtgtggtcaatcagtcatttgataacaaagtccagcgttctgccatcgcggaagcccagcggcttaataaggaaacgcagacagagattaaaaaactgcgtaccgaaatgggacttgtcagtcgcgaccttaaaggcagtcaggatcgcattcgtgaactggaagaccagaaccagttgctgcagacacagcttgaggccgggaagaattttgactctctcagtgccgaacctctgccgggggcgctggcctctcaggggaaacctgcacccgctggtaatgttccacccccgaccagtttctggccagcaggcggtggacaggccccggcagcgccggtgatgacccccattcagcgtccgggaatgatggacagtcaggaattcagtctgccggataccgggcctaaaaagccccgtttcccgtggatttcttccggcagttttgctgaagcgatcgtggtggaaggggctgatgccaatgcgtccgttaccggcgataaaaataccgccccgatgcagctgcgtctcaccggcaaagttcagatgcctaacgatgaagagttcgatctgacgggttgctttgtgaccctggaggcatggggggatgtttccagtgaacgagccatcgttcgtagtcgctcaatcagttgcaagctgggtgatgacgacatcgaccagaagattgccggtcatgtgtcctttatgggcaagaacggcatcaagggcgaagtggttatgcgtaacggccagatcctgctgtatgccgggggcgcgggcttcctggacgggatcggcaagggcattgagaaagcctcctccactaccgtgggtgtcggcgcaactgccagcatgagcgccggcgatatcggccaggcagggctcggcggtggtgtcagttcttcggccaaaacactctctgattactacatcaaacgcgccgaacagtaccaccccgtcattcctatcggtgcgggcaatgaagtcacgctggttttccaggacggtttccagctcgaaacactggaagaagcgcgcgcgaaagcggctgcacgtaagaaacaaaatcagccttctgcctcatccacgcctgctgccatgccaggtaacaccccggacatgctgaagcagctgcaggacttcagggtaggggacaccgttgatccgacgaccggacaggtcgtcacacagtaa

SEQ ID NO: 390258 - DNA, 618 bp, Salmonella enterica
ttggttgttaatgatattgaggcgcttaataatgaattgcgactatctttatctaaaataatatctaaaaatcttcaggaacttgaggttgttaactctacattaaaagtaatagagaagcagataaatgaggaggatatctattcaccggttgacggtgtaatttataaaatcaataaaagtgccactactcatggtggtgtgattcaggcggcggacttactttttgaaataaaaccaaaagtaaggactatgctggccgatgtgaaaatattacccaaataccgtgaccaaatatatgtagatgaagccgttaaactggatgtccagtcaattatccaaccaaagataaaatcgtataatgcgactatcgataatattagccctgattcctatgaggaaaataccggaggaacaattcagcgttattataaagtaattattgcattcgatgttaatgaagatgatttacggtggttaaaaccaggtatgactgttgacgccagtgtaattaccggaaaacacagcattatggaatacctgttatctcccttgatgaaaggcgtggacaaagccttttcagaacccgttaatactaaacgattagatacaccttga

SEQ ID NO: 390259 - DNA, 726 bp, Salmonella enterica
atgaaaaggaatttattatcctcagcgataatcattgcgctaatgaccctgggcgcaacaggatgtgatgacaataatgttaaaaccgaggcgacgccggccgccagcagtcagcctgcgacgccagcgccttctcagacgccggaaacgcaatctgacgaaagtccagcgcagcccccagcagcgaagccagaaacggcaactcagaccccggcggcgaagccagaaacgccagctcagccggaggttgacgctgaagaagtttatagtgaaaaaatggatgtctatatcgattgttttaataaacttcaattgcccgttcagcacagtctggcgcgttacgcggattgggtgaaagactttaaaaaaggtccgacagggaaagagagtctggtttatggcatttatggtattacggagtcttacataacgaattgccagaaagagatgaaacaggtggccgccttaacgccattgcttgagcctattgatggcgttgccgttagctatattgatagcgccgccgcgctgggtaataccattaacgaaatggaaaaatattatacccaggaaaactataaagatgatgcctttgctaaaggtaaggcgctgcatcagacattactgaagaatatcgaggattttaaacccgtctcggaaaaatatcatgaggctattcaggaaataaatgacaagcggcaattgacacagttgaagaaaatataa

SEQ ID NO: 390260 - DNA, 771 bp, Salmonella enterica
atgaaaaaggtatatttcatgtttgttatcttgttattactttcaggtattcattccgcgataacaaaaccctggcaggagattaaagaaagcagagtgttacgtgtaggggtgcctggtgactatgctcccctcgcatttcacaacagacaaaataaactgatcggttttgatattgatatggcatattcactgggcaaggctctgcatcttaatatccggtttgtacccagtagttggcctgagctgtcagcagacctggcagcagataaatttgatattgcagtgggggggattacagaaactcccgccagaagaaaacagttcgcactttcttctccggtacttagaaatggaaaaatagcgctgacgcagtgcgacaggattaatgatttcaaatctcttcaaaatattgaccgtaagggcgtacggattgttgttaatccaggcggtacaaatcaggattatgttgacagacatatcaggtatgcagatgtgattcgcgaaagagataatgatgccactctgcagagaattcgtgaacgcagcgctgatgtcatgtttaccgacttactcgaaggtaattattaccagaataaagagccaggtgtcttctgcgtatcaaccaggagtatcctccccgacactgccagcaataaagtctatatgatggcgaaggataatcagtatcttcttgaagctgtaaatagctggttgtctgatgaaaaccgaagcatacttgccagaaaatggcagatatccgcagagtag

SEQ ID NO: 390261 - DNA, 690 bp, Salmonella enterica
atgccattaagttttccaaatatatacttaaatacccgcaggagaatagagacgttacctccggatattctcgacagtatacgtaatgcagccaggcctcctgatggcgtgactggtccaactgaaattcaggtgcaactacgtgatgtattataccgggtgcgtcatcagcccgacgatggtacttttgaggtagccccatggcgtgaaccggggcaaggttatagttatattcggcagaaccatccagaaagttttagtaatgcgcgaagactggccctgcaattaaatgagcgatggaatttgccagggccaataacagatagatttttaaatcctaatggataccaggttgccgtaaataatttaggaatgcaatctgacattatgagtaatcaattacataaaaaaattgaagcatgtagttttcctgttgaccctggaagtttttcatgtgcggaagagcatttaacatgcccgataacgctggatattccaaaaaacggtgtttttgttaaagtatcatcacagtcagatgtttgttgcttatttgatagagaggcactcctcaacctggtgtgccaggaattaaaacaccctttgagtcgggagcctatctgtatggatatgatagttagaaagaaagactgttattttaatacattgcgtgataaattcacctcaatatag

SEQ ID NO: 390262 - DNA, 753 bp, Salmonella enterica
atgaaaaatatcgcagatagcgggattctggccagaatccggaagctggcaccgcaggccgccggacggtcagcaccgttccggacgccggaggagtggcgggagtggcaactcgccgaagggcgcaggagttgcgaggaaattgaccgtcagaaccgtcaggcgagggcagaaaaaatcttcggtcgggccgggattcaacggctgcatcgtggatgctcgtttgcaaattacaggatacagaacgacggccagcgccatgcgctcagtcaggttaaatccattgctggtgaactggataccggctgcacgaacttcgtgttcagcgggaatcccggtaccggaaaaaatcatctggccgccgccattggcaatcgtctgatgaatgccggacgcagtgtgattgttatcaccgtcgccgatgtgatgagtgcgcttcatgccagctacgatgacgggaaatctggcgagaaattcctgcgggaattgtgtgggggtgatctgctgatcctcgatgaggttggcgtgcaacgtgaaaccaggaacgaacaggtaacgctgaatcagattatcgatcgtcggacggcatccctgcgcagcgtgggaatgctgacaaaccttaaccatgacgcactgtcgaagctggctggtcagcgggtaatggacagaatgaccatgaatggcgggcggtgggtgaattttgactgggggagctggcgcccgaacgtcagctctctcagggcggtgaaataa

SEQ ID NO: 390263 - DNA, 132 bp, Salmonella enterica
atggtattgtccggctgttatctggtctggcgttgtcttgatgaattcattaaacacgaaatggtatacaaatgtcaacacaaaatgtgtttttggttgggggagggcgttctgctgggcttgaggcaataa

SEQ ID NO: 390264 - DNA, 480 bp, Salmonella enterica
atgtaccagagtgtgatggcgttaccgctggggcagtggctggttgaaagcgccggatatgctgaatcatcagtctactgggaagatcctgaaacaggaattttgtgtcggtgccgtccggacaaaatcatccctgaatttcactggatcatggatgtgaaaaccactgctgatatccagcggttcaggacagcttattacgattatcgctaccacgtacaggacgctttctacagcgacggttatcgggcgcagttcggtgagatacccaccttcgtcttccttgttgccagtacaaccgccgaatgtgggcgttacccggttgagattttcatgatgggtgaagatgcaaaactggcaggtcagcgggaatatcgtcgcaatctgcaaaccctggccgaatgccttaataacgatgaatggcctgccattaaaactgtatcactgccccgctgggcgaaggagaatgcaaatgcctaa

SEQ ID NO: 390265 - DNA, 321 bp, Salmonella enterica
atgaacaaaatcactgcattacccgtagagcgcgataattacggttactggactcacccgctgtacgaacagttttgcgatggtcgtgaggttatctctccagacgagtttaatgcctggctggaggctaacggtttggaatggaaagtctcatacctggatgacgaggaaatagatcctgacgttgacgggtgcgacatttcaacgtggcaaccagatccgccagcaggtaacggctggtttgtcggttccattcacgacaccgaagacggcgcggtctgtatctggttacgcaacgtgcaggacggtcattatgagtaa

SEQ ID NO: 390266 - DNA, 489 bp, Salmonella enterica
atgaacccactgataattgaattaaatgaacatgactttaatgaacggataagttcaatcttcccatttataaacaatgacatgactagtccgcacaggaaagggaaaggtataataatagagtcaatggaaaatatcttggtaaaaaataatttcaagttgaattatctacaggttgatgattcttttgaagatatactttcttttgatagcaatggcggtcttgaatatatttataatatgttttttgaaaatatgacctcatcatctgatgtgttattttttacaccttttttctatacgaataatggaagcaaaggaatagttgttaatttcaatcagttacattgttttcttcttgataaatcttcaaggtattataagaatgggttagatgctagcagtaatgacttgtttttttacttatatgaagaacgtaagttttttgggatagaacataatagcccaccgtattggttatcagtatag

SEQ ID NO: 390267 - DNA, 345 bp, Salmonella enterica
atgaatagctataaatctatagatgagttaataataagcctttctcttttagaccaaggagaatggatttatgtaaatttaaattcatggggtagtgagccggaaaatacagatttttattacattccgtgggactacattcaagatttaaatgatgaagaaatatatcttgatgaagaagatatggaaatgcctcttgttgttaaagaattaaatttgagaggatggatgctagtcagttcattaaattatatagctcaaaataagttgaatggtaggtatgataataaatggtttattgacgaagtaaattattatcgagaatacgatacatttagaacatag

SEQ ID NO: 390268 - DNA, 213 bp, Salmonella enterica
atgtatcaaggcgcacttgagtttaaagagtattacgcaaaaagatatcttgatacatcagaagttaagcttatcgaaagtagatatgacacctccaaacttgaggctttgcttaatgcgatcattgatgcttgttccaaattatctggagcaatacgtattgaaaaaataaagagtcactatccaaatatatggactgaagaaaaaatttaa

SEQ ID NO: 390269 - DNA, 723 bp, Salmonella enterica
gtgacaaaaataactttatctccccaaaattttagaatccaaaaacaggaaaccacactactaaaagaaaaatcaaccgagaaaaattctttagcaaaaagtattctcgcagtaaaaaatcacttcatcgaattaaggtcaaaattatcggaacgttttatttcgcataagaacactgagtcttctgcaacacactttcaccgaggaagcgcatctgagggccgggcagtgttgacaaataaagtcgttaaagattttatgcttcaaacgctcaatgatatagatattagaggtagtgcgagtaaagaccccgcatacgccagccagacccgtgaagctatactatcggcagtttacagcaagaataaagatcagtgttgtaatttgctcatcagcaaagggatcaacatagcgccttttcttcaggaaattggcgaagcagcgaaaaatgcaggtctgcccggaacaaccaaaaatgacgtttttacgccaagcggcgcaggggccaatccttttataactccgttgatttcatcagcaaacagtaagtatccacgtatgtttatcaatcaacatcagcaggcatcctttaaaatctatgcggagaagatcattatgacagaagttgcaccactgtttaatgagtgtgctatgccgactccacagcaattccaactgatactagaaaacattgctaataaatatatacaaaacactccctga

SEQ ID NO: 390270 - DNA, 1206 bp, Salmonella enterica
atgggatataaagtaaagaaattcatcatgagtaatggggagcgaggatgcctgatccttgataaaaatagtaatctaccagcttactatcaaaatctatttcttactacagacataagaaatagaggcgcaaccgcctcaactatggaaatagttgcaactaacttactaatttttagtaatttcttagatagtaggaaaattaatatagttgatagaattgagcttgaaaagtatctcagcgttgcagaaatagatgatctggtaagatatgcgaaacaaagattcgacagacaaaaaattataaatataaaatcagcaagtaataggtttattgcgaagagaacctttagttatagaatacacgttttttcacgctaccttaagtggttatgtggattagttcattcgtcaaaggggattcatgcaaagtatgaagtagaggtatttattgaaagtatcagagcacatattccaagaaacagttcattgaatatgaatgaaatatctgaaaaatcgttaaatgaagaagagatcaaagtgcttttccgtctattagaaattggcgggattgaaaaccctttccataaggaagtacaggtcaggaacagactaatatttaccttgctcttaaatttaggtttaagggctggagagttgctcaatcttaaaatagatgattttgatctcagagacaacactttaagtgtagtcagaagacatgattcaaaagaagatggaagatcttatcaaccattagtaaagactggagaaagggttattccgttatctgatgagttagcctgtgaaatttttgattacataagcaatagcagagaaaaaatgacaaaaagaaaaaagcataatttcttattggtggctcattgcaccggaaaaaacgcaggagaacccttaagtatttcagcttatgagaaggtgatatcaacactgaaacgagcaagtccagagctatataatctttcaggccataggttaaggcactcttggaattatatgtattctaaaggaatagaaggtgctgaattagaatatagtagaaggaaagatttaaggaattatctaatgggttggtcaaaggagtcaataatgtgtgatagatacaactataaatatatatcgcaacaagagaaggatgtcgtcctaaaggtctataaatcagtaagtaaaataattagtggagtttag

SEQ ID NO: 390271 - DNA, 873 bp, Salmonella enterica
atgaaagatgatcaaatccacatgattaagatatccgacataaaagtagtcatcccacgttcacgaaataaacttcgacattcggaaattactgaaagtatcgacacaagtggactgagaaagccaataaccgtacgtcgaatcgtggacaaaaagtatcaattcgctttaatttgtggtcaaggaaggctcgaatcattgacagctttaggagaagaattaacaccagcaatcgtacttgatatagatgaaaacaaagcctacataatgagtctggttgaaaatatggcaagagtagttcctcgtgctggtgaacagttccaacgtataaaggaaatgacagagcaaggattaaccaataaggaaatatctaactcgactggattatcattacactggataacaagtctgacaatgcttatcagtaaaggtgaaaataaattattatccgctgtagaatcaggcagcatacctatctcgcttgctgttgagattgcaagagtcgattttgaaggtggtcaggaattgttaattaaagcatttgataaaggtctaataaaacacaaagatgtaggaaaaatacgtgagatacttgactcacgagatgaaggcttgaaaggatacctaaataataactttgggataacaaagagaaagaaaaaaatgactacagatgaattaaaaaaaatctatcaagataacatttctcagcacagaaagattaaaaacaaagcagaatacgttgagatgaatttgttgatagcaaatcaaatctttaaagaacttgtcaatgatgaagagtttttacggatattagatgaagaaagcctaaatgaagtagtaaatattatagttaaaaacacgaccaattga

SEQ ID NO: 390272 - DNA, 1458 bp, Salmonella enterica
gtgaaatttaatagtaatgacaggatatttatatcaatctttcttggattggcgattatatatacatttcctttattaacacatcaatcatttttcgttgatgacttgggtaggtctttatatggcgggttgggttggtcaggcaatggtcgcccactttccgactttattttctatatcattaattttggaatcccaattatagacgcttctccgctacctttaatgctagggatagttattttagcattggcactatcctgcgtcagggaaaagctgtttggagatgactacatcacagcatctctttgttttatgatgattttggcaaacccattctttatagaaaatctatcatatagatatgattcattaacaatgtgcatgagtgtagcaatatctattatctcatcgtatgtcgcttatcaatacaagcctataaatatcataatatcatccattttaaccattgcattccttagtctttatcaggctgcgctgaatacttacgcaatattcttgttggcttttataatttcagatgtggttaagaaaaactcaatttcaaatatcacaaaaaatacagcatcttctgtcgctggtttaatggtaggatattttgcctattcttactttattgcaaaaaggcttgtaacaggcccttacaatatcgaacatagtaagattatagagataaactcaagtttatttgaagggataatttctaacgtcttatcattttatagaatgtttagcacgatcttgaatggcgataattacttaatctactactcgctattctttgcgctaatcatttctttgatagtcatagttttaaaagcaatcaaaagagatgaaaataagaaaacaaagttattgctagtagttttaattttattagcatcaatgttcttcatcattggaccaatgatttttctaaaatcaccaatatacgcaccgagggtattgattggtatgggtggctttatgtttttttgttgcctatgcgtattctatgcttttgaagataaacagttaatatcaagaatatatttttcttttattcttttaatatcaacaatattttcttatggtgcttacaatgccataaatgcacagtttcagcttgaggaaagcattgtaaatagaatatctcaagacatagattatcttggatttggaagagacaagaaaaatataaaattcattggcacagaaccgtatgcaccaataaatgaaaacatagtaataaagcatcctttaatgagagagttaataccacgcattattaacaatgattggatgtggtcagaggtgttaatgcaaagaaatgtgttttctagaaattacagactatatgacaaagaggttaaacttgaaaatgggtggaaaaaatctggtaataacgtatacgatattggtgttgtaggggaaaccatagttgttaggtttaattag

SEQ ID NO: 390273 - DNA, 363 bp, Salmonella enterica
atgttgaagttattcgctaagtacacatcgatcggtgttcttaacacgcttattcattggggcgtatttgctttttgtgtgtatgggatgcatacgcatcaggcgctggcgaacttttccggttttgttatcgccgtatcgttcagcttctatgccaatgcgcgcttcacctttaacgccagcaccaccacgcttcgctacatgatgtacgtgggatttatgggaacactgagcgccgttgttggctggatggctgacaaatgttccctgccgccactccttactcttgtcaccttttcagctatcagcctgatatgcggattcatttattcaaagttcattgtctttagggatgcgaaatga

SEQ ID NO: 390274 - DNA, 183 bp, Salmonella enterica
atgttccacaacccttatcccttcattattcatcttaaggatttcatctatcaacgaggcatagaaactgaagtattcctccatagaaaatgtgaacgatgctttttgtgcaaacccatagggactaacaggtcggataaacatatccttgaggccaagagacaagtgagcctggacaattga

SEQ ID NO: 390275 - DNA, 147 bp, Salmonella enterica
atggctaagcatataaatggttatcatgagaagaagattgtagatgttattaatacatggtctatagatgaaaaactaacctgggatgctttgtgcgacaggttagtaaggattattggcaaaaggccatcaagacaatccctttga

SEQ ID NO: 390276 - DNA, 1266 bp, Salmonella enterica
atggatcaattttggaccgctgacgagaagtctgaaaagagctatatttataaagtttcggattttcctattaaaagaatatgcctcctcgtaacattcctctcttatgccgaagaaattaatattttcagcaacgaaaaaatgtttcttgaggaagttatcatgcttaagatattagcctctgagaattacaatgatgacttcttagataaaaaattatataaacaatttactgtgtttgacataattaaaattcaaaggttttttaactatgttagttatatttatcataaggtatatgaaaaactcactgttgatgagtctcttgatgcacatctaatacgtaaacgctcagtgttacctgtttttaaaactgaacaactagctgttatttttcaaaaaatatgcggatattcacgtgaagactgcttagatttaattgaaaagattagtactgatttttctaataaaagtgatgttgttgacattcagtaccagccaattataaaaatgggaggaagtagtatgattcttccaactgttttagcaaattcaaaccttatacgttctttcgcgcagactgaaaaaatccatttatcaacttttgaacatcgggattacatgattaggaatatcagcgatgcatttaaatccaaagggtttaaagtaaatatagattttaaatatggtaaagatgaaattgatgttgttgcatttctggacgggtatttatttctttttgagtgcaagaacccttttcatcctgtgaatgactttgaattaagaaatacatatagtcatattgaaaagggattttcacagataaaaaaattcaagaatattctctctgataaacattctttgagacaattcctgaagaatctaaatattgagttcgaattggttaaggaaattcatttcgcagttattaatgcaaatcgtgcattgtctggtttacagcatgataatattaaggtgcttcatgctaatgaattaattggttttttagaatcagggttaattgggattgctgatactgtttatcgttgttgggaatatgaggcatttaaacctactgatttagtcaaatttcttaacggcgaggttattacttctgattttgagaagagtaagagtgagattttttatggttacccactacgttcatatacaatggcatttaaaacatatgcttttgaattagataaaatagctatcttagctgaagaaaactactgcaaaatagctatgccagtaattgaatga

SEQ ID NO: 390277 - DNA, 1263 bp, Salmonella enterica
atgtccctgtccgacgcgaaaatccgcagtatcaagccatccgataaaccctttaaactgaccgattctcagggtctgtatctgcttgtcaatccgggcggttcacgcctctggtatctcaaatatcgctttaaccgaaaagaatcccgcatcgcattaggtgcatatccgcaggtctcgctttccgacgcccgccagcagcgcgacggtatccgtaagctactggcgcagaatatcaatcctgcacaacaacgcatgactgaaaaagccgccgcgtcaccggaaaaatgctttgaagccgttgcggtggcatggcacaaaactaacaaaaagtggtcggctgattatgcagagcgcatcctttccagtatgaaaaatcatatctttccggcaattggtcatcttcccgtcactctgctgaaaacgcagcatttcacggccttactgaaagttatcgaggataaaggctttctggaagtcgcgtcccgtacccgacagcaactctgcaacatcatgcgttacgccgtacagcagggactgactgaacagaatccggcgctgcatctggaaggcgtcaccgcgccgccggtaaaaaatcattatcctgccctgccgctggaacgattgcccgagctgctggaacgtatcggtgactatcagcaggggcggcagttaacaaggctggcggtggtgttgactctccacctgtttattcgttccagcgaactgcgctttgcccgctggagcgagatagatttcagacataaaatctggaccattcccgccacccgcgaggcaatcgacaaagttcgtttttcaggtcgtggcgctaagatgcgtactccgcatattgtgccgctttctcaacaggctatcgctattctgaagcaaataaaagaaatctccggccatctggagttggtctttcccggcgaccataacccgtataaaccgatgagtgaaaacacgataaaccgggcgctgcgtctgatggggtatgacaccaaaaccgatgtctgcgggcatggcttccgggcaatggcctgtagcgcgctggttgaatctgaactctggtcgcgggataccgtggaacggcagatgagccatcaggagcgcaacagtgtgcgggcggcgtatattcaccgcgccgagcacctcgacgcccgtaaagccatgatgcagtggtggtcggattatctggatacgtgccgggagggttttatcccgccctatatttatgcgcggcaaaataaagcggcctga

SEQ ID NO: 390278 - DNA, 1425 bp, Salmonella enterica
atgaaaaataaaaaatatttgtttctttttattattggattactatatgtatttccaatagttttggctaatgtatattatgtagatgatatgggtaggttatcgcttggatatggatgggatggtgatgggaggattttatctaatgttctaacggaagcgctgtctttcggaaatggaataatatcaatatttccttattcaacattactttcatctgtgatacttgtcatctccgggataattgtttcagatatgttattcgaaaacaaatatctcaagtccatttcatcgctttttattcttacatcgccattcatgcttgagaacttatcatatagatatgactctatattaatggctgtatccgtattgtgcgcggtagtaccttttatttttcgttctcattataaacttttttttgccacatcttttttttgcttgcttatttcattttgcttatatcagacgtcaacaatggcatatttttctgttgcgttatgtttattgataaagcaatgcttgaataacgaaaaggcatttgactttaggctttgcctaaactctttattatgtttttttgtgtcgtatattgtttattcattattaataagctttcttgcagtaaatatgcaaagaagtggctttataactttcgatgcagatggatttgacataattctatcacgcttaagaagttatgagagttactataattccttatatgttagtggctttaagtatgtgatctggccatgtgttacattggttttactgtcatatgttaaatttattttaagagggcgcgagttcggcaggttgttactatcagtcatttatttgctgggagtcgctttattgaccatgatgccaaatcttgtaattacaacagcttggataacttcaaggacatttatatgctttccatttttaataatatctttatttattgttatagacaagataaaaatttctttatttcttgacagaataaagttcgcctcagcaattttagttgtttcgtattcatttttcttgtgttcaatttatgggtcaactcttaaaaataacgatgattattctgactttatcgctcaaagtgtctcaaacataataacgaaagattccaacgaatcaacttataaagtcatcatttcagggtctcgcccactctctattaaaacaaggatggcgtttaactctataccattcatgaaaatattagcaccaaattatatgactcagggatcatcatggggtatcgcagatctaggcaggtatatagacatgacgttcgttcctgattctcaacgatatattgaagataagtgtaactgggatattattgataaagggagtgtttatagtgtattaaagaaggatgatttgtatatggtagattttaattataggtcatgtggctaa

SEQ ID NO: 390279 - DNA, 891 bp, Salmonella enterica
atgatcgaagcagaatcgttgtcgtataacgcactagtttggctgaaaaaacttgatcatcgcctgaaagcgaaatatagcgagaagaaaaatactgacggtaaaatcgtgactcaggttttacattggtgtattgaactggatttgatcccagctaacagtttgttactgcctgagttcctttttacaacaacattgctgaataagatttcagatacccagaaacgtctcaaacaggcaaattttcgtgacgatcttagcttaaagagccgcattgaaagcgcacaattaagcgatcaagagattaaaacggcgggagtccggccccagcagcatcgggtattgcttcatcttaatcagcccttagtcaacgagtcaggtatgacggttgaggttgtcgatacggattggcgcaatattcccctgacacagtttgatgcgcttatggtggtagagaatcaggattgtttctaccatctggcgctttttgattattcccggtgcgatttccgttcgcctctgattatttaccgtggcgatcgggcatatagcaagggggctgttgcgttgaagcattgctggttgaaaacagggaaaactgcgatctattttggcgattttgatccgaagggggtcagtatcgcgatgaatgaaggttatcattgtatgttattaccttcgccagacgcggtgataaaaaaatcctctccagtgatgtttcctgatgcacagttaaaattcttacctgaattattaagaggtgagatacattaccattttcgtgactatctgttggttttggaaaaacatcaggcgctgaggcagcagaaaatgcagggagatattctacaggtggttccgctgttaataagtaattttctattcaggtag

SEQ ID NO: 390280 - DNA, 699 bp, Salmonella enterica; identical to SEQ ID NO: 100893

SEQ ID NO: 390281 - DNA, 546 bp, Salmonella enterica; identical to SEQ ID NO: 100894

SEQ ID NO: 390282 - DNA, 1035 bp, Salmonella enterica
atgtcagacagagtgatgactattttgcagttactgactccgcgtgtggaaatttacagtatcgatgaagctttttgtgatcttacgggtatgcgtaatctgttatcgcttgaggtgtttggccatcagatacgtgatcagattaagcgaagaacacatctgactgtgggagtgggaataggccctacaaaaacgctcgccaaactggctcagtatgcaagtaagcgctggcccgcaacgcgaggtgtggtagatctcagtgacagacagcgtcagcgtaagttaatggctttagtaccagttgaggaggtctggggtataggacggcggctgggtaaaaaattacagtttatgggcattaacaatgcacttcagctggctgagctgtcgccttcattcattcgtaaacagttctcagtagttgttgagcgcacggtcagagagctgaacggtattccttgcctcggtttagaagaatttactgccccaaaagaacaaatcatatgctcccgatcttttggagaaaaaccgtcggacgaagtcagcctgcatcaggccatttgcgctcatgctgaacgtgcagcagaaaaactccgtgcagagcatcaattttgtaaacgggtagcagttttcatcagtaccagccctttctcagaaaatgaggtgttttataagaatcaggcggtaacagagcttgctgtacccgctcaggattcacgggatatcattaacgcggctataaaggcatttgatacgatatttgtaccagggcaccgttatcatcgtgctggcgtgatgctcactgatttccgaagcgctgccgtatctcaattgaccctttttgatgactttcagcctcatcgtaacagcgaagagctgatgacattaatagacagcattaaccattcaggcaaaggctctgtttggtttgcagggcaaggtattaaagatgcatctatgggctggaagatgcgcagagaaaggctttcccccgccttcacgactaagctaagtgatataattaaagtgaagtga

SEQ ID NO: 390283 - DNA, 1281 bp, Salmonella enterica; identical to SEQ ID NO: 100896

SEQ ID NO: 390284 - DNA, 441 bp, Salmonella enterica; identical to SEQ ID NO: 100897

SEQ ID NO: 390285 - DNA, 900 bp, Salmonella enterica; identical to SEQ ID NO: 100898

SEQ ID NO: 390286 - DNA, 528 bp, Salmonella enterica; identical to SEQ ID NO: 100899

SEQ ID NO: 390287 - DNA, 1233 bp, Salmonella enterica; identical to SEQ ID NO: 100900

SEQ ID NO: 390288 - DNA, 336 bp, Salmonella enterica
atggatttacacaccgcagcaaacgcacttcgagaactgggccacccgacacgtctccgcatataccgggagctggtcagggctggtcatgaaggcctgccggttggcgaactgcagaagcaccttgagattcctgcctccacgctcagccatcatctttcagcgctgatgtccgctggactcataagccaggaacggcagagtcgtaccttgttctgcagaccttgctatgcgcagcttgagcagctgatggcttttctcactgaagagtgctgcgccggtggcagtagctgcagcctgtctaccgagatttcccataaagagactccattgtga

SEQ ID NO: 390289 - DNA, 723 bp, Salmonella enterica
gtgaataacgtgaatgatgccctgaacaatatcgatctgacactcctggatacgcccctttcggaagagaaattaaaggccgaagaggtggcgcatccgccccgcatactgatgctctacggttcgcttcgggagcgctcttacagccgactcaccacggaagaggccgcacggctgctgacggccatgggcgcggaggtgaagttattcaatccgtccggcctgccgctgccggatgatgtacctgagacgcatccgaaggtcgcagagctgcgccagctagtgctctggtctgaagggatggtctggtgctctcctgagcgtcacggtgccatgaccggcatcatgaagacgcagattgactggataccgctgacgtccggggcggtccggccctcgcaggggaaaacccttgctgtcatgcaggtcagcggaggctcacagtctttcaacgccgtaaaccagatgcgtattcttgggcgctggatgcggatgatcactatcccgaaccagtcatccgttgcaaaagcctgggccgagtttgatgaggacggccgcatgaagccttctccgtattatgaccgcatagtggacgtcatggaggaactgatgaagttcaccctgctgacgcgcggtcgtagtggttatctcaccgaccgctacagcgaaaggaaggagagtgctgcgcagctctctgagcgggtaaaccagcgcagcatataa

SEQ ID NO: 390290 - DNA, 429 bp, Salmonella enterica
atgactgacattaccatttatcacaatccggcctgcgggacgtcccgcaataccctggcgcttatccgcaacagcggcaccgagcccacggtgattctgtatctggaaacaccgccgtcgcgcgacgagctgaaaaagctgattacggacatggacattagcgtgcgtgccctgctgcgtaaaaataccgatccctacgagcagctcggcctggctgaagaccggttcagcgatgaagaactgctcgatgcgatgctggctcatccgatcctcattaatcgtccggtggtggtgacgccgctgggaacgaagctctgccgcccctccgaagtggttctgggcatactgccggacccgcagaagggagcgtttaccaaagaggacggcgaagcagtcattgatgagcaagggaatcgcgtcagccactga

SEQ ID NO: 390291 - DNA, 1284 bp, Salmonella enterica
atgtttctggcgggtgcgatttttattctgacgctggtactggttatctggcagccgaaaggactcagtattggctggagtgccgttatcggcgccgcgctggcgctgctgaccggcgtagtacaaatcggggatattccggtggtctggcagattgtctggaacgccacggccacgtttattgcggtcatcattatcagcctgctgctcgatgagtccggcttttttgaatgggccgcgctgcacgtttcccgctggggaggcggcaggggccggctgctgttcacgtatatcgttctgctgggtgcggcagtggcggcgctgtttgccaatgacggagccgcgctaattctgacgccgatcgttatcgccatgctgctggcgctgggcttcagccccggggccacgctggcgtttgtgatggcggccgggtttatcgccgatacctccagcctgccgctcatcgtgtcaaacctggtcaacatcgtcacggcagacttctttaaactgggtttcagcgagtatgcctcggtgatggtgccggtgaatatcgcgtccgtggccgccacgctggtgatgctgcacctgtttttccgcagggacatcccggacacttacgacctggcgaagctgaaggcgccgcgtgaggccattcgcgatgcgcgtacctttaaaaccggctggattgttctcatcctgctgctgatcggcttctttgccctcgaaccactcggcgtgccggtcagccttgtggccgcggtggcggcgtttattctctggctggtagcccggaaaggcaatgtgattgataccggaaaggtactgaaaggtgcgccctggcagatcgttatcttctcgctgggcatgtacctggtggtatacggactacgcaatgccgggctaactgattacctttctgccgccctgaaccggtttgccgagcatggcgtctggggcgcaacgctcggcaccggctttctgacggcggcgctttcatcagtcatgaacaacatgcctaccgtgctggttggcgcgctctccattgacggcagcaccgctcagggcgtggtgaaggaggcgatgatttacgccaacatcatcggctgcgacctcggtccgaaaatcacccctatcggtagcctcgctaccctgctgtggctgcacgtcctggcacagaaaaacataaccgtcagctggggctactacttccgcgtgggcatcgtgatgaccctgccggtactgtttgtgacgctggctgcgctggccctgcgcctgtctgtttaa

SEQ ID NO: 390292 - DNA, 354 bp, Salmonella enterica; identical to SEQ ID NO: 100901

SEQ ID NO: 390293 - DNA, 459 bp, Salmonella enterica; identical to SEQ ID NO: 100902

SEQ ID NO: 390294 - DNA, 2631 bp, Salmonella enterica
atgagtgactgctgcagtaataaaaaatgtggatcagccgcaaccggagaggaggcgtctgttaaaaataccgccactgccccgactgaggcttcagggaaaatgccaccaaaaacgactcagaccacaccggcctgttgcagcaccgggagctgctgctcaacggacggcctgagccagatgtccgaaccggttgcagagcttccccgcaacgatgacgttcagacgcgtctgcgcatcatgcagatggactgcccgacggaggagacgctcctccgaaaaaaactggcaaaattacctgccgtcagcaatcttgaattcaatctgatacagagggtgcttaccgtgacccatacaccgcaggcgctggaaccggttctgcaggcggtgcgctcgctgggttttgacccggaaccgattgataaagcaatgcagcctgaaggcagctgctgctcaggccgtgaggcggaaaataccggcggttcctgctgctcgcctgcccctgtcacattcggtgagctgcagacgcagcaggtgaccgctgacggggtgcgtaccagtatcaggatcatgcagatggactgcccggttgaagagggcatgatccgtaaaaagctggacggcatgtcagccgtcaaggaactggatttcaatcttatgcagcgtgtactgacggtggttcacgcaccggatacgctggagccggttctggccgccattcgttctctgggctttgaacctgaacttcctgacagtaatggccggcacgcggtcactgaggaaaagaaaaaacactggtggccgctcgcgcttgccggtgtggcggcaatcgccgccgaagccatgcactgggcgggcatgccggaatggctggaagcggctcttgctctggctgccgttgcggcctgtggcctgtccacgtacaaaaaaggctggattgctcttcgcaacggcaacctgaatatcaacgccctgatgagtattgccgtcaccggggcgctggcgctcggacagtggcctgaagccgccatggtaatggtgctgttcacgattgcggaactgattgaagcgaaatctcttgatcgcgcccgcaatgccatcggctctctgatgaagctgacgcctgaaacggccacggttcagcaaccggacggctcctggaaagaaactgaggccaggtctgtatcccttaacagcgtggtcagggtaaaaccgggcgagcgtatcgctctcgacggcacggtggtccggggcaggaccgccattaatcaggcacctattaccggcgaaagtctgccggtggataaaggggaaggtgacccggtcttcgccgggacggtcaacggctccggtggctttgagtaccgtgtaacggccgctgccggaaataccacgctggcgcgtatcattcatgccgtggaggaagcgcagggggcaaaagcccctacgcagcgctttgttgatcgctttgcacaaatttatacccctgtggtgtttgctattgccgtcgcagttgccgttctcccaccgctgattgcaggtgaaagctggcaggagtggatttacaaggcgctggtgatgctggttatcgcctgcccctgtgcgctggtcatttccacgccagtgaccattgtcagtggcctgacggcagcagcccgccgggggatattgatcaagggcggcgtttatcttgaagaaggccgaaagctgaagtggctggcgctcgacaagaccggcaccctgacgcacggtaagccggtacagacggatgcgattatctataccggggtggcagaagatgaggggcgcagtctggctgtgagcctggcaggttactccgatcatccggtttcgcaggctgtatcggcggcatcagatggcattcagcgttatgaagtggaaaactttgaggctctgccaggccgcggcgtgcgcggcgtcatcaacggtcaaacctacagtctgggcaatctgaggctggctgaagaaacggtgcgctgtccggaagcggtcagggctgcactaacggaactggagaccgggggtaaaacggtcatcatgctctgtgacactcatcaggtgctagggctgtttgcggtggctgatacggtgaaggaaagcagccgcgaggcgataagtcagttgcatagtctgggtgttaaaacgctcatgctgaccggagacaatgcgcacactgcgcaggccattgccggtcaggttggtatcgatgaggcgcggggggatcaactgccggaagataaactgcgtgctgtagaaacatttacggcgcagggcacgaccggcatggtgggcgacggcatcaatgatgcaccggcgctggcccgcgccgatatcggctttgccatgggtgcaatgggcacggataccgccatcgagactgccgatgtggccctcatggatgatgatttgcgtaaaattccggcttttgtccgactctcccggcagacgtataacattctggttcagaatatcgttatggctattgggatcaaggcagtgttcctggccctgaccattgcaggtatggggaccatgtggatggccgtattcgcggatgtgggggcaagcctgcttgtcgtggcaaacggtctgcgcctgttgcgtaagtaa

SEQ ID NO: 390295 - DNA, 300 bp, Salmonella enterica; identical to SEQ ID NO: 100904

SEQ ID NO: 390296 - DNA, 2127 bp, Salmonella enterica; identical to SEQ ID NO: 100905

SEQ ID NO: 390297 - DNA, 978 bp, Salmonella enterica; identical to SEQ ID NO: 100906

SEQ ID NO: 390298 - DNA, 369 bp, Salmonella enterica
atgtatcagtctcaagagaaacgcgcctggaatcgtggcgtccgttttgcgggtatatggaaacgagccagaactactctattaaactgggataaacggtgtgtgtcgtgggcggctactcatcgtctaccgtcttggtgtgggcatatcccaatgatacccattgcatgttttgtaatcctcacttttggatcattgtttctcattagtgccgtgctctcacctcatagaaaacatctctccgaaagtgaaaatgcaccatgtgagaactttatggaagagcagccaggttatggaaaatatcgtgatggccagcatggatggggatggtacgacgctgcagggcgtatggttaacgaggatgagtaa

SEQ ID NO: 390299 - DNA, 660 bp, Salmonella enterica; identical to SEQ ID NO: 100913

SEQ ID NO: 390300 - DNA, 348 bp, Salmonella enterica; identical to SEQ ID NO: 100924

SEQ ID NO: 390301 - DNA, 438 bp, Salmonella enterica; identical to SEQ ID NO: 100934

SEQ ID NO: 390302 - DNA, 714 bp, Salmonella enterica; identical to SEQ ID NO: 100939

SEQ ID NO: 390303 - DNA, 219 bp, Salmonella enterica
atggggctggagcgggccgacggcgtgtttttctttgtgagtgtccgggatatcctgcaggcgcaggaacataacggccgggtcaggctggtattcggggaaggcacgacattcatgaccagaatgacgctgtctgagttttctgctgccttatatgaggccggtggtcgctctttttttgatagttccgcaggaaaggtaaccgggggagatgtgtaa

SEQ ID NO: 390304 - DNA, 771 bp, Salmonella enterica
atgaaaaaaacactgattgcactggcagtggctgcatctgcagtggtatccggctcggctatggctgcgtggacagcaaacggcggcggtggtcaggttgagattggcgggtcactgacaccagtgacgaaagcgactccgtgggaaactgcagtcggtgctgctgtcacaaaccttaacggtcaagttcagaaaaatgacacaaaacttgagattactgttccaaaaaccctccctatcctggccattcgctctactgcgcagtttacaggtcgggctggcattgttccaactattaagtatggctggatcggtgatgactggaataatagttctgtaacagcttcagcagcagtacggaacgaagcgggacaggtaataggtaaggctgttttccctttaactgctcagggaatcgtggccgcagccaagcttgatggtagccgtccttatcagaggttgctggctgcaaatgaggggcaggggtacttcggtggtcttccaacagcacctagtagtgttgcggatgttcgcagtgtcatttttgaggggtggcctgatattacaaagaactttgttatccccgaaggtggctcaatgggaaatacttggtcagagacatttagtgaatctgactggaaattctcttcctattatggttctgtaattgctaaaaatagtatagttaaaatgaccatgaatgctcccgttagtgccgatgcttcatttaaatggaaaattggtttgcctgctacggttacctatcaataa

SEQ ID NO: 390305 - DNA, 1095 bp, Salmonella enterica
atggcatactataacatagagaaacgactaaaatctgatggcactccacgctaccgctgtaccgtgcttattaaggaaaaaggcgttatcacattcagagaaagtaaaaccttcccaaaacaggcgcatgctaaaacatggggatcccagagggttatggaactggatctttatggcctcccatcatctgatgatgcaaccggaataacagtccgtgatttgttgcaaaaatacatcaatgatccaaacgctggtggcaaagctggacgaacaaaaagctatgttcttaatatgctcattgactgcgacattgcagctatccccctgctgtctttaaccgcaaatgacgtcatcgagcactgtcgattgcgaaataatgcaggagccgggccagcgaccgtaagccatgacgtcagctatcttggaagcgtgcttgattgtgcaaagccagtgtatggcattaactatactagcaatccggcaaaagaggcacgccctcacctcctcaaattggggctaattggaaaatcaaatcgacgtagtcgtcgaccagcatctgaagaactaaacatgctgctcgaaggcctgaagcaacgttctcaaaggcggggatcaaaaatcccattcgtcgatattctgatgttttctgttttatcgtgcatgcgcattggcgaggtttgccgtctgcgatgggatgatatcgatgaaaaacaaaaatcagtgctggtgagagataggaaagatccacgtaaaaaagaagggaaccacatgaatgtcgctttactcggagaagcctgggatattgtccagcgccagccgcgtaagtcagagctaatattcccttatataagcagttccgtaacggcaggattccaaagggtaagaagtgctcttggaattgaggatctaagatatcatgaccttagaagggaaggcgcaagcagactttttgaagctggattcagtatagaggaagtggcccaagttactggccacaggtcgctgaatgtactgtggcaagtttacacagagctattccctaaatcacttcatgtaaggcttgaacaattgcaaaagtccagaaaaaatgactaa

SEQ ID NO: 390306 - DNA, 1338 bp, Salmonella enterica
atgtcagcaggaacattaaccctgacgaataactctgctgcggttgctggcagcggaaccgcatttaccacagaactggcggccggagattttattgttgtcactgtcggcggcgttccttatacgctcccgattaaatcagtggaaagcggtacagcgttgacgctggtcagcaattttaccgggccaacacaatctggcgcggcctggtcagctgttcctcgtgttgccctgaatatggtgacagccgcgctggttgctcaaagcgctgaggcattgcgaggactgaattacgataagcagaactggcaaagcatttttagtggaaccggtaacataacaatcaaattacctgatggttctgcgtggaacggcccttcgtggaataacattagtgaaacacttaaccaaaaggcttcgagtggagctaatcgcgatataaccagtatagccggattaaccacaccattaagcctgtatcagggagggaccgggggtaatacccatcagtctgcatgcaatggtataggggcgcttcaggtaaacaggagtgtgcaaaatgcaggtgatccacatttaccaacatgttctttttttctcggtgatgggcaggaagccggtggtaatggtaaaccatatccatattcaactattctgaacgtttctgaatcaggaaatactggtgaaaacggtaattattcacaagtttcattcccgtcaattcaggagtctgctccgagaattcgtcaaagatttggcggaagttctccgcggttaacggactggcgtgactttcttatcagggggctgaatgccattactgacaccaatggattttacaaaacgtcatcccccattattaagatttggggggacgggaccaccgaattaaacagtgagtccgaaggggcaaccgttgtccgggtggatacgggagtttataaggtatccggagtgttggggtttaactcctccccggagtggggcggtgcagacggtgggtattccgtgccgcaaaacggtaacggtctgcctctgttgtggctggatttcgaaatagcgcccgatggcgatattacaatccgtacgtatcatcgcacacacaacaatgctccagaatttgcccggaacctgattggtattaaacatgatgatggttcatttaccgaaacggttaaagatggcgaaccggtagatattcccgctggccgctggatagacctgcgcgttgagatgccccataacagcccatggaatatcaaacagcttaaggcacaggaagccagagaaaaagctgaacgcgagcgccagcaaaatcagccggatatccagctataa

SEQ ID NO: 390307 - DNA, 360 bp, Salmonella enterica
atgactttagaacaacgtgttgaagcgctggaaaagtcgcttttgcatatgcgccaggccaataatgagattaactgcgcgattgatgaactcagtgcttctgttcgacagcaactgaaagttaatgataatggacttcaggagcggggcgacaaagttacattagcagatggcggtattactgttcatcttaaagggggaggggttattgttattaactgttttagttcccctgtaagcgaatcagataaattacgccaggcaatggagaaagccgctactgctggtgcggaggcggctatgaaacaaatacatcaagactttatttctcgtggaccactacgccgattacttgactga

SEQ ID NO: 390308 - DNA, 2493 bp, Salmonella enterica
atggctgggaaatcactcgggacccttacactcgatcttgttgccaaggttggcggttttgtttctggcatggataaagcggaaagagcctctcagcagtgggctaagcaagttcagaaggatgccgctgaaactaccaaagcttttgcctccattggttcagcaacagttgctttatccggcgctgttggtgttgctggttttcagcttctaaaatctacctcgaaacaaatagcagagacagaccgttgggctaaatcactaaatatttccactcaagagttgttatcgtggcagttcgctgctgaaaaggccggtgtatccggcgatcaaatggccgatatcttcaaagatattggtgacaaaatcggcgatgcggtcctgaataagtcaggtgaggccgttgatgccctgaatgctcttggattatccgctgaaaaattatccaaagtaagtccagacaaacaacttctggcgattggtgagtcgcttggtaaaatcagcacaaacgctgaaaaaaccacagtacttgaaagccttggcaatgacctttcgaaacttcttcctctgtttgataataacaatgagaagcttaagcagtttttaagtctcgctaaagatttcggagttgctccagaccctgcatcaatagacgatctcgttaaagtgaatcagatattcgaggatattgaagcgcaggttcgagggttaaaattagaaatttcagcaggactcgccaaagtagacttatctcctcttacagactcacttgatcaattgaggaaagttttaacagatccaaaggttcttcagggtatcactaacttagtgtctgaggtggcagagcttaccggatggttggtaaaatcagctgctgcggctggacaattagcagcaagcacaggtaataggatagctgccatcggtggtaatattgaccgaaaaaatcttgatcaggtaaaagaacgaattgactggcttcaaaaaaacattgatgcaggtaactttcctgaaactgaaagtattattggtagtgtactcgattcaaatattactctggcaaatgcaaaaaaagagttagaagatttaataaaattaaagggtaaattagttgctggtagcccagcaaaactgccaattcaacctgcaacagtaggtgggggctacgcgcttgataaagacgaaacaaacgggaagacaaaacctgattcaacccttaaaaagcttgagtcttcgtttaaatctatggagacaagttatcttcgtcaaattgctctcatcgatacaactggaaagaaaagcgccgaagtaacagagcagcaaaaacttcagttcgatatagcagacggaaaactgagtggtcttaatgcaacacagaaggagcgccttgaacagctcgcaacagaggtggatcgcctgaattctgttaaaaaggcgaacgaggaaaaccttaaacttgctgagtacgtttcaaaccttcagcgtgagaacgctaatgcagcggcttctcttgatgcagatgttattggcgcaggggtgggggataaggcgcgcgaaaggatgcgtgagcaactcagcattgaacgcgaatttctggagaagcgagaggatttgcaacgtcggtatcagagcggagatattcgtagccaagaggattatgaccgttataaccaggaactggacaaagcgcttgctgagcgactcgataaataccgttctcattatgaccaactggatgagttacagggaaactggctggcaggggctcagaatggtctggctaactgggtagacacttccagcgattattacactcaggtatcagatttagtcggtaacacccttgatggtctggtggataacatggctgatgccctcagtggtaataaagctgactgggcaagttgggcgaacagtgtgttgaatgagctgcagaaagtcttgctcagggcaattatggtcaacacgcttaaatctgctggtgatagcggttggtttggttcacttggtgggatgtttggtagttcagtggctggcgcagcatccgctggcggtgcaacaccgtccggagcttatacaggtgcggcatctcaattgaaattcgccaagggtggtgtaatggattcgcctgatcttagtcgtttccgtaatggcgtcgtgaacagtccgacgatgtttgctttcgccaaaggtgcggggctcatgggagaagctggtcctgaagctattatgccccttacgcgaactgctgacggtaacctcggtgttcgtatggtggatgacacggtttcttctgttggcggtggtggtgctcagctccagcaaactattcatcagcacttcaacatatccggtaacggagacgctgcactgaagcaggctatgcaggaagccgcccgtcaaggggccaatgacggcgctaaacaggcgcggcaagatatcttgcaggacttttccaatcgagggcaggcacgtcgtttgttaggcgtgtaa

SEQ ID NO: 390309 - DNA, 459 bp, Salmonella enterica
atgagaaacttaggatggttgttatcgttaggtggtgttgcgttaggcgtctttgcattactcatggatgtaagcgttcctgtcggagatggttcacgcgtcaacaacattggtctgatggctgagcggcagaattatttaattgttgcagcggttttgtttattggtggaatattgcttgcaaataaaacaaagagaaatatgcctagaaataattacaaagcctatgacctatcaaccataaacaaagatgatttcatcaagtgtgacggtagtattaatttagaggaagtccgcaatttttcaatcttcctgcttgaaaaacactctggtaaatcggtatcagaaattactttcatgaacatgcctcttattgagcgtattgcaggggaaatgccttcccctcttgggaaaaacttcaagagcgagcttgagcgaagtctaaaagcaaacatatga

SEQ ID NO: 390310 - DNA, 381 bp, Salmonella enterica
atgaaactgacactcgacacactgaaagaaacgggagcgtttaccggccgcccggttgaaaaagagattacctggaaatcacaggatggtaaggaacatacagcgacaacgtatatccgtccacttggctatcacactgccacatcagatgtgcttgctggtctgggccgtattgatggggttgctgggcgtatcgcagcgtcaatttgcgatgaaaatgggcatcaggtgtttacggttgccgatgttaccggcgaggccgatccagaccgtggcgcgctggatggtggcctgacggtggcgctgctgctggctattcaggaagttaacgatctgggaaagacggactcagcgcagaagacgaaatctggtgcgaactag

SEQ ID NO: 390311 - DNA, 492 bp, Salmonella enterica
atgtcagtagtgactcaaggcacacagttgtacgtgctcgcgaatggtgtcgtgagcgaaattgaatgcatcactgcattttcaccaggtggaagcccgtcagatcagattgatgacacctgcctgagcgaacgtaacacccgaaaatataaaaagggattgcgtacaccggggcaggcaacggccacgcttaacgcagatccaactaacgccagccacctgatgctcagcaacatggcagagtcaaacgaccagagcgacgtaacgtttgctatcggctggtctgatggagaatcagagccgacagcgggaactggtccgggtgctgtagatggcctggtgcttcctcccgatcgaacctggtacgtattcaagggatacgtttccgacttcccgttcgactttcagggaaacacggtcgtgcagacttctgccactatccagcgttccgggcagggtgcatggattccgaaagagcagtctggcagctga

SEQ ID NO: 390312 - DNA, 366 bp, Salmonella enterica
atgatagcgcctgtttttaaagtttgtgcagccagccaggaggttcgctccctgctgggagaatctcccgtaaggctgtaccccttcggcaagcattttgatgaagttgtctatccctatgcggtctggcagaacattgacggtgatccacaaaactacctgaagcagcgacctgatatagaccgcttttctgttcagattgacgtttacgccgacacagatactgaagtcatcacggttgcgcgggcgattcgcgatgcgatcgaaggcagcgcaataatcaccagatggggtacgcaggagctggagcccagtaccatgaagtaccgttattccttcgacgtcgactggctcgtcaaacgataa

SEQ ID NO: 390313 - DNA, 540 bp, Salmonella enterica
atggctgatggtgttgaagtaagtcttaccgggcttgattccctgcttgggaaaatggaggcagtatcagacgtcacccgtaacaaagcgggacgatttgcgcttcgtaaagccgcgaacctaatcagggaccgtgcccggagtaatgctgcccgggttgatgacccactgaccaaagaggccatctataaaaatatcgttgccagctttggcagtcgtgaattccggagaacgggtaacctgactttccgcgttggcgttatgggtggtgcgcgacagtatgcccagacaaaagccaacgtcagaaaggggcgagccggtggaacctacaaaacagcaggcgacaaagggaatcccggcggcgacacctggtactggcgaatgcttgaattcggaacagagcatgcagcagcacgacctatcatccgccccgcgatgaacagtatcgatggccctgtcattaacgtttttgcggaagaaatggaaaaagctatcgatcgtgcgatcaggcaggccgtgaaaaaggggaccaaagcatga

SEQ ID NO: 390314 - DNA, 333 bp, Salmonella enterica
atgcaggccgggaaactacgtcaccgggtaacaatccaggagccggtgatggttcagaacccagagactggagctgtaaataaaacctggcgggatttggctaccgtatgggcggaagtctccccgttgtcggctcgcgagtttattgccgcccaggcatcgcagggggaaatcaccacccgtatcacaattcgctttcgaccgggaattacccggatgaatcgcatcctgtttcgcggtgagatatataacatcgagggcgtgcttcctgatccgaaaagtggccgcgaatatctcacgcttccctgctcagaaggggtaaacgatggctga

SEQ ID NO: 390315 - DNA, 213 bp, Salmonella enterica
atgaacgagcaacaggtaaacgagctgttaacagtgctacgcgaacagacagaagcacagagggcgcagacggacgcgataaaccggctggctgagtcaaatatggcgttatgcgatgtcattatccagccactggctgaagatgatggggttgaaattacgtcactgaacgatttgaaacctcagtatctcagccagaaagtcagggggtag

SEQ ID NO: 390316 - DNA, 327 bp, Salmonella enterica
atgcttgagcttgttgtggtgaaacagcactgccgcattgataccgactttagcggcgatgatgatttgctgacgttgtattcgggcgcggcggcgagatatgtcgagacatggacgcggagaacgctgtacgaggcagaagacagtcccggttacagtgatgatccggattcaattctgcttaatgacgatgtgaaggcagccatgctactgcttatcggtcactggtatgcaaaccgggaatccgtggccatcgggcaaaccgttgcagaggtcccgcttgcagttgaagccctgcttcagccataccgaatttacggggtgtaa

SEQ ID NO: 390317 - DNA, 225 bp, Salmonella enterica
atgaaactgatcgcactcaaaccgatttatttcggcggtaccgtcgttactgaagggcttccgctggaaacgctggaacagcacggtcgcgagctcatcaaaaaaggttatgcgatgctcgatgaatcagaaaatcctgcagagcaggaacagcagcaggaacagcagcaggaacagcagcaggaacagccggaagtaaaagcagacaaaaaggcgaaaaagtga

SEQ ID NO: 390318 - DNA, 468 bp, Salmonella enterica
gtgagcaggatagtcgcaatcatcatcgctgcggttgtctgcatcattgtgtcgcttggttggtcagttaaccactaccgcagtaacgccatcacctacaaagaccagcgcgataaagccaaagagcaactcattctggcaaatgccaccatcaatgacatgcaaacccggcagcgagacgtagcggcacttgatgccaaatacacaaaggaacttgctgatgctaaggctcagaacgattctcttaagcacaagcttgataatggtggcagggtgctcgtcaaaggcaagtgtccattgccagccacagccgaaacctccagcgcctccggcatgggcaatgatgccaccgtcgaactctcttcaattgctggacgaaacgttctcagtatcagagatgggattatcagtgaccaatcagcgctaagaacattgcaggaatacatcagtacgcaatgcctgaaatga

SEQ ID NO: 390319 - DNA, 279 bp, Salmonella enterica
atggatgaatcaagaaaggctttcgagcaatgggcgctagaagttatgcagttcacgtctgatgaccttagatgggatgaaaggcgaaactgctatctggattatgtgctgcacatagcatggaagggatggcaggctggcaggaagacaatcgaaattgaaattccggcagcatgtgctgacgacgaatatttcattgatggagtctttcaaccaatgagatatgagcgcgatgttgagagagccatcatcgccgctggaatcaaagtgaaggagtga

SEQ ID NO: 390320 - DNA, 240 bp, Salmonella enterica
atgggaaaggtaacttttgttgtcgatttcaaggatggcgcagagcctgttgtatcagcggcaaccgagattctcggtgggcgtctttcggctgttctgtgggccgactaccgcgatgatttcttctgtccagaacaacgcgatgtagttattgaggccttgaatgaattggcttgtgatgaggtagaggaagactgccattcagaaatcatcaaaaaaatggaactcatgacactatga

SEQ ID NO: 390321 - DNA, 684 bp, Salmonella enterica
atgaccactattaccagattcaccaaagagcagttactcaagcggctggaagagcagatgtcgtcagcacgctatgcactgggctttgtgcaggatagtgaaatcctgcgagatattgaaatggatttgcgtcttgctgaaatcgcaagggcatcgcttaccgccgaaccgataggcgcattccacatttcagatcagcaggtggaaggaacctcggattatatcaaggatggtgagtggcccatcgataacggcgtcattgaggtctacaccgcaccgccagcgccggaaccgatgaaagaccatcaaattcgcgaactggtaaacgacctgcgcgatattgccgtggagtatcacggaacacagcaattgcgagaacgcatagctcgaaccgtccgctccgccatgcttcaggctggcaactctccggtaactccagatggtttggctttggtgcctaagaggctaaccgccgagaacggcgcaaagggtgtgctgtccggtgagttttcagaaacgaaatttataaactgcccagagtgttttggtgatgatgaatgcgaaacatgcgacggcagcggtcgaattgagataacagtgccagtcagttggacgaacatcaaggccatttgggctaaaggtgtcgagcatttcgaagcagcacctcagcaggagaatatataa

SEQ ID NO: 390322 - DNA, 273 bp, Salmonella enterica
atgaatactttgtttttacttatggctgagttcaacacgcctaacatcgagctgtcagctgtatgccaaaagtatttcggtatgagccctaacacagcagaagcgaaagcaaatgcctgtcagttacctatcccgacttatcgtgtaggaacatcacagaaagcgaagcgctgtatcaacattcaggatcttgctgagtatatagaccagcggcgtgaagaaggcagaattgaatgggaaagggttagaacgaacaaacagaaaaatagttga

SEQ ID NO: 390323 - DNA, 174 bp, Salmonella enterica
atgaaagatcaaaaagcaaccaagccacaggttaagttcgacacaatgaaagcattcgcaggtatgggtgctgctgttgaagttctgatgaaggctgctcctaacgcgttcactcacgctattgtctctggtaaagagcagcagggtaagcttcgtcgtcgcaaggcagcatga

SEQ ID NO: 390324 - DNA, 534 bp, Salmonella enterica
atgctcactttagacgagataggtcaatctgttcgtaacaacattcagttagttattgaccatgtggggttgcctctcgcagttggcccgatcagtgatgaggattacaagatcctctgtggtggttatggcgagcttgagtgggactatatgctcggtgcctatggtaattctgatgacaagtatgaattttgcatcaaacttgttcagcaaggagtagtgcaggggattccttcaggggcggcaatttgtgtttatggggttgaagataaaatctttcgcatccatattgttgaaaggttctcaagggaagatgaatcacacccactaaaagggcgcatggttttgctcacactaatgagtgcctttgttttttgtaaggctgtcgagtgtgaggttgttcaaattgttgaaccagttcctgagctgaagccgttttatgagtcgtttggtttttgcatggaaaagtgtggctacgtgatgtctacagccacagataatctacaagagacatttcttaaattcgcacaatag

SEQ ID NO: 390325 - DNA, 279 bp, Salmonella enterica
atgacaaaaaccgactggcatcccgctgacattattgccgcgctgcacaaacgtggcaccagcctggcggctgtctcacgggaagcggggttgtcctcttccacgctggcgaacgcgctgacaagaccgtggccgaaaggcgagttgttgatcgcccacgccatcggtgtggatgccgctgatatctggccggggcgctattacgacagcaatggcaggcggattgaccgcgaatctctgttgcgctgccattcacagcctgcaacagaaacagcctga

SEQ ID NO: 390326 - DNA, 228 bp, Salmonella enterica
atgtcatcaatttattctgaagagtatcagttggttataaaatcgctgcgagctgcaaggcttgataaagggatgacgcaggctcaactggcgaaagcattggggaaacctcagtcattcatcgcgaaggttgaaagcggtgaaagacgcctggatgttgtcgagtttgttcgtttctgccgtctgatgaatattgagcctgtaagtattctggataagctgcaatag

SEQ ID NO: 390327 - DNA, 966 bp, Salmonella enterica
atgcctttagatttaagtaacactttagtgattggcatcagcgcgactgcgctttttgatatgagtgaatccgatcgcatgtttcgcgaaacctttgcgaccgatcctgatagcgccattgaaaaataccgcgcctatatgctggagcacgaaaaccaacctttacagcccggaacaggctaccccttagtcaaagcgttgctgggtctgaaccagtaccgtcaaccggatgataaatcaccgttggttgaagtcgttgtgatgtcgcgtaacagccctgatacaggtatccgcgttctgaatactattcgccatgacaggctcgatatcacgcgctctgcctttacagcaggcgaaaccgttgctgattaccttgatgcctttgatgtggatctgtttttaacaactaacgttgaagatgcgcaaaaggtgattgattcccgattctgcgccgctgcaatcctgaaagatccaccttctgacgcatctgatatcccggaagggcaagtgcgcattgcttttgacggcgacgcggtacttttttccgatcaaagcgaactggtttataagacccaaggaatggctgcctttcatgctcaggaagacgcgcagcaggatatccctatggaagagggaccttatgccactttgctaaaaaaaatagccaagcttcaggaacgattgccgacccgcgttgagtattctcctgttcgtattgcattggtgacagccagaaatagcccttcggaaatgcgcgttattaaaacgctaagaagctggggggtatatgtcgatgaagctttttttcttggcggtgtagagaaaacaaaagttctgaaggcgtttaaaccgcatattttcttcgacgatcaggatgtacatttgatcgcagcggccaaggttgtaccttctggaaaagtcccttatgccagtaactccgaacttgcagaacgtgaagcatcgtaa

SEQ ID NO: 390328 - DNA, 3792 bp, Salmonella enterica
atgcagtttattactaatggtccagatattcccgattcattactacaagcacacgaagatgggaaagttgtattcttctgcggagcgggaatttcatatcctgctggactaccggggttcggcgatttagttgacaaaatatatcaaaaaatcggtgaaaaacggaatgctctcgaagaagcggcctataaagcttaccaatatgatacaacactagaacttcttgaaagaagaatagtaggaaataaacaaactgtacgccaggcattggctcagatattgaaaccaaagattcgaagagaaaatgctctaacaactcataatgctctcttacaattatctcaagatcaggcagggcgcatacgactggtcaccacaaattttgatcatctttttgatatagctgctaaaaatatgaagaagaaactaacatcatatttggcacctatgttacctgttcctaaaaatagtagatggaatggagtggtttacttgcacggaatattacctcatgataaaaaaaatcatacagagttgaaccgtctggtagttaccagtggtgatttcggatgtgcttatttaacagaaagatgggctgccagatttgtaagcgaactatttagaaactatgttgtttgttttataggatatagtattaatgatcctgtattacgctatatgatggatgctttagctgcggataggatgttaggcgaatatacccctcaagcgtatgccttcgcggattataaaacaaatgaagaatctacaacggctgatatttgggaagccaaaggggtcattcctgttttgtacaaaacgactaagaagcatgaattacttcatgaaacattaaaaatatggggagaaatatataacaatggaagtatgggtaaagaaagaattgtagcccaatatgtaattgcccatccttcgacaagtactcaagaggataattttgttggaagagttttatgggcattaagtgataattccggtaagcccgcaaaacgcctagcagaaatgaatcctgctcccacattgagttggttatgggaatttgaaaaaaaatcttatagatatccggatctacctcgctttaatacccctgcccattctgaatttgaccctaatcttcaatttagcctgattaatcgcccttcctcatacaaactttcaccgcgaatgagtttagcctcttttggtggcgaattttgtcagtgggattctgttatgggatatatttgtttatggctaataaaacatattggtaacgttgacttaatcatttggttagcaaaacaagggggaaaactacatccccagttatcaaatttaataagtaataggttgagtgagattgaacgattagaaagaaacaaggaggatcagtctctcacacgtatcaagcaacaaggactacatgcgatcccatctcagaatttacgagctatttggcgtttattcttagcaggaagaatagggaccaatacatttgcatatgaaaataattattggatagatcaatttcaacatggcaatttcaatatggcttgccggttagcgctaaggaaaattttagcacccacccttatcctgcaacaaccttttcaactcaattttaatagatcatcctcaaatgaagaaaatattgcacaatctgtcaggcatgaattaaatatatcaaccgatctctattggctacaggatttagaaaaaaaatccatatggaaggaaatattgccatccttgtttgatgatcttcaacaattacttcttgatgcgatggatttacaatttgaactcaatgataactccataagtgcaagtgatcgatctttttgggacttaccatcaattacgcctcattggcaaaacagaggttatcgtaattgggtgaaactaattgaactgttgagagactcttggttacaaatttatgaaatagataaaaacaaagctaaaaaacttgctttaaattggtggttatttccatatccagtatttaagcgcttagccattttttctgccagctataatgattgcattgatgctaaagaatgggtaaagctattactgacacaaaatggctattggttgtgggctatcgatactcaccgtgaagtttgccgactcttcgttttacaaggtaaaacactaactgcaattgatcaacgaaagcttgaaaatgcaataacactaggatattcacaggaattatttaagatttctattgatgagaatgaatgggaaaatatagtcgagagaaatatatggttgttcttatcaaaactacaagtttcaggtgtaaagctcaatataaatgcgcaggacaaattagatcttttatcagaaaaacatccttactggaaattaaccgaaaatgaaagagatgagttttcgcattggatgagtggatcaggagatcctgattttgaagaagaaataattacagaaatggtcccagatacaaaggacggcatcatcatctggttaagagaaagggctgataataagaaatcatctccgtttgaacgcgataactggaacgaaatatgtaaacaaaacttaccaattgttgcttgtgtgctacgcgaattagccatggaggatatttggccatgcaaatattggcgttcaggtttacaggcttggtgtgataaagacctgattcaggagtcctggcaagaaatagggctattattattaaatattccagatgatttattccctgaaattcagcacagcctcgctcaatggttagagaaaatttccacaggaatgagtgagttgaatgatgcttacactaaatattgtcagcgtattatagattttagttacgatgaaatagatgattataaatcaataatacaagctataaatcatcctgtagggaatattacacaagcattaataaatatatggctcaatggcaaacctcatgataatgagggcataccagataaatttaaagttttttttacaaagctatgtgatacccataatatctctttcagaaattccagagttattttagcctcaaatttgatcccattgttcagagttgacacaaattgggcgaaaaagcaccttttaccattatttatttgggatagtaattttcttgaagcaaaatctgtatggcctggtttcttatggacacctcgtctttatgctccattgcttgctgcatttaaacaagcttttttaaaaacagctgaacactatcaagatcttggagatactgatgctaaaaaacaatatactatctttttgacatatgctgcacttgaacctacaaaagactatgttcttgacgattatcaaaaagcatttagaaatcttccatcggagagcctggtaatctcaactaatactcttgtagatgcaattgaaagttcaggagaacaatattctgaatattgggataactgcataaaaatatttttaaagaaaatatggccaaaatctcaaaatttaagaacgccgggaatttcagagaatttagtgcaactctgcattgcgggccaagatagatttcaggatatatttgatactgtaaaaccgtggatcattccctttgaatggcctcattatacactcaaaaaattatacgagtcagggataccaaataaatttccatctcaaacattagaacttatgggtttgattatggataatcaacgaggatgtgctgaacaaatagaactctgtttggctgatattataaaagctaaggcaatattaattaacaacccccaatataagaggctggttgagtttaaaaaataa

SEQ ID NO: 390329 - DNA, 687 bp, Salmonella enterica
atgaaaaaaattgatatgcgaatactggtcctagctatactggcagtagtacctctattgccttatctttatatttttcatgaaggtttttcccataaatctgatgattggggtaattttgggtcttttatgggaggtgctgttgcacctttcctttctgtgctgagtatagtattggttttgagaacaattgagttaacacaaaaaaatcatgcagagcagttatcacaagtaaccaaagagcataactacaataaattcaatgacctgtgtggttttttggagaggtctatatcaaagagttggttagttaataatgatcaaagaaagcaagatgttattcagcgtttaacgagacgtattcttggagatattatttatcagtctaatgaaaatgctacgccggaagagcagcgtcaatacgcagaagaaaatgcagaaagaatattgccatttatatcagatgacatcagggaaataatagtctgcttagattatttttgtggctttatcttggatgataaaaaccaagatatagagtttatgaaaaacatcgcagaaataagactggataatcatgttcgattcattatctctctatatatttacctaaataataaaaaattaaatttgttattaattcagaaatggaagaattttaggccatctatagaagagttagtataa

SEQ ID NO: 390330 - DNA, 1173 bp, Salmonella enterica
gtgaactggccgatggtgaagcttaaggattgctgccaagttgtgggaggggctacacccaaacgtaatatcgcatcttactgggatggtgatattccttggataacgccaaaagacgtgtcaaatcttgatgagccatatatttacgaagcaccagaatatatatcttccgcagggtataaggctgctgcaacatatatgttgccagcgggaacagtgctactcacatcacgagcaccaataggaaatgtagctattgctggtattgagctttgcacaaatcaaggttttaaaagtctaattcctgggcgaaatgttcacaataaatatttatatcattgcattaagaggtttgtcccgcaattggaactattaggtaatggtgcaacttttaaagaagtatctaaatcagttgtagaaaattttgaaattccattacctccttttgaagaacagaaacgtatatcggatattctcgataaagtcgatggtatacgccagaaacgtgagcaagccatcaaaattgctgatgattttttacgtgctatctttctggatatatttggcgatcccgttaaaaacccgaagagatggggtgttacctctttattagaatatggttcatttaaaaatgggatgaatttctcgaagggtgaatctggaacggtgcttaaatgtctaggagtcggtgatttcaaatcactggcaacgattacctgtatgaaaaatattggtgaaattgaattaaatactcttccttccgatgattatcttttgaaagatggtgatatcgtctttgttcggtctaatggcaataaagccttggttggaagatgtcttactatttatccaggcaaagagaaagttacatttagtggattttgtatccgctacagaatagggaattctgcaatcgtcccagaatatcttaactttctattccgtacaccttcaatgaaacagcaaatgttgagtgggggccagggggcgaatattcagaatattagccagggtactttatctgcactcaagataccagtccctcctttagaaaaacaacaggcattttctaaaatagttagttttcactctgcactaatggaaaaactagatattaatacagttgaaacagaagatatgtttgactcaatcagtcaacaatattttaattaa

SEQ ID NO: 390331 - DNA, 6321 bp, Salmonella enterica
atgactacacgctatttttcttcgctgattgaacaatcactgtcgcgttctacggaggcgacgctgagtattatgggggtgaccaacccgaatcttcgcgagcatctcacgcaacaaatggcggccgattgcgggaaagaaggatcgtttcttgcctcacccgtatttgaacagacatttggctggaaagagtccaacagcacaatgaaagaccttgcaacaaaacaaacgttgctaagcaaggaggtggtggactcgctggatagtgaggaaaatggtcgttatcgttttggctctgactggaaacctttcacgcatcagttagccagctggcaatcattacttgagaaaaaacattcggtcgtggtgaccagcgggacaggctctggcaaaacggaatgctttatggttccggtgctggaagacctctatcgtgagcttcaggttaagaacaaaaaaccgttgataggtgtgagagcactttttctttacccactgaatgccctgattaattcccagcgcgagcgtttagatgcgtggacccggagttttggttccggaattcggtactgtctgtataacggtaacacggaagaattgcatgctttggtcaaaagtgagcaggcaaacaggcctaatgaggttttgtcacgagagaagatgcgtgaagagcccgctcccattttagtgaccaacggtaccatgctggaatacatgatggttcgtcaggttgatgcgccgattattcagaaatcaaaagcggaaaaatcattacgctggatagttctggatgaagcccatacctacgttggttctcaggccgctgagttggctctacagctccgtcgcgtcatgacggcatttggcgtcacgcctgatgatgttcgctttgtggcgacgtcggccaccatggccggaagtgatgctgaaaagcagctgaaaaaattcttgtctgagctgtcaggagtgccacaggaacgtattgatgttctggggggaagccgcgttattcctgagctcgaaccctgcaaacaatattctctgtcactggatgagattgagcatatccctgattcggagagtgaagggatcagcccggagcgttatagtgcgttgacccactctccggaagcgcgctgtttacgcgaaatgctggttagccaaccccgaccaatgaaacttgatacgctgacccagcgtttgaacgaactgaccaaacatcagtacacgcagcaggatgttttacgctggatcgatctttgctctggcacactccctaatgcaaaggatcctgcatttctgaaagtcagagcacatattttccagcgaaacacccagggcatctgggcctgtgtggataagaactgtgcagctaaaaaaaataccgcgctggaaaaaaactggtcttttggcaatgtgtatgtaaatcagcggcaaaactgcgagtgcggcagtcccgtttttgaactggcattctgcaatgagtgtaatgaaccgcatcttcttgcacgggataaaaaaggcaaactcgtacagtgggataataaaggtggagatgaattctccctgcaggatgaaatttctgacgattttgaaacatccggagaaaaggttcagaaggattttgtattccagtcgccacaaattattgctgcggaatgtaatacggaagctggctatattatgcagcggctcgatcgtcagacccgcagtatcggcgtggtgaacccggacagtattccgctggcaattaatgatatcgaacaaatctgtagtgccagcaattgtggctataaaggcggaaagggtaaacagcccttccgacgggcgttactgggcgggcctttttatgtcaccaatattgtgcctacggtgctggagtattgccaggacttcactagcgatgaaggtaaagatggcgtcggcccgctctctttgcctggtcgaggtcgtcgcctgattacctttaccgacagtcgtcaggggacggcgcgaatggcagtacgtatgcagcaggaagcagagcgcagccgattacgtggtagcgtagtagaaattcttggctggcaccaacgaaaacaaccaacgagtgctccgaacgaccaggctgacgtgatgaaactggttgcaagggtgacacaataccgtgaagaagcccgggagtatcgcgagtggggaatgcccgaggaagcaaaactttctgaagctcaggccgaacgccttgaacaggcaatccagacggcgacggggggaaaggctgcaaccattttagtttgccgaacctggacggaaatggtcaatgagctgaaagagaaagccgatatacagggaccaattttacaatataaccattatctaaagcctgaaattttcaccgaaaatggtggccctttgaaactcgccgaaatgctgcttttccgtgagtttatgcgacgcccgaaacgaaccaacagcctggaaacccaggggctggttcaggttggctatcaggggctggagaaggcgcacagtgttcctgctcactggcaggctaaaggcttaacccttgatgactggcgcgattttctgaaggtgacgctggatttctatgtcagagaaagtaactacatccaactggatgacgatctaagaaactggatcggtagccgtttctcttccaaatttgtccgcaacccggattcgaaagagccagatgacaaccaggttaaacgctggccgcaaattcgccacggtaatgtgactcagcgcctggtcaaactgttgattttaggagccaaatttaacaccgtaaatacggtaactattgatattgttaacgcctggctgaaagaagcctggctccagctaacaggatctctggcggtattgaagcctgatggaaaccgtttttatttaccgaaagagcatctaacattctctctggttcaaaaagcacgcatttgtccagtgaccaataaattactggcgacaaccttcaaaggtttgaccccctatttgcccatgcatatccagttcgagcgactgacgagtgcacagtacgacgcgtttttggctcaggaagtcacgctgccagcgatctgggaacacgatcgctctcaggatgattatgtcgacgggttaacaaaagtgcgtgactgggtaagcctggatccgcaagtgctatcattacgctcgcaaaacctctggacggacattaacgatcgcgtggtagaaggtggattttactaccgcaccgcagaacactcggcacagcaatcgtcggagcgcctgcaaagctacgaaagaatgtttaaaaacgggcagcttaacgtccttaactgctcaaccacaatggaaatgggtgtggatattggcggtatttctgcagtggtgatgaacaacgttcctccgcatccggccaactatttacagcgagccgggcgtgccgggcgtagtaaagagtcacgcgctatttcgtacaccttgtgcaaagggaacccgcacgatcagcaggtttttgctaatcccctctggccatttgagacggtgatcccggctccaatggtggcaatgaactcagagcgtctggtgcagcgtcacgtcaattccctgctgctgtcagaatatttatgccatgtggtcggggaaaccgaaaaagagcgtaccagccttaatagccagtggttctttggcgaagagctcgaccagtcggtatgcaatcgttttaaagcctggctcgaacgtccgacgctgagcattgataacgcgctggagcgtctggttaaagggactgcattgcacggcgttactgcagaaaaactgcgtgataaaacgcaggaggctattgccgtcttacagacacgctggctggggatcttccgcgatctcgtgaaacaggaaagtgaatcgcagcccaatacgccgtaccgcaggcgactggagctggagaaaaaacggcattgtggtgaatacctgttacgcgatctggcggcccgaactttcctgcccggatatggcttcccaacggatgttgtcacttttgataacttcaccatggaagattatatccgcgagaaaacgcacaaaggccgtgataagaacgaccgggaggataacgtttctcgttataaggggctgccttcgcgcaatctttccgttgcgatccgtgaatatgcgccgggtgcagagattatccttgatggtcgggtattccgctcggccggcgtttcgctgcactggcataaccttaacgccgatactaacgaagcccagcgtctggacagcgcctggcgttgccacaaatgcggtaccttaggttatgaggaaggtattggtggcccgggggatttattctgtaccaatagcgcgtgcggggagcggatcacgctggataaccgacgtcaggtattacagcccgccggttttgtcaccgatgcccatactcccgttacgaacaacattgaaacaatgaaattcatcccggtggtgcctgcctgggtatttgtgaaggcagaacgcgtgccactgccaaacccgctgatgggctttatggcttcaggcgcggatggccatgttttccagcagagcatgggcgaaggtgggcacggttatgcgctgtgcctgagctgcggccgggcggagtcaatgctcagtgctaccgatgcgccgaaatcgatggaagcgcattatcctccgcgccccggtaaatctgatcgcgacagccagaatcagcggattatctgccctggatccacagcactgaataagaatgtcacgctgggtgcgctggcccgcaccgatgtgtttgagctcattttgcgccgtccgcaaaacggggagtatatccccgataattctgatgaaggccgtattgtggctatgacgctggtggttgcgctacgtcgggcgctggccagcgtgctgggggtatcggcggcagaattgggctatgcggtgcgtccggtcaggctagagaatgagcaatcggtcctggcggtgcaactttacgacattatcagcggcggtgcggggtttgcttccagtgcgccattgcatattgaagcagtcctcaaagggatggtgaaacagctgggatgccgccactgtgataccgcctgtagcgaatgtctgctcgattcgcagacccgccacgatcacgatcagctggatcgtaaagccgcgcaggcctggctgggggaggatttcagtcactatatcggtttgccggaggcggaaaaattctccctggccgacgcgcagtattgcccaggcagcattgaggatgctatccgtcgtgccattaacgacggggcgcgcaaactcacgttgtggatgaatgggccgcttaacgagtgggatttgtatgcccgccagttccgagcggcgatccagaactatcggctgaaagatgaggttgaggttacgctggttgtgcccggtcatattgaagatccggagcttttacaggagattgcgcagtttgccgccattggtgtgcagctttgccagtctgagctgaatacggatacgccggttgtcgcacaggtagcattcaacgatcgcctgatgacgttgatttctcgcagcccagaggccaccatccccggcccgaactggcatctgaatagccagatggttattcgtagccatgcgtttgagccgataacgcttagtaaagctgagctattatccgatgccgcaggtaacagaggcctggtcaacgatattgagatccataagcagcttaatggcccggtttctcagtttggtcagcgtttctggggcgtgttaaccggggcacaggaagatattcagacgctgctgaaggaaaaccaggtgacgcgcattcactacagcgatcgttatctgcaaaacccggtggcgctggcgttattaggcgggctgttaaaaccgctgaaatcgatcctggcgcaggatgcgcaagtgacgattgatacgctgtttaagagtaaagagcggccaggcaacaagccgttccatgactggatgagtgaagcggattttcaggattttgccgaccagtggtttgcggcatctatgggcagagccgtcgtggttaacacctttggctcgccgcgtgatattccacaccatcgtaaactgatggtgaccttcagtaatggtcaggcgctgaagatccgttttgaccaagggatgggatactggcgcatcgtctttgcgcgagcgtatcgcgattttgattttaacgatgatgtggctttccagctcgggaatatggcaaaagcctgcgttgaaggtcaggtggtcaacagcgaggaaagttgggcaaccgatgtgctggtgcaggtgatagtcccttaa

SEQ ID NO: 390332 - DNA, 267 bp, Salmonella enterica
atgaccagtaaagattccaacgtcagcagcgttcctgaactgacagattttgaagtgagctattcacttctcacgaacgaggtctatctatccacctcatttacagataacatggactgtataccaaactggcccttacaagaatttccggatcaactaatatgcatctctcgagcaaaagctgttgccctaatcgaagaactccagaaggctatcaactatatggatgcaggaatagatcgaagttcaggtagtcttctccagtag

SEQ ID NO: 390333 - DNA, 648 bp, Salmonella enterica
atgggtgaatttagtaatcttttaaatagcatccctggatggttatcctcctccctcacggccctagttggcactcttattggcggatggtttaccctaaaaggagttacccaacaagctaagctttctaaagtagagacagaaagagaatcccttgaattgcagctttcggtattaaaaggagttaagggagaagttttcaccctaatcaatttatataacaaaaggatgaaaacacacgttgataatatcaaacccggacagatgttaattctcacgttccctgtaggggatgataatttcacattctatgagcaaaatgcgaatgttattgcaaaactaaatgattctgcaagagactcaataattaatatttacacatactcacgttcattaatacaatcatttaaaggaaacaacaagctcattgaggattatgaaaaaatccttattggtatggctgacaataacaatgataaaaccatgtataagagattacatgatgcaaaaatagatgtaatggtagattatgctcaagggataaaaaatattgatgcagaacttagagatgcagtcaataagggatttaacattattgaccaagaagtaaagtcactacaaatgaaattaaacaaattagcttcatag

SEQ ID NO: 390334 - DNA, 591 bp, Salmonella enterica
gtgcaaattggctatgtgcgggtgtcaacaaatgaccagaacaccgatttacagcgaaacgcgctgaattgcgcaggatgtgaactgatttttgaagacaaaataagcgggaccaaagcagaaagaccaggattaaaaaagttactcaggacgttatcagaaggggacacgctggttgtatggaagttagatcgcctgggtcgcagtatgcgtcatctggtcgttctggtagaggagctacgggagcgtggcattaatttccgcagtcttacggatagcatagatacttccacaccaatgggacgtttctttttccatatcatgggcgcactcgctgaaatggaacgagagctcattgtcgaacggacacgcgccgggctggcagcggcaagggagcaggggcgaattggtggcaggcgtccaaagctcaccccagagcaatgggcgcaggctgggcgcctgattagggcaggagtaccgcggcagcaggtagcgattatttatgatgtggggctgtcgacgctgtacagaaagtttcctgcaggagaaaatgaaaccgcagacataccgtatgcaacgtgctgcggctag

SEQ ID NO: 390335 - DNA, 366 bp, Salmonella enterica
atgactaaatcagttttcaaagtacgcctctcaaaatccgtaggggaagagttgatcccttatatcgaggagatcatccccgctgaagccagaaaaatgggtgtaagggcgcgggtaggtgattcagcgccttctgcatcctcacccgcatcagtgatactcggatacatttttgaatttatccaaaacaaagatgtttgttatagcgtcgctgctgttgtggccgcatggattagagcaaaacacagtaagaagataatcatcaaaaaaggcggctacaaaatcgaagcaagcaacctcaccgatgaagaactttttaaactattcagtgaggctaaagacgaaatcgaaatcaaaaaggaatga

SEQ ID NO: 390336 - DNA, 474 bp, Salmonella enterica
atgatgttcaactggaaaacgatgtttattggcctgttgctcgtctctctaattgttttcggtcggctggcaaatcactaccgcaataacgctatcacttacaagtaccagcgtaatactgctactcacaacctgaagctggcgaacgagacaattaccgacatgacgcagcgccagcgtgacgttgccgccctcgatgaaaaatacacgaaggaactcgccgatgcaaaagctgaaaatgatgctttgcgcgatgacgttgccgctggccgccgtcgcctgttcgtcaacgccacctgtcccgcaatgccgacaggtaaatccacctccgccgcccgcgtggataatgcagccagccccagactggcagactccgctcaacgggattatttcaccctcaaagagcgagtgacaacaatgcaaaagcaactggaaggggcgcaggactatatcaggacgcaatgcctgaagtga

SEQ ID NO: 390337 - DNA, 180 bp, Salmonella enterica
atgagtaatacagtgtgtagcaacgagagttgtaagaaggagttcatctactgggaacatagtggaggatttcccggcggaaaagagaaagaacctattgtctgtccttactgtggtcatataaacggttatgaaatgacaagtggtttgatttcaagcaagaaactagaagatcggtag

SEQ ID NO: 390338 - DNA, 294 bp, Salmonella enterica
atgaagaaaatcgatctcaccaaacaggcgcgcggtcgcatgtgtactgtgcgcattccaggtatctgtaattttgatccagaaaccagcgttcttgcccattatcgcatgagtgacacctgcgggatgggaatcaaaccacatgacatgcaaggcgcaattgcttgcaactgttgtcatgacgtaatcgatggccgtgtaaaaaccgatattgatcaggacactctgaggctatatcacgccgaaggtgttttccgtacccaacaaatctggagagaagaggcgtttatatga

SEQ ID NO: 390339 - DNA, 756 bp, Salmonella enterica
atgactaatgcagcaacaattcttgatatgtgctgcggttctcgaatgttctggttcgataagcaggacgaaagagcagttttcactgatatccgagcagaacagcacactctttgcgatgggcgacatctgataattagtccagacatgattgcagatttccgggcactcccgttcgcagatacttcattttctgtggtggtgttcgatccgccacatcttaagtacgttggtccagaaggttggcagggaaaaaaatatggaaagcttaaccaggatacctggcgtaatgatctgcgggatgggttttccgaagcatttcgcgttctgcggatacacggtgtgctgatctttaaatggaacgaaacgcaaataccagttcgtgagattttggcgttgacggatgagaaaccgattatcaggcagcgaaccggaaaaggtgacaaaacccactggataattttcacgaaagaaactggtaacgacccctgtaatatcaaaaatgtgctccttgacagtgcctatcgtagattgcatgaactggaaagtctgcttcttcctgatataccagaaacagtctggccagctgaggtcaatatgatttttgagcaaataaaaaatgttgagagcctgccaggaaatcaccaaaggcgattaaaacaccatatcaatcgtatgtggttagaaaaaatgccagtaccggcgattgttgccgcggcccgttcgttaatgagtgcgatggagaaatacgcgtga

SEQ ID NO: 390340 - DNA, 603 bp, Salmonella enterica
gtgaataaaaaatacacattaatttatgcagatccgccctgggcgtaccgggacaaagctgcagatggtgaccgtggagccgggttcaaatatcccgtgatgaatgttctcgacatctgccgcctgcctgtgtgggatcttgcagcgcaaagttgcctgttggctatgtggtgggttccaacgcagccgattgaagcactgaaggttgtcgaggcgtggggtttccgtctgatgacaatgaaaggctttacctggaataaatgtgggagccgccagacggataagctggtgatgggaatggggcatatgacacgtgcaaatagtgaagattgtctttttgcgattaaaggaaatcttcctgaacgcattgacgccgggatcgtccagtcatttaccgcgccgcgcctggagcattcgcaaaaacctgactttgtgcgtgaaaaattggtgcaattgcttggtgatgttccacgtattgaactgtttgctcgccagtcctctcatgggtttgacgtatggggaaatgagtgtgattcacctgatgtaatgctactgccaggaatagctgaatttatcaaggaacatggggagtgtgcggcatga

SEQ ID NO: 390341 - DNA, 1389 bp, Salmonella enterica
gtgagtcctcaggaactggaagcatgtgtactggctggtctgttgaatggcggcgcttcacctgatgcattcgatgtgatcgcctccaccccagaagaatcattcagcataggattttatcgccgtacattcagcgaaataaaaaaacaggcgctgactagtggcatgatcgacatgttatttattagcgaagcactgggtggttcgagtctggctaacttgtcggaaatatcccgtatccctgcaacagtaccaaacctcaaaggctacgcgaggaagatggttaaggcatggcgaagtcgtgcgctggcgaagctcctgcaggatggggccgatggcattcgtaacgcagtaaaccaggagcaacgcgatcagatagtcgaaaacgccgtagcacaactgctggatatgactgccgatagtggtgacgtccaaccagtacatatcaacgagctattgcccgcttacatggacacagtacagaaacgtatggatggtgatgagtccacgcgcaatttgctgactggtattgtggatcttgataacgcgacaggtggcattaacccgcaggatcttattgttgtggctggtcgtcctggtatgggtaaaacagaattcgctcttacggttgtggaaggcgtaacgtcaaaagggggcggagcgctcattttcagcatggagatggctgcggctcagattgtcgagcgttcgctggccggcgccggaaacctgtctgtttcacgtctgcgtaatcctctggatatgtacgatgaagactgggcacgattgactgccgccattggtgaacttacggaccgggatatctggattgtcgatgcaaccgatcttacggttgaacagattcgcgccattgctgaaacacacaaacggcgtcatccgcatctggcgatgattatggtcgactatctcggactgataaaaaaaccgaaggcggagcgtaatgatctcgctgtagcgcatatttcccgaaatcttaaaacgatggctatgcggctacacacgccaaccttcgcgctgagccagctttcccgtgcagtcgatgcacgtccggcggcacagcgccgcccggtaatgtcagacctgcgtgattcaggctctattgagcaggatgctgacagcattctgtttctgtacagagatgaagtttataaccccgaaagcccggcggctggtgtagctgaagtcattctgggcaaatgccggttcgctgctgctggtaccgtaatttaccaggaatttaaaaacggacactttctgccgatcgatcagcacgtcggcaaagagaagacccgcattcaactggaggcagcaaaacccagaaaaccgcaccgcaaatattcagagaagtacaacaccgatgcattttaa

SEQ ID NO: 390342 - DNA, 234 bp, Salmonella enterica
atggatctcaaaacctatctaaagacctctggcgttcgccagcaggatttcgctcaagtggtcggtgagacgcagggctatgtcagtcgtgttgcatctggaaaatgccttcttggtgctgcaactgcattgaaatgggccgcagcaactggctaccaagttacaccgcatgatctactccccaatatttatcgaaaaccaactgacggactgccggaacagaatgcagcttaa

SEQ ID NO: 390343 - DNA, 456 bp, Salmonella enterica
atgagaaagaaaacgcttgatgcagctgaagctgatgcagcccaaaggctgcgtgacatatggaacgagaaaaaagtatctttacgtcttactcaggaaaaggcggcggatgctctcggctttagtacccaagctacagtcagtcagtatttgaatggaagtattccgttaaacacagatgcgacattaaaattttcagctcttctcggtgtaaaacctgaagacattagacctgaccttgccgaattaatgaattatgtccggaaatcaggagcccacgttcaagattattcagctgctggctggcgactcctgaaaccagaggacgccgagttgatagcactttatgaaagacttcctcacagtgaaaaagaaaggcatctatctgaattaaaagaaaaagttagcgagtttgaccgcctttttgaagaacttctagccacaagaaaacagtaa

SEQ ID NO: 390344 - DNA, 324 bp, Salmonella enterica
atggaagcgcttgccatcccagtaaagctgtacatccattacaacgccaacacgtttgctcaggaaaaagtcatcgtatctacctgtgacatgtcacgcacctttccagatcaatacgtcctgctggagactcgcgatatatccatcgatgtaaaccagccagaacctttcgacattattgctcttcaggtcgaccagttgcgtggtcagaaagagaagatagcaacgctggcaaaacatcagatagcccaggttgacgacaaaatacagcaactgctgtgtattgatcactctcctgtccaggaaagcgatattccgttctga

SEQ ID NO: 390345 - DNA, 477 bp, Salmonella enterica
atgcttaagaatatcggttttatttcggctctggcgttatatggtgttgttggttgtgttacagccgaacctggcaacattccgttagatggccttaacactattagtttcaacgttggtgaaattgctgatggagagattgctgatttgagacactccacttgcactcttcgtctggccaataataagaaggaggattcctataactatattgaaggggcaatttgtcctgcgggtggggaagaatgtacttactctgccatcatgaaactgaatgggaatataacaatattgaaacagatatcgtcaggtgaaaatgactcagtatataaaaataaggatttttctatcttcataaaacagactccagtggcagagcaaaatgatgatgaaggaagcgacattaaagccactattgtcatcaaaacaaaaagcgatgaaaaaacacttaatatgacgggatactgtggggtttaa

SEQ ID NO: 390346 - DNA, 198 bp, Salmonella enterica
atgtggctggccggaaatgaaggccaaaagttctggctaagcgtgctgacggagctgaaaaagcggggtcttcaggacatcctgattgcctgtgtggacggtctgaagggcttcccggatgcgataaacagcgtcttcccgcaaacccatatccagccaggcattatccatatggtgcgtaacagcctgaatacgtag

SEQ ID NO: 390347 - DNA, 1080 bp, Salmonella enterica
atgaaacttaacaaacgaaacatagagttttgttgttcacttgatattggcatgaataccagagatcaaaagttaaaaatgcgagttgataagctatgtgttgtaagtcaattcgataaaaataccgaaatgaagattacatatgcaaaactgaaaaggatgagacacaaggaattcaaacaatatcgcgttcaatatatccttaacaaagttgggaaaccttatcgaaaagcgttattgatccgagggaagaagaaacactcacctgtactgttgcgaatagattattctccaataaatcgtaatacaggaggaatacgtctagatttccacccccagcatatgaagtccacaaaaatagatcatttgctatcgtggataaatagtcgattaggaggaatattctaccaactgctggcacaggcatggattacacaaattgatgtcgctcttgacgtctacaaatgcaaattggatgattatatatggggcttagaacgttcaggaaaaacagcatactttgataaggaaaatggtttaccgggactaaggataggaagttgccgctcgcttttacacatcctttgctatggaaaagttgatgttaacagcggtagaaaactggtatttaaggaaagagccaaattcattaacattaattttgatgagtatcagcaattcttgcgtattgaggctcggtacaggccaaacactaaacccacaaacaagaagggtaacgttttaatgctggcccacctttcagagatgagaaatcccttcgagcgactccgggtctactcgaaagatttgggggatgagttattggaaagagggcttctttgtaccttgccagacgctcccagcatcgctgaaatgaagcgctacatgctggcaactatgcaatacccacgcttgcctcgcaaagtcgaaagactcattgaagaacacgaaacagatctgttcaataaatacacagtctggacgcagtggtcacgctgcgttgctcaattaagcggcattttcagtatagcgtctgttttctgtgtacatagacgtgtacataatgaaaagaccgagtag

SEQ ID NO: 390348 - DNA, 603 bp, Salmonella enterica
atggcgttaaagcacataaaattgagcgaacttgatgatccttttgaatttaagactgatgatgaagtggaggatttcgaggacgaagaaaaggatggtggatctaagggtattgatgaatctttaaaagctcgacgtaaagccaatattgagtatcagaacacacgcaaaaagcagcttgaaaaaataggaagaaatcatattcaacttcggcttgatgatgaaagttttgaaaaattaagcgatttgtgtgaggtgctaggttataagagacctaagcctcaaatgcacaatcttgttgaaatgtattcggcaatttttaaatatttattaagaactagcgacgaaagttttggatattctccgactactagccgatcaattaaaacattaggtgtctataagtatgttgatcatcttagtaatgaaaaaaaatggtcaaaggaagctatcctcgcagaactaaaaaataaggaaaccaaaatttatatagacaaaattgggaaaaaacgtggcctatcaggtaacgaaaaatttcttgaacgattttttgataaaaataaaattcttaaactacttacagcaatggatgacgaggtctga

SEQ ID NO: 390349 - DNA, 378 bp, Salmonella enterica
atggctcagctatcttcagatagtgcagataaacaggtagggcagcgcattcagatgcgacgtaaagagctagggataacagctcagcacctggccgaacttgtcgatatctctcatcagcaactctcacgctatgaacgtggtacaaacaagatcaatgtggcacatcttgttaacatcgctattaaattgaatacaccaattagttggttttttattgactgcttttcgacattagacaatgaatctaagaaccagcaagattttgtgccagtcaaggatgccgatttaaaaaatcgttttgatcagatatggcctcgattaacccatgagcaaagacgtgtactgattatgctcttagatgaatatacgaaatga

SEQ ID NO: 390350 - DNA, 585 bp, Salmonella enterica
atgaaaaaacaaaaaatacttattattgaatcacgcagcgatcaggatatttatgatgagagatacgagggaaatacactaaggaaggttttggagttacaaggtgtagctgcaaaatgtactgaagtagttaatgaaggaatgctagtaaaagcattaaaaatagcgcaacgagaacacataaaatatgtacatataagtgctcacggttcatgtgatggttttatgttaacagacgaggattttattacatggagggattttgatcgtatagcgtggcctatattaagaggtaagtgtatttgcttttcaagctgttcagtcggaaggggcgctgaacaattatttgattttcataagtctttttgtaacgcaatcgttggacccgcaagagatattacttggggtgagggacttgttgcatattctgcattctatcaccgagcacaatcgtatgagaaatcatccttccaggatgttcgggtgatgaatcatatcgttggcgcgggaacgttcaggctcatagaatcaccatatatatcatctacctatacaattgatggttctctaaaatatgtttgctag

SEQ ID NO: 390351 - DNA, 321 bp, Salmonella enterica
atggtaaatatcataaacaaaaaatctttatttattctttcaatgatggcttgcagtacaagttatgctgcttcttttgaatgtaatacagtagcttcaggtgttgaaaaaatgatttgctcagatcataagttaagtcgtttggacgactatctatcccagaactataaaatagctatggggcctgatatgcctgaagaagcaaaatctaaaattagaaaatcgcaaatagattggcttaataagagaaatgcttgtactgatgctcaatgcattgaacggatgtattctaagcagatggattatctttggaacgggtga

SEQ ID NO: 390352 - DNA, 1239 bp, Salmonella enterica
atggaaaagcgtatttatataaataccattgctaatttatgtggggttttttggcagggagctataattcttttaatggctcctttttacctgaagttattagggaaagaacaatggggtatggtggctgcatgtttatccttacaagggatattattactgcttgatgcaggaatgtcacaagttatgccaagggactttgcacaaaaaaaacagaatattaaagagatatattcaaactatatagctttatattttttgattgcgctttgtgctgtgtttttcttgtatttttctgcagaggctattgctgaaaaatggtttagattggatgctttttctgcaaagcaacttgaactcgctataaaaatttttgcagggcagttttttttccagttttgcaataacgttaatttggcatattggaatgggaatgaagagcaagtaaaagcaaacttatcgcaatgtatattcatttctttgaaaaatattacagcagtaattttaattctaaacgttagccgacaaacatatatttatgtattatctttcttcctaattgctatgattgagtttatctgtaatttttcttttatcgtatcaaggataggagtgtgtaaaccgtcatggggaaaaatcaaaagaattattattactaactataaaatatccttagggattctgttaggcgttttttcttcacaattagatagaatatttatgtcaaggtttttaagcattcaaaactttggcttgtatgttatgactatgcaatttggacttgcgttattgcagttacagtatccaatggttaaagcaatattacctcatatcgcaaaaattggcgatacaactaagttgggattatataaaacaatagcttttttttgtgtcttaatgccatcttgcatattatttttttgggcaaaagacatactttggttatggagtcataatattgaagttgtagagtatggagttattattgtcaaaattttgagcgttgctgtgctgataaactttttttataactttattcacgttaagttaattgttgaaaatagaggtggggtgatatttatttcgcaacttttgattattattattaactctattttcctaatattgttttccccaaaaattcatgaggtggctggagcattatcatggatgattaattttagcatagtcttattatgtggtttgttttttctccataaaggaaaaaaagataattaa

SEQ ID NO: 390353 - DNA, 1167 bp, Salmonella enterica
atgagagaaataataatacctaaaaatgatgacttcagaactgtatttaatcctgttattttaataactgtttctgttgtgcttaataccatttttcaaataaaaacaagcgaagaggtatggaattcttttaatatatttaattttaatcctgataataatgttctaatcattaccttgttttttttctttttctttttaatcggtgcgttttcatcgtattgctttctttataataagataaatttcccccctagaaatgaatatattatttataactttaaaaaatatgatgtcttttttaaagttatcctcttgatgaatgttattacatttttaataacccaatatttcatggggaatgcaaatataataaacatctatatattaggaggggttaacgctcagcttatagagtcaaaaatagcttcctcaccactaggcatacatggtatctctttacttcttgggtatttcggaattctaatgtatggtatggcaagattattgaatgataaaaggccaatagtcttaattagtcttattattattattataaaatttattagttacgccaagctacaatcgttactttatgttttcttagggctaatgttatattctccgaaaaaaatatcttttacaaaaggaagttgtgttgcgatttttaccatcatacttttttcggttacgagaattattagaaatcctgatcaagatttatcgtttaactttgaatttatattaagatttattggtggtttttattttggttctcctatagtcaactttagttatattgtacaaaataatataagcgacattttttatttttttaattggtttttacctcaaaaaataatacctgcctcaactattagtttatattttcctgatagtacatctcctattggtcttgtaggaagttcctatgtatcattaggtttttttagtttcgtttatgctttttttattggttttatagcacagtatattttcctgaaaagaaatagaacacctttttcatatatattccagccgttcttggttatggcgtgtttattttcgatgatgtataataattttgtcaatatgaatttttttatacttccgttaatttttactgtttttttagttaaaagaattttacgtgctaaaaggatataa

SEQ ID NO: 390354 - DNA, 738 bp, Salmonella enterica
atgatatcagttattatgtgtgttaataggtttgatttatatgtaatgcctgcaattaatagcatattgaatcagacttttagaaactatgaattaattattattgctaatggtaaggatgcaagtgaaatagctactactttgaaagaaaagataaatagtaatcaacaagttaaaataattgaaacatgtatcgggcaactaggtttctctctaaatcttgcaatatcgcgatcaaagtatgatattatagcaagaatggattcggatgatatatctcatcctgagcgtttagagaaacaaataacatatcttgaaaagaataatctcgatttagttggtacggcaatcaatttaattgacgagaatgatactttcttaggtcttagatcctatcctcaaaaaaatgcgatcttcaaaaagataatttttaaaaacccctttgctcatccttcggtaatgtttagaaaagattttttcctgaaacatagaggttatagtggagggtttaattctgaagattatgatctttggttaaggatgcgggattcaattccacgttgggataatatggatgagcctttattaaattatcgcatacattcaaactcgacccaaaaatcgaaacttgcatattatgaatgtgcgagttattcgttacgagaattcttaaagaacagaaaaatgattaattttattgcctgcatttatcatttctctaaagccctaataaaataa

SEQ ID NO: 390355 - DNA, 897 bp, Salmonella enterica
gtgtatagctgtctttctggtggtttaggtaaccaaatgtttcaatatgcagctgcttatattcttaagcaatatttccagagcactacattagtgttggatgacagttattattattctcaaccgaaaagggatactgtacgatctttagaactgaaccagtttaacataagctatgatagattcagttttgcggatgaaaaagaaaaaattaagttgcttagaaaatttaaaagaaatccatttcctaagcaaatatcagaaattttatccatagctctctttgggaaatatgctctctctgatagagctttttacacttttgaaacaataaaaaatattgataaagcatgtttattttcattttatcaggatgcagatctactcaataagcataaacagttaattttacctttgtttgaactacgggatgatcttctagatatctgtaaaaacttagagctatattccttgattcagagaagcaataatacaactgcgttacacattcgccgtggagattatgtaacaaatcagcatgcggctaaatatcatggtgtgctggatataagttattacaaccatgctatggaatatgtagagcgtgagcgaggtaaacaaaattttattatcttctctgatgatgttcgatgggcacagaaagcctttttggagaatgataattgttatgtgataaataatagtgactatgattttagcgccatagatatgtatcttatgtctttatgtaaaaacaatattatagcaaatagtacctacagttggtggggagcttggctgaataagtatgaagataaattggttatttcacctaagcaatggtttttgggaaataacgaaacatctttaagaaatgcgagttggataacgctttaa

SEQ ID NO: 390356 - DNA, 3792 bp, Salmonella enterica
atggaacgtaaaggggcgggtttatcaggggcaggatcgcatgccggacggggatttcgctaccaagatgcagttggagtatggctgtcactccgctgttggaatcaggaacttcactatggcaccgttattcctgaggggcgagatgattacgaattacagggttccagcggctctgctttagtacaagttaagtctcgtcgtgatcacatggggttattcccgattagtgaagttgttggttttgtgcgggcgctctggagccggtacgaattatctccggaccctggcaaagatctgaatctaatccttgagcgccctgttatacaggggccaaaaacagattatatcctcactgaacataccggtttagctgaagttctgcgggaagactctcgctggaaattacttgcaccccgtactcatatctggattgctgctgaacctgcggaaaaagcaattgaaactatcagccatacactttcttgtgcaccggtggctgcacaagtttactacggtgaattgttaaaccacattggtggtttggctgatgcgaatgggatggttaagaatggaatatacgaaggattggctatatccgatgttgaagcggttattcgtcgtatggagcctgtccttgatgttgcgggtatggagatggcccttcgtgaagggtactgcgatgctattgattttctgactacggtagacgagcctgcattttatcagggagttgatacccgaccggcccatcttgcggcgggccttgtcgtggaaagacctgaagtgcgcagtgcggttttgactatgctggctgcccaaagagcagctctgatcgtcgggcagtcgggcaccggaaaatcagcactcatgtgggaaacagcccgcgtcagccgacatacagtacgctggtttgaaattattcgtggtgacagccttgacgctcatttacttatccgttttgcccgttcactaagagcgtcatctacagcgcccgttggttttatttttgatgatgtgggtaaagggaaagcgggtctttgggatggcctgctgcgtgaggcaagagccggaagcggcattcttctgctcggttcaatcagagaagaagacgtttttatgctaactacccggtctttcgccggagagatccgcccaaccgtggaagaagttgtcgccgaacggatttggcaacagctttctcatcagggacaaaccacatgggctggctggcgagagccatgggcgcaaagtaatgggcttttgcttgagtacacgcatatcctcacccgtggtgaacggcttgaaatagttcttggagaacagatagattgtcgccttcgggaggcaagggatgccgaactgactattcttcgcattaccgcactggcgggtgctgcgggagcaatggttgatattgaccggttatctgatgttttagacctctctcagagcgatctttcccgagcgctacggcggctcattgatgaacatctcatttccgaatccctaaatgggaagttgggagggctgcatcagctacgttctgcgactattttcagtctcagccataagtatccgccgccagcaattttgcacaccatcgaagaagcagtatttgctgttcacaacatgaatctggatatgcttgcggcttatgtcatcacccattatccggaagcaaaagctgctttgattaaagcgattgtgaccagaattgagcgtgagcgcgatcctgctgcattagtgactgtgctttcaggactgggacaggcgcatattgagatgactttacgggactggatcccggaggtgaaagcgttgggggtagaaccgacacttattacaggtattgttatgttcgccgtcgctgatacagatctttcctctgatatttttcctgaacgaatgagaaattcagcgcgcatattacaaacccgatcaacatccgatcccagattgactttattaaccctgctttcaccaacgataattgagcagataatttctacctctacgatatcaaatcttctgggaattctggggggactgttgggaatagaggtcccggcgaatattcgacagatgatggttaatgcaagaccctgctttgatgcgttggaccttatggctatagcagacttactgagtgtggcccgacttgtcgatcccgcgatttcgatggcgtgggcatgtagcaatattccagagcgattaattgcacgtattccacttgagatcccctgggctggaccagtcagtgttgaagtggtgccagaaggccggctgctgcgtagctcgatcttccatgttgcacattctgtccagacagacgttcataaagacgttgtacaactttgcacactcctgcttggattggatccaacagctgctgtggttgctgtagatgctgttgctgccggtgggtttctctcaggtactccggattatccccttgcatctaagcgaattccaagagaaaacctgccaccatcagcattacccgaatggaataaacggtggatagtgaccgccgccgggctggtgggaacagaaagctatacggattatttacagcgtgcactcgtactgttaaataaactcgttccgttagtcgagaagattctggatggaaccttacggtgcaaggctccttcatctaaagttctggaacagctgggggccatacatgaggcctcgcgggaacttaccccacccaaaggaggggagttgattggtataaatatagaactgcatgccactcctgttcagaacatattattctattgttcgacagatatgatccggcgatttatatctttacctgaaggatatggtgcatacatcgcgtggctgaaagatctgctgaaagacatagagaagggcaaagattatccttgggatctcgtgggtggttatccggaaaaaaccttcacgcgattaaaggagttgatcgcgtcactgcgtcttctgtcagcagaagcgggtacccaaggaataaaaccgacgcagctatggttagctgaggctaaaacggctgtacgtggaggggcattgagcagcgccgtcagagtagtaatgcgtcagttcaataagttagcctctggctatctgacagagatagaggacagactgaaaaatagaggaattgaaacagaactccatgctcgccctgactgggaggaacttttgccgtggccaacgtcagaagttctggcgatcgttgatcttgagtatcctgaagactggccgaaatggcttgaggaaaatggagcacatattcagactgtaattggtgaacatcgccgtctatggattattcctcgtattgcagggattgtagtatcccgccttaccgtcagcgcgatatttagtttttttgcatccccgtatgcagttgatgactggcttgatgaattaaatttgcatcggcttaacgatacactgactcaggctgcgcagcctgccttggcgcttatcagtgagcttgacggattacgctattttaatcttggaacagaaaatcgccctcatctggaacagtctgtgcgtaaagaggatgaaaaagccctgattaccgccctgacggaatttgaacaaatagcagaaggtacaccggttcaaatgttaccccgacaattaaatgaagagtgcatagcaggacgagcggctatagctgagggggagattgccctgttatatggtcaagtgacggcaggaggcgaggctttaatgatacttcaatttactttactgactcaggatctggtgactgccttaactcaagcgtaa

SEQ ID NO: 390357 - DNA, 3312 bp, Salmonella enterica
atgagtcacgacatcacttcttgttccagcatgcgaatctgcatggggcaacccattgagaatagatctgaatatgaatgtcttttggctgtacatgaagtactaatggcgttaaatgaatggtcttatatttttgtcaactttcacgttgaaggccgtcagattgaccttgcagtatttacggctactacaatacttgttattgaagctaaaggatattcgctgcctgtaacgggggaaatcaatggaccatggttgcagcatggtccatttggtggtaagaggattagaaatgcgtacaatcaagctttagatggaaagtatgcactgcgtaatgccatccagaaagtaactaatatcgattcttatccaaatgcatcagtaattatagctccgaatatccccaaaggctcaagacttactattggcgactttaaagttcatattggtggtttagagcttgttccaacgattttacagcaagcgtctggtgcgaacttaacatttgttcagtgcgagaaattagctgagcaattaggactggaatttatcttaaataaagatgcagtgctaaatcgtactgtgttagatgcagatagaatgtatgacatttacactcaatcttttcttgaattttatgaatcctacacgaaaaagattattaatgataagtataattattcaggagaagatatttctctcaaggatgttaataatttagttacgaaggatgattcaggtctaattattctggggccttccggttgtggtaaaacgttgctcactttatcttgcgcagtttcttgtattaaagctggatattttccaatggtggttgcagccaaagattttagtaataacttccagaacttccttgataaagagatgactcttttacatatgaattctgcaattagcattatcaattcagcaaaaattctgggtaaacggattattttatttttggacggttataatgagtgctcagaagcggttaaaataagattaactcgatctctcaaggcgttttctttacggtatgatgcgggaattgtcatgagtagccaatgtgaacctgagcgtgctgatcttttaaatcttcaaaaagttattattggacaaccatcagaagaactcaaagttgctatcctgaaagctgaaaatatagatagtacgaatgaaaatattctccgattgctcaacgttatccattcgggtcttgaggcttatttaattggtaaggttgctcacttagtacctgatggagcaagtagatttgttctttttgatatgtttgcaagagagaaattaaagagatatacctctgaaggtatccgtatattaagtatttttgcgagtgttttaataagtaaggctcgttttagtctttctgttcgcgaatttgaccgcctatgcgattctcaaaggttgagttcagatgtacagaatgaattatataactcaggcttattaaaaagacgtggagataagattagttttgaacatgaactatttttttcttcatttattgctgaagcggtaatgagagaggctaatggtgagattgaaaatattataagactattatcatctcccagatattcattatcgaaagtttttatacttggtgcaatagaggataaccgcctacttaatgaggtgctggagtgcgttaaggataaggagttaataactgcctgtgctcgaggagagtgtggttcagtagctcaaaccatagttaatgaaaaagtgtataatttattaagcatgatggtggaggaaactaaggggctcgtttttgagatccatcataatggatggcacggagttaaagtagataaattatcactttctcctgcattggagcactttgatttatatattgatgcaattagtagtggtttagtgtctggtaattattttgattatgttatgtcagcatgtcaatatatagatgaagcaattgctattttttgtgaaaaaaatatgattaagaagggagatatttcattacatcatattgtttttagcgaagtctatgtgatgaaccgtaactcggcattttctaaacttattagctttattgttagtggagggatcttatttcactataagacatctggaaactttgatcaggctctttatcaggcatggcgcgattcttatactttcgggcaatactatttcctacttgctatatcgaagttcaatatagataccaataagataatttcaataataatatccttaattgaagattctgaaatatatccttatcatctgcaactcgaattattttatttttgtaagtattgtcgtgatgtgggtgaaccttatcataattggttaattgatgtacttgaaagatctcttgaaaaacacagccctacaatgaatgctataatagtagaggctattcgagacataggaggattagataaagaagaagataattatttaggtataattaaagcggaattagaacatgtattgagttctgatggtgtagagtcagataaattggcttggttaatatattctaatcaatttgatcatccatttgaatcatcttattggcaggagataaatgatttagatacctccaaacaaaagcttttatttatgaaagcttgtcgtggggctaatgtatcttattcattctttttaggaacgttaatcaacagactggctgattttaacgatcccagcgtttgttctgtaataataccttggacatcattacccggagaggatgtattctcaccacaagtagcaatagaagtgtttgttaatgctcatgaagtgctggggcgtcttggtatacctattcctgcatatcgaggaaagcccgtaacttcaactgatgatgtattgcttgcatgtggagaattgtactattggataaatcgtagtgatgtagaaaatccacaagaatcatcgcatactctcactgctcggcagatattaatgaaacacgctcgatgttcaagtattggagtattacaacttactacttcacaatttctttcaagcaatggaactcgtaaatcacttattgatttttatccgctgatttctcttagagtagccagagagatgattatagcaaaagaagaacaaatattctatttccagcatggatttagagataatataaggagtgtcacaatattttctattcaaattataggcagactcggtgatgagacagatcttctattattaaataatctatgcgatgatgaaaaattcggaacctttgcatttgatgcaataagaaaaatagaatctaggttaatttcatctttctga

SEQ ID NO: 390358 - DNA, 195 bp, Salmonella enterica
atgaaaaatagattaaagcgtgattttagtcacatatcaattgaaatacccaaatctatcacccaggtgattaaagagaaaataagggagatgattatccatggcgatttcgatcttgggcaagcgatcagtgaaaatgaactatcaaatattctgatggtaagtaaaacaccaattcgtgaagcttttatttag

SEQ ID NO: 390359 - DNA, 1002 bp, Salmonella enterica; identical to SEQ ID NO: 81319

SEQ ID NO: 390360 - DNA, 1644 bp, Salmonella enterica; identical to SEQ ID NO: 81320

SEQ ID NO: 390361 - DNA, 648 bp, Salmonella enterica; identical to SEQ ID NO: 81327

SEQ ID NO: 390362 - DNA, 276 bp, Salmonella enterica; identical to SEQ ID NO: 81329

SEQ ID NO: 390363 - DNA, 522 bp, Salmonella enterica
atggaaaataatcctgaagagacaccttttagttggggaaggctgattttagctttcatcatttttatttatttgatgacctactcttttctttcgataaaatatttattcctatcgtggtcaggcgatttttcttttttaggaaggatattgcattttaataatacctttactgtgaatgaggaaataaaacttgcgatttttactacatttggtgctattttaggtggtgcaacattaggtattacttcattgcacaaatatgctgctgtaaataaaaagttagatatagatcatttatggggctatttgatggctccaattctttctgtaattatagggatattgatattttgcctcctttatagtgggttgataattcttacaggtggttctaatcctgatacagaaaacaatagtgtaaagattggttatttatgtatgggagcaatttgttcttataactgggatgtgtttattaaaaagctccaacagttatctaaacatgtatctgaaggataa

SEQ ID NO: 390364 - DNA, 1323 bp, Salmonella enterica
atggaattattcgctagtgatccaagatttggtaaactaagaataataaatgtttacctcgagtttgatggtccaaaaatcttctatgccgaaaatgaaagcggctcaactttttttgtatactgggttggtgacgaagaagctttcgaaaactggtatgtaattccgtgttcaaaatctaaaataatagcttttgaaaagaaacaattaaatttaaaaacaatactcgagcaacaggaacaagagtatttttacgatgttaaattgccattctcttcaagtgaagagttaattgttgattttaaacatagaaataaaatagcagagatagaactccctaaggaaaatgtatttgtaaaaaacataaaaatttacgcgcctagtattcttgaaaacgatctcattccaacacatgagttaattgtatctaaaacaaacaagaaatctaagaaaaatgttttattagaacatatgagccttgtgtgtgatagatttagtgagctggtttttggctttaataaatctcatgatattgttagtagtttacaaccgttgaatgctagatatggttcttttgctatttctctccacgcagaaaacttaacgaaattcgaagagtttttggcaaaagtatcagaactaatgatacataaaaaagatatcacttccttcttagaggaatgggatatagatattaaagtttttctgaatttattaaaagcaatagaaaattcaagtattgattttgaactgcgctcttcagcagaaccagaaaaaatcataaaaatatacaagatagatgcagagatatatttatctcgccttaaaaaaagagcacttacatatatctcatctatcaaagttccacaaggaaatgatatagagaaggtattcaagcttattgatttaaaatggaataatgaaccagtaaatgctgtgtcattgaatgtggaaccaagactagttgcttactatagacaatctgctcatatacttggatttgttgaatataatggtgagctaacccctcaggggcaaagaattgctctttcagataataatacaaaatataggattactgctaatgcctttgaagccagtgagtgtgtatgggcatggataaatcattttgatttaactaatatagccgagatagatcctaatactgcaaaggattttctgactgaacgctgtccgactttgtctggtcaaacgattagccgtagagcaaacactctatcatcatggtggaaacagctcataccacattatttagatgttaaagctgtcaatgatgagaaacatcaaaaaaacggagtttaa

SEQ ID NO: 390365 - DNA, 426 bp, Salmonella enterica
atgttaaaaaaacaagaagctaagaacgataaaaaagatggttggcccgacttttatccatctgatcttgagttaccaccgaaggatgctgtcgatgcggctggaaccttatacagactggttaaatcattacctccgacagaagagtgtttttggtcaacccatcaagaacagccgaataggcatgaaaaatgtaataccttagaaaaaaagcaggcggtttatggtacgagtatgtgggctagtaaagacctcttactggaggcgatggaatcgctaccggaagccttgaaacaacgcaagttggcctgcggcgtagtcaacgctagtatggggaaaatgcgtaaaacccttgaagaaggtcatattacattgtggctaaaaaaaagtagccacattcatataaattttagcgaggctaaataa

SEQ ID NO: 390366 - DNA, 1215 bp, Salmonella enterica
gtgagcattttgctggtcgctctgatgggggggctgtatttgtgcttcccagaaaattactcagtacccttttggcgtttgcgttatcgttttgcgggcaaacagcgatcgctggtcataggcacgtacaccgagctgtcactcgctaaagcacgagcaaaagctaaagaacagtcagcacgggttgcattgggttatgacgttgcgggggaaaagcaagaacgcaaagctgaagcgctgaggaagatggaggatgaaaagcacgcgctacgtgtttcagaacttgcagctgaatactttgaacgccagattctcaatcggtggaagcatccagacattctacgtcgtcgcatagataaggatattaatccggcaatcggtcgcctcagaattgaagaggttaaagccagggatattgatgacatgctgcaaaaaatagttcagcgtggtgcacctacagtcgctaacgatgtgctcagatggactcgtcgtatcttcgattacgggataagacggcacatgctagaaacgaatcctactagtgcttttgaaattgatgatgcaggtgggcaggaaaaaagcagggaacgctggctaagccgagaagagcttgcgcgattcttacaggcaatgccgatgacaaaaggtttctcacgtcagaacgaactaacaatgaaacttctgctggtgttctgctgccgcaagatggagctttgcggtgctcgttgggaagagttcgattttaatgaagcagtttggcgcttgcccgcagagcgggtaaagaatggcgatgcgattgatatacctatcccggcagtagctcttgaatggctgaaggaactgcatcaaatgtcctgcaatagccagtgggtgttgccagcaagaaagatgcagcaccggatgattcctcacattcaggaaagtacactccccgtagcattgagcaaggtgaagggtaacctccccgacgtacctaattttactattcatgattttcgacgtaccgcgcgatcgcacctggctgcattagggattgatccagtagttgcagaacgctgcctgaaccacagaatcaaaggtgttgaggggatatacaaccgttatcagtatttcgatgagaggaagcaggcgttggagctgtgggctgacttgctggtttctttagaaagaggtgaaggctataacgtgatgccgttgagaaaggggattgcatga

SEQ ID NO: 390367 - DNA, 381 bp, Salmonella enterica
atggggctggttaacattacattaagtgaaaaagggacgttgatggcgacgctcccggccaatgttgagggggatattcccgccattggttttatctcccatgtggatacctctccggatttcagcggtaaaaacgttaacccgcagattgtcgagaattatcgcggcggcgatatagcattagggattggcgatgaggtgttgtcacccgtgatgttcccggtactgcatcaattactgggacagacgctgattactaccgatggtaagacattgctgggcgcggacgataaagccggtgttgcggagatcatgaccgcgctggcggtgctgaaaggtaatcctattccccacggcgacattaaagtggcgaagaggtag

SEQ ID NO: 390368 - DNA, 1017 bp, Salmonella enterica
atgatattagtcactggtggagctggttatataggatcgcatacttgtttagcgcttattgccaaagggcacgacattattgttattgataatttaagtaattcctcttatgagtcgattaggcgtgttgagaatttaaccaataaaaaaataaaatttataaaaagtgatataaaagaacgacattgcctggatgaagtgtttaataattattcgatagaagcagtaatacattttgcagcattaaaatcagtaagtgagtctgttgaaaaaccattggtttattatgataataatatcacaggtaccttgactctactggctgcaatgcaaagtgcaaatgtaaataatttgatttttagttcgtctgctaccgtatatggttgttcttcgattgttccaaataaagagaacgatacaattggggggactacaaatccctatggaacatcaaaatattttagtgagattattctgcaggatttttgtaagtctaatgagttattttccgcagtaagtcttcgttattttaatcctactggtgctcataaatcaggtatgattggggaagatcctaatggaataccaaataacctcattccatatatatcacaagttgccactggaaaacttaaatatttaaatgtatatggtggtgattatgacacaattgatggcactggcatgcgagattatatacatgtagatgatttagctgaaggacatgtcaagacattagaatacatgttatcaacaaaagtaggttatgatgtttttaatttggggtcaggtcgagcatatagtgttttgcaaatcattaaagcttttgagctcgtcactaaaaaagagattccctataatattgtcgcacgaagaaatggtgatttagacaaatcttgggctgatactgaaaaagccagaaacctcctggggtgggaggcaaaatatggaatagaggatatgttgcaagatgtttggaactggcaatcacacaatccaaatggttatagagtttaa

SEQ ID NO: 390369 - DNA, 1113 bp, Salmonella enterica
atgattggtactacggtgcaatctttattaggattcagatatgaattacttaaagatttagttagcgcaggacatgaagtatatgcgttatctgttgattatgattacaaatcgaagcagacattgattgatatcggtgtcgtaccgatagattatacaataagtcgctcaggaattaatcccttcaaggattttgttaattttatttttttatataagctaataaaaaaaataacaccagacatcgttttttcttattttactaagccttgtatttggggatcgcttgccgcatattatgctggtgttcataagattatcgcgatgcttgaagggttaggttttttatttaccgaacaaccatctgggattccccaaaagacaaaaatcctaaaaagaatacagattctgctctatagaatagcttttaagaaaattaatacacttattgtacttaatgaagatgataggaatgatttacttaacgctggttgtatagaagatagaaaagtatatgtattggggggtattggaataaatttagagcattacaagtattcaccagcaccacttgaaccaatttcttttattttcattggccgattgctcagagaaaaggggatttatgaatttatcgctgctgctaaaaatataaaagaaagatttgaaggggtgacgtttaatgtgctgggtaatattgatccagcaaaccctggtagtctaaaacaaaatgaacttgatacaattattaaagaagaaataattaactatgtaggatatgtgaatgatgtttctcattggttaagtaagagcagtgttttcgttttaccttcttatagagaaggatttcctcgaagtacacaggaggctatggctataggaagagctgtaataactaccgatgttcctggatgtagagatactgttgttaataattctaatggttttttaatacaacggtggtctagcgatgctcttgcagaggcgatggaaaaatttattttatctaaagaattgattcgcgactgtggtaaagaaagtgccaggatagctaaagaaaaatttgacacccgaattaccaataagaaaataattactatattattgtcttaa

SEQ ID NO: 390370 - DNA, 360 bp, Salmonella enterica
atggtattttttgcgcacctcgcggaagtaggcggcgatgttttccagtttcaggatatccagcccggtgtcgtgttgcgttccggcgagcgtggcgaccagcgcctcggtggccgggtggccgtaggtggcgctcatggaggaaatcgccgtgtccacgccgtcaacacccgcctcgatagccttcagcagggccatctccgccatcccggtggtggcgtgacagtgcaggtgcaggcgcacctcaaaacgttttttgatttcgctgaccagctcatacgccgccatcggtgtaagaatgccggacatatccttgatggcaatcgagtcaacgccggtttccagcagttgctccgttaa

SEQ ID NO: 390371 - DNA, 345 bp, Salmonella enterica
atgagccacaatctcatctggcgggctgttgcttatacagccgatcacgaagaaatccatgttttcgttgaggctccggactgcgaaacggcacagcagcgttgttatgggcgtctggctgaagaatggtgcgtcgtgacgggatttatcgatatctacaacttgtggaatgaaacagaattgcgtgacatggtcatgggatctcaggagcccacaggactgcccctgctcgaatcaggtgatgggaacggcgaagtcttttatgaccgaaatcctctggttcttgtggcttcaccccgtctgagtgacgtgctggaaagcgcactgcgggaggtaagggtatga

SEQ ID NO: 390372 - DNA, 264 bp, Salmonella enterica
atgagtacgatgaaagtcagtgccattctgaaactatgttcgcaacagctggtttcagagagtgataatcctgcgatctgcgtcggatgtagctgttctgacaacaacgcctgcgtaaatgaatttcgtgaggcgtgctgctggctgaaagtgaaccgccagacaggactgggcgtatgctcattctgccccgagttcctgagtcatccgttaaatgatgtaggcaactccggtaatccgttaaagaccggaggtgaggtatga

SEQ ID NO: 390373 - DNA, 1800 bp, Salmonella enterica
atggctaaagctccgcttctgaatctgggagatgcactgttgcagggcgcaaaagagcctgcttcagcgccagctgtaccgatcatgccgaccagtgaaatgcctatggtattgacactggatgaggtggcaccgaatccggataacccgcgcaccacgcgtaaccctaaatacgatgaaatcaaggagtccatccgagcccgtggtctggatacggtaccgaaggtgacaaaaaacccggatatccccggttctccttatatcttcagcgatggtggtaacacccgctatgccattctgcgtgagctgtttgctgaaacacaggatgaacgcttttatcgcttccctgcactgttcaagccctggcctggcaggcttgagtgtctggtagggcatctggccgagaacgacgttcgcggggatttaacgtttatcgacaaggcactggggatcaaaaaggcacgcgccattcatgaggaaacactgggacgaacagtcacgctgcgtgaactgtcagacttgttgaggcggcagggatatcctattcattactcgcttatcagccgtatggagcatacggtggaatacctttatccgtatatcccacagcttctggcgtcaggtttggggtatccgcagataatacagttactgtcactgcgtacttgtactgaaaaagtctggaagcaatacagtgcagagatagtcactgataccggtgtgaataatgtctttggtgatgtttgccagcagtttgatgctccagacttgtactcatttgagatgttccgggatgagctgattggtagtcttattaaagcattaccacacccctccctgaactatgaacgctggcttattgagttggatcccaaagtgcagaaccaacgtttgctttttggcgagccagagcccgtggctcctcatctggtggatgcagaccgccaggcatggcagaacgcttctgcatcattgtcgggtgctgaaaacaatgataatcaacagagcaactccttctcagattcgacgctgatagcgacttcaaataacggcgctgtcttacctcaacaacctgattcagataatgatgatgacggaaccgggggatggtttggagcttctgaatcaccgcgcccgcctaaaactgaagtccagagcgatttcctcgggggcccctctgttttatccggtgatattatccccggagaatccccattcattcctgatgccggaaatatcgcggtcatggcgtcatcctttgcctgcgctcaggcgttgttaacggcggatacagcttctgatgatgataatcatgccgccggtgatatgtctggtattccccttttacccgctgagccctccctggcctcagtcgcgtttgccaatgtcggactggagccggtgaatgacatctgggcgatttcggcccttcaggatgatatcgaccatctgcaggatatggcctatcggcttgttttcgaacttgcagaagcgatgggctgtgagatggacgtcagcgaagataaaagtgccggcgccgccgggttcgtcgtatcggagcacggtggagaattagccctttttctggcagggctttccggtcgtttgcccaatcggcagttcaacatgttcatgttttgcctgaatttttttggttcgcaatctgcgggagatacacctgtatttaatgatgtgcatgtggttaagaccctgcgtcttatccgggttattcgccgcctgcgcgaactgcagagagacatgccagcagaacaaaaggatgggggtatgtatgagcattga

SEQ ID NO: 390374 - DNA, 201 bp, Salmonella enterica
atgagcattgataccgatgatgcgatggctcaaatcgaatcacaaatacacatcgacagccggattgctgaaatcagggcagccctccgggcgcagggaaatacctcatgcaaacattgcagggactgcggtgatgagatacctgatgcacgtggtgagtcaatccccggcgtaagtctgtgcacactctgtcaggaatag

SEQ ID NO: 390375 - DNA, 261 bp, Salmonella enterica
atgacaaagagcctgaaaaaaccccgggcacattaccagtggatgggggcggcggtagtgacaacgcagttgctaagcagtggtgttgcggttattcctgcgggaagtcgtggcgtgattgaaggcgcaaagcgcgggttgtcagtgatatttgatgcctgtccgtgctgcggcgttcagctccggttgacccgtattcgcccagagatgcttgatattgtggcatatcctgatgtggaggtgccccatgtcggcgagtga

SEQ ID NO: 390376 - DNA, 723 bp, Salmonella enterica
atgtcggcgagtgaaaaagtgctttcacgcatcaaaaagctgatggctctggcggataacaccggcaatcctcatgaagcggcggtggcgctgcggcaggctcaggcgttgatgatgaaatactgtgtggccccggaggccgttgtactagcagagataatgagtgaaacctgcaggaatatccccagtaatgtgctttcggtaccgggctggctgaatgcgctggtcactgtggtctgcatgactgcgggttgtcgcagctattacggctggtatcagcacagtgacaagaagaagcgccgcagcgtgacgttctatggcgttggtgaacgcccggctgtcgcgtgctacctctttggcgtggtatgccggcaactcaagcgtgacgcggaacattacctgcatacagcttgtacacacccgttgctgaagttgtccaccatccgacgccgtatggatgaataccggttgtactgggtggcggacgtgtggtcggttcttgagtcagtcgagcctgagtcatcagagaaagcgatactcgaccagtggttatcccggcagcagcgtagtctgactcccgctaaagtccggcaaccggaaggatgccgcaatgccggtaaagtcaggcaagcggtatggaccgcaggcagtcaggctgagatttttccggcaatgacggtgaacaacaatgaagtgcagctcagtgaggtaagtaatggataa

SEQ ID NO: 390377 - DNA, 573 bp, Salmonella enterica
atgagctattcattatcgcaggccgccaatacgttgttatttaacctggttatggagctgaaaagcggaaatatccggcgttgcgaggctttagggctggaaccggaagaaatgcggatgttgcgtgaattatcttctgatgatctgctgtacctgtctgaaagtaaggtcagcgtactggatgtgcgtatccatcatgagaacctgagcctgatgttgacgcaggcgcgtcgggaacagaaacgactggaacgtattgaccgggcactggtactgggggcttcaatcgaaatgatgcagacctatttcggacttgaagcttcggaggtcagtgcccgcaggcgtctggaggggatccagacccgtaaaggccgcagcagttctcctgaagaagataaagaatccgcgttatggcaacagtggcgtgatgcgggaatgataagtcccgacagcgctgaaagtctggatgtcatgatgctgatggctgaggaacaaaacgtgaatctgacgtcggtatgggctcaggtcaaggtctggagccgtaaaaatgctgccggaacggaggtggcctga

SEQ ID NO: 390378 - DNA, 207 bp, Salmonella enterica
atggactcgttaacacccacatttcagttttaccgaaccgacccacgccatgttagtaagtctataacgttaaaggcacgttcacttctcactctgtatcaacagggaaaacgggtttacagccagattggtcaggcgggttatctcaagattgatttgagcatgcgctggcgtctgctgagtatttatgtctcaccagacttatga

SEQ ID NO: 390379 - DNA, 1287 bp, Salmonella enterica
atggcaccagtaaaccggagtacgctgccggccgacagcatcattgactatacgcttgccagaatgcaggagcgtctggcaatgcgtaatgatgcgcagtcaggtcaggagcgcagcggtctgctctttatggggaatgtgcacgatgcctatccacgggcactgcttctcgacacacgtctgtcaccactggataaggtcgcatggatgatgatacgccagtacgccctgcagaatgaaggggcgattttcccttcttatgatgaactgcaacagctgctggcatccccgggggctggacttgcttcccgggggacggtgagtcgcgcactgacgatgttgcgtctgaccggctggctgagcctttgtaaaaaagtgagagatggtaaagggcgcgtgcgggggaatatttatgctcaacacgatgaacccttgagtgcgcgtgatgcggaaacctttgacccggggtggctggatatggtggctgatgcctgccggcacaaaagccgggccgtgaatgaaactgcatggcaggtcctgacatccattcaggacgacccgatgatgcggcatcgacattcccgggtgacgatgatagccgagcgtctgacgcgtctgtccgatgccgcgcagttcgcccgaatacagtcaggtacaaaaatcgaactcagtgaaaaggacgctgaaaatcaggctgaaataccgagttcgaatatcgaactcagccattgtggggatgagaaaacactgagttcgaaaagagaactcagtggagaatcaagggattgcagcagggttcgaaaatcgcatcatattaacgtacgttctttcacacagagtgtgattaaaaaaacgtacgtatctccgcaggccgtcaaaaaacctttacccggggtacccgatgattttgtgtggcctgacggcctgcaggacatcctgcctgaaaatgagcagccgatgctggctcagcaactgtaccagctggcacagaaatcaccatctgtggctgagcaggttgtcataagcgtggtgaatggctggcgccagaagcgcatcagcaacccggtgggctacctgctggccaccctcaaacaagccagagagggtaagtatcacgtggagctcgctgcgcctcagcaaatccctgccagacctgtcgtacaggccgaattatctcctgaggttaaaatccctgcatgtccgatcgaacctcacatcccagcaggtcaggagaccgtaaaggcgatggtagcccggattcgtcagcggctgaactgttctgcataa

SEQ ID NO: 390380 - DNA, 840 bp, Salmonella enterica
atgaaagagaatactgagaaaggcacctctgatgaaacagaaaaaaagtcggagttaagaagtggcgcattgcgctcctcgcttgcagtcgaactacatacgcggtatgccatcctgttatgggaagggcagcactcggagaaaaaggaaaaagatggccgaaacgtttctcatcgccgcattatgggaatgccctactttctgcatctggtgaaccgcattaatgaagattcccttaaggacgatccttttgcagatgagaagatgtaccttctcgagcaggaatttaaccggggcaccgggaggctggagagattagtcactgaactggacaacatactgaaaaatgtccctgcccgtatatcactgtctgaagctttatctgtttctcccgtaaacatctctgtttttagccgcacacccgtaggataccggtgtgtctggttactggttgggtttgaccagctggcgttaaaagcctttcaggcatcacattatggtctgatttctcatgcccggcgtgatgactatctgcgtcgcggggctcagtcaattcaccgttcatatggcctggtactgggataccgttcgtccgggatcacccgtcgcgatattcttcagaacagttctgcgctgacggaacaaatggcttctctggacgaagatattttactgggcaaaaaacgctcttcattttcacctccggtcagtaaagagagtatcgctcttctccagtccgccaaaaatgcctggccagaaagcatatctgcacctgatgagccttcagaaagccggttacaggttgatccacaaaccggctctgattctctgacccgttga

SEQ ID NO: 390381 - DNA, 207 bp, Salmonella enterica
atgctcttaagtcgaaaaaaggcaccgtggggtcaggtaacccggcacatatttcacacggtttttgtaccttataagcccatcctgttcagggagatgtcttactgggttgccgccagcatcactaatgcacaagcgatacaggccctgcaacgacaggagtgcggcaccttcaagtaccgcagttaccatacgaaaaatgcgtaa

SEQ ID NO: 390382 - DNA, 360 bp, Salmonella enterica
gtgcagttcgcgaagcttctgatccacaaaactccccggttcaagcttcagcgtatcgagacgaacctgcgcacgaatatctgcgggaagatgcactgccaggaaatccctcgcagtgtccggctcacgcagaaaaagcttaaacaggccatcgtgcccgggccggttatggcccttttcgttatccattccgtatccttctcatgttcagaacataatgccttccactggaaggcattacttagcgacagtcctcaggacagggcatacagtgcatgtcttgacacactgtgcccgaacggcgcgaacggtatgtcatcgtcaaagtccattggcggctcactggccggatgctgttga

SEQ ID NO: 390383 - DNA, 1218 bp, Salmonella enterica
atgaacacacgagcgcttttctgcctgagtctgccgctggtgattgccgggtgtgcgcagcagacctccatctcaaccgcccgcgacagtgcgtttgcacaaagccagcgaccgcccgccttctctgatatttaccagctctcgccggaggtcacccgtagtggtcgctacacgctggtcagcgttaaaagcgcggatgcacagcgggaacccctgaaccagctgatcgatgtcacgatgcccgggcaactggttaactcggtcggcgacgggtttcgttatctgttatttcagtccggctattcgttgtgcggtcgttatggcaccgattttgctgagttgctgaagcggccgttgccagccgttcagcgtaatatcggcccgatgcgcctgagtgaagcccttcaggttgttgccggacctgcctggcgtatgtccgtggatgaagtgaatcgtgaagtctgtttcgtgctacgcgatacgtacctgacgcaggcgaaaacgccggtatcgacaaccccggtcgcaacagtctcaggcactcccggcgtctatgcctctgttgagacctcccgcaatccttatatcggcgttctgcccggcaagagagctgtgcctgtggtggccggtcagttgctggcatcgaaaaaagaaaccgggcaggaaccggtcagccagtccctgccggtacccgcactacagccacctgccacttccgtgaaatcagttggggagcctgtgtctgctccacgtaatcctttcacgggtgaaaacctgacagataccactatgccggtgccgtcatctccatctccggtagtgccgcaaccccgtgttgacacgccggctccttctgccgttgcaacagtaaaaccgcccacagggtcggtagcagtggctaaaccgttaacaggcacgccggtgacggtggtgaccagtggtcctgaatggaaggcggttgccggcagcacgctcaaagagtcactgactgactgggcaggtaaagctgactgttcgagtgggggacactgggtggttatctggcagaccagcaccgactaccgcatcgatgcgccgctggtattcaaaggcaattttgaatcggcactggttcaggtgtttgacctgtacaaaaaagccgacaagccgctgtttgctgaggcctcccgcctgcagtgcctggtctcggtgacggataaaccggcggacaggtcgtaa

SEQ ID NO: 390384 - DNA, 438 bp, Salmonella enterica
atgggctggcttattgtcgccttcggcacggtatttctgctcatcgtcggacatatccagaacagtcagcgggttgaggccgtgaaactccagcagtcggggagcagtcacctgctggcccgacaggtgttgtcgctggccgcaggcattaacgactggcgctaccgacatccgctgatggacggcacggtcgcattgtcagcactggacctgccggtcacgcccgacaaccgtatccggcatgtcatcgtggcggacaggctgtgggtctggatgcctgaagttccgggtctggtgaatgcactgcgtgaacagtctggtggatcggccttaattggcacggtgacacaggggcaactggtctggttatccggtgtgagcgcaggagtgcctttaccggccggtattcagaacggggatgtggtctacctcaattag

SEQ ID NO: 390385 - DNA, 1272 bp, Salmonella enterica
atggcggagatcccattatccgggaagtcccgtacgcaggttctgcactggcagcggcagtgctgggtggtgggacttcgctgggaagaaaaacaaaagttggtacgccgtcccctcgtgcagcgtcgcggtgtgctgaacgtgatgctgacggtgaagcagggtaagagcctgctgaccgcgcaggggcaaattgaggcgggttcgcgtcaccagaagctgtattccctggcggcgctgttcagtcagctgtgtacgcccaatggctatggggtgtaccagctggacgacggcaggcaggtctttctggccacggtgaaggggatgccatcgccgatggcggacgtgaccggcacgccggagcaaattatccgggcacaggaattatttctgtcattcaatcccgctcccgaggacggatggacaataccgtcatatccggaggggcctctgtcatgggggacgctggtcggccaggtctcttcaccacagctccggtttgcccgcgtggcgggcgtgtcaaatcttctgcggaaatacggggcgggcgtactgtcacttgctgctctgctgggcggagtggtctggtggaatagattacctgaaccgccggccgcacctgtcgtgcaggcgttaccggcacaggtacaggacgtttttaaaaaagcccccgaaccggtttatcttccccatccctgggcagatatgcctgtggccacagactttttaaaccgctgtcaacgctggcggttcagggtgcctgtgagtcttgaccggtggcgccttgagcgtgttcgttgcagcgctgagggtctgcaaaccgtgtaccagcgacaacccggtgggacggcgtcgcgctttgctgaacgggtgaagcagatttttaaccgtacaccggtattcaacctggtgtcaggtggaaacgaaggcgtggtgtttattccatgggcgaaattcacattacaggatgaggctgcgccggatgcgggaacacaactgatgcaggcggtgtcgtggtttcagtcccgccaggtcagtttttcgttttccgaagtgaaaccacctcccgcaatgcccggcgacggcaatgatacaccaccgatacaggactggcatgaatacacctttagtatcacggataaacacatgccggagtggattttacagggactggctgtgcagggcgtacgcctgagttctgtggcttacaacctgagtccacagggacagtttacttatcagattgaggggcatctttatgccaaagaataa

SEQ ID NO: 390386 - DNA, 591 bp, Salmonella enterica
atgccaaagaataatgttttcatctgcggcgcagtcctgatggcgctcagcaccggcgcgttcgcccggcccacgctggcgatcactccgtccgcagatgtttctgccacgtctgccaacgaagctgcgacggccgccgtacagtcggtgtcgaccgcagactcctcagaggttgtcccgattaaccccggggagggtgtgacgggcggtcagctggaagtgctacaggctaaaaccctgcttctggaggcgcaggttcaggcggcccggctgcagaaagagctgacgacggctgaaacggcggaggctgcgggtaatgtcccggtggccggttcgtttgctgcgggcatgctggctgatttgggggcgactcccgttcaggcggttccggctgctacccgagggcagggacggatcacagttctggaggtgagcggccgtggaaacgcgctgcaggccacgctgtcatttccggatggccaccaaagccaggtacagacgggcagtgtggtgccgggaacatcgctgaaggtgaaggcgataacaccgtcatccgtcacgctcagcgacggccagcaactgacgttttag

SEQ ID NO: 390387 - DNA, 1716 bp, Salmonella enterica
atgcctgaacacaacgatgcggttctgctttaccacaatccggatgcgtcagccagtgagttactggtcgacagcgagcgccggactgattcggtgatacagcaacgcgttatgcaactgatggaagaaaatcccggcgcgtcaatgcgcatggtttcccgttcggagctgctccggtgccgcgatgtggtcagtcggcaggctgcgaagggcgggcagggcctgcgtttacaggatattaaaagagatgtcagtcgccgtcagggcgatgtgctgaactactttatggttgctaaagatatcggggcgtctgatatccactgtaccacccttccggggctgacccgcattgagatgcgggttcacggcgagctggagaccatctcggagctggccgaagaggacggaaatgcacaggcggccaccatcatcctttccatgtgtgatgtgaccgaaccccagttctacgtcggccgaaaacaggatggccgtgtggcggcaaagtttctgcgaatggtggggttatttggtgcccgctacagtcatacccccacggcagatggtcttcactttgtgatgcgcgttattccggatgacggggatgtggttcccacgcttgaaaaactcggttttctgcccgaacaaatccgcctgataaagcgcattctgcgcctgccggaagggctgattattttgtccggcccgactggggccgggaaatccaccactctgcgcgcctgcagtgaactgtacctggaacgcacgcgttataaaaaacgtctgctgacggtggaagatccgcccgaggggcgcatcaggggggcgatacagaccccgatactttgcgacaaggccgatgaggccgaagtccggcgggcctgggaacgtgcgctgtcgtcggcgttgcgtcttgatcccgacgctatcttgcccggtgagctgcgtgatttgatatcgatactggcgggtatttttgccgcccagacggggcatctggtgttgactactctgcatgccaactcggccttctctatccccgagcgcatgataaccatgggggctaatgccggactggttgccgacgcgcaactgcttatcgggcttatcagccagcgtctggttcaggtgctgtgcccggcctgccgtgttccgtggtcggtcaaaaaagaccagctcaccaccgaggaacgagaatatctcgagaaatactgcacggtagagggggtatgccggcctgagcatcttcatttcagaaacgaggaaggatgcccgtcctgtcgaaaggccgtcacgattaacggcaggcaggtggcgacagttggcaaaggtgtgaagggacgcagtgtggtggctgaagtggtacgtcctgacaccatgctgttccgtctgcttattcaggaagggaaagaagctgcgaaagcgtactggctcagtgagctgggaggcattacccggcgcactcacctgctccataaactgaacgaggggctggttgacccactggatgcggatttgatcgttcctcttgatgaggatgaggtgacgctgtcggtgagtgacccggttacgtcgtcgactgatattgatacggtgctgattgagcgccttgccacggtgattgcagccagcgtcagggaggggctgaaacagggtgttgaagatgccattaaagctggtattaccgccggaatggctgcgctgaaggaggttgcatga

SEQ ID NO: 390388 - DNA, 1083 bp, Salmonella enterica
atgagtctgttttacatgtttcgtcgcgcactggcgcgccgctttttcacagccggataccgtctgcggttttatcgcattctggcgctgcagatgaaaaacaaagtgcttctgtcagaagcactggagcaaatcagcaatatgtacaccgattttggtcgccggacacacggttttggctatctggtggacgactgccgtgcggcaatcagtgacaacagcgatgagaactccctcgaacatgccctggcgaactgggtcccggccgaagaggcagcgcttatcagcgcgggtatgttcagcggaggcctgccggaagcgctggggcaggcggagacactgattgattgccgctggcgtattcgccatgcggtcctcaggatggccatttacccgtttggctgcgcgctgatgttgctcggcaccctgatggtcataaaaacagagttaatcccgactctggccggaatgtcagatccgcagtcctggtcgggggcgctgggcatgctgaatgacgcgctgctttttttttctgagcatggccttatcgccggcgctgtagtcattctgattgtgagctggttgatttggtcgttagctcactggacgagtccggaccggcttcgccgactggcagacaaacgactgccctggtcggtctatagcgacattcagggggcgatatttctcatcaatatgggggcgctgctgcgcgcgggggtgaaaacgctggtcgcgctgcaggtgatgcaccgttttgcttcaccctggcttgccgtccgtctggacgcggtgatgagtgaggtggaggaaggtgacagcttcggtgtggcattgcgcaattgtggctatgccttcccctcaaaagaggccgtgaactatctctcgatggtcagcggagaaggtgctgcggagatgattgcgcaatatggccaggaatggctggaagagacagtaggacgggttaaccgacgagggatagcggtgatgctgttctcgatggtgatgttgtttacgctgattggcgtggtggcgatggcggtatgggagctgtctgcgatgaccagcagcatgggtcagtag

SEQ ID NO: 390389 - DNA, 594 bp, Salmonella enterica
atgaatgtgttatcagcaggtaaagtgagttgtacgccggatcgtggtatgtcggcggacgcaggggccacggcaatttttattctggtggttgtgggattgattgcggcaggcgtctggagtatgtgggggaaaaaggatgcagggtctgagctgacgaattatcagaatctggccaccaataccatcggacagatgaaaggcgtggatggctatgccttcagcagcggggcaaaaatgaccgggatcctcatccagaacggggcggcaaaggggatgacgattaatggcgacccggcttcaggcacggcaacgctggcaaatacatggggtgggcctgtggtggtggccccggattcggtagggggaaccggatttaataatggcttcactatcacgaccagcaaggttccgcagtcggcctgtgtgactatttcaaccggcatgagtcgttcgggtggtacctctggtatcaaaattaatggtaacaaccataccgacgccagggtgacggcggaaaccgccggcagcgaatgtacagcagacaacggacgtacgggtaccaacacgctggtattcacgtttaacggctga

SEQ ID NO: 390390 - DNA, 660 bp, Salmonella enterica
atgacggtctcgcttatcggtacctttttccctccggtgtatgccatacccgcgtttatcgggtgtgtcattctgggggcggtatttttaaggccggtacgcctttacctggccatagcagaggtggatatctcacgccactgtgccgtcgtggccggtgtctggctgtttgcggtaacgggtttgctgatactcatggcgcctcaggactggatgacccgtatcgagatgctactgatgtgcggttttttgctgcaactgggggtaatggatgcggccagcggctggctgccccgaccgtttacagcagcctgcctgtgtagcggattattgttctgtctcgcctttcatcaggagcctgaacttcgcgtgatggaaactgcggcgatggcggtggtaatgggggcaatctgtctcagtgttaaccgtcgacacccgcaactgggcgtgggcgatgtctggctgctctgtgccctggtggcctggatcggggtaacggatgccctacaggcggcgtttatggggctgagcggttttatgttgtggcagtggacagtccatcgtgactgtcagcgatgtggcgtgctgggcccctggctgtgtgccgggtgtattccggtcattgtagagcggctgtaccagccagagtggatactgtga

SEQ ID NO: 390391 - DNA, 540 bp, Salmonella enterica
atgccatttgatgtaatcggaaatgatgttccattcggtacatcaaatgaaaaactgccagatttctgccattcagaattgccgtcgattgagtgcaccactgtttgccctcccacactggcagtcaatgagaacgtattgacacgtttgccccagtgtcaatccggtatctggagcagtctggaaggataccccatcggcagccccatcccatggccttctgtaataccacctcccggatattttttaatggcaggacaacgttttccgtgtggctcctatcccggacttgctcgcgcataccctgggtgtgtattacctgatctccggggtacttttattcgtggatgggataatggacgtggatttgataacggtagaacgattctgagctaccagaccgaccagagcgatatgatttataatcaaggagggtatcttcatggtcatcacagagggtttgcccattattaccatacggacagacgtgaagtgagacccaaaaatatcgcttttaactatatcgtaaaggcaggatag

SEQ ID NO: 390392 - DNA, 468 bp, Salmonella enterica
gtggaatttacggtgtttgtcctggcctgtctggcgttgtactgcccgtgctttacgttaattgcgctgctaacacccaggaaaggatttgcggtgttcagtgtgaggcaccggcaacgtcattaccgggctgttcatcttgctttactggaccgggtgggaaccatgaaccgccgccggacccggctttatcacttggcatttgtcagggtactggaggaagccctgacagcgcggccggtactccccgttttttttcgttcacacctgcttcggcccgctcaggtggagcttgcctgtcagactctttcccgtaggccaggatatcgctgtcggatcgtacctgtgatactgcctcgatgggagcgtgttgccattgtcgtgcagatgttgttgcaggagtggcggtttgttcagttacctcctgttcaggcagtcatggtggtcattcacaggttgccgaaataa

SEQ ID NO: 390393 - DNA, 921 bp, Salmonella enterica
atgacgaccacgacggcatctgcatcttctgtcgatattcagtcagatgacgatttacctttatccgcccaccttaccgagccagaatcttctagccttcctgcaaaggatgcttcactgaagggggcaactacgtctgccgaatcagccgtacagctactgggcgggaaggggagccgtaccagacagccttcttcagtccgtcgctctctcctgcaaaaagtgacttccgttctggtgttttgcgtactactgggctcagtcctttttctctggtttaccgtgcgccagcagcagattcagctgactacgttggatgaagcatttcgtagtggacaactgcaggcacttcctgaacgtatgcaggccattgaaggccggcagcagcagtatgttcttaaatctcagtctgaaaaatggcagcagcggctgagtgaacagatacagaacctcaccacgcttcaacagcaactttccacgctggctgcaaatgttgaagagacccaagcatcggccgcacaggcgattgtcaagcaggatgaaacgggcatgaagctcgacacatttcagaaagcgcttgatgcacaggtattacgtatcgacaccctggacgcctggaaaaaagaatggcggcaacgtgctttaacttcaacgaaaactgccccgcctcccggaggtagccggcctgtcgtaaaaaagccgccaaaaccccgggtcattaagccgcctttcacactggtgagtattgagcgccggggagggcaggcttacgcggtgattttacctgccgggaaagggggctgggcacagttacatatgcttagcccgggagagagcctgtcgggctggatgctgatgagtgtcaacggcagtcaggctgagtttcaggtgaatggccagatacagcgtctgacactctga

SEQ ID NO: 390394 - DNA, 753 bp, Salmonella enterica
atgaaactgatgaaaccgacactacgttattcgttgctgtggacgtgggcagcccccgtcatggtggcggtcacgatgagccagccggctcttgcctccgtcagtgccagtagcagcgtcagtacgcctcaacaacaaggggccacttcagttgaccggacccggacatccggcagtgcatgggggctcagtgataaagagtggcagaagtaccagcaggtactgaaaagccccagggcgttacagtcgccgggcattgatccggtgatggcgctggggctggaggccggttcgctaggcgaacgccagcatttcgctgaattgtgggtgaaggaagagtatgcccgcgtggaaaaagagctggcttttcagcgggaagtggacgcggcctggaaacgtatttatcccggtacgctacccgtcaatatgaacatgcgcaatgccagcggtattgcgcatgacacacaggaaagactggcgttatttgtgaaacacgactgtttacagtgcgatgccagattaagtgcgattctggcggacaaccgtcctgttgatatttatctggtcgacagcgccggcagtgatgacaccatccgcgagtgggcgctggcgcaccatatccccgtcgataaagtgctcagccggcagataacccttaaccacgataatggcaactggctgaaatatggtcaggggcgtatgccggtcgtgcttcagcaaggagcatcgggatggcagattgcagcattctga

SEQ ID NO: 390395 - DNA, 693 bp, Salmonella enterica
atggcagattgcagcattctgaccatcggcagagatatttttattttttctgcgctggttcttatgaccgggatatccggtagtgccattgctgccgcaaaggcgcaaggtctgcaaacgatcccttccggttaccagctggtggccagtgaaatcggggtgcctgctgaggcgctgtattcggtctctctggccgaatcatcccgaaagttatctcatggcgaacgtccgtggccgtggaccttgaacgtcgccgggaaagggtaccggtataacacccgtcaggaggcgtatgacgcgctgctgtcctttatgcggcaccatccgttaaagcaaattgatgtggggatagggcaggtcaaccttggctggaacggacgctatttcagtagttattgggaggcacttgatccgtacaccaatctgcgcgtggcagcccgcattctcaaatcctgctatgacagtaacccggggagctggatacaggcggcaggatgttatcactatcctgccggagggaggcctgcctggagctataaggccatcgtgagacgcaagctggccacgctggattttagcgcgccagtctcacattccggacttcaactggtccgtataccgtcaccacaacctcatttatcaccccaggaccgtgaactgcaatgggttgaacccagggagtccagtcagtga

SEQ ID NO: 390396 - DNA, 540 bp, Salmonella enterica
gtgaaattgtattcagctggtttttgtctcagaacgctcattgtcagtgcactgctgaccacctcatcgatggcggcactcaatgtgattgctgacctgggtggggagacaacggcaccactttttgatgccatcaataatgaaaataacgaattcacaccgcctcgatcacttaattcaccggacatgtcttcgattcctgccccggcagatgtcagtgacatgctgccagttattacgccggagatgtgtgcaggaaaagtggaaccccgtgagttaaatctgactggtatgacaccagtctttctggttggcgatgactcgctgtcacgtgagtggctgactctgcgccgtgatgagcttaagcgacttcaggctacaggtctggtggtgaatatcagtgataaagccgcgttttctgaactgcagcggttggtccctggagtgacgttacttcctgcgtcggctagcgaaatagcgtgccgtcttcagctcagtaactacccggtgctgattactgctacgggtctggcgcaatag

SEQ ID NO: 390397 - DNA, 2157 bp, Salmonella enterica
atgagcgaccgttatgtgatggaagccctgctacgcccggcggttgaactgtactcagctgcgacggcaggtgctgccacttttgttatggttgtggcaccctggtctgtggcattaacccctcaggtcagttatgtaactgcggcaggttttgccgtgtttacgacaatcagaatgcaacagggactacgtatcctgcgttaccgacgtaacctgaaacggctaccccgctatgtgatgacaagcctgcaggttcccgtcagctgtcatcgtctgtttctgggaaaaggatttatgtgggagcaaaagcacctgcaaagactactggaaacccgccgtcccgaggtacaggctttccttcagccttcattaccttatcgcctggccagagtgactgaacggtggtcggaataccggttaccttttgtgagccagctgctgcgtaaagactccgtgtttaatcctgtgaggccattacctccggtggggggaaacccggcgatccatggggttgagccggatgaaactgatgtcagtatggatttaggcgagcgagtcggccatatgctggttcttggcaccactcgtgtaggaaaaacacgtctggcagagctgctgattacccaggatatacgtcgcggaaatatcactattgtgtttgaccccaaaggtgacgcagatctgcttaaacgggtatgggcagaggctcgccgtgccgggcgtgatgatgagctttacatctttcacctgggatggccagaaatcagcgcccgttataacggtataggtcgtttcggccgtacatccgaagtgccgacccgactggcaaatcagctcagtggagaagggaacagtgcggcgtttaaagaatttgcctggcgtgttgtcaatattattgctcaggctctggttgctctgggggaacgcccggactataacctggttcgtcgttatgtcatgaacatcacgggtctgcacgaccgttatgtggcctggtttctgaaagcgaaagcgccccatctgctggctctgatagacacgcaaattgagttgctcagacaggttaaacaaaatgccggtgtgccggaggcgttgttacgcaaagccgcaacggaacaggttctcgacagtgaagaggctgaaaatctgaatgatgccatcctggagagcctgcgcaatgcggttcgctatgaccagaagtactttgataaaatcgtcgcctctcttttgcctttgcttgaaaaactgaccagcgggaaagtgtccgcgcttctttctccggattataccgatatgtcagatcctcgtccgttactggactggcagcaggtgatccgtaaaaaaggcattgtgtacatcggtcttgatgccatgtctgatgcagaagtggcatccgctgtcgggaactcgatgtttgcggatcttgtctctgtggccggccatatttataaattcgggctggaaggcgatctgccctcaaatggggccggtaagatgcaaaaactgccgataagcctgcattgcgatgagtttaatgaacttatgggccctgaattcattcccatgattaacaaaggcggtggggcggggattgaagtgactgcctatacgcagacgtggtcagatattgaggcgcgtattggtaatgcggcgaaagccgctcaggtgacagggaacttcaatacgctggtcatgctcagggtcagagaaaaaatgacggcggaactgctgacaactcagctccctgaggtggaagtctataccaaaacgctggtgtcgggatttaccgatatttcaaatccagagcaggggagtgacttcacgtcgaacactcaggacagggtgagcagtgtgcgcacgccccttctctccacgtacgagctgattaatatccctaagggacaggcctttgcgttactggagggggggaggttatggaaaattcgcatgccactaccttcctctgaaaatgacgacatgatgccagctgatatgtctgcgatggtcactgcgatgcgtaaaaactaccgcacgggagatacctggtggccggttatctccacactccctgacaatacgccagcgcaggttactattcctgatgcaaaggatattcaggttccggcggggatgcccggggagggactgaatggctga

SEQ ID NO: 390398 - DNA, 765 bp, Salmonella enterica
atggctgaagaacagactcagaggactaaacaggactcgtctgctcgaacaaaacgcccgggattgctgcgtctttttttatgggagctgccctggcacgtggtggggatcctgctggcatctttgttattcagtctactgattgaatatgtcgggttaatcttctggtggccggagcagggaagcctgcatgcccggggaatgatggaaacagaactcggatacctgtcttcgaattttacccgcagcctgttcatttcggagcctgcggtgacggcaatggcctggataaacctcggctatcactggatgtttgtggacagcggatttatccggtttctttcccaggggacggctgtggtaactggtccgaatacgttattaacggaggaaatatcggctctggggatctggctactgacacacctgagggactttctgcaggcaacggtctatatcaccgtggtctttgttgtacggatatcgattctggtgctttccatccccctctttgtcatggtggttatggttgctatggttgaaggcttaagccgtcgtgatctacgccgctatggtgccggctatgagtccagctttctctatcatcatgccaagcggtttatcaaaccctctgtcatatacccctgcatgctttatctgtcatggcccacggcgatttacccaaatcttgtgttattgccagctacactgttgcttggggtttcggtcactgttcttatgtccacgtttaagaaatatctttag

SEQ ID NO: 390399 - DNA, 324 bp, Salmonella enterica
atgtaccactttatccgccaggccctgaaaggtgtgctgttgatgagctgcagctgtttgcctgttatcactcaggcctcagaaaaagaggaacttgcccaggtgatacgccagctcgatcaggtacaggcctcgcttgaacgtgcccgggcactcagtgttcagtcagcagatagcgggcgtttttattttgattatgtccgggccagtcaggacatcgtatcgatgaaacagggcatttcacaatatcttgacccttcccgtgcccagccgcgtgatgctgccgccgtggaagggcgctatcgccaggaacgagctcaatga

SEQ ID NO: 390400 - DNA, 237 bp, Salmonella enterica
atgaatcaggcgcagataacagcattcagtaccggagctggcgggattgtgccttcagatattaaacatctggtcgttgcgattctctttgctttccttttcctctgggcttcctgggcattacgtacagtttacgtgggctggtcaaaccaggatgttcggggtgatgccgtcggcatttttgtcattcgtgcggtcattatgcttgaactgacgattctctttttcagctattag

SEQ ID NO: 390401 - DNA, 339 bp, Salmonella enterica
atgaaactgctcgatcgttttcgccagctctccctggtgggaagtgggttgctctggtctgcgtatgcgagtgctgacctgcccaaactgtcgggaggcagcagctccaacgatgtgatgggggacgttaaaaagatgagccaggacggggtttcctacggtgccctggtgatatgtgccatcgcctttattgtggtggtgatttcctgtgtgagtacttatcacaaaatcggcgatggcaaagccagctggtttgacttcggcgtcagggtggtggtcggcgccattatgatcgtgctttgcatctacttcctcaataaagccgtcaccattatctga

SEQ ID NO: 390402 - DNA, 390 bp, Salmonella enterica
atggctacgattgattttattccggataagctcaatacccgtccggtagtctggcgggggttcaccgttgaagagctggggctgactgctctggccggtcttgttatcgggtttgtactggccatttttatcatgccgttcaccagttggattgcgtttcccatgctgatgatcctgatgcctatacctacagcctgggtgagtggtggctggctgatgagatacaagcgcaacaaaccagaccactatctctggcaacgggtttctctgctacgcgcacgtttactgagccccggaaagcacgggagtcttgctgcgggaagttatcgttttatcaccctttcacgggcctgggaactcaaacgaacacgttgtaaggggctgatatga

SEQ ID NO: 390403 - DNA, 663 bp, Salmonella enterica
atgagtctttttcgtaatgctgtttcagcccgtgacagtcatattcataccctgcgtctggcctgtgtcattctgggcattctggccgctgtctctatgggtggctggtacatggccccacggggtttaaccattcgtattcctccggatttgcgttccggcagcacacagaaatggtgggaagtccccgcgtcgacagtttacagctttggattttatatctttcagcagcttaacgcgtggcccaaaaatggcagcgtggactatccggcgcggattgcccaactgagtccttacctgacgccagcctgtcaggattttctcaataaagacgtcaggttacgccgcactaacggtgaacttcaggatcgtgtccgtatggtctatgaaattcccatgcacggatacagcagtcacagcgtgcacgagcagggaatggataactggacggtagatctcgatcttgtcgccgatgaatactaccagtcagtgctcattaagcgtgcgctgacccgctaccccctgcatgtggtgcgctgggaaggcgatccggagcgtaatccttttggtctggctctcgactgttatgccagcaccccacagcggttgcaggtcgcaggtcttgatgaagtcgataaaaccagaaccggggggacacaatga

SEQ ID NO: 390404 - DNA, 858 bp, Salmonella enterica
atgaaaaagtctgtctcgttgctgagtgtgctctggtttttctgtacctgtgcgggggcggttgaactgatgaagtgggaacgtattcccttacaaattccgctgaccgtcggccaggaacgtatcatttttgtggataaaaatatgcgtgttggttttcctgcgagcctgaacggtaagctgcgtattcagagcagcagcggcacggtttatctggatgcacgagccgctttcccggccacccgcttggtgctcaaaaacgtggaaaacggggaaatgattttgctggacgtgagtgcaggcgacgggaaaattgtccgggaacccgtccagctggtttaccagggaacggtgagtacggccagttcagccggccagccagatgattcagcctccggaggaacccgccggatccgggagccagacaatgccgcaaaaccaaaagtggccgtacttaatggcccggtacccgtcgttctgacccggtatgctgcccagacgctttatgcaccactgcgtacagtggcgcccgtcgcagggatccatgcactcccgctccgtcttcctgccagactgaccgcattatacccggctgcaccgctggagatgaccccgctggcggcctgggcactcggtgaatatagcgtggtggcgcttaaggttcgaaatccgcgcagccagaaaattgttcttgatccccggatcctgtctggccagtttatctccgccacatttcagcatcgatggctgggtgaagcgggccggccggaggataccacaacgttgtatctggttataaagggccgcccggagagtgcttttccggctgaacccgtttatcgcagggaggctcactga

SEQ ID NO: 390405 - DNA, 1488 bp, Salmonella enterica
atggccacacttcgctccaatacgctggtcaaaattattatccctgtggtcgcgctgggcgcagtggctatcgggatccgtgcctgcagtgacaaacgtgttgagcaggaggctgcggtgacgacgctgcccacgctcacgcctgagcaactgcgtgaactgggcgtggaaggggatacggctcaggacacgctcaatactctggtggggaaactgggagagatccagcgccagcagggcgatattcttgaggagaataaacagcttaaagaagagaataagaccttacaggcaagtacgtctcaggttgataaacgcattgatgaagcggtcagtgatgcgcaggaaaagacccaaagggccctggagacgcagaaaaagtcgctgacggagacatttgattcgatgctggcggggcttcagggtggatccgcgcaagtgcaggcgaacacgtccggcaccggtaacatgaatggaagtgacattccggtggggctcgggcttgatgccggtggtaccggacaggtttccggagacgggtaccagtgggtggagcctcaggatacggttccggtcgaccctcagaacagccagagcgggccaccccgttttgccacctcatttcttgatgacaatgcccttatccggcaaaaaaacgaactggaacggaatgcgaataaccgtcagggcctgaacaacgagcaggatgaggggctggttgacccggtttacacgctgccggagaactcgacactggtgggcagcacggcaatgactgccctgctgggacgaattcctgtcaataacaaggtgaccgacccttatccgttcaaggtcatgattggccgggacaacctgacggcaaacggtatcgaactgccggatgtggaaggggctattgtgtcagggaccgccagcggcgactggacgctgtcctgtgtacggggcgatgtgaaatccatcacgttcgtgttttctgacggcacggtgcgtaccgtgcctgcgccatcggggcgaaccgataacagcgggaacgataacggcggcacatccggcaacgggggcagcattggctggctctcggatgataacggcataccgtgtatcagcggcacactcaaaagcaatgcgtcaacctacctgccgactatcggcctgctggcgctgggaacatcggccggtgatgcgctgacggccagtcagtatacaaacaataccactgacagcggaggtgtcacctccgcgctgaccggcaatgccgggcaggcggtactggggcaggcactgggcgggagttttaaggaagttgcccagtgggtcaaagagcgctatgcccagacgtttgatgccgtgtatgtccctcccggggcaaacgtggccgttcatatcacccgtcagctgaacattgactatgccgaaaaagggcgccgggtgaagtatgactttacgttgccgggtaccggagcgacacagcagggtcttgactaa

SEQ ID NO: 390406 - DNA, 306 bp, Salmonella enterica
atgctggcgttgtggcagaacaaagcgccgtcaggacagccggcagtacaggcgcgggcaacacttcgtcgccccctgacacagacggagcagcgcggtgacacctcactggctgaaagctacagccgcactcaggagagcgaaatcagccagcagtttccacgactgccgaaccccgacatggtgatgtatgtctttccacatctggcgggcggcagtgccccggtaccggggtacagcaccgtctttccgttttacactcagacgcagtatgcccttccgggtgaacgcacggaggcgctgtaa

SEQ ID NO: 390407 - DNA, 2784 bp, Salmonella enterica
atgtttgattttctgacaggaagacgtccggctccggcggcacaaaaaacggtgacgtctgcatcggggcgtgcccccctgaaaagggagcggcacctgagccggcgggaagaagcgaaagtgtatgaaaatggcccgtcagtgattgattttctgccctgggctgagtacctgcccgaagatgagtgcctgttgctcgatgacggtgtgtcggtcggcgcggtctttttgataacgccggcgggaacagagggcaggacacaggagaggcttgatgaaattcgggacatgaccgaaaaggcgttacagagctcgctggacgaacgggatactcaccagtgggtggttcagttcttttgtcaggatgaatcagatctgacggtggaaatggaccggatacgcgggtacgtcagtccggcagcacagggtactgcatttacccaggcctggcttggcgaaaccgaacgccatcttaagcagataagccgaccggaaggcctgtttaaagacaatgtggtgacgggagtggactggcgcggacagatgcgccgtacccggatggtggtataccggcatgtcaatccccgaacccgggagccttatcctcctgcagtacagctgcgtcaggtctgtgatcggctggttgcctcactggggcaaacgggcgtggtgtgccagcggcagaacggtgagcagatccatgcctggttgctgcggttatttaacccggcacctgaatggattgacccgcagacgctgtaccggacggcggcatggcgcgataaccggcaggatgcgttgccggtgaataacgatttcagtgaaacgctgtttttcacacctccccgcagcgacgcgggaaacggggtgtggtggttcgacaatatggcgcatcgtgcggtaccggtcgaacggctgacctcaccgccgggaccggggtgtctgaccggtgaaaagccccggggggaacatatcaatgcgctgatggatatgatgccgccgggcacactgacctgtcttacactgctggttcagccccagaatgtgctggaggaggagtttaaacagcaggggaagaagtcgctgggcgacaatctggattcggaaatggccagggagcaggtgggagaggcgctggagtggctcaaacagaaacataaactctaccgtggggcgctgacgtttattatcagggccccggacatgagtacgctggacaaatatcagttgtcactcagtaccaccctgatgaatgacggcctgcagccggtgaatccggaacatgagctgaccccgctgaatacgcttttgcgcgccctgcccatgtgctttaacccggagctggatacgaaccggtggtacacctggctgacgtttgtgcaacattttgccggtgtggcacccatttacggccgttcaacggggacaggacacccggggctcaccttttttaaccggggcggcgagttgctcaattttgacccgataaaggaccgtatccagagcgcgcacaagctgcttttcgggccaacgggggccggaaaatccgcgacgctgacggtggaattgtgccagcaaatggccatacaccgcccacggctgttcctggtcgagtcgggtaactcgtttggtccgcttgcagactattacagtagactggggctgacggtcaacaaggtcagtattaaacctgggaaagggacctgtctgccggtattcgctgatgcgcacctgctcagggatatttccgatgaggccctggatgaaagtcagctgcgcgacatcgatgatgtggatgatgacgaagagaagcgcgatattctgggtgaaatggagattgccgcggttctgatggtcaccggaggagaccgggacgagaaactgagccgcgcggatcgtgggctgttacgtaaggccctgaagatggcggcggatatggcgtatgacgaaaaccgtcagatgctgccggaagatttgaaaacggttcttgagtctgtttcgacagataaagcgctcaacgacaagggtggttcccgctggcacccgaagatgcagtcgagagcgtcggaaatggcgctggcgcttgaactgatgacggaggggtttgagggcgagttatttaaccgggagggtgaagcctggcctgaggcggacgtcaccattgtcgatctcgggtatctggcacgtgaaggatatgaatcacagatggcgctggcggtaatatcgctggctaacacggtgaatcatattgcagagcgtgaccagcatgataaccgcgatattgtcttcaccatcgatgaggcacacgtggtgacagcaaaccctcttgtgtcgccttattttgcgaagatatcaaaaatgtggcgtaagctcggtacctggctgtggctggcgacacaaaacctgaaggattaccccgatacggcagaaaaaatgctgaatatggcggagtggtggatttgcctcaccatgccgccggatgagatagagcagatagcgcggttccgcagtctcacggatgagcagaaagcgatgctggcctcggccagaaaaggtgagaagaagaacggtatcccctgttataccgagggtgtggtgctggcgagaaactggaacgcgcttttccggtctgttccgcccagtttgtatctggcgctggggatgacggagaaagatgaaaaggcgcagcgccgggaattgatgaaaacgcatcagtgcagtgaactcgaggcggtgtttatggttgcgcgaaatctggatgaaagacgtggggtgagtgtatga

SEQ ID NO: 390408 - DNA, 378 bp, Salmonella enterica
atgagcaggctggttctcaaatatcctgaacccgttgtgacagaagagaacggtcatggcgtgttgtttgatatcaccccgcagtctgctccggtgataccgtcaacgctgcagaccgagtgggagcagcttcagtcagcgttgcgaacccggctgacgggtgaggtgacgatgacgtgccaccctcatcgtatcaaccatcgcggttgtgtgtccgtgtgttttcagggagagcagggcaggactgatgtgttgatcacggtcagcggccgggcgcagttcccacggaaagaagattacctttctccacgctggtatatcgatgttgcagatatggtggatgcaatgtatctggtgctctggctgagtgagatataa

SEQ ID NO: 390409 - DNA, 345 bp, Salmonella enterica
atgaccactattgcagttttattgatgggcctgtcagccactgtttcctgggccggcgatctgcctgcacaacaggcagcgcaaatgcatcaggaactgagcacctcaatgcagaaaatgcatgatgatatgcataagggaatgatgagcaatgatccggatgtggcttttgcggccggtatgttacctcatcatattggtgctgtagaaatggccaaaactgagctgaagtatggtacggacccgcaaatgcgtaagctggcaaaaagtattattgcctctcaggataaagaaattaaagaaatgcaggaatggctgaaagcccatgggcagtcggcagagtaa

SEQ ID NO: 390410 - DNA, 636 bp, Salmonella enterica
atgtctcaaatgaccttccatattctgaatgctcagaataaactcaccgctcactgtgaatggcttaaaaccagcctgacagacacctacgaaaaagccgggaggttgatgtcgctcccttctctggatctggtcgttaaagccgggacgtttgtcatcccggaaaaaggacatctcggtttttgtcctgaagctggcgttatctatataactgtcgatcctgataatccggcattctgcaaaaatgatgcgtactctattgaacgcatgtttgctcatgaactacaccatgcagcgaggtgggcagggccgggatacggctccacattgggagaagtgatcgtttctgaagggcttgccggacatttttctcttgagctttttggaggtgaacctgaactctgggaaagccttaaatcagatatcattgagccctacagtacaaaattattagaaagctggcattgtactgattacgaccataattcctggtttttcggaaccggggggctgcccaggtggctgggatataccgcagggtttaacctgatttccaggtatcttgcagcatcaccatttttaaaggcttcaatgctggcgaacatacatgctgaggagttaaaagcgtatctttaa

SEQ ID NO: 390411 - DNA, 387 bp, Salmonella enterica
atgtttactcatatgcgtattgctaaacccgtcaacaatctcgaaagctcttttctgatgtacagccaaggattggggctacataaaattgctgaattcaacaatcatgatggtttcaatggaataatgttagggcggggagacttagactggcacatagaattcaccttttgccaaaatcatcccgttcaacctttgcataccgaagaagatttactcgttctttattactcggacgaaaatgaatggttgcatgcctgcgaaagaatgaacgatgctggtttcagaatgactgcgtcatttaatccctactgggacgtgaacggaaggacatttgttgatctcgacggatatagagtggttatccaaaacaagtcgtgggcatag

SEQ ID NO: 390412 - DNA, 810 bp, Salmonella enterica
atgtcacttcctattccttttggtgcgatcgttacagtagtgaagaaatgctggtctactctttcccaggtaatgctgataaaaacttatcagctctcacatgagcgctgggcagccagacaccggctaggagcgcgatggcattatttgggtaaatatttggagtacagtctccgattggctcagttgacagataaagaacctcgatgttcacgtattgctttcagaagcaaagaggaacgactgcaaaaagttgagcttgttttcgaagcccttggcagtggcttacgctaccaggaaacactgtgcattcatgatgtaaataattcaccgataatattaactatcccaaacattcctacacttgatgtatttattctagagaatggattcgcatttacggttgaacagtaccagttaaaatattgcaaaatcaaattagctaatggtgaaagcatgtccattgataattcacccaagtattcgttaatacaaaactggtgtttcaatgatgcatggaagcggcgttgggggaccatctggaactgtaatgcaattgaaagtgcccagaggcgtattgctgaatattggatatggggcttttgtctgccgttagttgggcgacgccctttatattcaccatcgcgaaaaggtattcatctgtttgaagcaaaatcgttacgctggtttatgacacgcccatggtgtctgaatacccagttttggatggcaatatggtcagggctgtttattctcaacgatgagaatgttttgcaatggcgctggaaggattcaccacaacaagactaa

SEQ ID NO: 390413 - DNA, 393 bp, Salmonella enterica
atgtttcgatatctttccctgctggcactgatactgtcagccccttctttagcgtcaacagtggtttatacggaccggcatcatttgccggctaacgttcagtccgacacgcgcgttgtttatctggatgagacggagcagctggcggaaagtctgtttggcccgctttcgaataattcagtgcaggcagagcgtcaggcacagtcgatcatccattcccctgaatggaaacaacggcaggccgtaatggtcagggcttatcagggcctgattcaggcctggcaactgggtctgaaaaaatatccggccgtggtgtttgatgaccgtgatgtggtgtacggtacggccgatgtcgcattggccagaacatatctgcaggggggaaccccatga

SEQ ID NO: 390414 - DNA, 981 bp, Salmonella enterica
atgagcacgatatcgaatcggttacgtcctgttgcgctcagcctgatgctaaccgccggcagtttacccgcagttaatgcggtcattaacaccgccactattgtggcttcatcggtctcaccctcatgcatcagctggcgggtgagcgggatttgttactggctgttgtgtacgccgtttggctgtgcggtaaagacctccataaaggtgacacattttattcctgaaaccgtcgtgtcggtctatcaggacaagggcaaaaatccctggaccgagatggcgctggtcagcggcatatcgggtggtgttaagaacgccatcagtggtgccctggcaggtttgtctgccggcggcggcgaatccgtcagcaaagtgcctggtcagcgttccctgcatacccgtttcaaatatgccgatgcgattggccatccggcaacgtccctcattggcggtcagatacccgggtactcctgcaacagtgccgccacgccattgttaccttatttcctcagcacactggatacgctggtatggcgtaccggcgtgcctgaactggcctacccggaggctcttatcccgggtaagcgtgaagtcgggagtcagacttcacaaaatatgtggggcaatgtctatccgcgtagcgggtttatcacccagcaggatgactataaagcaggtgcagttattgctcagcgggttgccgatattattacccgcagtggtcaagtccatgtttatcaaccccttgtcgggcatcgttcccctggctactggccacctgagcctgtgagcgaaaacaccggcacgaaaaatcacaaatggcagcgcctgtctccttcgttgtcgcaatcctgcgcggttttccctgataccggtggccacgtggctgaagacgggaactatgcctgggccttgtggcaaccctacagctgctgcaagcgacgtgggcagaccttcctttacagcactgacttcagctaa

SEQ ID NO: 390415 - DNA, 1407 bp, Salmonella enterica
atgaaaaaaaagaaaatcataacgcctttattcacagcggtttcgctggccctgatatcgatatctcccgccgttctggctgcagggtcggggatcggcagtatggccacaaatgcggtgagtgacagtttgttttattccattggtggcggttcggtgatatctcagcctgcctccctcaaccgcatgcaacgtcttggggtcagtgccgggattaacagtgacctgatgtgcggaaactttgacattaaaaccacggtggggaatcaactgaacgggttaacgagtggctttaaggacctgatgggggaggtgatgcagggagccacaggggccgtatcaagcctgcccggtatgataatccagcgggccaatccggggctgtatgacatgatcactaacgggattttacaggccggtgtttctttcgataagtccaaactcagttgtgaagctatgtccaaaaaactggccgattacaccatgggtgacagtgcctggacggagtctgccgtcggggacgagtaccgtgatgcgataaaccgcagcggcggggatgctacccgggctgagcaggcaaaggacaaggccaccggagaggaaggggccacctggattggcgggaaaaaggccggagggaaagggcagcccgctattcaaccggtacgtgatatggctaaggctggctataacatgcttaatggccagcctgtcaccagtaacagcagcgttgcctcttcggcctgtaacggttcttcctgccagattttcaaaaattcagatgcagctgccaccgctatcgtgcaggtactgggcgatcgcagtatccgtacctgtaaagataaaagccagtgtgagagtggcgggactgacaatgccccaggtgccagcgtggccggcactggttttggcccactgctcgatgagtccacgaaagtaaatctggaggcgctgggcaaactggtcagcagccagggggcaccttcaacagaagagcttggcaaactgaaaacagggggattaccggttactcgcggtgtgattgaagcactcagggatgataccgataaaaatgcgctggttcagcggctggcgggagagctggcaatggcccacaccattgaaacggcgctggccatgcgacgaattctgacgaccggagagtcagaacccaatgcggccgcacagaagcaggcgatagaagaaggcgatcgtcgtattgactcactcgaccgtgagctgcaggcacttaaaaacgaaatggagctgcgccgggccatcagcagcaacagcctgctggtgacgcttgagcgtcaggaagtccgtaacagcagcaaccagatgcagcaacgcacgccgagtaccgatgaggggatgaattcccttaatcagaaagggggagagtga

SEQ ID NO: 390416 - DNA, 342 bp, Salmonella enterica
atgaacatcgtttttcatgtccccgaactttcccgcagtattccctgcctgaacaatgtaaaaaattatctgaagctgagtttgcagccagaggatgaggcaatacgtattgtttttaacgctgaggcggttaaaagcctgatatcggaagaagagtgtgcccttcgctggctaagcctgtgcgaagaatatccttgtataaagctattagtgtgtagcaattcacttaagggatattctctttcacctgatatgcttatcaataaggttgaagtaatccccgcagccgtcgttgctctggttgagttccagaaaaatggatggatatatttgcggccataa

SEQ ID NO: 390417 - DNA, 240 bp, Salmonella enterica
atgggaaatctgacaaaacacaatataaaagaaatgccttatctgtcagtaaaaaaggcaaaaaaactggaagagaagaaactatggcgcagggctgcacgccagtggttggttgccctgtctgaagtcagcgaagatcatgaaagagcgtttgcagcccgtcgccgtgaacattgtttttctgaggcacaaaaagccaccagtaagctaaagcgcataagtgaacttagcaaccgttaa

SEQ ID NO: 390418 - DNA, 375 bp, Salmonella enterica
gtgaaagccagggatgagttaaagacgttcacattgatgtgtttatatttatcgtcgttcattcctgtttacgacgctttcgctgtgccgctctcgcccgccgagcgtaatactattcaacagcaacagcagcagcttcttaatgaaaaccagcgccagcgtgaagagctggagcgtagcgttacgctgcctgaaactgtaacgccgaaaacgccagcccggactgaagggccgtgttttatgatttcgcgcattgatattgacggcgcaacgaagttgtccgcaactgcctcggcaaagcttaccgcgccgtgggtgaatcaatgcctgaatattccccgcctgacggaactgacaaatgcaatttccgactga

SEQ ID NO: 390419 - DNA, 1251 bp, Salmonella enterica
gtgctgcacattgcagtgcttgaggggaaattgcagcaaatacgtctggaaggcgtcccgtcgcgcactctgctgatgacctttcccggaatggaaggaaaaattctcaatctgcgtgatattgaacaggggatggagcaactgaaccgtgtgcgccagacgccggtggaaattgaaattttgccgggcagtcagcaggggttctcaatcgttaacctcaccgccacgccagaatttccgtttgcggcctcagtcagctttgacaacagcgggcaaaaaagtacgggcgtcgggcagattaacggcgggctgaccggcaataatttgctgggtcttgccgacagttggtacatcagcggtgggcgcagcagcgcattttcgaattcaacagatgcacaaaattttgcggccggcgtcagtgtgccttacggctacagcctgctggactacagctacagctggaacaactatctcagcaccatcgataacaacggctacctctggcgctcaagcggcgacaccgaaacgcaccgcgtgaatctgtcgcatgtgctgttccgcaacggtgatatcaaaacgggtgttttcctgggcctgagccatcgcatcaatcataactggctggatgatgttctgctgcaaagcagcagccgcaaactcactagtctgctgtctggcctgaatcatacccagaagatgttcggcggcgtggcaacctttaacccgaccttcagccgcggcatgccatggctggatgccgaaagtgacggcagcaaaaacggtgatttgccgaaagcgcagttccgcaaatggagccttaacgccagcttccagcgtccggtggctgaaaatatgtggtggctggcgagcgcctatgggcagtggtcgccggatcgcctctacggcagcgaacgcatgaccatcggtggcgaaagctcggtgcgcgggtttaaagagcaaaccatttccggcgacaacggcgcctactggcgaaacgagctcaactacgccctgttcacgctgccggtgataggccaggtcagcgcgctggcggccctcgacggcggctggctgcactccgacaggctggatcgctattccgcaggcactctctggggctcggccgccgggctcagtaccaccagtggacacgtttccagcgcgtttaccgttgggctgcctctcgtttacccggactggcttggcccggatcacgttactatttactaccgcgttgccgtcgcgttttaa

SEQ ID NO: 390420 - DNA, 9555 bp, Salmonella enterica
atgaatcagcctcctgttcgcttaatctaccgcctgctcagctacctggtgagcggcctgctcgcgacgcagcctttgctacccgccgttgctgccacactgacaccaacaggcaataccaccatggataaagcggcgaacggcgtgccggtcgtgaacattgccacgccgaacgaggcagggatttcgcacaaccagtttaaggattacaacgtcggtaaagaggggctgatcctcaataacgccacgggtaagctcaatcagacgcagcttggcgggctgattaacggtaacgccaggctgaaagcgggcatggaagcgaagggcatcatcaacgaagtgaccggtggtaaccgttcacagctgcagggctatacggaagtggcgggtaaagcggcgaacgtgatggttgccaacccgtacggtatcacctgtaacggttgtgggtttatcaacacccctcaggctaccctgaccacggggagacctgtactggacgccagcggcaatttacaggcgctggatgtgaaaaaaggcagcatcaccatcgaggggcaagggcttgatgccagcagcagcgatgcgttgtcgataatttcacgcgcaacggaagtgaacgctgccatttatgccagggatttaaaagtggttgccggggccaaccgtgttggcaccgacggcagcgtgcaggcgcagcagggtgaaggcatcgctcctaaggtcgctgtcgataccggtgcgctcggcgggatgtatgccaaccgcattcatctggtgtccagcgagaaaggcgtcggggttaacctcggtgacctgaatgcccgacagggagacatcaccctggatgccagtggcaaactcaccgttcacaacagtctcgccagcagggggctgaccgctaagggtgagggcctcgccctgacgggcgaccacaaatctggcggcaacatgatgctgagcagcaagggcgacattgccctgagcaacggttcgctgaacagcgacggcgacctggtactcaacgccagtggcacgctaacgcataccagtgaaaagctgaccgccggacgcgatgcaacgcttaccgcgaaaaacatcagccaggatgccgccagccagattaacgctgcccgcgatatcgctgctaaagccagcgatacgctgcaaacgcaggggcagatgaccgccgggcaaaacctgacggtaagcggtaacaccctgaccctggacggcaggctgctggcgcataacagcgctcagctgaatgccggcacgctgaataacagcggttccgttcagggggcttccctgagcgtgggcagcgccacgctcagcaattcgggttccctgctgagcggcggcaatctgaccgtcagtacgaaagattttacccaaagcggcagcaccggcgcgaagggcaaagcggacatcaccgccagcgggaagctgaccaatacaggctcgctggtgagcgacgatgttctggtgctgaaggcgcaggatgtcgcgcagaacggcgtgctgtccggtggcaaaggactgacggtcaatgcgcagaccctgacctccggcaaaaattcggtgacgcacagcgacgccgccatgacgctgaatgccgcaacagtgacgctggacggggaaaccagcgcgggtggcgatcttcagctgcagggcgacaggcttacgacagcggcgagcgcacagcttcagagcggcaataacctcaccctcagtgcgcgggaagcggcgctggcgggtacgcaggcggcacaaaaaaacatgacggtgaacgcccgcgaaaaactcacccacagcggcaaaagcagcgcggcatcgctcagcctcagcgcgccagaactgaccaacagcggcgtgctcgtggcgtccactctgaatactcagtcgcaaaatctcaccaacagcggcctgatgcagggcgaaagcgcattgctgattggtacacaaaagctggataaccagcagaacggtaccctctacagcgccgcaaatctgacgctggatattccggacatccgcaatagcgggcttatcaccagcgacaagggtttaacgctaagcacggactctctcagcaacccgggcaaaatcattgctgacacgctgaacgttaaagcgaccaagctgaacggcaacggcctgttgcagggaaccggggcgctgacgcttgccggtgatacgctctcgcaggggagcaacgggcgctggctgacggcgggcgacctctctctcagcggtaaaacgctgaatacctccgggaccacgcagggacagaacctcaccgctcaggcggccagctggaccaacagcggttccgtactggcaaccggcaatctcaacgctacgctgagcacttctctgctcaacaatggcgatctgatgagccagggcaatgtcgggctgaacgcgcccgtgctgaccaaccacggcagcatcctctcgtcaggtgaaatgtcgctcgccggaacgaccttcaccagcgacggcacgcttcagggcaatacgctttcactgcgccagaacagtatcgacaacagaggaacggctattggcctgaatggcctgaccctgaacagtaccggccggcttaccaacagcggagacctgctaagccagaaagcactgatactgagcgcgggagacgtgaccaacagcggtcggcttcaggggcagaacatcgccttagacggcagcagcctgaacaacggcggtgcaattcagagcgcgctcgacttaggcctgaccctgagcggcgacgtcatcgccgcaactggcagcaaaatcaccgccctgggcgacgcccgcctgaccggcaaagcattgagcaaccagggattaatcagtgcgaaaacgctggaggtgaaaggcgattcgctcagcaatggcggcgaaatcagcggcgttaacgacctgaacgtgacgttcagcgggaacctggaacagcagggaaaaatgctgaccggcgggttgcttaacgtcaacgcgaaggatgtcagcaacagcggccagcttcagggcgcggatacccaactcagcgccagctcgctcaccaacagcggacgcgtgcagggggacagcggcctgacgctcaccttactgaatgccctgaccaaccaggccagtggcgtgctgctcagccagaacacatttagcctcaccgcgcctgtactgactaacgacggcactattcagggcaacgacaagaccacgctcagcatggaaacgcaggcccgcaacggcggcaaaattctctccggtggcgatctgaccttcaccacgccagactacagcggtagcggctggctacaggccactaacctggtgctgaacgtggcgaagcttgccagcaacggcaccgtgatggcggcgaaccaggcgacgctcacaggtaacagtttgaccaacagcggtacctttcaggccgcacagttgaacgtgaatacgcagaccatcaccaacagcggcacgctgctgggtaatcagggtttgacgatcaaagggaacaacctcaacaacgcggacgggaaggtgttcagcggcggagatatgctcactgaggtggtctcgctcagcggcgcgggccagctggtggcgctcggcaacctgacgctgaagctcactaacggctttaccacccagggcgttatcgccgcgaacaagcagctctccatcagcagccagggcgatatcacaaacggagccacattgcagggcaacggcatcacgctgaacgcggcaggcaagctcaccaacaacggtcagctgactgcaggcagcggcaccacggtactgagtggcagccagattgcgatgaacgccagcggcagcctgcaggcgggcggcgacgtcagcctgacaagccagggcagcatcaccctcgacggctttaccggtaccgcgggcagcctggcgctgacgacagcgggttcaatcgttaataccgcgctgctctacgcgggcaacaacctctcgctgtttgccgacagcatccagaacctgcgcggagacatactggcgggcaacaacctggtgatgcagaaaaacgccagcggtgcggcaaacgctgaggtgatcaatacgtcggggaatatcgaaaccacgaagggtaatatcaccattaatacccaaaagttgctgaatcaacgggatgggatacaggaatcaacgtcttatatccctgctgaaaacaatccaggagcaaatggtggcagttcaatttcagtcagagttggtgatttggctgccgatgaatgggggtattactttgtcttccacggaactaactacggtggaagccaggaggctttcgctgctccgactgcaaagggagcaaccagacgctttctcgcaggaacgaaaattgttgatattactgccaagggaggagtagccagaatcgcatctggaaataacattctgattaatgcgtcaacactggataatctggggggaaatatactggcaaatgacgccattaatatttcaggctctcgtctgaataaccagtcatattttgggtatgctcaggatgaatacaatatatacacgtattacgggaaactggctactcagcttaataatggacacatgcagaatggtaatgcaggcagcaatgacagagtaacttatagtctgtcaggaaacccggaatatgtggttcgggattcgggacaagctatgcgttccgtcattcaggctggaaaaaatgttctgattaatttttccagtgatatcagtaatacatcaacggtatcgaatgcgggtgggattactaacaccattgtcacacctgtggtaaacgcgccttctgagcagaacatcgggggcgctgcaagtcagcagacgctggcgggtgcaggcatccagtccatcacgcatcccgactggaaagacacctcctccagccagactattggcagtggcacggggctggaacccggcggtatggacggcaactatcctctgccttccggtaataatggttactttgtgccgtcgaccgatccggacagcccgtatctgatcaccgttaatccaaaacttgatggcctcggccagctcgaaccgtcgctgtttggcgatctgtataagctgctgggtatgaagccgggcgcggccccacgtgagacgggcagccagtataccaacgtcagtcagttccttggctcgtcgtatatgctggaccgcctcagcctgaacccggacagggactaccgcttcctcggcgatgcggcatttgatacccgctatgtgtcgaacactgtgctgaatcagaccgggacgcgttacatcaacggccttggttcagatctcgatcagatgcgctacctgatggataacgccgccaatatacagagttcgcttgacctgacgtttggcgtggcgctgaccgccgaccaggtggcggagctcgatcacagtatcctgtggtatgaaactgcaacgattaacggccagaccgtgatggtgccaaaagtatatctgtcgccaaaagatgtgacggtgcaaagtggcagcgttattagcggcaataatgtgcatctggcgggggggaacgttaccaacagcggtagttctttactggcacagaacggtcttaccctcgacagcagcaacagtattgacaacctgagcaacggattaattcgtgcgggagagaacctgattctcacctcaacgggcaacatcaataacatcagctccggtattactggcaagaccgtacagctggagagtcttgatggcagcataaacaatatcacccagtccgggcgctggcagtttgatgcgccggaagatggcattgctttaaaagatacatacaccggaagtattgcatccatcactgcaatggatgatttgagcatcagggctggtaacgatatttcggttacgggggctgaaatcagcgctggagcaagtgctgaacttgtagccggaaacgatctgaacctgaatgctatcgacaacagtaccagtactcgtcatgtcaatcaggaatctcaccagcgcagtgctgaactgacggcaatcaccgcgggcgacaacgtgacactggttgccggtcgggacgttaccagccaggccgctggcattgcggcggaagggaatgtcggcatccaggccggacgcgacgttaatctgctggcggaagccatcaccacgggcagcagcagccataatagcaagaaaaccgttatggacgaatccgtgcgccagcagggcaccgaaattgcaagctccggcaataccacgattaccaccgggcgggacgtgaacagcgaagtcgcacaggtgaccgccagcggcgacatcggagtggcggcaggccgcgacgtaaacctgaccacggcgacggaaagcgactatcactacagggaagagacgaagaccaaaaaaggattcctcagcagaaaaacgacccacaccatcgaggaagacagcgcgagccgcgaagcgggcaccctgctttccggcgataacgtgaccgtgcaggcgggcaacaacctgctggtgaaaggctcttccgtggtgggcgataacaccgtggcgctgggcgcaggtaacaacgtcgatatcgtggctgcgaccaacaccgattcctcctggcgcctgaaagagacgaaaaagagcggcctgatgggtaccggcggtatcggcatcaccgtcggcagcagcaaaacaacccacgatttacgtgaggcgggcaccacgcaaagccagagcttcagcacagtcggctctacgggcggtaacgtggtcatcgctgccggaaatcaggcgcacattggtggcgcagacctgattgccgggaaggacatgagcctcagtggcagcagcgtcattatcgatccgggccatgacaagcgcacccgtgacgaaaccttcgagcagaagaaaagcgggctgacactggcgctttcgggcaccgtcggcagtgcgattaacaatgccgtcacgtcagcacaggacaccaaagaggagagcgacggacgtctgaaggctcttcaggccaccaaaacagtcctctccggtgtgcaggccggacaggcggctgaggctgctaacctgacggccgacccgaatgcgatgggagtcagcctctcgctgacgacgcagaaatccaaatcgcagcagcacgctgagagcgatgtggttacgggcagcaccctgaacgcgggcaacaacctttccatcactgcgaacggaaaagaacagggcccgaacagcggcgacatcgtgattgccggaagccaactgaaagcggggggggacacgctgctggacgcgaagaatgacgtcattctcagcggcgcggccaacacccggcaatccagtggtaagaacagcagcggcggcggcggtgtcggcgtgagtattggtgcaggtaaaggggccggtatcagcgtatttgccaacgtcaacgcggcaaaaggcaaggacaacggcaacggtaccgactggactgaaagcacgatagacagcggcaaaaccgtgaccattaagagcgggaatgacaccgtgctcaacggggcgcaggttaacggcaataaaatcgtggccgacgtgggtcatgacctgctgatgagcagccagcaggacaccaataaatacgacagcaagcagaacagcgtggcagcgggcggcagctttaccttcggcagcatgacgggctccggctacatctcggcctcccaggacaagatgaagagccgctttgactcagtcgcagaacaaacagggatatttgccggtgatggtggcttcgatatcacagtcggcaaccacacccagcttgatggtgcagtcattgcttccaccgccacggcagataaaaacagtctcgataccggaacgctgggtttcagcgatttgcacaacgaagcggaattcaaaacccggcactcgggcatcagtatcagcggtgcgggtagcttcggcgaccagttcaagggcaacatgcctggcggaatgatttctgccgcaggcaacagtggccatgcggagggaacgacgcaggcggcggtagcgggtggcactatcactgtccgtaatgaggataaacaacagcaagacatggcgaacctgagccgtgatacggaacacgccaacgacagcatcagcccgatattcgacaaggaaaaagagcagaaccgcctgaaggaaatcgggatgatcagcgatatcggcggccaggtggcggatattgcgcgtacgcagggagagctgaatgcgctgaaagtggcgcaggataaatacgaacctcttccggccaatgcgacagaaaaagagcgtcaggattatcttgcgaatctgcgcaactcgcctgaataccagagcgagatgaagaagtacggtacgggcagcgacattcagcgcggtatccaggcggctacggctgcacttcaggggctggcaggcggtaatattgccggcgcgctggcgggcgcttcggccccggagctggcgaacatcatcgggcatcatgcgggtattgatgataacgaaggcgcgaaagcgatagcccatgcaattctgggcggcgtgacggcagcccttcagggcaatagcgcggcggcgggcgcggcaggtgcagtcgtgggtgaagccatcgcacaccagctctatccgaatacgccaacagataagctgacagaagaggaaaggcagactatcagcacgttgtcgtccatctcggctggcattgctggcggtattgccggtggtaatactgctggtgctgcggccggagcgagcgctgggaaaaatgccgttgagaataactttttgagtcagggaagaccgaaagacttcaccgaacaactgaagggctgcaacggaaacccatcctgtgagcagggggttcgtaaggatatggccagggagtcagcggaaaacatcctgaagctgaaatcatgctgggatgctggtgatgctgcttgtgttgcagatacgcgttcgaaaatagaactcgatgagaaagcgtatactgagctacgccagcaggacaatatggccggacgtgcttatgaagactcggcaaaatggtatgctgatattattgatcagtgtgctggtaagtgtggctggctagaagcttcattgctgaagaccggagccgatgggctgggtaacttggtttatggtgcgttgggtgcaggtagtttgccgaagccggtacaaaatttaagcgcgaacgatcttaaagttgcaaacgaaattagtaaggatatagcatctgttgggaagcagacagacattgggtttgcggcaaagcaaaccaagagaagcgcagggcaaatagtaattaaaaatataaatcaatctgaggcaattgaaaatttatctgctagtggttatataaaatcagtttcgaaagacggttcggttactgttatgacaaagggcgagaaggtgtatagattctatccatcttcaactggaggtgggatcgccggtgctgaatctggggtaccgtctgcctctgtgtcagtaaatggtaaaatcatttctaaactacgtttccctggagagtga

SEQ ID NO: 390421 - DNA, 558 bp, Salmonella enterica
gtgactatcgaaaatgatgatgcaataactctacttaaaaatgtcgtaagactcagtgctaatcttcctgctcgcgtttttcacaaaaaattttcaagatatttcttttttgataatgatatctgtacatcagacgatttgattagtgtggctaaactggtcattggtgagtctttagggtatgacttaatggcgagagttttcgctagttcagattttaaatacttaggcgatctgcatatgaatgaggattgggtcgctaaaatagcttccttaagcactgaaatgaatgattctggtgattatggaggtctaattattttagatcaaaaaaaacaatgggcgatattccagaaaacccctgttgaagagggcgtgttggggataaatagcaataaaaaactagaggccataaatgatttaatttatgagagttttgttgattgcgagaaatttaaagaatggcttgaggaaaaaacatcacacgatgttgaattagtcaaatctttgggaagaaattatttaatgagtatagttgaaaactatagagaagcatag

SEQ ID NO: 390422 - DNA, 807 bp, Salmonella enterica
ttgcaaagtgaaaactcgtgttcaccggctgaatctgcaacggatgaagttgttgttgagaataacttcctgagtgcttcaaaaaatgatgtacttaataaagcgcttgaagatcaaaagaatggtaagaaccttcttcaggcatcacaggatattgttcgtctgaccaatgaggacaaagctagtaatgggcttctgaataaataccagaacggtcagttgagtgaagcagaaaagcaacaacttgcctggctgcttaatcagtatggttatgaactccagaccgtttacggctactcagagcagcaagcggcacaagcaatacagaccctgacgaagggcggagcttttgttgcatcgacagctgatgccaaagcctataatgaggctctgagctatctgaagatgtacggtgtgccgtcgggtcaagccgctatgggtacagatgccttgatggtacttcctggagttcccggcgctctggtgcgtggaacggtggtggcgggaggtgcataccagacaggtacagggataggtcagattactgatggtaactatagtgatgggaccctaaacgtaggtcttggtactgctgctatatttggtggtatagctgggcaaggaacggtttctaaacctggtggaggtattatctctcagggagatacgagcttctggcaaaacagtaccattggtaacaatattgcaaagtttgatggaacattgactggccgaccaacccctgtagatccgaagatgacacaggagaatattcgttctcttaatcgtgaaaatgaaagtgcttaa

SEQ ID NO: 390423 - DNA, 282 bp, Salmonella enterica
gtggagcaaaatccttctgtagcaggaaataaaaatccagactatcgaattaatggcgagatttttgataactatgctcctaaatctaacagtgtgaggaatatctacagcgaagttaaatctaagatagataaaggccagacagctaatgttgtgatcaatatgtctgacactaaagttagcgtcccagaacttcaaaaacagttaactcagtggccaataatgggtctagataaagtaatcgttattgataaaaccggtaatgctatcagggtgaagtga

SEQ ID NO: 390424 - DNA, 306 bp, Salmonella enterica
atgtctataggattaacatgttttactaagcttccttttgcagagttacagcataagttgaacgagtttgcgaagcgatatccggatgtctttcccgctcactactatttatctactgctggtataccacatccaatccaaaaagaggtatctaatgagtttgggctggatccgctatcttattgttatttatcggtaaataataagattctcgaaatatcaacggatgaaatggctgacatgatcagaaaagagttgggttcagacaacgtcattatattactaaatggtgaagatcagatctga

SEQ ID NO: 390425 - DNA, 717 bp, Salmonella enterica
atgaagtcctgtcaggtgaaaggcggtgactgcggcggtattatcaaaaagtacgaagagttgagtacggcacagcagaagcaactgatcagtggctgtgcagccagcccggcaacctgccagcagaaatacggtgatgtactgactgacagtctggcagtgaagcaggcaatagatcgtgctctggctgaagatatcccgatcaagatggtctacgatctgacggcgacttttgcgcagcaaatgcaggccgaaggggttgtcgcgaccaacaaagtctcggaagcactccagaaagaatacggtctggatgaagttcaggcgggaatagttgcgagcgctgcagcgtcagcatttgggggaattagtaaggcgaaagggaattccctgcctaaaattgaacaaatcctcaagccagagaaaaactgggaaactgctcgaaacaaggcattggatcttgtaggtaatttaggagcggactctaagcccgttatcggacgtttggaagtcagcgctggtaatgggaaagtcataggacggcaatccagcgatggaaaagttggttggcgtgttgattatgatcctgaaaaaggcacacacatcaatatatgggattactcacagggtaaaggccctggaaaagcagtgaagcaagtcataccttttgaaggtaatgaaaagtcttttgaaacaatattgaaacagctaaacaggtag

SEQ ID NO: 390426 - DNA, 375 bp, Salmonella enterica
atgactttatttgatgagtgtcgggaagcactgagtgctgattttaatatagtagaggggctggctcagcaggaggctctgggcattttaaataagtatcctctcgcgaaaggaagtgttacatggtcagagatcaggcattctgattatgagagttttgatgagctattgagtgcaaactctgtaaaaaacgatgacatgtttgtctttgcagatgatgcaagtattccagtttttaggtcaaatctaagattaatcgctgaaaatatctatgacgtaacagctttatcgcccaaattattcatttttaatgatgaagtgataatacaacctttattcccaactgatatgttccgtttaggaatcaagaaatag

SEQ ID NO: 390427 - DNA, 564 bp, Salmonella enterica
atgcagagtactaataatgtagcagatccgttaacggcgctcttgtctaatttatatactcaatttgagaggtatgctttgaagtacaaatgttggtttgagaaaacctgtatgacatcagatgattgttttatactgcttccgggaaccatacgtccaatgcagccgtccgtttccaaagggtctgcagttatagtttttgtggatacaaagtggctctcagtacatgcactaaaatcttttggtacttcaattccagaagagtgtttgactaagcaaagtgaatggcgattgcattattgtaaaggagatagatttgatttccctcagattgcgtgtcgtgttagcgatagcattcaatttattgagggacgaaatagatctatagtcgcatatgaagtaggtattaaaacaatccctgttatggctccaaaagaagatctgggaaggatgtcggactatatatcagaagaccctgaatattttgatttttctgatgtgaaggaaaaaattcctggtatagaagtctatatgaagaaaaatggagttctgcaaaccatttga

SEQ ID NO: 390428 - DNA, 864 bp, Salmonella enterica
atggaaagtaaagaaaaccacgctctttcattaatgataaagtttagtctttttgaagacgagtgtttttctgttcttaaaaatcactttggcgaagcatgttataatgcagcaatcactaattataaatcaaactacaaaagatatgttcaccgatacgtggctattgcccatatttatcattctttaataaactgttcatcactttttgacatgaatgtcagattgtatctcagaaagcaaataaccgtcagagatgaacagttaaaaaaattttcaatggctatgcatgaaagctatattcaacagcttttcattcagtatgcaaaactttgcgaggcctttatggatattatatctgaggagggcaaagactcggcatcacaccaggataaatacaacaacttaatttctaaaaacggtcttgaagatgtatatgcgcctttgcatgaattgttgaaaaagataaagagcagcagcattcaaatattacgcaataaaatctttgcccatccttataaagagacaggaaaaattgctgccttttcacctcacattgctgttgaagaaatatataaaaccttaagagaactttgtgatgaagataaaaaatcacaatatgataatgaagaaagaaagatacttttcttcacaaaccaccaccttttaaaaggtgaaaattcaaaaaaacatttacgtatcatttatgagtttatgaaaaagctaagaatgaatgtttttttcaatattgatccatacatacacctggatggtcaggatgcaattgacatgctcaaaacatgtctcataataaatacccctcttacttcggaaataaaatcaaaaaaacaaaaacttcaatag

SEQ ID NO: 390429 - DNA, 1932 bp, Salmonella enterica
atgaacacacccttacatccggatgatatcagccggtttatcaccggccgtattatcggcagtctggccgcaggccaggtgccgtggcacggcaccgcgccgggtttaccggagcatgccctgacgggcgagccgtttaccggcgttaacgtgctgttgttgtggcaggcgatgcagcagcggtcactgcattcaggtcgctggttaaccggcgatgacctccgccagcttggcggtcaggtcaggagcggtgaaaaaccggtgacgctggttcggtaccggccgacgctgtcactgtttaaggtgattaaccctgaacagtgtgacgggctgccggagacgctgcagcccgggtggccactgccacccccgccgcaaccgtcactgagcgttgtccgtgacctgctccggagcagcgggatacccgttatccaccgggacaatattttaccggtctggcgggcattacatgaccggattgagctcccggcggcggcttatgccggggaagaaacatactggcaggatatgctgaatctgctggtccaggccaccggacacccgcagcggttacatcgcttcggcttaacggtggacgggcgtaccgatgaggttcaggaagccctggtggcggagctgggggctgcgtttctgacggcgtccctgggactgcctggcagacagccctcgcggcacgacgtggcaccctgggtgtcatttttacacgacgacccgtggcgcctgtttcgggcggcggaggcagcgcgaaaggcgatggtgtggctgagtgcgcgaagacccgcgatgacgacggtggagatgtggcagaagatggccacgctgatactggagacgcattacggttttccactcgacgacacgacgctgggctgtcgcagtgtggttgagcgccatcttgagtgtggcatcacaccgctggtggccattaacgcgctggcgcgtatttaccagtgggaacggtgtgaccagccgcagcggtcactgtttctcaacgacgtgggcgcagacagtgaaatactgacgttgtctgaaatgtgtcccgggctgctgacctgttaccgggttcctgctccaaccggcatgccggaggaagcggaacgggctgacagttttcctttgctgccggctccggtggcatcggaaggcgagggcgcggcgaacgacgacgggcctgatgacccggatgataacgtggtggcgctgccgtgggctgcgcgtcgggggaagaacaatccgcatatacagcggtttgtcagcctgtttaaccagacggcaccggatgcgaatcgctggcaggtcttcagtgattttgtccatatggcagcctgctcgctgtataacgcgattcaccgggatgaggcttttgaagcggactatatgcaacgggttgcacgctactctacggaggatgcgcacaacatgtcccgtctgctggcagaggtgatacaggggctggaattctgtccgacggatttcctggggcagattttcatgagccttgagctgggcaatgcacgtcatggccagttcttcactccgtacactgtctgttacacgatggctcgtatgaccctgagtgacagtctgtcggcgctcacctcaggggagcgtgacttcatcacggtcagtgacccggcctgtggggcgggtggcctgattgtggcgatggcggaggctatgctggaggcggggtttaaccctcaaaaacagatgatggtgtactgcgtggatattgacccggtggcggcgatgatgtgttacatccagctgtccctgatgggtatcccggcgattgtggccaccggcaacagcctgaccgtggccattaagcgggaaatggcgacgccgatgtttgtgctggggcactggcaccaccggtggcaggccgaacggtcgcggcaggcggcttag

SEQ ID NO: 390430 - DNA, 456 bp, Salmonella enterica
atgtttaagcctcttgttctgatcacggcattattactggcgtccgtccccctggttcactcaagtgaaaatggtgcaaatatgttgatcaaatctcacagcgcatttgactatcagcagaccagagagcttctgctcaaagcaatctcagataatggtcttgtattatttggcgagtttgaccatgcaaaagcagcccacgacgtgggcctgactatgccccccaccaccgttctggtatttgggaatcctaaagggggaacccctttgatgttggctcacccggatctcgcactggatttaccattccgggtacttatcagccagcttcctgatgggcaggtggatgtcagttatcatgcggcagaagagctccagcgttatgggcttgatgccgcttcagtccagacgttgaaaaaactggagcaacttgttcagaaaaacattcaaccatag

SEQ ID NO: 390431 - DNA, 141 bp, Salmonella enterica
atgctcaatgatttcactgccccggggagttcacagctaaactttttcgatgatattcagcccaacagcaaccagttgatgaagttctgggcggaattgaccatacagtactgggaaaagtgtggtttgcatggtgagtaa

SEQ ID NO: 390432 - DNA, 450 bp, Salmonella enterica
ttgcaaattgaactaatgaatgaagcctctttgaacacgtggcatgggcttcgaagccagctatggccagaccatggcagtgaagagcatattcgggacggtcaacacattttaaattgtcccgataaatatgtttcattcctggcaatcaatagccagggccgggcagtagcgtttgctgatgcagcggtacgccatgattatgtaaatggttgtgaaagcactccggtggtttatcttgaagggatcttcgttagtcctgaacaaagaggccggggtattgccaaactgctggttgcagccgtacaggattggggtgtgaagaaaggttgcaccgagatggccagtgatgcgtcgttagataatcatgcatcctatcaaatgcatcaggctttaggctttgaagaaaccgaacgcgtgatatttttcagaaaacgaatagccggttaa

SEQ ID NO: 390433 - DNA, 171 bp, Salmonella enterica
atgatcggggaagaccctgttaaatacaagtctgttgacatatacattctgcaattaacaggatgcgctaagtacacccagaaattagcaaatacatacagtgtagttttcagagcatttcactgcaggagatatgaatatgacggttatgcagaaaagcaccatggataa

SEQ ID NO: 390434 - DNA, 1077 bp, Salmonella enterica
atgacggttatgcagaaaagcaccatggataatgtcctgttttcggggctcggcttactggctgtcagagttattcagggctttatctactggggaggaggaagtcggcggtttatctatgcgccggataagcttaatccagatgctccccactggatggcttataaatttcagacagccatgcccggcgctctgctggggctggaccatattatttccttcatgctccagcatttttggctactgtatgctggcgtcatactgttcagcgcagctgagcttattgccggattattccttatggtcgggctttttacccgaatctcggcgctgctttctatgattttttctgtgttgctgatgctgatgtttggctggcagggagctacctgtatagatgaatggactatggcggcgtgtaatctggcaatgggaacgacgatttttctttgcggttcgcaggtttatgcactcgacaatatcattttgaagaaaaagtcacatcttgccgatagccagatatttaagtggtgctgtggttcacttcctttaccagtaagccctggtgcttataaaaaactggcgttagggctactggcttttgttgtgatatttgatgtagggacttacagttactatcgtggttccgtagtcaccccttaccatcacggcccggtcagtcctacgacacatcatattagtcttacggacggcaaactcctgtcagatggtcaggtcagtgtgcatgcttatcttgatgcaggaacccctgaggctccagagcatataatggaagcctggcttaaagccccgagcggcgaaacgcttgttcactggaatacggcgatgttgtccgctctccctaaaggtaacttccggaatgattatgattataatcagttctctgcgggacattatgggatacaagccatagtgggctctgctgcaacaattacccttccgacaggagaacttagagaaggccttgacagattgcctgatgggccgctgactctggtactgatggatatggaagggcatacatttagtgcagtattaagccgtgtaagcgagtga

SEQ ID NO: 390435 - DNA, 531 bp, Salmonella enterica
gtggccggcaattcagaaaacggttccggggtacatgtcacgggtgacagccatctggacggtgtggatcttaacggcaccacgggcagcggcagcggcatcgagcttgacggagacctgacgtatacggacgggacggacattggccaccatgtgaacgcgggcggtggcggtcaggaggtcagcggtgacgggaatatcagtctttatgtgccgccgtcgcctcctgacgtgacgccgccggatgtgaccccggacaaccctgacgtgacgccgccggatgtaacgccggataaccctgacgtgatgccgccggatgtaacaccggacgttcccggcgtgagttacgggcagttgtcccggcagcagtcggtgataagccaggcatcttccggagctgcggtccgcgggacttccggctatcaggccgcaccgcagaaagtggatatcagcctctgtgatggcagtgagtgccggtccatgaaactggatgcgggcgggccggcgcggtcccacgtaacggacaaataa

SEQ ID NO: 390436 - DNA, 528 bp, Salmonella enterica
atgattgctgatttatttgaggcaacccccccgaaaaaaaggcactatggggcggcgttttctgcaggggtcataactgggattatttctgcgtttgttaaatcaggaactgaggccattcttcctccgcgcactccagacaggatcgctcctcctgtaaaaatgttaaatgactttggtattgacttgcatagcctggcataccgttactccggtcagatggtttactggggagggaatgccattcatattattttctcaattgttgctgcactcttctattgcgtcatcgcagaaattttcccaagagtgaccttgctacaggggatcgtattcggcattttattcgccattgtctgtcatggaattgtgttacctgttctgggattatctccggtggtgacacagcttccagtagatgaaattatttctgaaatactggggacatgtctctggatatggtcaatcgaactattgcgtattgttctccgtgttaaaatagttgatgctgattcaatcagcaagtaa

SEQ ID NO: 390437 - DNA, 591 bp, Salmonella enterica
atgtcaattaatggcttgcagttcgtaaatggtcaggaaaaggagaaacacttaggtggaaatattgcggaaggcgatccgcgtacttttgcgccagcagtctgggactatgtcattgaccggtttgctgtcagatctgttcttgatattggttctggaatgggatttgcggccagttatttcaataatcagggaatgcagacactggccgttgatgggcttcccttcaacatacagcactccgtattcccagccctgcaactggatatcactcttcagcctattcagtgcaaagtcgactttgttcactgccaggaagttgttgaacacattgaagataagtacctggaaaacctgctaaaatcgttaacctgcggaagaattacgctaataactcatgcagttccgggacagggtggatatcaccatgtaaatgaacaacacggtgaatactggattgaacatatgaggcgttactcatgtgaactccttgaggaagacacacgtcggatccggcaactggcggctaatgatggtgctgtatatctcgcgcaaacaggtctgttatttgccaaccgttcacgaatttag

SEQ ID NO: 390438 - DNA, 804 bp, Salmonella enterica
atgaagccaggatcctctctagagcaagatgtacagcgcgtttattcatttttactcaatatgcgtgatgagggggtggtcgttgctaatcgagtatttatgacaggaaagtcaggggtccagcatgaagttgatgtttactatgagttcatccgtgcaggtataaggcaccgagttgctattgaatgcaaagactgggtaaatccagtttcaaaagggcaaattcaagagtttgagtcaaagttacgtgatatcggaaatataacaggagtagtcgtttctagaaacggttatcaaagtggagcttccgcatttgccaggtattgggatatattgccaattctttttagcgacctcccatcttttaatatcttgttaggtgagcgactgaaaacagtggcgcttcctggggaggattacgtcggtgaaccattctggataattatggagatacgtggcggtaaaattacaggatctcattatggaacaaaagatcctgtgtcgggaaagggattaatcccactgacattttcaagagcgcatgcagagcgactttttcaagaagcaggacttgactcaaaacgatgggccattcgtggtttgcctcgttatgctttacgagcattcctcatccatctggagctttatgaaaaagctatgaatactggggccgttatttgctttttaccaccaggcgctcgacctgacgctaaatttatcgggattcaggcgtcaagagaagatctgattcgtgattattatggtgaattaattccctctattgagaaaggtattgatggttag

SEQ ID NO: 390439 - DNA, 1779 bp, Salmonella enterica
atgaaaagtctgattaaacgggcgggtggcgctcgttctcaaaaagtgtgccgcgtttctttcctgctcgcacctcttactttgttgtcctggactggcgcacaggctgcagtaccttcggtgtccgttcctggtgctggcaccctgggcaatcagttgcgtcaggagtcggtgcacaccccggcagcgccggtcagcgctcccttgactttacctgaagaaggtgcggcccgccagacgttgtcggccgataatcataccaccataactgtaaaaactgtgttttttactggcaatccgccaggactgaaagggctgagcgaggctgacctgcagcgccagattgcacctgaccttaaccggccacagacctttgccgggctggaggcgatggcgcagaaaatcactgatctataccgtcgcaatgggctgctggttgctcgggccgttctgccgccacagactgtgaagggcggtgccctgaccattcggattattcctgggcgctatgacagtgcgcaaatccacaattcagctctggtgcgttcatcggttgtgcagcgcatggttcggactaccactccgggaagcgatgtggtcacccgggcacaactggagcgtgaagccctgctgctcagcgaaattccgggagttaacgcacaggtggcgatgaaggctggtcgtcagcagggtaccaccacgccggaaatcaccctgacgcccggacagcggttcggcggttatgtcgggctggataatcagggcgacccgacgacaggacgcagccgggtaatggctggcggttatgcaaataatctgctgggcttgggtgaccagcttcgtgtggacctgctggatgcctacgaaaaaagcgatctgttcaatggctctctggattacagcctgttggccggtggtgcttacggtacccgcattggggcgaactacagccacctgaactaccgatataacctcaataaactcggatttaaaggttattccgataactggggaatttacgtcactcagccgtggattcgtacttcccgggctcgtgtggatgtacgcctggacggcggacagcaatttctgacggatacgtatccgtcaggctggggcggaaaaggccgtaaacaggtcagtaccggctcactgaccctgagcggctcggtggcagatctgccgggtggcgtgaccgggtttggcttaaccggtacgacaggtgatgttgctttgcgaaacgagactgcccgtgcctggaatctgaatgacggtcagtttgcccgttttaattaccggctgaatcatgaccagcagataggtggcctgttctcggtctatgcaggggtaaatggtcaactggcgaaccataatctggattcttcccaaaaattcctgatgggcggaccactggcggtgcgtgcctatgatatcggggacggctcggtagatcagggcctggttggtacggcagaagtccgtagtcgctgggggatcccggtgcaacgcttgctgggggctgcgccgcaactgacggtggctgcgttttatgaccaaggctggggtgagcagtaccgtaataataacaacggatggggcggacgtctggccgacagcaactatctgaacctggccggtgccggcctgtatgccacagtggcggatgcaggaaattacgccctgaccatgacgtgggcgcaccgtacgggcaatgcggacccgaatgcagtgcatgatgaccatgatcgactctgggtatcggcggtaaagaccttctga

SEQ ID NO: 390440 - DNA, 5781 bp, Salmonella enterica
atgaacagaatttataaactcaaatttgacaagcgtcgtaatgaactggtagtggtcagtgaaattacggcgggcatgggcagggaaaaaagtaccggtcatatcgcagacctgtcggcgctgtccccgttcagaaaactgctgggtacgctaaccccgcttgcactcctgaccgggctggttgccggcctgctgccggcaatggcgctggcggcagacctgcccaccggcgggcgggtagtgggcggccagggaagcatcagcacgtccggcagccagatgaccatccatcagcagacgcagaacatggtcactgactggcacagctttgacgttggccggaacaacacggtgcagtttgtacagcctgacagcagcgcggtggcgctgaaccgggtgacgggggccagcgggtcacagattatggggaccctgcaggccaatggccaggtgttcatcctcaacccgaacggggtgctgttcgggaaagatgcccgggtgaacgtggcgggcctggtggcctccacgaagaacatcagcaccgcggactttatgaaggggcagtatacgttgggcggcagcggcaacccgggggcgcaggtcattaaccagggcagcctgacgacgtcgaagggcggctacatcgtgctggccggggagcgggtcagcaacagcggcaccgtcaccaccccgtcagggaaagcggtgctggcggccgggaaaacggtcaccctgcagctggataatggcgggctgacgtcggtgtcggtgaacggcagcgtggtgaatgccctggtggagaaccgggggctggtatcagccactgacgggcaggtgtacctgacggcgaaaggccaggacatgctgctgaacacggtggtgaacaacagcggcacccttgaggcaaaaggactggcgagccgtggcggggagattgtgctcaacggcggcgacagcggggtggtgagccagtccggccggctgctggcggacagcgggaccggccggggcggtaaaatcaccctgaaggggcagaatatccacctggcggcgaacagcctgacctctgctaccggcaaaaccggcggcggcgaggtgtatgtgggcggcggctggcaggggaaggacagccgcatcaggaatgcgtcaaaggtggtgatggacagggctgccacggttgacgtgtccgccactgaaaatggcaacggcggtaccgccgtactgtggtctgacgactacacgaacttccgggggatgattctggcgcggggtggggcgtggtcaggcaacggtgggcaggtggaaacgtcgtctcatcagaaccttcaggcgtttggtgcggtggatgcgtcagcacgcgccgggcgcggcggcgactggctgctggatccgacagacgtgaccatcgtggggactgggagtgacagcggtatcggctccgccaccgcggacggaacggatgtgttcaccccgacggccagcggggcgcaaatcctcaacaccagtattcagaaccagctgaataacgggacgagcgtcaccgttaaaaccagcgggcaggacacggccgggcatctgggtaacatcacggtcaatgccgatattcttaaaactgcgggtggcgatgcgacgctgaccctgctggctgacaataatattttgctgggcaccttaaacggtgcaaatgccacagccggccgctacagaacgatttcctccacgtccggaaaactgaacctgaacctgctggccggcgggagccagaagggcaacatcacgctcggcagggatacacatatctcactgaacggcggtgattttctggcggatgcggccagtccgggcaacagcgtgtcattttactttgccaataatggctacgttcatggccacaacataacgctgaatgtgggggacggcctcaacggctacgtctacagtttccaggccgacaatgacctgaccattaatggttccgtcaacggctcctcgggttatgccgtgcccctgagttttaccgccggcgggatgctcacaatgaacgcgccgggagatatcatcctgtacgccacggacagcagcaatggcggcagcagcgtggtgatccgcggggacaagggcgtcagcctgaacacggggagtggaaatatcgtccttcaggcggggtcggccagtaacatgaacgccagcgtcagcagcggtaacggcacggtgtcgatgaatgcagggggtaacctgacgctgaagtacgtcggcgtgtcgtcaggcaaagggcaggatatcagtctgcagggtgccggcaatgcgaccgggatgattacggtgcagaactcgaacctgaccagcaacggcggcaatatcacgctcacccagaagaaccacaccacgacgggggctgacggagtggcgatggcgaacccgaatgccatgacggtgaaggtggatgccagtaacctgaatgcaacctcctcagatacgtcggtgccggcaggtgatatccgtattaacgcgtggaacctgaataatgtggacctgagtgcagcggcttacaccaacaccgtgcgtaacggcagtgccatgctgcaggtgagcggcaacagtaacctgagtggcaaagatattacgctgcacacggagctgggcggggcgaaggcaacggggctgccggtatttcttaatggcgcaaacatcatggcagatggcgacattaccctggatggtcttgcgcagggcggggcgtcgctggcagcactggaactgcgtggtgcaggcaacaccctgaatgcgaagggcaatatcacgctgagaaacaacagtaccagcgttggtcaggcgggcgtttttttgaatagcagtggtgccagcgcagttaccattacagctggtaaggatattatcctggacggtagcagcaagactggtactggtgttcagataacgggggccaatactacagcgaaggcggtaattgcatcatctcaggggaatatcaccgttaagtcgactggaacaacaggtttcagtcttgaaaatgccacgcttaaagccagtggaaatatcagtgtcgattcgacgggcaatacaatcggtatcagaataaagaatgtggatttaatttcagataatgggggggggactcttaatggtacagccattaccggggggtatgatgccagttctgtttcgggtgggattctgttttatggaaatgtgtattttaaatcaaagctgggcactatagttaatgcaaaacatctgtcacataatacatcgtactccccacctgtacctattgtgctctatgcagcgaatgtcacatttgatggaggtggggaggttaataccctgggttcttacgcgggaatagttggagagtttgcatcgaatattataacccattcaggagatcttattatcaatgctgtgcttgatggtctggcccagtcaggaccaacaggagcagcaggtgcggcagcttctggcgccataacttttgataattattaccaaccaagcacaataggcattaaagctgataacgggaatattactataaatgctgatgcctccgccgacaaaaaatacagtttttctgcgttcgcggcggcaacacctcagtctagcgttgttgctggttatctgaatgggtttaattttagcggtaatggaaacatcttcgttaccgggcgttcaggtgcgggagatgctgtcaatctgcgattttttaataaccagaacctgaccgggtgtctgaccattaccgggataagtgattccggtatcggggtgaattttgaccgatatctgtccactaatgtcagtaatgccaccattacgggaagcagtgtttccggcaatggtgtgcaaataacagccaattccggcacagcagatctgaacggtaacaccatcaccggcatatccagagacggagacggtgtccggttcagtggtaaaaatgtcactatcactaacggccagctgaacggctcatcctctggctccgggtccggcgtgtttctgatgggcggcggtaatttcactcttgatggcgccacggttacaggctcttccgtggatggtcacggtatcactgcggcgggcaacctggctctcaataataatgccaccctcaacggcactgccaccggcagtggcaacggggtgcgcgttgccggtaacctgacaagttcaggcggagcggagctgaacgggaattcaacggccgggaatggcgtggcggtgacgggcgacctgaatctgaccggcggtgtgaatatcaccggcaggacggacaccaccggaaacggcagcggggtcagcgtggggggaaatctcaccacggatgaacactctcatatcaggggaaatgccacggcatccggtaccggagtcagcgtgggcggcgggctgtccggtgctgatgtctcagggggctcagcttccggtacggggattgagctggcagacacctccagtgtggtgaactccaccctgaacggctcttccacgacaggcaccggggtgtgggtgaacaacggcagccaggtcaccgacaccacgataagcggtcattctgacagcggaacgggcacccgctggggaagccaggtgacacacgacaatgtgaccatccaggggaattccacgtccggcagcggcgtgtacctggaggatggcaccaccctgaataacgcgacggtcagcggttcgacggctgacggaaagggggtggatatcgccggtaacctgacgaacagcggcaacagtacggtgagcggaaacgccacgggcagcggtccgggtgttgacctgaacgggaatgtgacgggcggaagcatcaccggcagtgcggatacgggtaacggggtgattatcagcggcgggaacagcaccgcgacggacacgaccatcaccggcaataccgtggagggcaacggggtgaatgtgaccggcaacattaccaccggtggcaacaccaccatcagcgggaatgcgacgggagcgggaaccggggcaaacatcagcggcacggtcaacgggaatatcagcggctcttcagacagcggtaacggcgcgcatattacgggcggggcaaacattacctccgggagcagcattgccggggagtcgggcagcggaaacggaacggtcatagagggtaatgtcaccagtgacgggagtattaccggtaattcatcaggtggtgacggcatcagcatgaacgggtcggtgtccggtggcggtacagtggccggcaattcagaaaacggttccggggtacatgtcacgggtgacagccatctggacggtgtggatcttaacggcaccacgggcagcggtagcggcatcgagcttgacggagacctgacgtatacggacgggacggacattggtcaccatgtgaacgcgggcggtagtgggcaggaggtcagcggtgacgggaatatcagtctttatgtgccgccgtcgcctcctgacgtgacgccaccggatgtgacgccggacaaccctgacgtgacgccgccggatgtgacgccggataaccctgacgtgatgccgccggatgaaacaccggacgttcccggcgtgagttacgggcagttgtcccggcagcagtcggtgataagtcaggcatcttccggggcggcagtccacgggacttccggctatcaggccgcacagcagaaagtggatatcagcctctgtgatggcagtgagtgccggtccatgaaactggatgcagacaggccggcaccgtcctacgtaacggacaaataa

SEQ ID NO: 390441 - DNA, 2022 bp, Salmonella enterica
atgggttctctgacttcagagtctgaaaaaaccgttaccgctgcacatgaccgggtggagtttgtcggcgttcccgtcggtcacaatgttctgccggataattttaaccttgagcagtttgagtaccaggtgacacagccggacaccgagccagccgcacggatgcttctgcttctgctagcgcagctcgaccaacactacggcaagtgggggccgcggttttcggcttatgcgccgggtacgcccgtggaagggcttaaccctgttctgtgtacccggattgccggggctgtgactacgctgttctcccgtccggactttacggtcagcgacggcggctatatacagcttatgagcttacaccgctggttggccctgatttttgccgtcagcctttacaggcacgccgaccacattattcgcaatattaatgcagcgggcggtgggttagtcgacccgctgacgcttaacagccataacctgcgtctgttttgcctgtgttacttcccggactcacagatagccctgcaaccggacgtgctatggaggtacgatcgccggacggtggcccgattgttcctggcgcttatcagtgggcgtgcgctgccgacgcctgccgcgcacggcaagcgggaacaactgctggcctggctaccggagcgacttgcagaactggactccctggaatccttacctactgaagtgctgcacgatgtgtacatgcactgctcctatgcggatctggcggaaaagcaccggataaagcgcagcctgaatgaccttatccgctgctcgctgcttgccggagattttgccgatatcgctgtgggggataaccgggggcagacggctaatgttaatccgttgattcagggccccccaaaaaaacctgtcatgctggttgtgttggagtggttcaccagtcagcacagtgtgtaccggacccattcccgggcgctgaccgccctgcgaggccgcttcactgtccatgcggtggggttgacctcggcggtcgatgcggcgggccgtcagatctttgacgtcttccacggggtggacgccaccactgccctacaggaagcgtatgccctggccggggaactgcgcccggatgtggtgctgtacgccgggataggtatgtttcctttcacgatttacctgagcaatctgcgtctggcgccgttgcagctggttggtctgggtcacggtgcctcaacgttctgtgggcaactaaacggctttgtgattgaagaggatctggtcggagaagaacgctgcttcagtgaaacggttatccgggtacccgccgatgcgatgccgtttgtccctcctggaggcatccaccgcgtgccggttatgcgcacgccatttgttacccgccagcaggctcagtggcgtgagccgctgccggtccgggtggcggtgtgcgcctctatcatgaagattaacccgaattttctggcgacactggcggaaatacggcaccgcagccgggtggccgtgcagttctgtttttatctggggtttgcgcaggggctgacgctggattacctgcgggatgccattcatgccgagctgccgggggcggaggtgaatgcccacatgtcggtacaggaataccagacggccctgaacagttgtgagctgtttgtcagcccgtttccctacgggaatatgaacggcgtggtggatgctgtgcgccagggactgccgggtgtctgtctgaccggaccggaagtgcatagccatatcgacgagggattgttccgtcgtctggggctgccggaggagctgattaccacagggtatgaggcgtacatccgggccgcgctgcgcctggtggaagagcatgactggcgtgagatgctgcaacaccagttactggacaacgacgtggaacaggtgctgtttcaggggcatccggagaagtttgccaccgttatcagtgatgtatggcagcagatccggccctttgtggcggtctctgacccgataaaagtacagaagggaaggccgtcatga

SEQ ID NO: 390442 - DNA, 474 bp, Salmonella enterica
atgatgcggactcccttttaccatcctggtgattttgatgacaacggcctgctgaaggccccggtacttttctgggttgggctggttgtgctggcacgggcgtggtggctggcgggcctggtggccatgatggctccgtccgggaatacgcaggccggatttctctggccggatatcaggtttcaactgactgcgctggcagccggcgttcccggcatggtgatgctatttacttatccactgcgggagcggtggcctgctttttcccgggccgtctatgtgctgatactggccgcccttctggtgatggtgggggtagatctgacgggaatagtgtctgccggacagtgggatgcgggttggctgtttctctgtctggatatggcttgcgcggtgatgctgtggccggactgtcgccaccggactgtctttttcggtaaagggctgtggcgatcagtcagtaacaaagggtga

SEQ ID NO: 390443 - DNA, 381 bp, Salmonella enterica
gtgccagaaattcagtttattcaggaggtcatgcatcgggctgacctgttaacgggcagttttaacccgggcagggccattaagtgggtccggcaggagggcaatattcagcggatatatcgtctgcgggacgagacccggcaatatctgtcgggagatttcacgccgcaggcagtgagcgcgttctggtctgggctggacagttcgccggatatccgagcgtttattcactgcctggatgcaggggcacaggtgctgtgcagtcgcggccggaaaggcgatatctacagtatcccggtgctccactgtgtgacgaatcattttattcagcattatctgcatccgggcatgcaggaagaacccgtggcggcagcagggtag

SEQ ID NO: 390444 - DNA, 531 bp, Salmonella enterica
atgacagggaaactgcacggcagcgacagacatgctgcacccggcaatagcgacacagccggtaaaaaaaataaaattatgaagaaagtaaaacagagcaatcacgacgaatacatcctgccgccctgtatggtccggtgggctgacgaacctttgtatttgattatatcccgatgggggatgaagcagaaacggtggatagaccgcaatgatattgtggcgacatttcatataccggaccgacgggcttcattccagatttcatatatctcgcgcaaaaaagagcgggtggcctgtcggtcgcgctatgtaccggtagagggggggggtagacaacgcgtggagattttcattgaccgtattatcccggccagagatgaaaaccctcctccagaccttccccggcgacgtaacgtaccggcaaaacaggccggacccacgtcccgcggagtgggaaacggtatgaccgaaaacatcgggttatgggagcaacttcttaaggggtgccggaaggagcgtgatgatgaatga

SEQ ID NO: 390445 - DNA, 741 bp, Salmonella enterica
atgaatgaatccctgattatttttagtcgggagtgggtggtgacggcagctcttgctgcgctgctggcaccggcatactcccggccggccacggtggtttacgacctggatcatcttgttcgtgtgttacgggaaaacccacattccccggtggtactgggtctgcgtccgcatgagcaggtgacgcaaatgtaccggctgcagtcgcttctgaccggaagagcggtgctctttgtggggcgctgtttttactggacggactacagcctgccggaatacttcgggatgacccgttacggtttttgtacatgggatgctatgcgggatccgttttcccggaggatggagctgcggcgtttcaggcgtatgtccgttgatgaagacgatgaaaaagtggcaggggaggccaggcaggtcgctcatgctatatcagggataacggatatgaaaatactggaaagggctaatcggtggctgtaccgcgaactggcagcggctggtctgagcgggtttgaaatccgggtgctatcactgatgactgaaggccagaaaagtaacctgccgtcccggacgcggagtgtttataaaaacagcggactgcataagcttgggatgacaaaacatcttatgaacctgtaccggggcgtgaaggtgcgtccggaattgcagactgggctaccacttcagtctgaagaaggtaaatcatgcaacataatttcactcaggctggggactagctga

SEQ ID NO: 390446 - DNA, 327 bp, Salmonella enterica
atgaaagaaggtatctatacagtggtgtttgagagcagccggcagtctgtcggagaaggccttgtggtggtgaacaatggacgggtgcatggcggcgacattgcctgcaccatccgggggataatggagcgcccggtgatggcgctggaagtgcattattacaaccgggatatcccgtcggtgctggggatggaggaagactactggctggaaatgagttatcgcgaggtaggggaggggctctacgatttcagcggtcacgtgaaaggacatcctgagcgaaagcttaatgcgcatgcagtgtttttgacttctttactgaagtaa

SEQ ID NO: 390447 - DNA, 429 bp, Salmonella enterica
atgggggagcctgatgctgaattagcaccgatggttgatgggcttagtagcgcactatgcatgttaatattagttgctacagtttttattattgggactattgataccagcaccgcagtgttgtcggaatcatttcattttaaaacatcgatcttatcaaccaatacaattttttatgatgaagcaataagtctcccaaagagtgacttcgataagataagaaaagatataaatggtcaagcaggtaaagtcctggtggttacaggatatcaaaatggagaagagagtaatctcccctctaaactggcatataattttgccatttttcaaaaggcaattggaaacataccaatggaaattcagtacgtacaatcaaaagaaaatatatgtcatgtaaaattatcttgcataaaatgggaggtacagtag

SEQ ID NO: 390448 - DNA, 1008 bp, Salmonella enterica
atgtttgtcattgcaatcttagtttatttgctgacggttgtttcttttgtctcttttccagctatgcgctttttgtttcatgaggcaataacacttgctcctgaagttgccggggctgtgtgtgtggtatgcttttatccgctcgttattttcctggtacatcttaccagaaggatgagaggatatgaatatggtgtctatttaacaagccaggctaaacttgctgcgtcattatcagtatctcttggattaattggtacatttcaaggattaaccgaaatggtatcaacaatatctaagtctatgcaatcaggcggagatgatttagtcgaacgaatgaatttaatgatatcatcaatatcctccgcgttgagttcaatgtcttatgcgtttatcacatcaatatttggtgtggcatcatcggttatcatactgctgtctttaaattatatgattacttattatgacaagaaggccagcacagaaaataaaacccaggatgctgatgactataattcagaacggctggaaaaaattagtgatgagttaaaaggattaaataatataaatttctctatcatggaaagattacttgcatgtaaccaacaaaataatttggcggatgattatttaaaaaatatctcggaacttatatcccagaataatagcataacaaataatgctgctatcaatatttccagaacattggatgatttgagttcgaaagtcagtcactgtaatgaaaaatatcgtgaatattatacggggattattaatggtatattgcatggcaatgaaattaataaagatatcattagtataaacactgtgtttcatgaaaatgttttaacattatttgatgagagcgtgagtatcagtaaaaacattgatatttctttgcaaaaaaacagcgaaaaaataaatgaaatattgacttctttggatgaaaaagaaaatagaagaatggatagaattaaaaaagtagtagaggttttatcacatgaataa

SEQ ID NO: 390449 - DNA, 1203 bp, Salmonella enterica
atgaataaattacttgctgcttttattttttatgttcctgtatattgttacggcatggattatcataagtttatgggaattgtttataatgattccgaatctataaaatctaaacagtatgatctggagtcagagaaaaataatgcaactaaaactaatttatttttcgctcctaaattatcttttaacagcacatataaaaaggatagtgccgataaaaaatattttgatgatacattaaatgccaatgcattgatttatgattcatctttagctaataggttcaaagaaaaggatgctcggttagaagaattcagtaccgctattaatgttgaaaaggaaaaaatagcaaaattagtgctcgagaatgcaattagcatttatcaatacgaacgcctgaatggtagagcgcatgagctagatttggcggcaaaaaagctatatcaacaaataaataatcgttatgaaaatggaactgcaaatcagggagatttgcagcaagctaatttgttggttcagcgtatcgagggtgatataaggcgtattgagcaggagatagaaaattttcgtggcaacattgagattggcactggggttaattatcctaaaagtggaataactgtaaatgataaacttgtaggtaaaatacaacaggtggtaattaatcagcaggacttgagaaataatattgaatatcagcaacttggttttcagactgaaggaatgaagcaaaatgcaaaacaacagaattcgttattttcagtaagcctggttggtgagcaacgcaataataaccataaaagaatagaagatgattcatatgtgggtgtttctgttgatgttaatatttttgatcttgataaaaacatgagcgaaaaacaaaaaatgaatcaatatagatcactgaaatcaaaaatggatcaaaaatataaagaactgtcagggcaactaaaattattaggcttgcaatacaattcttcaaacattgaattggataattacataatgcaacttgatacaacaatgaaaataataaaaagtcaacgacaggagtataatatagctaaaacctcttattacgagatgctgaatacggagtatgattattttcaacttcaggagaaagtggttgatataaatatcaaaaaaataaccaataggttatccgtattagcgttggcaggaagaatactttcattatga

SEQ ID NO: 390450 - DNA, 279 bp, Salmonella enterica; identical to SEQ ID NO: 389537

SEQ ID NO: 390451 - DNA, 627 bp, Salmonella enterica; identical to SEQ ID NO: 381872

SEQ ID NO: 390452 - DNA, 681 bp, Salmonella enterica
atgataaataaaatagatgctaaagagataaccaaagaaaaaaacctttgggatgtttacttgctttgtaaacgaattactattagtacattccatgtttgtattttgctcacagcatctatttttttattgacaaactctttttttcttgagagggacatgtcacatttagtatctgatattagaaactgggctttgattggtttcaactttgcagtgacaacactaggttttcttattgcagggttcactatatttgcaacactatccaaacccgatatgtttcttcaaatgatgtcagtacaacataaaaaaacacagatgcccacgttaaaatataacttcatggcatttatgaaagttttcatctcttttattacatttactttcatttatctagttataattcttttttgtcagacaaatggaatgataggaaatatgattgatttagttccatattcaacagtgataaaagaattaattatcaaactcggatattgggttatagggactagccttatttacttagtattagtagtaaagacttttatttttaatatttatgccatcataatgaataatatccgttgggaattatatattaaaagaaaagaacaaaagatttccagtaacaaagggaaaatagataaaaatataaatgttactaaagtgcactaa

SEQ ID NO: 390453 - DNA, 1029 bp, Salmonella enterica
atggattttgttaaaaaactcgagtttggaaattacactctccgttttggtgatgatgttttattagactactatgatgaaatcgttttcccatcttttttagaaatggcaaacattcgcagaatatctgataaatcagaattctttttcattgatactgaatgtgtcatacttgatgaagaagcaacgcccccagtactaggaattaaagggaggattattaaaaacacattactaaccagagaacaggtatttgatggtgccgatttagtcgaagatcatgatgaacttgaaacagcacccagctctttctttcttctaatattaaatacgcacaggttaattctttgcaaggaagttagtggtgcacctacaattcaaaacttccagtcaacaagtcaatgcttcttaaatatagaatatgaaaaatacatatctcatttgtacgaaactgcacaaagagaacgcgaagaaaaccctgacttgcctcgagttactaaaaaaagcttacggagtgaaatcgaacggcctaagctaagaattacgccgttaactgatgaacaaagcttggagcaattcattgaaaattttagaaaaattcaaaatgtttctgtaaaactgctccctacaaatgaagaggaaattgataacgacgaattttgggagtcacttgaaagcgctggagacgaaatgggcagcatttctacgtcaattcgtttttcaaacaccgattcaggtttgaaccatgatgctgttttagaacaactcacatcagcaactaggttagcaaattcaggaataaatattaaaggatatgatgacaaaggtgatataatcaaaggcagtaatgatgattttgttttattaagtgagatgaatgaattatcaaaaaacacggaagtggctgcaaatgaaagttatgaacgatatgaaaaccttgtaaacgaaggtaagatatctctacccagagctctttcacaaaagacgattagaattattagcaatatatatgaaaggtttggcagatga

SEQ ID NO: 390454 - DNA, 594 bp, Salmonella enterica
atgtcaacaacaaagtacccaaatgagatctcactaaattttgagagcggagggagagaagccatcgaaaggctagtttcagcatatggctttacaacgcgccaagctctagctgatcacctgaaggtatctaaaagtactttggctaatcgatatcttagagataccttcccttctgactggatcatccaatgtgccatcgaaaccggagcaaccctcacttggttagctactgggcacggacaagtatttgaaagtgaagaaagtgaagttttaaaaatttctaaagtaaaacttattgacaatcaaattttcgatgctggtcatttatttatagataagactctgctttctcattttaatgatttactcgcaattgaggacgaacattgcacaaatattgcacatataaataagtctaatattgaagatggcagatggcttgttcaataccaaaataattttaagttaaaacaaatctttctattgcctggaggtaatcttcgggtaacagatgatgatttaacatttgattgtaaaaaagaagacataaaattagttgcaaaaatcttctcacagtaccgtactgtttaa

SEQ ID NO: 390455 - DNA, 222 bp, Salmonella enterica
atgaaacctaatatttcaatatcgttggccgtaccttcgatttcaattgaaaagtacagtgaactcacagggttatctatagacacaatcaatgacatgttagcggatgggcgtttgatacggcaccgcttacgcaaagataaaaagcgtgaaaaagttatgattaatatcgccgctatgactatcgatgcgctctcagattgcaatgtgtccatcaattag

SEQ ID NO: 390456 - DNA, 498 bp, Salmonella enterica
atggcacttaccaaatgtaaagaatgcaaaaaagaagtctcaacctctgcaaaaacgtgtccccactgtggcgttaaagatccggggtttggtgcaaaacagaagcttggcggatgccttatcttgataatcatcgttgcagcagtcatgtactttgttggtggaagcgatgacaagcaaacggcggaagcgccaaaagtatgctctaacacggatacccagtgtaactttgacaataacatggtcgatgcagtgaccaaatgcaaaccactggtagaacatgcagcaaaatatgaatttgaatggactgacggccttttagatccaatgttctctcatgcacgaatcgacagcaaaaaaaatcagctaacgttcatcggggataaggtcaaatttacaaatggctttaatgcaaaaatgaccatgacttacgcttgcactatggacctgaaaaccaaagaaatagtggatttcaagatttcagaaggcaaattgtaa

SEQ ID NO: 390457 - DNA, 2787 bp, Salmonella enterica
gtgacgggcgatgcggaatactggtcgtcaaccaaagatcagataaacgactaccacgctgccgtgcatatgaacagcgcgtcggtcgtcagggccgccaacagcgacacgctactggtcagttgtgtggataaggcccagcctgcggcgcatccgcagataacgctctctccagaggggccgtataaagcacaggtgggggaatcgattgatttagtgatgaccgttgtggatcgcgacacgcaaaagccgctgccttatcgctatatggagctgttcattgacccagcgaaaaaccgcaaaggagagcatcaggacgcgtgggataaccaacgggttacaatcaacaccgaagatatgcgcgcctcgtcgccggaacactataccggtgtgaccgacgccaacggccaggtacacctgacgttaaaacacgacagcggcctgggcgtagaaacgcccatccgcatcgtgatgccggatgatgaaggcggcagcatcgagttgccctttagcgtaattttcaccgtgataaccagcccggatgtggacggcgccaacatgtggggccacatgcagggcgtggtggacgcgggcaacctgtataaacgcccgctgctggcggtggaaaccagccacaaagacggtcagttcagcgaaaacaacgaagagtgggcgacgtttaattcagtggaaaaagccaccgcgcagtgcggcatcggccaggtgccggatcagtcatcgctggcacatttatacagcgaacatgctggcggcaagatggaaagcgaacatggctggccaaccgaagactattacatcgccgcggacagcgacgcctcgggaacggcgcacgtcaaccttgaaaacggcgatagcggtaaatttaccaatcaaccgaattacctgacctgctcggccaacgaaatggtggcgcagcttgaggtctacttcaatgatgacccggcgaccaaaaacagcgatgcggtcgccaaagtgggtgagcagattaagctgaacattcattcgcgcaacgccctcaacggcatggcgatcgcctataccgacttcaccgtcaccatggcgaacggcaaacggcgcgacgggctgacgaccggttttaccgacaccagcaatggccagatgctgtttgatgacgtgggctaccttgccgggcaggcttatcatgggatcaccgacgccaacggcgatgcgaccattatcctcacccagccgaagggagtagggctgctgacgccgttaagcattgcgcccgtcgattcattaatcagcacgcccgtttcccgcagcgtgaagtttaccgtcgccaccagcccggatacgccaaaagccaaaatgtggggccatatggctgataccatcaccgtcggcaatctgacctttgagcggcctaagctggcggatgaagtgacgccggaacgtactcaggctgaggctaacgaaacttgggcgcgcgttctgcatcctgacgcggcgggcaatccggataagggcggctgcgcggcgaaccgcctgccgcgcatcgatcagcttgaggcgttgtacaacgccaacagcgacggcgtgatgaaaagcacccagggctggccgacgctgcttcactactggtcttcgaccttccagagcgctaccacgtggaaactgatctcgctgtttagcggcagtgaattcgccaacgccaacgtctcgatttacgccagctgtctggccagcgataacccggcggcggcctcgattaccattgaaccggtggatgcgtcgcagtggtacgatggcagcggcgttcacgcggtcaaagcgaaaaaaggcgacacgatgcaactgaaggtgacggtgaaggacgccagcggcaacccgatcccggaagcgccgtttgtgctcacccgcggcgacggttacgatcgcaagggcgagaagtacaccgccagtgaaggcgacgatctgcaaggcatcgtcacgcccgtggtgatcgatggcgaatcgctggcctggaccaccaccaaaatggggatgctgaccggcgctgacggcacccgcatcatcagcgttacccgcccggatacccacggcacccgaacggccattatcgccacgctgtatgaaaacgctgccgtgagcgccagcatcgacaccatctttaccgtcatcaccagcccggatgtcgacgtcgcccgcatgtgggggcatatgttgccgtcgctcacggcggcggatggcgcggagtatcagcgtccacagctctatgctgaattagccaatcaggcaagtgccgcgcaatataccgaagacaacgaaatctgggcggggctttatgggccaggcagttcaaaaaccgaccccgctgttaactgcgctgcgggctatttcccttccatcgaggtgctggattcgctctacagcaaatacccaaaccgcacgataaaaaccgcccagggctggccgatcaaccgttcttactggagcggttccagttcctggtcgttaaccggcggaaagccccgatcctattacactgtcgatctggatgatgattcgcgtcgaagcgtcgttaatgacggtgtgaacgacaggcaataccaaatttgcgcaacgacgccgaagacgcaggctacgcaaattacgctcacctccacgctggcgacggatgacactattcaggcggtgaaggctaaaaacagtgagtcgatcccactgctcgtcaccaccaccgatgcggctggcaatccggtgccttatacgacgttttcgcttaagcgcgacgccgcgtaa

SEQ ID NO: 390458 - DNA, 1017 bp, Salmonella enterica
atgaacaaaatgacattcgatcttcttcttgaagattatttttttaacaaattactccgtccggcaacaatctggagctataccaaagtcactcgaacgtttatccgatttctgactgaccaggtgagtccagaggatattacacgtcggcatgtattgcagtggcgcgagtcaatcctttgccagcggggactttctggccgtacctggaacaataaggtgactcatttacgggcgctttttacttatggaattaaaaaaggcttattgcctcaggaagaaaatccgttctatgagactgttgttcgtccagatcagaagctgaagaaggttttttcgctgcaacaggttgagcagatctgctctgttatggcgcgattcgccattatggagcatcggggagtagcttcgcttccttgtcgttgtgctttgttgcccacgcgattctggttggttgtacttgatactctccggtacacaggcatgcgtcagaaccaacttatccagttgagactgagtgatatctcatttgatgatgatgtcatcaccctacgtgcagaaagtgccaagaaccataaggaaaaccgtgttccgattatttctgtactgaagccgggattacatcaactttccgtagaattaaaactcaaagggatgaagccagacgaccagttttttaacgtagtttttttgttgggtcggcaaagttatgaaggtgaggagatgtcggtacagacgttgcgtgcctttttcaggcgcctttcgaaggaatgtgggtttaaggttagcccgcatcgtttccgacacacgattgcaacggagatgatgaaacagccggatagtaatttgcaaacggtgaaaaccttgttggggcattcgagtatcaacacaacgcttgagtatgtggatggcaatgttgatacggtgagggaggcactagaggctaaatttgtcatgaagaaaaaatattcgtcaccaggttcagggacaccgccagcgttaaggttgattgaatag

SEQ ID NO: 390459 - DNA, 1722 bp, Salmonella enterica
atgtcacatgaaatcaacctgatgtatgtagccgcgacccgggtgcgcaagatactcatccccggtccgatattgtccgaacttcttgcccagcctttgagtggggatctgcttctatttccatctgatgaaaacattttatcctcagaaacaggaggggagaaaacgatgatgcgtaagctccgtaatattctgaagggagtcccggctggcagccctccgtcttctgtttcatgcccggtcaaaggtttacttcgacagcaaggatatctggagccacgatcggccatatcattactggatactgagagtcggcaacatttgcttaggcagatatggaaaaacagtctgttacctcagacgcattatgagaagtatttcctggctccgctgaggatatgcgtttcactgatgcaacaacttcctgccacggcaaacgggcatcatgcagtactaggcgggatggtggattataccttgaaaacagtagtctatgcggttcgtctatctcaagggtatatgttaccccctggagctagtgcggaagaacagtctgcccaaagtgcggcatggagtgcagtggtattttatgctgccttatttcattccctgtcttctctgcgacggattgaaggtgagctgttaaatggggagatctggtatccggggattagcgtgcccgggcaaccctatcgctttcgttttagttctgatgttccagacggagccagagaggggctgcgtacgatgctggggatgcgtttacttcccagtgaagtgatactttggatgagtaaaaccccgcaggctctggattcgctgctgtcatttatccgtggagacttcagtcatacctgtgttatttctcaaatagtgggcgatgcaatacagcatgcaggaggggactccagaaatattctcaatgaaccttcagtgtctgtgtcacacgtatcccatacagctacagacgctgctatggagctggctacttcaggggggagggctggcggagctgttttaccttctgaagggcatttgcagccactgctggacgaaccgatacctttaacgtcgccccttgatgagaatttatcccccctagtctctacagctcaggacgggcaggaagtcggcgatcagacgattcaggatgtgatatcactgatagggtttgaaggtggctcttccgtcgatgaggcaatttctgagcaggtggctcccgtgagtcaggatatgaatgaattaccgcctgtcagatctgacagtgtggtaagttctggcgaatctccctcggtgatgacaatactacttcctcttaatactaggaattttgacaaaaatgagaattttgggcagcagtttatatcgtggctgagtgcgaaaattatatctggggctctaagtgttaataccaaagaggcacaggtacatatcgtaggtggcatgatattcctgccaacaccgaatatttttttctctttcatgaaggacaacgcttatgccccttcactgaaaggcgatgtgcaacgtgaatttgaacacctgagactgcattttattcaaaagggtaagggggttttttcctgcctgaagtatgagagtgaaaatagaaagggccgttatgaaaaaatctcgggttaccttatcaggtcaaaaataatctacacactgcatcccattccagatgactctttatttctattcatttcaaatggtacttaa

SEQ ID NO: 390460 - DNA, 225 bp, Salmonella enterica
atgaggctggcgattttcattttggatcaatttgttccgttaccgaataggctgaatacgttgcagggacaacgggtggccacggagttggacgatgatgtgaccgtatgcatggcacacaggagtaagggactggagtgggacaaagtgaaaatacatgatgatttcgctgatatcctcgatcctgagatgttggaaagcaaatgtcacatgaaatcaacctga

SEQ ID NO: 390461 - DNA, 183 bp, Salmonella enterica
atgtcctaccccgatacagcagagcaggctgttattatcgcctggaagagtaaacgtctggttgtcagtgcctgtgccggaagtggcaaaaccaccacacccagacgttttgcagaggaaaatcctaccgaacgaatatataaccgtgccattccgggtgaggtgcgacaggctgatacgtaa

SEQ ID NO: 390462 - DNA, 1188 bp, Salmonella enterica
atgaaaaaagtagcagtggcattaacggcagttgtaggcgctattatatctagcggttctgcacacgccgcagagatttacaataaagatggaaataagctcgatttgtatgggaaagtagatggactacattatttctccagcgataactcaaaggacggcgatcaatcctatattcgtatgggattcaaaggagaaacccagattaacgatcagttaacgggctatggccagtgggaataccagtttaatactaatcgaccagagaaaggggacaaaacagactcaccagccagttatactcgtcttgcctttgcgggtctcaaattagctaattttggttctgttgactatgggcgcaactacggtgttctttacgatatcggcgcatggacagatatgttgcctgaattcggcaatgattcatatgaagcttcagataacttcatgacaggacgggctaacggacttttgacttatcgtaataacggcttcttcggacttgtagatggcttaagttttgccctgcaataccagggcaaaaatgatggaaaaagtcgggactctgatagctggaaagctgcaggatggaatggttccccactcagtaataatacccgtgatattgcccaccaaaacggtgatggtttaggggtgtccgctatctatgacacaggtatggggattagcgctggtgctgcttatacctcctcgaaccgaactaccgagcaaaaatggcgatatggtgataatgatggagggaataaagccgaagcctggactgcaggcctgaaatatgatgcaaaccaggtttaccttgctgcaaactacacacaaactcataatatgacatggtcaaatattaccaaggatagcccgattggtaaggctaataatgccagtcaagattacggggactttgcacataaaaccgataactgggaagttgttgcgcagtatcagtttgattttggtcttcgtccttcagttgcttatctgcagtcgcgtgcacgtgatgaaggtggaaactttgaccttgtaaaatatgctgatgtaggtgcaagttatttcttcaacaaaaacatgtctgcatatgttgattataaaatcaatctgctgaaaaataataatccagcaggtcttgatactgacaacattgtggctaccggtctggtatatgagttctaa

SEQ ID NO: 390463 - DNA, 1104 bp, Salmonella enterica
atgcaaactcaagataccttctatcaagttatgcgcaggcatggcgtaacacggcgtagcttcctaaaattctgcagtcttaccgcaacatcattagggctgagcagttcgataattcctcaaattgcttacgcactggagaataaaccccgtacgccagtaatatggttacatggacttgaatgtacttgttgtaccgagtctttcattcgttctgcccacccactggcaaaagatgccattctgtctcttatttccctagattatgacgacaccattatggctgccgcaggtcaacaggccgagcaggctttagcggatgtaatgcgtgagtacaaaggaaattatatcgtcgccgtggaaggtaacgcaccgctgaatgaagacggaatgttttgcatactggctggagagccattcctggaaaaattaaaacgcgtcagtgcggatgccaaagccattatcgcctgggggtcctgcgcatcatggggctgcgtgcaggcagcccgtcccaacccaaccaaagccacgccggttcataaattaattaccgataaacccattattaaagtacctggctgcccgcctatcccggaagtgatgtccgccgttatcacctatatgctggcatttgatcgcatccctccccttgatcgtcttggacgaccaaaaatgttttatggtcaacgaattcatgacaaatgctaccgacgcgcgcatttcgatgccggtcagtttgtggaagcgtgggatgacgaaggcgcccgtaaggggtattgcctgtataagatgggctgtaaaggcccgaccacctataacgcctgttcaaccgtacgctggaatgatggtgtttcttttcctattcagtcgggtcatggatgcctcggatgttcagaagatggattctgggattacggatctttttacagccgggctacgggcattccacaaactggtattgaagccaccgccgataaaattggccttggcgttgctggcgtcgcaggcgctgccgccattgctcacgccacggtcagtgccataaaacacgctcgtaataaaaacaacacgtcgccagaaaacacgccggaagagaaaaaataa

SEQ ID NO: 390464 - DNA, 246 bp, Salmonella enterica
atgtgtgccagtgcagacgccgcagatacgctcaacgaatgcccaggcgtctcgcggatcgcggcctttcaggataacctcaaggccgcgccacatagtgccggtcgacacggcgttagtaatgacattattactgtcgatattcacttcgcagcgcatatgtccttcgatgcgcgtcaccggatcgaccacaattcgccttccgctattgtccagtgtaaaaccctgggtctgataagaatatga

SEQ ID NO: 390465 - DNA, 192 bp, Salmonella enterica
atgcgggtttttaccaccgaaaacggtgtgaatttttacgatctctttttgaaaatcgagcgcttcaagatagtgggcgaccgccagcaaattggcttccggagggagtttcatagctggatgtccccagtagccattacggaaagggccaagttgaccggactcgataaagcgcttcagccgattttgtaa

SEQ ID NO: 390466 - DNA, 696 bp, Salmonella enterica
atgcaaatcctcaaagcgattggcctgttgatggagtatccggacgacgagttgtgggaatatcgggatgaagcgcttgcccttatccaacacgatgcgccaatgctgaccgacttcactcgcgagctgctttatgcgccgttactggataaacaagcagaatggtgcgaagtgtttgaccgcgggcgcgccacttcattgctgttattcgagcatgttcatgcggagtcccgcgatcgcggccaggcgatggtcgatttgttaagccagtatgaaaccgtgggcctgcagctcaactgccgcgaactaccggatcacctgccgctctatctggagtacttaagcgtgttgccggaagcggaagcgcgcgagggattacagaatattgcccctattctggcgctgctgggcggtcgtctgaaacagcgaggagcgccgtggtatcaactgtttgacgccctgctgacgctggcgggcagtacgcttacaagtgacagtgtcacaaagcaaattgttcaggaatcgcgggatgatacccgtcaggcactggatgccgtctgggaagaagagcaggtgaagtttatcgaagataacgctacgacctgtgacagttcaccgttacaccattatcaacgacgctttagccaggacgcggcgccgcagtacgtcgacgtcagcgcgggaggcccgaaatga

SEQ ID NO: 390467 - DNA, 1122 bp, Salmonella enterica
atgcaacaatctcgtagacatcattatgttccagaatggtatcagcgtagattcattcctaaaggtgatacctcctactatagattagatttatatcctgaaatagtaagaacccctagaggggatatcattcggaaatctgaacttctacgaaagggacccacaaagttttttcaccaaatagatttatatacaacaaaatattttggtatcgaaaacgatgatattgagaggtatctcttcggggaaatagattctaagggctctttggctcttgcagctttggcagatgataattggatggagaaaattcataaccatgttataaatctttatgaatatattgatgctcagagattgagaaccccaaaagggcttaattggttaacaaaacagtttaatccaaaggatcataatgaattactaattagtatgcagcgtgttcgtaaaatgcactgtactatgtgggctgaagcctctttggaaatcgttagcgcaaaaaaatcgtcaataaaatttatagtaagtgataatccagttacattttataattctgaaatgtacccaggtaatatctcgtgtaaatatccttttgatccatcattggatttacagggcactagaacaatatttcctattgactcagatcattgtattattctcactcataagcaatttgcgcgaaaaccagggaggtttaaagcaaaaaaaccaaggataaacgcaaggtattttgattctactgttataaattaccatgactttattcgagatcgctattttagcgataaaatggttgcttcggttaattttattattaaagctagggctgagcgttatatagcagcttcaaatcctgaatggttgtatccggaaaaagtacttaaaaacaccgattgggcttcttttgataaaatatttatatctaaaagtagcaagttattaggcgaaaaagttgagatatttttaggtggtaaaaacggagaattgatagccacacaagatgaatatggaagaaagcctaagacccaaaaagaatgggaggaaaaagaaaaacaagtgcgatctatgcatgagcatattctaagacttttgaaacaacatcgaactgatagtgagtga

SEQ ID NO: 390468 - DNA, 1743 bp, Salmonella enterica
atgaaagaacaggcacaaaccatattactagatgattcttctattgcgctatttgaaatgcgtgcagatgaagtaatttcaaacaacgtcacaaatgaaatcattggatttataaaagcaattgaaaacccaaactatgtattttcaactgaagtagtcaaatcacgatactattacactattgccaactgccaatccgcagcattcaaaaaaacaaatacaaattggtactcagaagaactagggaaatcagtaataaattacagaaaagccctgaacgcattacagcatatagaaagcaaagacaattatataatcaacctaaaaagtcgaatagaaactaatttaggtaactatctatgttcacaaggccgtgtcctttgttgtaaaaaccattgggaaatggcaatcgctttagataacaatcccgtcgcaataataagaaaagcatataacaacttaaatcttgctggccttttatatgattacagtcactcctattatcattactacgaggcttacaaatcaattaaggagggcctgaaagaattcaacacactagatccagaattagcttcctcatatcatgaaaaaggcgacttaattaaattcaaaaactggtttgaaacaaactttgaagaatcagattttcatttaattgaaagttacaaagaaaaatttgaatccaaagcacattcaatttatttgaaatggtgtggagataataggcttttcttaaatgagttgaacgatgagtataaaactgaactcgtgtacaccgactacatcacgttacctagtcacactgtcattatgaaccaaacattaactatgagtgaagatttaatatatcatgggaattttgatgaaataaaaaatgattatatatatgcacgttatttaatttttaccgcgcacaatatacccaatgagaaaagtcatttttttaataaaacttatcaacaaatcgatgatatgtctcatgctataacaaacctcaaagcgcagcattataaatctgcctttaaaactctctatgctacttttgataaaattgcatactttctcaattctttttatgattataatgacgtagatgcaaaaatatactttcatactttttttggaaaattcgagaatggaagacttaaaccgcactcaaagctaaaagagagcaacaatcaatttcttcatgcattattctatatactgaaggatataagggactcaaaccagaaagataataggtttgatagtgaatcctattggttagacccagatgcagaacaattttctaaaattagaaatgcaattgagcataaatcattaaaaataatcgatgaattcggctataaattattaaaaactgaagctgatttctatgaaaaagctctcacaaaagaaaaaagcaatctagcacatctcgagagtgaaatagctctaatttgcaaagagataaaaacatgcaaagataatcaagagaatttacaaaagctaattgaaaagcggggtgaactatcaaaaaaaataatcctttccaaaaccaaaataaatgaaaaggctaaacgcgaaaagcactctttaatgatttgtgaaacagatttcgaatcaagattaacattacttatgaaattagtgagaagatcaattatatatttgtcattagccattcactgggaacagcagaaaaatcagggcgaaaatacccttctaataccaagagaagtgccattaaaaaattaa

SEQ ID NO: 390469 - DNA, 207 bp, Salmonella enterica
atgcaactgcatgaaaaccactccctaaagcgggcaggcgtggcggggctacgagcgcgcgctgtggggttaaatggagccgagcgtacaaacattgtggagcttgcatggtcaagaagggggaaatttttgcctctttggtgcgcagctgaaacgcaaggaacaaggacgaagagcaacagtcctgatcagaacgacgcgccctaa

SEQ ID NO: 390470 - DNA, 813 bp, Salmonella enterica
atggcagaacaacaattgattgaaaaccagattcaggccgcaaccggacacgtagtaacactcctcgcgagggcaaaaaaaccgcttcaggatgcggattggctcatgaatttgcctgcaaatgaaatagcccgcgagacggaaaaactgacaaaaagcctttcctccgactggcagtcccgaattatcgacctttaccaaaaaatgcagacctgggtggaggccagacaggccgaagaagcagccattgagaacctcagggctctgcgccagcatcagaccgaaactgagcaggccagcaaagacaatcgggcgcagttcagggaactgcttaaccagagcggcggcatcgtaacgccggagatgaaagctcttcgggctgaatatctggaacaacaggaaacagccacagaactcgccgggctgattactgaaaaagaagagttgctgccgctactggctgacgcgaccgcgcgtaaggcaaacgcctatgtgaactgccatcatggcatcactgaggagcgtatcgatgagcttttacgagacttttttattttccacggttccgaattgagcagcctgctcaggatgaagtacagacaatttgagcggaatagctcagtgcatataccgggcattattgaagggacaaatgatgcagatacgctgtatcgtgaatttatcctgaatctaatgctgaagtggacgaatgaaatattgccgttgagattccgggacgacgtgatgagtctgaccggttcagcaccggtatcaggatcacatgaagacagaaaaaaaagaaagctgttctga

SEQ ID NO: 390471 - DNA, 273 bp, Salmonella enterica
atggccctgaagtgtcctgaatgtggcacggtcgcacacgccagaaccagcgcctatgaagctccatcggttaaacgctcatggtatcagtgccagaatcttgaatgctcctgcacatttactgccctggaaagtgtggacacgataattatgaagccccataaaccagcggcgcctgagcctgaatcacagagcgattctcttgtacgtcagccgcatacactgggccgctacggttcagcctgtacccttaaagaccgccatgcacaataa

SEQ ID NO: 390472 - DNA, 1281 bp, Salmonella enterica
atggcgttgtcgcaagaagagcaaggtattgaaaataccttaagatattcagcttatcacagaacgctggagagcttcataaataatattgttaatgctgattatgattttgagtctccacttgaagttcaagagatcttgctaacccattcaaatttcttcaatccatcatttgaagcagcagaagactccttttttgatcctatcattacatttttcactcaagcagccgataatgattactttataatgaaaaaatcattactgttggagtttaaaaataatatcgagttaaatgatattagcgacggagaatatcaagttctttttttatactctctacttgatctttttgatagtgccaatactttattcttattagatgaagtagactctcatttacattttaagaatattgagatcttatggcatcgactacataatatcaacggttatgcgataacgaccacacatctactggactcgattacagctaatgagaatagctttaaaaatttaaagatcgttgataaaggaaaaataaaagaagatgataaaattaaaactataatagatcgattatctatcttgaccagaattaaagacgtacagttcgaagtttgctgcaaactagaaaacattgtcttaatggatgattataatgactggactatattttatgccttggcaaagaaaaaaggtcttgatgtgtcaaagctagataaccttcatgccataaaacagtcctctggctatgataatttaagtcaaaagtttgcacaaccaaaactggagtggattgagtctcttttaaatataaattccgctaaaaaagtcaaaaggatattcatgatctgtgacaaagatgaggctccaattacatatcaaaaagatggcgttcaagttaacggaagcgaatactctaaaaaaataaccatgctgggaaacaaatataaactaaaaatatacctccttgcatggcaaagaagagaaataaaaaactatttattgtcttatacggcattgtctcatcatggacttattgggcaagtaaataatggagatcttccggctaactgttttttaaagggaaataattcaggagacaatcctgcaataagtcggcttaatgttaaaccttacataacaaaaataatagattctgatggcataggattggataaatcaaaactttatccatatatagatctaataccgcctaatgaaataagtaatgacatcgagaatatgtacaattttttggtggagaaattgaaatga

SEQ ID NO: 390473 - DNA, 279 bp, Salmonella enterica; identical to SEQ ID NO: 389537

SEQ ID NO: 390474 - DNA, 1104 bp, Salmonella enterica
atgcaaacacaagatacattttatcaagttatgcgtagacacggcgtgacaaggcgtagcttcctcaagttttgcagccttaccgcaacgtctttaggcctgagcagttcgatgattcctcagatagcttatgccctggagaataaaccgcgtacgccagtgatatggctgcatggtcttgaatgtacctgttgtaccgaatctttcattcgctctgcgcacccgttggcaaaagatgccattctgtcgctcatttccctggattatgacgacaccattatggccgccgcagggcaacaagccgagcaggcgttggcggatgtgatgcgcgagtacaaaggaaattatatcgttgccgtggaaggtaacgcgccgctgaatgaagatgggatgttttgcatactggctggtgagccgttcctggagaagttaaaacgcgtcagtgcggatgctaaagcgattatcgcctgggggtcctgcgcatcatggggctgcgtgcaggcagcccgtcccaacccaactaaagccacgccggttcacaaattaattaccgataaacccattattaaagtgccaggctgcccacctatacctgaagtgatgtccgccgttatcacctatatgctggcatttgatcgcatccctccccttgatcgtcttggacgaccaaaaatgttttatggccagcgaattcatgacaaatgttaccgacgcgcgcatttcgatgccggtcagtttgtggaagcgtgggatgacgaaggcgccagaaaagggtattgcctgtacaagatgggctgtaaaggcccgaccacctataacgcctgttcaaccgttcgctggaatgatggtgtttcttttcctatccagtcaggtcatggatgcctcggatgttcggaagatggattctgggattacggttctttttacagccgggcaacgggcattccgcaaaccggcattgaggctaccgccgataaaatcggactgggcgttgccggcgtcgcgggcgctgccgccatcgctcacgccacggtgagcgccataaaacatgcccgcaataaaaacaacacgtcatcagaaaacgctccggaagagaaaaaataa

SEQ ID NO: 390475 - DNA, 279 bp, Salmonella enterica
atgaatcgtatgcactcagttataatatcagtatcaatgctgatttctgttggggtttctgcagcgaaccaggtatcaatgaaagaagttgatcattttaagttggagtatctgggtaatatcagtctcagctcgacaaatgaaagcataacctcaccttcggatttacaaggggcactgtcgaaacttgctgataagaaaggaggtaaatattatcacattattgccgcccgccaacatggcccgaatttcgatgctgtcgctgaggtatacaaataa

SEQ ID NO: 390476 - DNA, 1086 bp, Salmonella enterica
atgaaaattaataaactgatgtctgtcatgctcccatctttactttccttttctctgatgggggaagcctgtacaaccctggcggttacggacagagagggggatgtttttcacgggagaacgctcgaatatatgcaggatctaccttcctggatgacgtactacccagtgggcacagtatttaataaagcagacccgacaggtaaacccggtatcagttattcttcccgttataaattactggctattacatcccgtatcacagatggggatagccgtgatatcctggaagggatgaacagtgcaggcctgtcttttagtgaaaacatgattatgaacgctgagcttgccccgattcctgcaaaacaatacagacaagctcttcctataacctcgctgggagagtgggcgcttgcccaattttcttcggtagatgaagtccgggatgcgattaaagatggtacattttggtctccaactttaaaacgttttggaaacctgaagtccccttttcactatgctttttatgataagaaagggggcagtatagttgtggaagtaaaagccggaaagttacaagtctacgataaccctacacgggtaatgaccaatggtcctgaattcccatggcatctgactaatcttaataattacagtcaactgacgaataaggatcgctcatctggaaaacttggaaatattaacgtaacacaacctgacagcggtatagcagtttcttcattaccatcctctgatacctctgtgggacgttttgttcgaggggtatactacactacttatgcgcagcaggctgagtcttccgctgaggctattaatactttgtcccatatcatgagtcggtttgatcgccctaaaaatatcacaactgattcaatggggagtgaaggtgaaggtaatacagacggtaaatccgtatctgagtatacggtctggacgacattatcagacctcagccatggatatatgtatataaaaggttataatgatatcaattatactatattttcactttctcagtatgagaatatgaaaaaaccagtctttgttggaattaacataaagtag

SEQ ID NO: 390477 - DNA, 681 bp, Salmonella enterica
atgactaatgatgaagatgtttttaaatatatataccgtaccctgcagaataaatttgttcatgttcagtatactgccgagaaagctattaggttacgtaaaaaaatgtctgcatcggcggttgaaaataaaataatagcagaagaaatgattggtaccattaaccaaatgcattctttaagggagcgaattaaaaccaaaataccatcattaagcaagaaagagaaacgatatgggaaaaaaattgtcactatacttgatcatcttatgagagagacaaccggcatacaaaactcagtacaacactcagctaatattatggctgtttctgccggtagcttgcagatcactgtacttaaagccgtgcattatcaatggcgggaacgtgtgtatatggcattacttaacaagacaaatactatccctggggatgatgaacatcactgtctcttaggccgctggtatgacggtgaaggtaaggaaaaattcagtcttctgccagcgtttatcaaattgggggatgtacatagaaaattacatcagttggcggcagaaatgatcatggaagatttaagtcatccatggaatgaagagatcctgaataaattggaagtatttgaaacaacgagccaggctgtgatttctgcactagatgcgctggacgataatattcttcagtaa

SEQ ID NO: 390478 - DNA, 342 bp, Salmonella enterica
atgcatgagttagccctggcgcaaaatataatagagttattggaggaactggccataaatcatcaattcagtcaggtaaaacaagtctggctggatattggtatcatggcttgcattgaggtgccggcgttgcactttggtctgaatgttgctgctagcaatactattgctgaaaatgcacttttccacattacggttgaacctgaacagggatggtgcctttcctgtaatcaacctttcatttcccagacttctatacaggtatgcccacattgtaattctgggaaagtacagataaatgatagtggtaagatgcgcattcgagagatagaagttgaataa

SEQ ID NO: 390479 - DNA, 888 bp, Salmonella enterica
gtgcaaggattgaccctctattctcacccattccgcattatctggcaggaaccgccgataggtcggttgttacagggcgcaacgccgatatacgcgaaaacgcttatttcacgtttgtttgctttgtgcactcaggcgcacagcgctgcggcttctttactgctgtttcctgaagaaaatacagatatgtgggccgcacaacaagagctggcgcgagaaacgctccgccgcgcattgaccaactggctacccacatttagccagcgacaggccaccgttgaagaatgggagttgctacgtcgtggagacttatcgccgctcgcgagcacactcttttttggcgcccccccccactcctggcttgccgctggcgtacaggggtgggaggcgtggtttttgcaagggcgtactgacgccgcccgctggctggcggcattacagaatatcatcacgcctacactaccgatggcttcgcacccggatcagatattaatgaagagcggcccactggatgtatcgcctcttgctattgaataccctatgctatcaacgagtttcctaagtgggaaatctgccgcgcttcgtttactggcccgttttattacacttgccagaagtttgagctctttccccactctacgctggaaccgttttaaatatgataaatggaaagtagcagtagttgaaacctcacgaggatggttagtccatcaagccagactgacaccatcaggcaatattcttgattaccgtattatctcaccaaccacacgtcacactcaacctgaaggagttattagtcgcgaactgaacgctattcctgtctccctatggcagcagcaactactagttattgatccttgtgtcgacgttaatattattgaataa

SEQ ID NO: 390480 - DNA, 1062 bp, Salmonella enterica
gtgaatcattccagaactattccagtcgttaatatcgccggcccaggctcgcagccagaagaggaagactttaactttctccccatccccgcgggcattaatctcccgctgacgccagttttaccggaacaggcgctgcccgcggagctccatgttgccagacaagtcttgactgcggtcattagcaatatggataacccggtggaaacactctcatttcccctgacctacaaactgaatgcttgtgagcaacagaatagcggtttattggatcaactgttcggcgaaggtgaaatatccgcccgggtactgttacccgatggaaaagaacagcgtattcaggaaacggtttttaccggcgtctggcgtatgcgtgaatataacgctgaccagcaacgaattgccgatgaaattatcattggcccgattccggagagcatctggcggacgcacccgcaaccgccgattacgccagaactgccgccgcaaccagcggaattgatgaatggcgcctttattgcgcatgaaattgccgggcgcgtcaaacagccgataaaagaacctcatatcattaatttaacgctattgccagtaaatgatgccgatcgcgagtatctggatctttttttaggcgaaggttgtagcgctattttttcacgcggatatggtaaatgccggattgtaagcacacattttcccggcgtatggcggataaattatttcaatgatatgaacacactattacaagatatgattgagatagcggatattcctgatatcgccgtcgccggtatagacgatattgaagatgcctgcgcggggctgaaaaatacgctggaatggttgaaagagtatccggttacagaaaatgagctagtagtgcgcatggagtgcaaagtctgttggtgggtttacgatcctgcactgggcgatgatgtctggcaaatcccacctggcgtgcccttcagccagttacctgattactggtgctgtccggtttgcgaaaccagcaaatccgggtttatggtgatcgatgaaggtaatcattcgtgcaaggattga

SEQ ID NO: 390481 - DNA, 411 bp, Salmonella enterica
atgactatctcactcaaaaatcccgtttccccgctggcgaaaaaaggttttctcattaccgatgcgcaaacgctcccggcattgattaatgcgcatccgacgctgctggttttgctgcaaagcgacccaaacaaacacccggaagttgccgacagttgggtcatcatcccggagatcctcaagcgatttccggcgacgtcttataccgcggcctttgcggatagcgaacagagtgaattgatcgcccgggagtatcgcattctgaaatatccggcgctgcttttttttcgccagcaccgttttgtcggcagtctggcagggttatatagctggcaggaatactctgagcgggtagctgcattgctgaccacgccgggctatcgtcaggatattgccgttatcacgcaatag

SEQ ID NO: 390482 - DNA, 609 bp, Salmonella enterica
atggcagaagtgaccatcttagggcttggcaacctgctttgggcagatgaagggttcggtgtcagagcggcggaaaagctgtttgaacagtatgccgataacgagagggttgacgtcgttgatggcggcacgcaggggctggcgctgcttccctggctacaacagaccgacaaactgttaatcatggatgccatcgattttggtatgtcaccaggctcgctggcgatttttcgtgatgaacaggttcccgcctatctgacggcgaaaaaactcagtttacaccagaccagtttttctgaagtgctggcgttgctgcaattaacaggctgccagttagcggagatcgttttgatcggcgtgcagccggagtgtctggatgattacggcggaagcctgacgccacgggtaaaggcacaactgatgtccgcggtctatctcgcgcaagaggtgctgacacaatggggcatctccgcctcttctgcatcctcgtcccttgaaagactcaatcatgacagcctgtgtatggaacgctacgaagatgaacggcctgatgcccaaagcgcttgccgggtcggcgatattcgggtgctgcagagagagaaatcataa

SEQ ID NO: 390483 - DNA, 276 bp, Salmonella enterica
atgttctacttctggatgtctgtattgatggtgtttagcggttttgcgctctatggcgaagggctcggaacagacagttgggcatatcaatggtttgtctggatgattcgcttgacgggaaacgatagcctcgcgctgcatttctggcatcggttgggcatgtggttcatcatcgttttcgtcattgcgcatgtttataccgccattcgtgaagatattatgagccgacaaagcgtgatttccgtcatgataagcggctggcgctggttcaggtga

SEQ ID NO: 390484 - DNA, 807 bp, Salmonella enterica
ttgataaatgacgaagaaaattatgcttcaaggattcaatcaattaaagataatattgataatctattaacacaaaaatctattttagaaaagaaaacattattattgagaaaaagtgcagcgcctgagatagaattgttaaataataatactgaattaagcaaaatccagtctcaacagattaatgacagaattagtattttggatcttgaaagcagtcataaaaagcaaattgatgatttttataatagactccttagtgaaatttctcaagaaagaaaagaactgaatgaacagaaaaaagaaatgataagaaatgaaggtgatcttgaattacttcaaaataaagtgaaatctaatagtatattatctcctgtaaatggggttatattagatataactcaaagtcttactgaggggtcttatattgaaccttcgcaactggtgcttaaaatcaagaaaaatgaagttgaacggcttgttgaagcaaggtttgacgctaaatatagaccatttatttattacggggcaaaagttaaaatcgtcgtcaattccccaggttacaagaaatattatgacggtattatttctaaagttagtgctgattcttttatagataaagatagaccaggttctatatatagccgttactacaaagtggaaatcagttacgacaagaagagtggccaggttcctgaatatagtgagggtattcaggttaacgtgtatgcgatcagcaagaaaattacgatattcaactatttattttcgctggttaattctaatgttgtatttaacgtttggtga

SEQ ID NO: 390485 - DNA, 138 bp, Salmonella enterica
atgacaaattttctttattttcattcgattctgacgaagagtcagaaacctcaacatgtaatgagcttttctgttcctgacgatgcattgaaacatagagtagatttagtagctgcccactcattattaaaacaataa

SEQ ID NO: 390486 - DNA, 303 bp, Salmonella enterica
gtgctggtcctgcccgctgtgctgcgcgttgtcctgcacaaacagcgtagtctgcgccaacagatattcctggttgagttctgccgtagggtgattcatcagcgtgaaggtatagcctgtcatgagtgtgcggatattccctccccccagcacccgactgccggggctgcgctgcgcttccatacgaatgcgcgtcagcatctcgccttcactcttgtcgaagtagtctcccggccactcataatgctcgtaggtggcatgaccggtttcacgcgggtttgccaccgtgtttgccagcaatga

SEQ ID NO: 390487 - DNA, 252 bp, Salmonella enterica
atgagtaaaaacgtaaaacagacttctgaaaatgtggcttccactgctgcaaaaacgctgactgatcctaatgcctcagccatccagaaaagccttgccggttccgcgctttctcaacgtgggacgtcaaaccagaccagtggcaaaatggaacataaggcttcctcagctcttgataacccacgctccagcgagttaacgaagcaacttgcagcctctgttttggcacaatcaaacaaagggcgtaagtga

SEQ ID NO: 390488 - DNA, 249 bp, Salmonella enterica
atggcatttcaaattttaacgactactgcagcaagcattacagaactgaaacgtgatccaatgggaactttcaatgccggagatggcgctccagttgccattcttaaccgtaatgaaccggctttctactgtgtgcctccggcactttatgctcatcttatggatattcttgaggatgaagaactcggtcgtattatcgatgagcgtgcgaatgaacgcgtcattgaggtcaacattgatgacttataa

SEQ ID NO: 390489 - DNA, 423 bp, Salmonella enterica
atgaagccccccctggacagaaatatccttttcaattctgtcagtaacttattgctttcaaagaactatgtagaaaagagttatccggaggcattgatcgcccgggaagaaaatcaccccacagcaatgcagttggaaaaaatgggggttgcgatccctcatgtcgatgttgagcatgtccgtgaagaaaaactggttgtggtcacctgtcctgaaggtatcgaattcaatcaggctgaagatcccgactccaccatgaaagtgaatgtcattttctttttactgctgaaggaaaaagatgcgcatcttgaatttctgatgaagctaatttcgctttttcagcgcagcaatgaaatggaccaaattctttgggcgaaatcaaaggatgacgttatggaacttctggcaaagaatctttattaa

SEQ ID NO: 390490 - DNA, 282 bp, Salmonella enterica
atgaacaaaaaaattatcttcgcttgtactagtggtattgcgacttctgcggtagcaactgaaaaagtagttcagttctgcaaaactcaagggattaacgttgagccaatacagtcgaatattggcacaattggtaaacaggatggcatggccgatttaattatcgtgacatcggcggttaaaacagaactgaagacgcccgttcttaatggccttcctctgctgacaggatttggcgaagaagagttgctggaaaaaatcgtagccatcctgaaaaaataa

SEQ ID NO: 390491 - DNA, 1392 bp, Salmonella enterica
atggataaagtattttccgccgtccagtatattctggggctcggtccgacggtcatgttgccgataattatatttatcatggcaatgtgtcttcagaccggttttagccgggcaatacgctcggcgctgaccatcggcatgggtttcatcggtatcttcctggtttttggcttactggtcgacagtctggggccagcagccaaagaaatggtcaaccacactggaatcgatttaccggttgtagacctgggttggactccactggcagctattgcatgggcttctcagatcgcgccgtttgttgtacctatgacgattggtattaacgttttgatgctgacgttgaactggaccaagacggttgatattgatgtctggaacttctggcatttctcgatggttggcgccatggtttacggggtaaccggtaatttcttctttggcctgctgattgccggtgccacagcagcaattacgtttgtgatggctgactggtgtgccccgatgattcagaaatatttcaatctaccgggaatttccctgccaactttatcatcggttattttcttcccgatcggtgtgttaggtaatatggtgcttgataaagtaccgggcatcaacaaactgaatgccgatccagatcagatccagaaacgttttggtgtctttggcgagccgatgatgttaggggtcattctgggagcagggattggcctgctggcagaatacgatttcaaaggcgtccttaacctggcgatgagtctgggggccgtgatgttgattatgccccgcatggttaagttactgatggaaggtctattgcctctgtcagacgccgtgcgtagcttccttaagaagcgttaccctgatcgtcacgatttgtatatcggcctggacatcgccgttgcggttgggcatccgtccgtactgtccacagcactcctgctgatcccggtcgctgtattgctatccgtggttctgccgggtaaccgcttgctgccactgggtgacctggcgaacatctgggtaccgatttccatggtagtgctggcctgtcgtggcaatattgtcagagcatttatcattggtattccatgcctggcagtgaatttgtatgtggcttcagcagcagcgccgatactgacgaaaattgcccgggatatgaatttcccagtgaaaacaggcggtgaaatttctagcctgctggacggtggtaacccgtatcgtttctgggcagtcaaaatctttgaaggaaataccattgccctggtgcttattcccgtcatcttcctgttgtgcctgtggctatatcgtgtcaccaaaaaacagctaaaagcagacgagatagcagaaaatgaagcaatctcgactgatattccggtagcaaaataa

SEQ ID NO: 390492 - DNA, 1512 bp, Salmonella enterica
atgtatacgatcgggatcgatattggcacgaccaattgtaaggtgtgtttgttcgaaattccttctctggaattaattaatcagtacagatttgagacgcccaaaattgaagacggagaaaatactgattttaatgttcgcctcatctgggaaggcgttctttatggcctcaaaacaataaccaataatctgggtgatgcagagcaaattcgtgcagtagcggtcgccagtgttggcgaagccggtgtcctgcttgataataatgatgatgttgtgggcccggcactgacctggtatgacacccgtccgaaacagcagttggaaaacattatttctgccatggatatagagcatatctatgaaattacaggtatccctgcgcattcgaattacagcatcaacaaaattaagtggttgcaggataatatcagcagtgtccacgaaggctggaaatggttatgtctggcggaatatattgccttcaaattatccggcgtgaaacgctcggaatattccctggcatcacggacgatggcattaaacatcactgatatgaactgggatgagcagctcattcatgcggctgaactttctccttctttattcagtccgttggtccaggccggggtggcgattggtaccgtcacatctgatgtttctgaactgactggattgactacgcatacccatgtcgccatcgcagggcatgatcatatgtgcggttccgtagcggtgggactgacccgtgaagatcagatccttaattcaacaggaacgacggagggattactggtggtgaccgaatcggtcaataactccggacgttttttccgcgccagagtgtctaatggtgtgcatgtgcttccggggcttcattccctttatgcctcactgccttctgccgggtatgccattgaatggttcagaaacctttttgaattggatatgtccgcattcctgagaatggtggataccctgcgtaacgagcaggatatggctgtggccagtgcgcttgacggtatctttataccccatctgcggggcagcggtcccccggacagaaatacctggtcccgggcattaatttacggtcttgatgataaatcccgaccgcaggatgttttgcgctttgtgttccagggattgtgttttgaacttcgcaatctgctggatttatacgaaacgctgacagggaataattaccctgtagtgaatgtgattggcgctgcctgcaaaaacccatactggttacagcttaaggccaatattcttaaccgggaaatcgtggcatgtaatgtcaatgaggccgtgagcaaaggggccgccatgctggctgcgaaagctgtcggtgtggaagtggagtgcctgcccggaacaagtgaagaacagacccgacgctacctgccggagagtgatgccgtgactcactatcaggcaatttacactcaggtctacaaaccgctttatgaatccaagatgcgtactgagcgtctctgcaatggagttaactaa

SEQ ID NO: 390493 - DNA, 1035 bp, Salmonella enterica
atgaaagccagtgtttactacagtaaaaatgatatccgctatgaagatgttgaggagccagaaattggcgacggggacatgctcatcaaaatgcactcctgtggcttgtgcggtactgacattcataaagcgcagcaccagacggtgaccggtccgattatcctcggtcatgaagtatcgggagaagtggtgaaagttggcaaggatgttacacgctaccgggttggcgaacgtgtagtgactgccattcatgttccctgctttaactgccattactgtgacagggggttcttcactctgtgtgatcagttcaagaaaacgaatctggaacccggtgggtttagtgagtttattcgtatcccgcgccagcatgttgaacatctgacgcatcgtattatcgacagtcttgactgggaccgggcagcaatgattgagcctgttgcctgctgcttacatggtctgaaatcttccaacattcatccaaaagatacggtgctggttctgggctccgggaccattgggctggtcagcgctcagctggcggcgctgaaaggtgcctcgaccgtgattgtttctgacctttcccggttcaagcgtgaactggcactgaaggtgggagtaacccacgcgatcgacccggcaaaagaagatattgaaacccgcgtggcagaaatcacccagggtaaaggtccggatgtcgtcatcatcgccgccggggtctcgtcactggtttctcaggccgtgaacgttgtacgtcgcgggggaagaatcgttgtgttctcaccatttgataagaatcctgtcgtagaaattgatgctggcaggttgttccgcgacgaaatttcaatcgttggcacttattcactgacgccatatgacatgaaggaagcgattgagattgtggaaaaagacaaaatcaatacgaaggacatgatcactcatacctggccactgtcccgtattgctgaagcaattgattttgcttccaatccggataatgacgtactgaaagtcattatcaaagctgacgaatga

SEQ ID NO: 390494 - DNA, 744 bp, Salmonella enterica
atgagtaccatactgcaggattctgaagttccattatatatgcaggtttcagaatgggttcgcggaaaaatttataaaggtgagctgggtaaaggggacaggatcccgtctgaaaatcagatcatggaaatcctacaggtcagccggggcacggtaaagaaaggtgtcaccatgctggtaaatgaggggttactggttcaggtgcagggaaagggaacctttgttaaaaaggaaaatatctcctactcacttggcgaagggttgctatctttcgctgaatcgcttgaaagccagcacttatcttttacgactgaggttattgatgcttacatagagaaggcgtcaaaaggggtagctgcaaagttacagatagaacctggaacacccattttttatcttaagcgtatccggagtgtggatggggaaagggttatgttaattgaaaacagaatcaatatttcgctgtgcccgggaataactgaagttgatttcaataagcacaacctgtttcagactgtcgaagccatgacgggacgaaaaattgaatattcggaaagccgctacgctgcaaaaattgtgggcagcgaacgaggacactatctggaagttaatgaagaagcgccagtgcttcatctggaacaactggtattcctcgataatcacatgccatttgatttcggtaatgtctggctgaaatcagataaatattatttaggtactgtacttcaacgaagaaagaggtaa

SEQ ID NO: 390495 - DNA, 840 bp, Salmonella enterica
atgccattagtaaacggtaatattctgcttgatcgcattcgtgaaaaacgtgttctggcaggtgcattcaataccactaatctggaaacaaccatttctatcctggacgcaattgagcgttcaggattgcctaactttattcagattgcaccaacaaacgcaaaattgtcaggttatgattatatctatgaaatcgtacggaaacgcgctgcgaccatggatgtgccagtcagtcttcaccttgaccatggtaaagagctggatgatgttaagcgggctgttcgtgccggcttcacatccgtgatgattgatggtgcagagttgccgtatgaagaaaatattgcgtttactaaagaggctgtagatttctgtaaatcgtttggcgtacctgtagaagcggaacttggcgcgattctgggtaaagaagatgaccacgtcagcgaagcggactgtaagacggatgttaatcaggttcgtcgttttgtggaagagaccggatgcagcatgctggcggtctccgtcggaaacgttcacggactggaagatatcccgcgtattgatatccctttattacaggagattgccaaagtatgtccgtgcccgctggttattcatggaggatccgggatcgatgaagctatcatccgtagttttgtgaaatataatgttgttaagcttaatattgccagtgatctgcgtaaggcatttattaccactgttgggcaagcctggacgaaaaataacaacgaagcgaatctggcaaaagtaatgtcgggagcgaaagaagctgtggaagcagatgtctacagtaaaattctgatgatgaacaaggcatcctga

SEQ ID NO: 390496 - DNA, 273 bp, Salmonella enterica
atgattcgagaaaatattcgtgttgtaaacagcacgggcctgcacgcacgtcctgctgccacatttattaaaacactaaaaaaatatgagtcttctgttacgcttattaataatggtaaagaaaccgttattaaaggtctgatgagtgtattaggagccggagtaaaaggaaagtccagtattgaaatcatctgcgagggtcctgacgaacaaattctgatggatgaaataaaagaattatttgccagtggctttggcgaaaaagaagaataa

SEQ ID NO: 390497 - DNA, 783 bp, Salmonella enterica
gtggctcaaaaatatttacaacggattttacttgtcaatgatgacggtattgatgcgccgggaattaaattgcttgaacgtgtggcaaaacaacttgctgatgaagtctgggtagtagcacctgcaactgataaaagcggcgtggctaactctgtcagcctcagggagcctgtccgggtggaacaacgagcggagcgccggtatgccgtgcatggtactccggctgattgtgtcacgatggcagttcggcagttgatgaaggaatgtcctccgcagctgatattgtcagggattaacaatggttccaatatcggttttgagacagttctttccgggacggtcggggcggcaattactggcctcttgctcggtgttccgtcggttgcattaagtcaggacaaacgacctgaggatgctgtgaactggcgaaccgcagaagcattttgtctgcccgtactggatacgttaataagccggggattgtctactgactgttgcctgagtattaatttccctgatctgccaatggaagaaatcaagggaattaaagccacgcgccagggtatcggcaaggtgaaaggattacaggttcttcccacaacagatccacacggagaaaattattactggatccgcgtggaacatggggtcaccgagtttcctgaacatagtgaggccggtgcggtttcagaaggatatgtgtctgtgacgcctttaatgtttgagagaacagccatggaaagctggcatcagctgtccatggatctgaattcaacgcagtag

SEQ ID NO: 390498 - DNA, 1056 bp, Salmonella enterica
atgaaggcactgaatttgtatggtgtacaggatgtccgctatgaagacgtgcggaaacctgaaattgaaaaagaaaatgatgttctgattaaagtaaatacagcgggtatatgtgggtctgatatatctcgtttcgggaaaataggatcatataatcccggtctgacatgggggcatgagttttccggtatcgtggagagcacggggaggggggttacatcggtcagcaaaggcgaccgcgttacggcctgtaactgctttccatgcttccattgcgactactgtaaacagggaaattatgcccggtgtacggatatgaaggtactgggaggccaggtcaacggtgcttttgctgaatatattcgaatgcctgcggagaacgtcctgaaattacccgattctatggactttgcgacagcaagctttattgagccatccagtgtggttgtgcatggcatgcggcaagttgatatcaagccgggtagcagtgtggccattgtcgggtgcgggactatcggcttacttgccgttcaatgggcaaaaatctgcggtgcgggggacgtgttcgcatttgataccgacgaagctaaactcgcggtcgcgacgaaaacaggggcaacggaaactttctgcgtcaaagatgaaaactatttatcccggttccatgaaatcacctatgacaaaggtgtcgatatcgtttttgaatcatctggtaatgctgctgggattagctcatcgctgcttctggcggcaaaaggcggcgcggtagtactgctgggcataccttatggggacgttgctttaccccggctgaattttgaaaaaattgtgcgtaatgaactgaaagtcattggttcctggaactctatgtctgcaccgtttcctggaaaagaatggcagacatccatccattatctcagttctggaaagattgatgtatccccattgattacccggcaggttcggatggaagatgttccatcacttttgccagagctttacaaccgaaaatcgtttttcgttaaggtcctgatcaacgttgaagcgttatcctga

SEQ ID NO: 390499 - DNA, 258 bp, Salmonella enterica
atggtaagtgatactcttgaacagcggatttatgaactggtaagaagccatgatggaatttacctttttaagaaaaaagaactgacaccgtcaacagatttggattcagatctgcggttggaagatgatgaagcactggcattgatggatgatttttttacgacattcaatgtagataaagggaatttctcgatcacaacatactatccgccagaaccaccgctaaagcatttgcttaatccgtttcgcaaaaactga

SEQ ID NO: 390500 - DNA, 351 bp, Salmonella enterica
atgccaccacgaaccccaaaagcctgccgcgttcgcggctgccgcaataccaccatagatccgtcaggctattgcgaaagccacaaaagcgaaggctggaagcaatacaaaccaggcctgtctcgtcatcagcgcggttacggttcgaagtgggacggtatccgcgagcgcgtcctgaagcgtgacaaaggcctgtgtcagttatgtctgcgtgccggtgtggtgcgtgaggcgaaaaccgttgaccacattatccctaaggcgcatggcggcactgatgcagacagtaatctgcagagtctgtgctggccgtgtcataaggcgaagacggcctgtgaacggctgaagtga

SEQ ID NO: 390501 - DNA, 489 bp, Salmonella enterica
atgatggattggaatatgttgtctgctattggagcttgttgttcggctatcgcgtcttggggggcgttgtgttatgcacgcaaggcgttaaacacatggaatagacaagagcaatttaaagtaaagttagagtttaaaagagctttacttgagctggaggatgcctttgaggcaatgccagataattggaattccacacaatatagaatagctagaacaagagttggacagcagtataatgctgttgttcaccgagttgatgatgaagcacagctatatttcaagaaagaagaccttaaatcagcataccagaatgcagtgagagcatgggttttatgtgaaggggggattaaagataaaagtatacatgctgaatggaaacaactcaggactggttatagtcaatatattctgactggtggaaataaaaattgctacttatcaaaaatagaaaaaatatattctagaattgtagtgttcatagattaa

SEQ ID NO: 390502 - DNA, 315 bp, Salmonella enterica
atgcaaaacagcagagcgcactggagtcacagagaacccaggctgatatcaaagtggctgttgcggatgatgattgtgctgtacgccttgtgcctgctgccgctgctgaccggttgcggaaatacgcggacagtttacgtaacagtacctccaattccgcttccagctactctgactttggaaactccagtaccgcacatccccgatactctgacctatggtgacagtctggagttgaatgtgagtctgttgtcagcgttggaacagtgtaatcttgataaagcgacaataaaaagtatcgatgctaacaagtaa

SEQ ID NO: 390503 - DNA, 477 bp, Salmonella enterica
atgctgacactaaattctcaacgtaaagctttccttgctatggtggcatggtcagaaggaacggataacggacggcaaccgacatgtaaccacggttatgacgttattgtcggaggcgaactgttcactgattactccgatcatcctcgcaaacttgtcacactaaacccaaaactaaaatcaacagccgccggacgttatcagcttctttcacgctggtgggatgcttaccgtaagcagcttgctctgaaagacttctctcccaaaagccaggatgctgtggcattgcagcagattaaagagcgtggcgctttacagatgattgatcgtggcgatattcgtcaggctatcgaccgttgcagcaatatctgggcttcattacccggtgcaggttacggacagtatgaacataaaatcggtgacctgattgcccgatttaaagaggcaggtggggtggtaaatgaagttgagctataa

SEQ ID NO: 390504 - DNA, 207 bp, Salmonella enterica
atgctgaacctcgattgtgttcctatctcaacttattgcaaagaaactggcgaaactcctgaagcaataaacaaacgagtacaacgcggtgtttggcgtgagggcattcaggttttaaaggttgaaggcgttaaggagaggtggattgatcttagtgaggttgcaaaatgggccagacaaaactgctcaaactaccgcgcggcgtaa

SEQ ID NO: 390505 - DNA, 216 bp, Salmonella enterica
atgtcgatattaaagattctgagttctttgaaatatactcagcgtcagaaatcctcaaagattacgatgttacctatgatgacattgaatatggcattgttggaaatggtggtgatggcggcattgactctatatttacttttattaatggtgaactacaaaaagaagatactcaacttaatactcaagcaagaaaaaaccaaattgaattggtag

SEQ ID NO: 390506 - DNA, 1410 bp, Salmonella enterica
ttggtagtaattcagtctaaaacatcctcaacatttaaagaggatgcaataattaaattccgagaaaccattcaggatttatttgacttaggtaacgatctcgataaatttaaaaaacgatataactcattattactcgagaaagttagcctgttcagaaatgcttattcaaaacttgcaaaaacattcccgacgattttaataaaattcttttatgcaacccagggtgttgaaaatgacattcatcaaaatgtaattgataaagcaagtaagttacgtgacgatatacatggattatttagtggttcagtctgcgacttctctttcatcggagctaccactctattagaaatgagcagaaacataccagcgagttcacgcatattagaggtatcagaacagccaataagcacatctgcaggtagctacatttgccttgcttcacttacaaaatattatgaattcatcagcgataatggcgcattagctcgaagtattttcgaatcaaacgttcgagactaccaaggaagtgtaactgttaacacaggaattcgactgacgcttcaaaatatgaactctgatgacttctggtatttgaacaatggcgttacaataattacaccgaaagcagtcagcgcaggaaaacaattaaccatagaagacccacaaattgttaacgggctccaaacctcacatgaaatataccgacacttttccaattccgagaattctcaaaatgataaaaggtctattctcattagaataatctgtgaagaaaatgaagatgcacgtgacagaataatccgtgccaccaacagccaaacagctattttacctgcatcccttcgcagttctgatgaaattcatagaaacattgaagattatttgaaagccaatgatttctattatgatagaaagaaaaatttctacaaaaaccttggaaaaccagtatcaaaaatcataagcatcgcgtatcttgcacaagcaatgatgacaatattattgttcagacctgatagtgcaagggcacgtccatcaacacttatcaactctgatgctgaatataaaaaaatattcagtctagatatcaccattgatacctacttaaaagtaatactaattataaaggctactgaagcttttttgaaagtagaaacagaaaaatacaccccagatccaaaaaccacaacaaatattaaatattatgttgcgatggttgcagccataaaatacttaggaaccaaagataatatcttacaggaactatcaacaataaatcaaataaacatcgacaatgctatatttaatgaaagtcttgatattgtattagctcattaccataagctaggaggggatgatcaggttgccaaaggcgctgcgttgaccccagcgattctagcttcactttaa

SEQ ID NO: 390507 - DNA, 543 bp, Salmonella enterica
atgagtattatgcaagaggatcacaaagccacgctgcgcaaatggcatgaggatttgcaggagaagcggggggcacgggccagtttgcggcgcagtaaaacggtgaatgaggcctgcttgtctgagggatttcgctccctgctgatgcagacgcatacgctgtggaaaattgacgggcaggagtggcgcgtaaccgcgctggcgctaacggcggcgctggcggcgaatgtgaaagcgattgataagcagcaaaaattcgccgcacagctcaacggcgtgatgtcggaactgcgttttacccggctttgcgcagtaaagacgccggatgaactactgcgccaactgcgccgcgcggtaaaactgtcaaatggcgcggtcaacctgttttctcttgcagacgatattttctgctggtgccaggagcagaatgacttgctgaaccaccatcgccgccagcagcggccaaccgaatttcttcgtatccgctgggcgctggaatactaccaggccggcgatggcgataccgataacgaacaagattaa

SEQ ID NO: 390508 - DNA, 135 bp, Salmonella enterica
atgttggattctttgccggatgcggcgttgccttttcgggcctacaaaagcagatgcctcaagatcggccgtcggcgtcgcggtcagttgttcacggcaagcgcgcagggcccggagcgtactaaatgtacgtga

SEQ ID NO: 390509 - DNA, 177 bp, Salmonella enterica
atgatgcataagatttatttttggtataaattccatcaaaaaaatcaaaaaatgctaagttacattttttttgtttactcgtggcaattaatttattttaatagagttgttttttattacttcgataaaaaaacaatattttattatcgaagttttataatgaaaacttattattaa

SEQ ID NO: 390510 - DNA, 312 bp, Salmonella enterica
atgtggtgttttgtaaacgagctctatcctccggggcaacgttttgtgggggatacaggggtaatgccttcaatcgatagaatttatagtatgtactgttattttaggttttctatggttactgttgccattcagatgaaatttatcgtcatggtcgtagttcttctcggcacgagcgctttcgttgccggtcatgtagacgtgttttccagttgtcttatacctgtgaagcccgtacgcccggcgtcaaagaccatattgttgatatggccttcaatggtgctgacgtgcgcgatacagcaaaaacgctaa

SEQ ID NO: 390511 - DNA, 468 bp, Salmonella enterica
atgaaaaagactgcattatttttagctctctcactgggtggtatttgtgcggctaacgctgctacacaggcgacctcaaccgtaaccatctcgggatctgccgtatatagtattgaagcacagcctgcaaagactttaggtacctatcttgcgcagggggctaccgtaggtggattcgttgttagcaatgcgggtccgatcgagggtaaggcggaagtgagatttgctgatgcaaacatgtgccgttctgagagcgctacaaacccgtgttatattgaccagaccgatccaacaaaaaccattcttctctatgcggatggactgaactgggctgaggctaccggctttactaccccagtgattaaacctggtgctacatctattattaatatgaatgcaacgaaagaacaaacgttgacgcctggcgtatatgagttgactgcgaacgttctggtatcgactaattaa

SEQ ID NO: 390512 - DNA, 204 bp, Salmonella enterica
atgaaagaaaaaacaaaacttattcgtatttcagaagtaatcgatcgtaccggattctgtagagcttggatttatcgactgattaaaaataatagttttccagctcccgtaaaaacaggggaacggtctatcgcatttattgaaagtgaggttgatcagtggattgatgaaaagattttttattcacgcaatcaagctgcgtaa

SEQ ID NO: 390513 - DNA, 291 bp, Salmonella enterica
atgaaaatagaacttaatacgacagagcagtttgtcagtgaagcagcggattcgtataaccgttatatgaataaacgactacgaaaccagtctgtgcatttttaccacttactgaagaataaggaggatatgaatgaagtgattgaaaatattatcaagaaaacaaagagccgtttttatgggactgaaggtgaacaagaagcagaacggttctccgggaatgttaactatgcgaaagtaaagcaacatcttcgtcagctttggattgtctataagtgtgtataccgctga

SEQ ID NO: 390514 - DNA, 945 bp, Salmonella enterica
atgaaaataacattaattattcccacatataatgcagggtcgctttggcctaatgttctggatgcgattaagcagcaaactatatatccggataaattgattgttatagactcaggttctaaagatgaaacggttccgttagcctcagacctgaaaaatatatcaatatttaatattgactctaaagattttaatcatggaggaaccaggaatttagcagttgcaaaaactctggacgctgatgttataatttttctaacgcaagatgcaattctcgcggattcggatgcaattaaaaatttggtttattatttttcagatccattgatagcagcggtttgtggtagacaacttcctcataaagatgctaatccccttgcagtgcatgccagaaattttaattatagttcaaaatctattgttaaaagtaaggcagatatagaaaaattgggtattaaaactgtatttatgtccaattcttttgctgcctatcgccgttccgtttttgaagagttaagtgggtttcctgaacatacaattcttgccgaggatatgtttatggcggctaagatgattcaggcgggttataaggtcgcctactgcgctgaagcggtggtaagacactcccataattataccccgcgagaagagtttcaacgatattttgatactggtgtatttcatgcttgttctccgtggattcagcgtgactttggcggagccggtggtgagggtttccgcttcgtaaaatcagagattcaattcctgcttaaaaatgcaccgctctggattccaagagctttattaacaacttttgctaaattcctgggttacaaattaggcaagcattggcaatctttaccgttgtctacatgtcgctattttagcatgtacaagagttattggaataatatccagtattcttcgtcaaaagagataaaataa

SEQ ID NO: 390515 - DNA, 297 bp, Salmonella enterica; identical to SEQ ID NO: 8472

SEQ ID NO: 390516 - DNA, 252 bp, Salmonella enterica; identical to SEQ ID NO: 79083

SEQ ID NO: 390517 - DNA, 183 bp, Salmonella enterica
atgacgattgcagaacgtcttatacagaaaggtttcgacgagggttttaaacaaggggctcttgaagtggcgcgggaaatagcctgccggcttcgggatataggctggccgccggaacggattcaggaggtcacgggactttccggtgaagaactgaaaaagctgtttcctgatgagcagtag

SEQ ID NO: 390518 - DNA, 891 bp, Salmonella enterica; identical to SEQ ID NO: 8520

SEQ ID NO: 390519 - DNA, 819 bp, Salmonella enterica
atgggtagcatgaaggaatatatgcaggatctggaagctgaacggtttgatgaatggcttgaggagaattacccggatgttattcccaactctgaagaatgggagcaggccgcgaacctgtactgctgggagcaggaagcgctggccgatcaggctcagtgggatcatgaacacgggctctttgtggcttccctgaacaatgttcatcaacgttacatacacgcaaaggaggagctgaagaagctgtataccctactcgataaggagcagcctgaactggtgtacaggatgtctttcgtccatgcagtgacggtcatggaggcatacctgatgtattgcgccagggcactgcttgagcatgactggccccttacacgtttcagggatgagttttatatgaagtccgatagaataaaaaacccggtaaaacatgctgcccgtgagatggagctttcacttttccggcctgcggcgcgaaacttcgtttcccgaatgacttttcataacgttaaaaccattgagcgctatttcggggccgtgctgcacatccctcccgtctggccaactgagccactgggcatcatctcagactggcgaaatgatcttgtgcaccgaaacggcgtggatgaatatgatgtgccacgagtgatatcagcacagcagctgcagaataccctgcaaaaagtatcggacctgatagaagctgctgacatatccctgcgtctggaagtggactatttcggtaactggcgtaatgaggaaaaccgggaaaccatcgcatcagcactgaatatacctccagccggagagtcacactga

SEQ ID NO: 390520 - DNA, 312 bp, Salmonella enterica
ttgcataagtcattagaagatgtatgggattacttgactaaccagtacgggcatcaggatttatggttaagagaagatccgattcctcccagacacaaaatttcagctgtgttaatccgctatagccatatgccagtcattgtcacgggcactaaaaggatactcgcgtataaagatctgacggcaggtgtctgggtatacattggtaatcctctttccccactcgaccaggagattaactggctaacagaacccacaaaaattcgtcttgataaggggctttgttggcaatattcgctaacgggatactga

SEQ ID NO: 390521 - DNA, 336 bp, Salmonella enterica
atgaacagaaaatattattttaataatatgtggtggggatgggtgacggggggatatatgctgtatatgtcatgggattatgagtttaaatacagattactgttctggtgtatttctctctgcggaatggttttgtatccggttgcaaaatggtatattgaagatacagctctgaaatttacccggcctgatttatggaacagcggtttttttgctgatacacctggaaaaatgggattgcttgcggtttatacgggtactgttttcatattatctcttccgttaagtatgatatatattctttctgttattataaaaaggctgtctgtaagatag

SEQ ID NO: 390522 - DNA, 552 bp, Salmonella enterica
atgaaaaaacaaccactactctggatgacgatagccgccgcactgctgtccggctgcacaggccacagggaacatcacccgcaggtgacattcacggtcgataccgtgcgaacagacacaacggccagcaacccaatctgcctggcggaaaaatacggaagccttcttaatgagcgccatccggacctgtttgccggtgctcaggggagtatttcacgcagtgcattttttaatgacagcctgacgctgacacctgaaacgctccacgggatgatacagaatacgccctgtgttgaatcactggtaacgtccgtaggtccggatatcttcactgcagatgtctctcccggtgtcagaatgcaggtatcaccggatattcacggtgcgcccggaaatatcactctgcgactctcgaccacagaccagaaacgaaaacagactgttgaacaaagcatttctctcagaccggaacagtcccttgtcgtgaatggattcaccggagacggagctggcgaaaagcgcgtcgttctcatcacacctcacgtgcgttaa

SEQ ID NO: 390523 - DNA, 912 bp, Salmonella enterica
atgagcactaaattaaccggctatgtatgggatggttgcgctgcatcaggcatgaagttatccagcgtggcaattatggcccgcctggctgatttcagtaatgacgaaggtgtgtgctggccatcaattgaaaccattgcccgtcagattggcgcggggatgagtaccgtcagaacggctatcgcacggctggaagcagaaggctggttaacgcgtaaggcgcgtcgccagggtaaccgcaatgcgtcgaatgtttatcagcttaacgttgcgaagcttcaggcagcggcattttctcaactgtcagattctgacccgtcaaaatttgatgcgtcgaaatctggcaaaaaagcgggttttcacccgtcagaatctggcggggatccgtcagtaaaatcaaaacatgatccgtcagataaaaaaccttctcgtccggacgcttcgcaaccggacacgcagacggctgaacaggattttttaactcgccatcctgatgcggttgtattcagccctaaaaagcgccagtgggggacgcaggatgatttgacctgcgcacagtggctctggaaaaaaatcatcgccctgtacgagcaggctgccgaatgtgacggcgaggtggttcgtcccaaagaaccgaactggacagcatgggcaaacgaaattcgcctgatgtgtgtgcaggatggtcgtactcacaaacaaatctgcgagatgtacagccgcgtcagccgcgatccgttctggtgccgtaacgtgctcagcccgtcgaagttgcgggaaaaatgggatgagctttccctgcgcttatcgccgtccgtcagcacgcacacagaaaaacgtgaagacccgtacttcaaagccagttacgacaacgtggactacagccagatcccggcaggattcagggggtga

SEQ ID NO: 390524 - DNA, 558 bp, Salmonella enterica
gtgggtaagcatcactggaaagtagaaaaacagcctaagtggtacgtgaaagctgtcagaaaaactatcgcagcgttgccggggggttacgctgaagcagctgactggctggatgtaacagagaacgcattatttaaccgccttcgtgccgatggcgatcaaattttcccgctgggatgggcgatgattttacaacgtgctggtggcactcacttcattgctgacgctgtggcgcagtctgcaaatggcgtctttgtgtctcttcctgacgtcgaggatgtggataacgccgatattaaccagcgcctgctggaagtcattgaacagattggcagttattccaaacagattcgttcggcaatcgaagacggtgtggtggaaccgcatgagaagacagcaattaacgacgagctgtatctctcaatttcgaagctgcaggagcatgcagcacttgtctacaaaattttttgcatttcagaaagtaatgacgcccgcgagtgtgcagctccgggcgtcgtggcgtcgattgcttctggttgtggagaaactaacgcatga

SEQ ID NO: 390525 - DNA, 249 bp, Salmonella enterica; identical to SEQ ID NO: 10801

SEQ ID NO: 390526 - DNA, 687 bp, Salmonella enterica
gtgaaaacactggcagaacgattaaagataggtagagagaaagctggcatgagccaagctcaactagctgaaaaaattggactttcacaacaatctgtagccaaaatagagaatggcgaaactctacaaccgcgcaaaattaaagaaattgcaaaagttttaggtgtatcacaaaagtggttacaacttggtattgaagacaacgcatccatacctgatcttgttgtaaaagaagcagaaagcaccgcattagaccccgatattttcgtaaacattcctgttttagatgtcgagttatcggcaggtaacggatgtctggctgaaatagttgaatcagctattgactggtttccgttaagaagagcagatttgagaaaatctggcgtatgtgcatctaatgccaagatcgtaaaaatatgggggaacagtttattaccggttctcaataatggagatcttgttgccgttgatatttctcaaaccgttcctattcgtgatggcgatctttatgccgtacgagatggtgtattgctaagggttaaaatacttatcaacttacctgacggtggcttgattcttagaagcttcaacaaagatgagtacccagatgaaatacttacctttgaagatagacgagccagaattcatgttataggtagggtattctggtcatcgcgaacttggtaa

SEQ ID NO: 390527 - DNA, 891 bp, Salmonella enterica
atggaagacgcgctttacgcttttaattacacacagaaccgggacaagttatttgctaacttgattagcatcattgatggaatcattgcagatggagttgtccgtgaagaggaggttctttacttagatacatggttacttgaagcaaagcagattatcaataatggagttataaaaagtctatctgcacgggtgtcggatattcttgcggatggaataatcacatcagaagaacgtgatgaccttaaaaatagccttctccaaatacagagggaaattcttgatatccctgaaattgatttttactccaaggatgtagatgtccatttacttaatggactatgtaaaggattaattgctgatcggaacttaactcaagaagaaataagatatcttaattggtggcttgagcaaaatggagctttgaagaacaactacccaggaaaaaaactttatgcacttgtaaaggaaattcttaaagatggtgttattactgaagatgagagtttaactctacataaggcattagtagacttcacaggatgtgacttggaaagtggggtggtggatggtttggcgaccaggctgcctattgatgtagaggcttcgatagagttagagggtaaaacctattgtcttacaggcacttttgttgcaggaaagagagccgtagttgaaaatttgattaaaaatgctggtgggaacatcagtagtggaattactcaacagttggattttttagtaattgggacgctttcctcccgtgattggaaattctctagtcacggaaggaagatcgaaaaggctatatcttatagagatgataatggtgcaaaacttaaaattatttctgaagaaatgcttttcaatgcattaccaagttcgcgatga

SEQ ID NO: 390528 - DNA, 309 bp, Salmonella enterica
atgaatgagcagaatttgaagcatgtgatcgcattgttgctggaagacgctaaacgtttgcagcagatagagccaaatgcaggcactgaggcccgtattttgttagcaaaacaggcattaaagacttgcggggcgcaagaccctgatcgaaccaagttcatgaatttcatggctaacacgatcacccccctgccatgcaatggagagagggtgagccgtgtttatcacgacacaatggttaaggcattaagaatcgagcttgatgggcttaggcgtaagatcgtgatgaacaaaatcgttgccaactaa

SEQ ID NO: 390529 - DNA, 378 bp, Salmonella enterica
atgctggagttctcacacagccagcaaggaaacctaatgaaccagttttatgttcacgttcgtctgtttgaagcaacagccgaacagaccaaaaaatttgaagaattaatgcttaactttctgtaccagaaaacaatcaaagagtctgacgatagctgctgcagactgattccagagggatatatcctcaaaagcacaatgaactgccaacaaatccttgatcaaactttttccattgctaacagtgctggtgttgacgcaaatatatttgtctgcaaatttgaacaaagcgcatgcttacttccgtctgcttccttagttggcaacgattttgttcatcacgatcttacgcctaagcccatcaagctcgattcttaa

SEQ ID NO: 390530 - DNA, 153 bp, Salmonella enterica
atggttcaaaaaaaaacagaaaaaactggattatggattaatcgcaagctaaatttcaaatttggaattgatatagagctgggagcagtaaaaaggggaaataagatcactcccatcccaacgctcattttatatctccccatggaaatataa

SEQ ID NO: 390531 - DNA, 720 bp, Salmonella enterica
atgcaagaattactcgattatgcggcatcgtcgcaggatgaagtatgcgcgcttatcctgggtgaagagcgagtgtttcgctgtcggaatgtgcatccagagccatggcatcacttccgcataagtgatgatgactggcttgcggcggaggaagaaggggagattatcgcagtcttccattcgcatccgcaaagccagccagtgctttctggttctgaccggcagatgcaggtaatgacggggctgccatggtggcttgcatctggcgggcaactgaggaaatacaggcccgttccattcctgcgggggcgcaggttcgaacatggcgtcatggactgctacacccttttcagggacgcataccacctgtgcggcattgacctgcctgattttgagcgcactaacggatggtggttgcgcggtgaaaacctctatctgagcaacatgccgctcaatggattccgccaggtatcgccgggagaggcgcaaccaggtgacgtcattatcagacagccattccccggcgctgacccttgccacgcaatgattctcctcgaagacaacatggtacttcatcacgaccacgccggacacctgagccggagagaaccaatgcgcccggcatacgttaagcagatgcattcaatctggagacacgaacagtgctcatctttaaatttgcaggcaatttacgccgattttaccgccagatatccctga

SEQ ID NO: 390532 - DNA, 240 bp, Salmonella enterica
atggctgcaccttctaatgaactacttactggattggctgtaaaaacagttctcagctacgtaatcgcaattcttaatgaagatcaaaaacaaattcttatgagactggcagaaactagatctatgaattttgatgggattgaaagtaactcaacctcgaaggaagagcttcgtgcagcagccgataccgttaacgacatcattgaagaaatagtcaaaacgggagttggccaagagtga

SEQ ID NO: 390533 - DNA, 2241 bp, Salmonella enterica
atgacccaaaacgtcggtgatattgaatatgtgattaaggctgatactgctcagctgctgcgcgcagataagaaggttacatctgtaaccaataacatggatactgggtttaagaaggctgataattctgcgtcaaagctgtctacgacaataagcaagctgtctgccgccatttctgttgcgttaattgttgagtgggggaagaagttccttgagcttgcggacaacatgacacaactccaggcaaggatagcaaggctttcaacggatgcctccacagcaaaagaaacgtttcagtcgttgacgcaaatatcgtcaaaaacaggcgccagtctgtcggatacaaccaaactgtgggaaacattgacatcgtctcttaaagaagctggcgcatcgaatgctcaggtattaaatcttaccgatacgctgcaaaaaattggtcgcataggcggaaactcgacagaagaaatgtcgaatgctcttcgccagtttgggcagtcaattgcgtcaggcactgtcagagcagaagaatttaactcaatcctcgaacagatgcctgagttagcaagacagattgctgctggcatgggtattagcatgggtgagttgcgtcagcgaatgctcaatggaaagttgacagcgcaagatgctcttaatgctatacaggacagaacgacagttgttaacgaggaatttaataagcttccacgttcattatcacaagctaccggctctctcgaaacatcatttgcaaaacttgtctcctcaataaatgacgcaactggagcatcaagtgcagcagttactgtcattgatggattggcaaaatacatcgagttactcggagactcgtcaacatcaactgcagataaactatggtctctcgctggtgctatttcaaaacttaatcctggatatattggaaaacttttagctgacgggcttataggagatgaacctccaaaacaagtcgatgtattaagcgagaaaattgccaatcttaccggggatttaaaagggctttatgggcaggctgaaaaaacagcgcatgtggagatacctcagaccgataacaataagggaggaaaaggaggtggtgggaagtccactaagaaacaggcagatgaagcaacagagtctctcgccagacagcaagccgcactcgatcgcctgaacactggttacgccgatggctctctcgaattagcgaaatacgacgctgtagttgctcttggaaataaagcatcaggagagcagattgccaaagctgaacagcaagcggaatccatatggaaaatacagcaggcaaccaaagcggcggcagaagaggaaaggaagcgcacacaggcgggtcaaaactttaccgggctacatgggcaggtatcaccagttgccgcagtagataacacctacgcacagcaaatggcgcagcttgacgagtatgtgcagctttacccacaaaaaattgcagaagcagaagccgtccgcgcaggaattgaagatcagtatcatcagaaacgcatggccgcaatgtgggaggaatggcagcagcaaagcgagattaatagcatgcttggcgcggctgtagattcgcttcagggcggggcgaccaatgccataaccgggctgattaacggaactcagagccttcaggagtcactggcaaacatcggcacaaccatcctgaacagcgttgttggcggcttcgttcagatgggcgtcgagtgggttaaaagccagttaatgggacaggccgcagcggcatcatcattagcgtctacgatggctcaggctacagcagcagcttcagcgtgggcaccggcagcaatgagcgcctcaatcgcaacgtacggtagcgccgcagccataggtcaggctgcttatgcggaatccatggtcgctgcgaaagggctggctcttgccggaggccgtcgctacggcggcacagtatcagccggcaacgcctaccgcatcaacgaagatggacgctctgaaatcttccagactgcaggtgggcagcaggcattcatcccgaaccagtcagggaagattattcctgctgacaaggccggaggaggcgggtcgtttagccctgtaatgaacctcacgataaatactacgggaggaattggtaatgaggagatcgcaaggctgcgtaaagtgtggaacaacgacatgctgaaaatgatggtagaccagagcacgcggccgaacggtttactgcaagggcggagaaaataa

SEQ ID NO: 390534 - DNA, 297 bp, Salmonella enterica
atgctcgaagtacgagtggctaagcttgaatccaacgttgaggatatcaaagcaaacctgtctgaggcgcgggttgacattcgagaccttcgtaacacgtcatcaggaacaagtagagatgtggcggtaattcttcagaaacagttagatattgacgaaaaactatcaaaaaaacccagtatcagcgatatggacagagccatatcaactgccgcaaacaagcaaataatctggacggtttctgtcatggtaggaattgcgggcctatcaatggctgtagctaagctcattttctaa

SEQ ID NO: 390535 - DNA, 639 bp, Salmonella enterica
atgaatattgtagcaaaatcagattacaacttccaaggattcgcttttaatcctgtgacagaaggcggttctatttggtttacctccactgaactagctaaggccctcggctacaaaaaaaccgatgccatcagccagatttatgctcgtaacgccgatgaattttccgactctatgtcgttgaccctcaatatgaaggtcaacgggataaacaatagcttacgtaacaaatcggtcagagtttactcactccgaggcgctcacttggtggcgatgtttgcttctacgcccaaggccaaagagttccgccgttgggtgctggatattttggatcggcaggcagaatgctcaccgattgcaaaacagtttactgacgaagagctggtcaatctctgctacttacaattgtggatggagaagagtcaacaaatgtgcaaacacatctatccaggaatgaagcaaattggttctgagctttcaggaaggatttacgatattgcatatgagactcgctacatgtcagaagaaaccaagaaatcacttcttcgtgaaatgaagaatcttgataccaacaattttgtcgtaaagaacgctcagccaatgctggcaaaactgcgcggcgaggaatggattcattga

SEQ ID NO: 390536 - DNA, 174 bp, Salmonella enterica
atgcaagatacgctttttactgagcgcaaaaacatcaaactcaatcttcgactaccttctcgactcgatcaggagcttcgcagactggcggaaatggactgcatttcgctgaactctgcaatagttcgtttgctggcaaagggtgtaagggaagaggtggcgaatggtcgttaa

SEQ ID NO: 390537 - DNA, 258 bp, Salmonella enterica
atggcgtattcatcaagaattgtacaaaaagcatctgacatatcagacggcaaggacagccttaagccgggggtgcgcataacattctcctttgatagttggtctgaacgactttgttgtttgcgcttctttcttcgctccgccattgcagctttgctgaacaaagagctggaacaaatcttctatgatgaagattttggaaagatcaccaaaaacatgaccaaagtaccgcaaaaaagagaacgccaggaagcctga

SEQ ID NO: 390538 - DNA, 225 bp, Salmonella enterica
atgaaggagatagtgattgaacttatcaactcaggaccattctgggcggcttttagcgcctgctttatcgcctatctaaaccgaaacagaggcaagaaagcgaccatcgaaaaggacgggaagaagatatcgcttgataacatcacccaccacgaattgactgaaatccttgaagacgccaaaacaatcgtattcagcgagagcgacgacaaaaagcccacctga

SEQ ID NO: 390539 - DNA, 264 bp, Salmonella enterica
atgaacgagagctaccgacagtttgaagattggtggtcaaaagaaaaaagccagtttacggatgacgacgaattaaaaaatttttcttgggttatatggcgggcatcacgcgccgctatcgagattgagttgccagtaaaaaatgatatctccgacgacgactaccccattcctgacctggttgattgggatgatggaagaaacgctggaattcaggaatgcgcagaagccatccacgtcgctggaatcaaagtgaaggagtga

SEQ ID NO: 390540 - DNA, 219 bp, Salmonella enterica; identical to SEQ ID NO: 170316

SEQ ID NO: 390541 - DNA, 639 bp, Salmonella enterica
atgcatgaaattatcggggaaaggattaagtcccttagagaggctaagggcttaagccaagctcaactcgctaagctttgcggctgggcggctccgtctcgcctgggtaattatgaacttggaaccaggaaggtcagtgctgacgatgctttgacgctcgggcaggtattgggggttcccccatcacaaattctgtttggggattcaactggcgcgatattcagggaatacaattatcctgttttctcacatgtacaggctggaatgttctctcctgagctaagaacatttactcagcgagacgcggagggatgggtaagtactaccaagaaagccagcgatgctgctttctggctagaggtagatggtcactcaatgacagctcctgccggttcgcgcccaagcttccctgagggaatgcttatcttggttgaccctgaggaacctgttgatccgggtgatttctgcattgcgcggttagatggtgatgaattcaccttcaagagactgatcaaggatagcgggcaggtgtatttacagcctcttaacccacagttcccgatgatgccgtgcaatgagaactgtcgagttgttggcaaggtagtagccagccagtggcctgacgagacgtttgggtga

SEQ ID NO: 390542 - DNA, 381 bp, Salmonella enterica
atgaaaaaaatagctctggcagtggctttggcagtaaccttggcaggatgcgcatcttcaggaaatcagcaactgaaaaacgagactgaaacaagcgttcagtcgaaaatccaggaggggaaaaccaccaaagctgaagtgaagtcagtcttcggatctcctgacgctgtttcttacactgatggcggtaacgaaatctggaagtataccttcgccaaagttaaagttaacggcacttcctttatccctttttatggtcttttccataacggaacaaacggcaccaaaaaagaactaaccattctctttaaagacgacaaggtgcagaaatacaccatggctgaatcagctataaacaccaaatctgggtgggctgattaa

SEQ ID NO: 390543 - DNA, 204 bp, Salmonella enterica
atgaaaagcgaagatgaattctttgcggagcttcacccgcaggtggtggagattcttggaacggctgttatgcagatacttgtagagcagcgagagccatcaagagaggctctgatagagatgattcaggtgctatggcaggaagatgatgtgggcttggctgtagaactggctattgatgtgctgacgttgccgaaagagtag

SEQ ID NO: 390544 - DNA, 618 bp, Salmonella enterica
atgagcaaagagttttacgcaagacttgctgaaattcaggagcacctgaacgcaccaaagaatcagtacaactcgtttggtaaatacaaatacagaagctgtgaagacattctggagggtgttaagccactactgaaaggcctgttcctgtctatcagtgatgaagtcgtgctgattggcgaccgttattacgtcaaggccacagcgaccattacagatggtgaaaatatccattcagcaagcgctatagcgcgagaagaagaaaacaagaagggaatggatgcagctcaggtaactggcgctacaagctcttacgctcgcaaatattgccttaacggtttgtttggtattgatgacgccaaagacgctgatactgacgagcacaaacatcagcagaatgcagcacctgcgaagcaaactaaatcatcgccttcctcccctgctcctgaacaggttcttaaggcattcactgaggccgcaatgcagaaaaacacggtggaagagcttaaacaggctttcgctaaagcgtggaagatgcttgagggaacagaagagcaagcgaaggctaaggacatttacaacatcaggcgagacgaattagaaggagcgatcgcataa

SEQ ID NO: 390545 - DNA, 384 bp, Salmonella enterica
atggcacattcaatcactgtacgactaaacaagccagcaagagagtttcaggctggagaaaatatcggattcaacattcgtgctggcgtccagtattacgaccgccagacaaaaaagaaagaatggacaaactacagtgccgctgtatttgccaaaccggggtcgcaggctgattactatcgcagtgttctggttgaaggcggcgttgttgaaattaccggcgaaaacatcaaggttgatgtttatcagggacaaaatggtcaatcaatcactcttgaattgctgaacgcaaaaattggatttgcagcttcaggaaatagcccgcagcagcaaagtagtaaccaacagaacacgcctgtatacgacgattccatccccttctga

SEQ ID NO: 390546 - DNA, 1698 bp, Salmonella enterica
gtgaataccgaaacgcgagttgaatcgcaggcggtatctgcgtcttcccgcccggaaaggtggcacgccattaactggcgtaaaacctcagaagcggtgagaaagctacaggtacgcattgcgaaggcagcgcttcagcaggagtggcggcgggtaaaagcgctgcaacgaatgctgacccgttcgctggcggctaaggcattagcggtcaggcgagtcacggaaaaccggggcaaggatacccccggagtggatggaaagttatggagtaccccgaaaaccaaatgggaggccatcttcgatatgaagagaaccggatatcaccctaaaccgctacggcgggtgtatatcccgaagtcgaacggcaagttgcgtccgctcgggataccgaccatgagagacagagccatgcaggcgttgtatctgctggcgctggaacccgtgtcggaaacaacagccgaccgcaacagttatggttttcgtccgatgcgttcaacggcggatgctattgaacagtgctttgtggtgctcagtcggggcaactcggcgcagtgggtgctggagggcgacatcaaagggtgtttcgataacatcagtcatgactggttactggcgcatatcccgatggataagcaggtgctgggtaaatggctgaaggcaggctacatggagtccggtcattaccatacaaccggtgcgggtacgcctcagggcggtattatctcaccgatactggccaatatggcgctcgacgggctggaagcggtgcttgaatcccgatttggggtgaagaataccaaagccagctacaagaccaaggtcaactatgtgcgttatgcagacgactttatcatcaccggtatctcgcaagagttgctggagaatgaagtcaaacctctcgttgaagcctttatggcggagcgggggctgcaactgtcgccggagaaaacggtgataacgcacattgagcagggttttgacttcctcggccagaacgtgcgcaagtatcgcgggaaaatgctgataaagccttcccgtaagaacctgcgaacgtttctggcgaaagtgagggacattgtgaagcgtcatccgacgcagccgcaggactggctgatacatcagctcaacccggtattgcggggctgggcgaactatcaccggcatgtggtggcgaaagaaacgttcagctatgtggattaccgtgtctggaagctgctctggcgctggtgttgcaggcggcataaaaaccgctacaaacgctgggtgaaggctaaatactttcatacggtgaataaccggcgttgggtgtttcaatggcgggaggataaggaaaatccggtaacactggtctgggcaaaagacaccgttattaaacgacacactaagataaaggcggaagctaacccttatctgcctgaatgggaactgtacttcgagcagcgccttgagcgtcactggaaggaaaccatgcagggcaggaagaagttgctggcgctctggctcaggcaggagaaacgctgcccgctctgtaaccagttaattacgatggaaacaggctggcacgttcaccataagcaccagaagcatctgggcggcggtgacgagcttgagaatctggtgatgctgcatccgggctgccacatccagttacacgtgaacgaggaaaaagatgtgcaaccggttcaacccgtcggttga

SEQ ID NO: 390547 - DNA, 1272 bp, Salmonella enterica
atgcgtttaactgatattgctgtaaaaaacgccaagccttccgacaagcagatcaagctatcggatggaaaggggctgtatctgctggtgcatccaaatggttccaaatactggcaagcggcttatcgctatgatggtaagcagaaagtgttctcgattggcacctacccttctgtatcgctctcagaagctcgtacaagcctcttggagatgaaatctctgttagctaatggtattgacccactacagcaaaaaaaggctgcaaaagctgaggagcgcggagatttcacgtttgaagctgtagcgcgggaatggcacaaaaaaatggctgttagtgagcgatggatacctaagcatagcgaacgagttttaaacagtctcattaaccatcttttcactgccataggctcacgagatgttaaaacgctaaaaacccgcgatctgctgcttcctcttcgtaaaattgaggctaaaggtcaaaatgaaacagcttcacgactgaaacagcgtattacagctattatgcgttatgctgttcaagaagatctgattactcaaaatcctgccgattatttagacggaacactgacaacccctaaacgcaatcattacccggctcttgaacttgagcagataccggatctacttgctcgtattgatgcttataatgggagtagattaactgtattagctttaaaactcactttattagtattcatacgttcaagtgaactacgctttgccagatggcctgaaatagatcttaaaaaccaactctggattattccgccagagagggaagaaataaaaaatgtcagattttcagaacgtggttctaaaatgcgtatgccgcattatataccgttgagcaatcaggctattgatgtattaaaagagctgaaagagatcagttatgatatatctgacggggaaggattaatttttattggttgccacgattataaaaaaccgatgagtgaaaacaccataaataaggctttgcgtcaaatgggctatgatactaaaactcaaatttgcggccacggtttccgcacaatggcttgtagtagtctggttgagttcggtatatggacagaagacgctatagaaaggcaaatgagtcataaagagcaaaacaacgttcgtgcggcttatactcataaagctaagcatattacgcagcgtcgtttaatgatccaatggtgggctgattatttagatgcaaataaagagaatcatattatgccgtttgattttgccagaataaattaa

SEQ ID NO: 390548 - DNA, 1146 bp, Salmonella enterica
atgaagattttcttggctcatgcaaaagaagatgaagaaacgacagaagtaatatacgataagttaaaaaatgacggctttaatccttggatggatataaaagatattccagcaggtgttgattgggactatgaaattcagaaaaattttaataattcaaatcttattgttctaatactaagtaaaatcagtatacaaaaaaatggttatattagacgtgagatcaatgatgctattgaaaaattaaaatactacaaaccagatgatatatttgtaattcctttgttgattgatgattctcaagttccatcctatatttccaataaaatacagtttatcgatttcaagaggaatgatggttgggaaatattcgatagatctttaagattagcagcttcacagcaaaatttagaaatagtgcaaggtattcaatttggtttatttacctttaaaactaatattttaaaagaagagtataaacaaatcccggggcatgatatagaaattagctacccagtgattaataattctaaaaattctaagtcatcagatacattatcaaagtattttgaaggccgagctgtacgtatcttatttaacaacagaacatccccttggcctctagaatttgattggaataaagaatataagagtacctatacggattcttattatgagagttataatatagcattttgtaatgactcagtgataagtatattgcatactataaattggtatggtgcaggagctgctcatccaaatacagcttttgaagttagtaactttgttattacagacaatgactattcatataaatttagcatatatgatttatttaacaacgaggactcacaagaagcaatatcaaagattaaacgcaaacttattgaagatgcaccacgagtatattgggaaaggactggagaaaaagcagaacaatcagatatggattggtttactacaggggttgaaaatagtgatttatctaatttcacattaaatcaatcagggtttactttccactttcctccttatgaacttcactgttatgcattaggatcttgggagttttttatatctttcttcgaagtgatagatcatttaaaaaaagattctatttatcaactgataaagggagagtaa

SEQ ID NO: 390549 - DNA, 1467 bp, Salmonella enterica
  misc_feature (1431)..(1440): n is a, c, g, or t
atgaaagggaatgtggctaaaacgggaagatcatttaaaaatagagttgattacatattaaaagatgagcacggttttatttgtagcaatatgtcagcagataaaaataacgttagtaatttaactgatgagtttaaaactgtaagcagctttagacaagatataaaaaaaacagactttcatgcatttttatctcttccaaaaggtgaaaaattaacagatgaaaaatggcaggagatagcaaaagactatttgaaagaaatgaatattgatatagaaaaacatcaatatatttgtgtgcgtcataaagatacagatcaagaccatattcatattgtagcaaatagggttggtttagacggttcggtatggcttgggcagcactcagcatttaacacaatagcagcttgtgaacgtttagaagtaaagcacgacctgactatcacacaaggactaaaaggctctaaatcagaggtatcagcaccaaccaagaacgagatcgagcaagccctccgtacaggtgaaaaaccagctcgtatcgtgctacagaacgcattacaggcggctatgttgggtaaaccagatctgcagacgtttatagacagaatgcaggccgtaggcattgaaccttggttcaatgttgccagcactggcaacgtagcgggttgttctttcagtgtgggagatgtggcatttaaaggctcacagttgggtaaaaaatacagttggaacacaattaaaacgaaggtgaaatatgacaaaaatagagatgatgaactcgttagaagattctcagcaagaaaagatgatgaaccaaatagtattggacgatcatttgttgaatcaaatatcaatgacagtagagccattgacagaatcgatgatgatattatcagaatcagtcagcacagcattaaaccagacgcaaaagacattaaccagagtgaacaactcattagaagcaacaaatacagctttaaactcagcgaaaaatataatagaccaacaagccgtaaagttagaagaacaacacagaaaactgcacaaatactcaacagagttaaaaaacaatacaataaagaaccaatcaagccttataatcaaggtagcttcaatagtgggagttctaaatttagcagcagttctatcagtaggatacttgatcatgcagaaacagccacaactgccaccaataaatttagactcaaaggccgtggcaaaatcaacagcagagcaactaagatcgaagagataagggaaaagttaaatataaagaaaccagttattcagccaaagaataaagagaaagtgattaaagaagaaataaagaaaaagccatcctacgtagttcaatacgaaaacaggtttaagactaaattaaaatataaaattcagcaatatgaagaaaataaaaaagaaaaggcaaaaaannnnnnnnnngtgatgtgttttaatatttttttctaa

SEQ ID NO: 390550 - DNA, 375 bp, Salmonella enterica
atggatacagacagaaaaagaggtcgtatagaattaaatcacgaagaacgcagagatatatctatacagtttagagtaaacaaagtagagtttgaatatttaaaagaacttgttgaggcgtccggccttgagagggggcattacattagaaaagagattttaaactctgaacctattgttaaaagaaaaatgcctgaagtaaatcaaaaaacatatatgcaactttcagcagttgccaataacataaaccaagcaacaaagaaactaaatagcaatgagtattttgataaaaacgaggttgataaattcaactttaatataaagcaggttggtagaaggataatagaaataaataaagacttggggtatatatga

SEQ ID NO: 390551 - DNA, 357 bp, Salmonella enterica
atggaatatcaggtgagagagtttattaacgaaaaatatactaaggctgttaatattttaaaggataaccttaaagaaaactaccatgttttttatggtgtgagattaagtgagattctttttccagccagtgagtatggcactgatgctttctttaaagagtttgaattaattaacagtgtaatacttccactggtaatctttgatttaacacaacgcaagccaatgatgattatcagcttcgataagatacttgatgccagtttgttggaaggaacaaatattgtggttcttgaatgtattaccctcgctgatcttctgacaaatgataacattgattttttatataaaagctaa

SEQ ID NO: 390552 - DNA, 978 bp, Salmonella enterica
atgagatatttaaccgaattgatctgtgacctctacaggttgacagatcaccataaactgaccacagcaacgtttaaaaatcttgctgatattaagttatttaaacctacagcagatgcagacaccatattgcagcttgaaaatatatttagcgaatactcactgagatatattgacaaggatctggctgaaattctgagcaacttaataactacagataagaaacactctctggacttcgattttaacaaaatacaatctctgactgactcgaaaagtttcggttgtggatggagcaaggtaataaatggtagttggttcaaagatctttattcttggggagaggggatgtatcctgccgaaaatctgaaagctgaaaatattttagactggaaagataatatatggcacattgagcatgaaggtttccccccacgcaaccctattaatgttaaatattattcttggtttgaccgatatgtagcttcaaacagtggtggttcacatcatgcagcaatggttgtatatcaatcagtcagagacgggttagagtataaaagagaagctgttattaaacaactgagtatagacccaggcactgttgaaatacttgataagaattactattcattcatattccagatcaaaacccttaataaagaaactagaatttatacatctgaatacgagtttacagatgctttaaaagactttggacaaaacagacataccatacttaaacctgttaattacgtttccaacataaaattagtatttattccaaaagatgcattaaaaacaaatagcgagacattccgcaactggtttcattctgcaattagctgcggaaaaataatatcactccctgattatctgaaaaatccagcacattatcatacacttcattactcacatgaagtagactcaataacacttggcgacccaagcagaaaatttaaactgaaaggagactcttag

SEQ ID NO: 390553 - DNA, 309 bp, Salmonella enterica
atgcataccgtacaaggggaaattgtcatggctttaaaactaaaccgtccgaacatcgatgaatctcagcaaccagcaacaaacgcagaaaccgcgcgttttatctccggcgctaccagagcgcctgtagtgggtaaaccaaagttgatgaacttcagactttcagcccattttgaggacatactggaagctgaagctatcagaacagggcagagcaaaacaaccgttctcaaagcggcgctggcgatgtacaacagccaggatgaaaacataaagaatcactggttgcttgagtctgcaaaattctaa

SEQ ID NO: 390554 - DNA, 663 bp, Salmonella enterica
atgggtaaaatcttgcttgtcgtatcagataagggtggtgtaggcaaaagcacctacgtggctaacacaggctcaatgctggtcaataaaggtaagtcggtaattatcctcaagacagataaaaaccacgatctgttgagctggaacgaaaagcggacagataacggcttactcactatcccggttcacgcagcttacggaaacgtcagcaatgaaattaagcgacttagtaagctgtgtgaagtcctcattgtcgattgccccggccacgacagccaggagttccgtagcgccctgacagtatcagatatcgtggtaacactggttaagccgtcctctgatttcgaaagcgaaactctgaccagtgttacagagaaaatccgcaccgctcagaaagctaacgcagccctggaaccgtgggtgctgttcaccagaatcaactcagcgaaaccccgccacagaaaagcggccattgatctggataaattactgcgttcggacaacatctggattcaacctcttaaaacccggatatccgagctggatgtgtatgaaagcgcctgtaatgaaggggcaggggtacatgacgttagccgggcatcaagcctttcaacagcgaaagcacagattgaactagtggcgcaggaaattggaattttatag

SEQ ID NO: 390555 - DNA, 348 bp, Salmonella enterica; identical to SEQ ID NO: 385985

SEQ ID NO: 390556 - DNA, 249 bp, Salmonella enterica
atgtccccgcaaaccaacggcatctgcgagcggttccataaaacaatcctgaacgaattttatcaggtaacgttccgtaaaaaactgtacggcgatcttgatacattacggtcggatcttgatgaatggctggctcactataataatgagcgaacccatcaggaaaaaatgtgcaatgggcggacgccaatggaaacgttacttgatggaaagcgcatctgggccgagaaaaatttaagccagatgtaa

SEQ ID NO: 390557 - DNA, 285 bp, Salmonella enterica
atgagcaaaaaaattagagactttgaattgatgagcaccagcgaaatttgctgtcagctaaggatttcttccaggacgctggatcgttaccgaaaacgaccaagcgacaacaacccattcccggaaccagactgttcatatatgggtggctccaacaaatggcttaaaactaaagtcaccgcttggcagattaaagagatgtcacgatcaacccgtaagccgatgtctcacctgaatctaacccgtgatgataaaggccgtctcacccgacctgacgcggcgtga

SEQ ID NO: 390558 - DNA, 222 bp, Salmonella enterica
atggatattgaagtattaaaaagaagccttgaccgaactgatgctcttgagtcggtcgttagagaactaataagtgtgctcacgcctgaacaactatctgcttttcaaagcaacacaaaaaagagatgggagttagctgaaaaaaatgctccgtctgaactcgctgatacaatatccagaactaaagctttagctctgaaattgtctggtattggaaattaa

SEQ ID NO: 390559 - DNA, 357 bp, Salmonella enterica
atggcttgcatcgatggcgcttccggtcaggaaattgcttttaccaaccagcggcgcatcgcagctaatgcagggtttaccttcatcccgtatcctgatgtaacggttaaaggcggcctgcgcctctttatcccactgagctttagttttgaacgactcacgcttagcctggcggcgctggcgttcggctttatccgcctggtgtttctccctgatacgcctggctgcggctttaatctttgctttggcacgcagttcaagcgcgtagatagcgccatgttcaggacagcaccagacaacattgctgtaagcaggatgaaaccattcccggcaaactttgcacttacggcgcggtaa

SEQ ID NO: 390560 - DNA, 546 bp, Salmonella enterica
atgaattttaaaccgatatgggatatctggtatccatcgccagataaactctcctgccaaacgtcttatacgcttgaggacgctcagcaaaaattggaacatgccctcgaaaaaaatgaacagatgcatggaacgataaagccgttgcgcgtgacggtgcggtatgacttcagacgttgcgatggacggaaactcacagcgtcatttaacgggcgctggcatgaaacgccagttggcgtaacgttggaaggtcaaacatcgccatcaacgtttggtcccctgattattaccatcgcactccttctggcgctgggaatggaaatactcactctcgctaaccttgtcggacgctttatcggagggatatttttcccgctggacaacattgttagtggacccgaaataaactggccgctcattgttatcctgctcggtttcccccccatttttcttgccatcgcaacaggtattctcgcgttgctgaacgccgttgaacgtgaacaaaaacaacaactgcttcgttttatccgcgatgcgctgaaatag

SEQ ID NO: 390561 - DNA, 1488 bp, Salmonella enterica
atgataaggaaaaaaggatttacattattagaggttattatcgtgttgggcgtcgggagccttattgcttttatgaagtttcaggatatgagaaacaatcaggaaacggctatggctgaaaacgtcggaatacaaatgaaacagcttggtgaggcggttaaccgttatatcagtattcgatacgacaaggtttcaacattgtcatccaccaacaatcagagcagcgatccgggtccaagaacctgttcggctaatggctgtgaaatcacttatcagacgttgattaatgaaggattgttgcccgtaggctataccggaaccaatgcgcaaaagtccacgtataagattttgttgaagcgttcaggaacagcgcctgattacgtgattaatggcctgataacaaccagtagtccttggaaagaaggtgggcgcattcgctatgacctgctgggtaaagcggttcaggctgcgggtgttgatggtggtatgagcagaagcaccaagatcgcttctggctatggtggtcagtggagtgagaattcagggaactacagcaatattactgatggtggattgctggcttaccgcgtgggctataactcttctatgtattctgtttacctgcgtcgtgatggaacattgccaatgactggcgatctgaatcttggcggtaagagcatcaaaaatatccaagacattacggcatcaggaacaacaacgaccggaacacttaatacaacgggtaaagcgtctgttgcatcagatcttgctgttggtggaacctcgactctgaacgggcaggtgaatatcaataataacctgaaagtgaaatccgacacctatctgaacacgctttctacaaccggactggcgaagttcggaggacgtatagcaaccaacggactcaatcccaacgatctaccgtcaggatgggctggaggtgtgcgcacctatgacttgtatgcgtctggaactgttggggctggagccgggaaaacggtcaatgcttatatgaacagcgcgggtaatattttcgcgtcaggaaatcttaccgctggaacgataaaatccaatgggacaattgaatcagccggaagagttaaagtcggtgagtatcttcatctgaacggtcaggcaacgttaaatgcaaaatgtacgcctaatggtctggtggggcgagacagtgaggggaaagtattatcttgcgctagtggtaaatggaaaaatgtttctgcaggggctggtttgtattccgtgacgttccaatataatcctgctgctggttcttatggatataatccagcgacttgtataaccaaaaatccagatacaaatgcatgctcttgcccttcaggagcaaatgctgtggagctaatgccttcatttacaacatattcttatgagtcagggggcggaagtccgggtcatggcgcaggccctacgactcatactgtaaataaatattatatgttatatcagtgtcgttaa

SEQ ID NO: 390562 - DNA, 1113 bp, Salmonella enterica
atgagttttgttaatgagttatctatagaagacaatgcggctcctccatcagccacagccaaaattactgcccagaggataggtaatttattacggaataggtatcaagattttatacataaaagggaagcaggaaatggcacttggtccaactcagattttttatctttcaaaaatgcatgcgataaattgcagagcgaagagtatgaaagatttgatgaaatattgagagaaaaacagtcagatatttcaatggcactatcatcttttgattataaatttttatttgtaatgatgcatactggtaaaaaaggtgctgccgagaacatattgtctgacatgaagcaatggcaaagagaacttaatttagcatctttgattgcggataatacccccaatgatgacttaccattccaagtgcatcttgtctcagcagaagatattcagcaatggttagccgcaggaacaagaagcagtgtagatttagatgacgtagaaatagaaaaatatggacaaatagatgaaccacatcaagcattttatggtttagtaagtggagaccaaattgctgattggtggaaaatatatggaaccagattatttactaaaaatataagaaatttattaggaaaaacagaagttaacgatgcaattaaagtaaccgcatcacaaaatcctgaattattttggtattacaataatggtatcactctcttggttaatagtgttgaaccacatagacgtaatgcatccagaggcttcgaaagaggatgcttccgttttactgacgtaagtgtaattaatggtgctcaaactgtaagtagtttaggcatgatggccgggtctgtgggggaaaacttatctaatataaaaatatcagctcgcttcataaaattatcaggaaatgaagacattgcaaattctataacaaaggcaaataacttccaaaatagagtattgggtagagattttgcctctcagcgtcctgaacaacaccgactttcgaaagaaattgcaattgaaggatatcaatatcagttgctacgttctgggccaaatgatacatctggcgatgcctccattattgatctcgacgaagcgccggggcaatag

SEQ ID NO: 390563 - DNA, 2265 bp, Salmonella enterica
gtgttatggctgataaatcagggcgtaggtcttgccgatacggtctggaatacgtatgccgcaaacccatcagatggtgcggttatcaccacgtcagcgtcctatcaggaacttgatcgcatagcgaagactgcgttcatcaataatgtctgcatgctgaaggcaggtcagctatggaaaaaatcgcatgaaagcgcactgtttcccggtgttatgcctgtgtttgagatgacaccagaaaaaggaaagtatttatacagatacaattacggtgccagtaatgcgggtaatgaaatgaacaaaaacttactggtatccaaatcagcgtgtggaagtatcacattgacagacccgaaagctaaagcggcttatgatgaacaggctaatgctcaggcgcaggcggctatcgcatctggtggaatgtatatgagctacatgccgcaggaaatcaaaaccaatatatcagccgttgttgaagctcataatacagcttttattgccctgaataacaatatgatgacactggcagaaaaatatgtcgctgataataacattgatattcagtctgatataaacagtgcaactgctacctacgtttctgttatcgatacggcggtcagaactgcattttctacaggcaaccagtgggatgattttaaagataatgtccagaaagatggctggtttatggcgggggcgtggagtatgaaacttattcgtattcaggatgcgattaatggtgctgctcacaatcttcctgtcgcgggacaacagagtatggaatatggcgatatttttaatagcctgaatgctgtaatggcaaaggtgtctcacgacatggcgagatcgacgacggcatcgagatacgcgaatggtattgatgcgcaaaaccgaacagaagtcaataccactggtaagggggggcaggggccgaaaacagatgatgcagggaaaattgtatcctcgcttcaaaatgaagccaataagagtatttctggcgcgatggcgggtttcctgagttcaagcgtaatcaatggtagaaaacaagggaaaatcgtcgcattttcaacagataccacagcagcaaatttacaggccatcaacccattattagcggttaaagggcttggagatacgctcagtgctgctggctggacattattagggagttctgcggttgtcggtgccggtcttggcgcatggacatcatggactgcaagctgggtatcgggtgcatttggtgctatgggtattgttatgccactggttatcccattatggatagctggcgataccttagctgttgttattcctatgctcccttacgttatgtggtttggtgtttgcgtgggctggatgattttatgtcttgaagcgatgatcgcagcaccattatgggtcatcacccatttacatccagatggtgatggcgttgtgggtcgaggtggcgctggatacggactggtcctgtcgctaaccatgagaccagcattgatggtcacgggtctgatagcggcctatacgatgctgcctatccttggtggggtggtgaatgaaacgttctcaggtgcattcggcatgatgtccgcgaatgccgggataggtatcattgaatcactggctcttattgctgtttatattgcgctgatgtttacggttgtgaagaaatcactttccctgatccatgttattccagatgaaattatgaagtggcttggcgtccatagtggtcagagcatggcgggttatgctcagtcggcatcgaaaggtgtggaaggtgctatgttcgcaaaaacagtgttagatcaggtatcacattcctctaatgcgttaggtaatcagatcagaaacgggcaaatgaataaagaccgtgagcagcaacgtgaacttcaacagcaacaacaaattcaacaggggaaagctcaggcttccagcagagccaataatacgggatctgcattcagaacgcatatgagcaatgcagggccgcttgaccaacaggatgaataccaatcccttgaaagtgctaactctgcttacaatgcggctgaggcagcagatgccgttggagattcggttggtgctgcaggttatatggatgtcgctcaaaaggctgctaacagagcggtatcttttggtgatcataacaggccattgttgccactaaatcttcagagtaaagcgtctcctatagagagttttaaggctccgggtaaaagtgatggcggtggatcatcaccacgaactgagagtagtgatgagtaa

SEQ ID NO: 390564 - DNA, 354 bp, Salmonella enterica
atgtttgaggcgttaacctcaatcccgaacgcttccgtcagcattggtgtgcgtttacacatcagtcgcgccgggcgaaagacttcccacgcttgtttctctgtcgtggcaccggaatacacttccgcgccaaactcgttatcacaggcaaaacaatacagggcaacaccggcagagattgccgatttgccgttcttacgggggatttcggtatacacctcccggaagcggcgcagccgggagcctttattgacccagccaaacgcgcagcagatcacaaagagctgccacggctccagcgtgatgggcatccgtttgaatgcccactcccccttggtgtgtggcaacagctga

SEQ ID NO: 390565 - DNA, 198 bp, Salmonella enterica
atgacctggtgtatcggcaatgtggtcggcaaaaacatgccaggtaacgatgatttagtgaagcccgtcaaagagcaggcggaaaacaaaatcgatggtgcagttgcgctgattatggcggttggcagagccatgctgtacgagaaagaagacacgctgtctgaccacattgagtcctatgggatccgctcgctttaa

SEQ ID NO: 390566 - DNA, 708 bp, Salmonella enterica
gtgagcattaccaagcccggtgtgacgctcctcaaaatctttcttcaggcgctcataagcctgatccgacagcgtctgctctgtacgcaaaacacccgatgtcaccgcgccattgctgaacagtctggccccgtgctcttcggtcgctgccgccagcgatattgcctcgcgggcataggcgatgggattcagccccaccagtccgtccagcgtcagcgtacgcacatgccagatatcctcctggctcagtacatccgtggagccatccgggaatgtgacctgatagaccggttcccagctactgttaagcttcggtaccacactgccgggatcgacgggcagcagttcagccacttcgccaaatgctttcactttgtaggcgtaaaagtttcccctcaggcacagacaggtgaccaccagctcccagaactcctgcggcgtcatatagccattgggatgcgtggagatcagtttatgcagacgttcgccggtggctctctgcttcaggctgccgttcaggtgatacagattgcagggcaacatcccgaccgactctgccagcactctgacgcaggaaaaaaccgccgtcagtcgcatggcccgctgactgctgatctgctttccggtataggtgtcatacgacagcccgatggcatccgccagctctgctggcgtggtcaccggtgcgtcactttttcgttgaaataa

SEQ ID NO: 390567 - DNA, 1137 bp, Salmonella enterica
atgtcagcaggaaccttaactcttaccaatgacacagatgctgttactggcagcggcacagcgtttacagcagaacttgctgctggcgattttattgtcgtaactgtcggcggcatcccttatacacttccggttaaagcagtaaataacaatacatcactgacgctggttagtgtttacacaggcccgacacaatccggcgctgcgtggtctgccgtgcctcgtgttgctttgaacatggtcacggctgccttggtggctcaaagcgctgaggcattgcgaggactgaattacgacaaacagaactggcagcaggtttacagtacagacggaaacatcacagtgaagctgccagatggcactaccttcaccggcccgtcatggaaatacctgtctgacaatattgtgttgcagaatgattctcgtctgacaaccataaatggtaaaaccggtggaattattaacggcgaaatttccctcactcgttcagccacagaaaatatttcaaacagaatcgtctttactaccattgttgctgctgaggggttaactgcatgggctgagcgtcataattttgctgatggcactaatcgccagatactcaacttaagttctgtatcaggttcgcgtaaagcggtacttcatgcagatggtggggtcctctgcagagcgggtatgaataacctttcgttgttacgtactggatactttattgattacgagtcaggtccaatctccctttatatagactctacccgtatgggagaaatacagctatcagcgacctctgacaggcttttgaagaaagaaattgagtatttatcagatatggttggtgcagatccttctgccaatgcgctgaatgaagtactccaatggaacccggcaacattcaagtataagaaacgcagcattatcccagagagcgatacccatcttgggttcattgctaatgaccttgtcgaagtctcgccggagtgcgttaaggggaaagggctggaagatggctatgatgagaacaatacagcggaagcatattcactcgatgagatagctatgatagctaagctgacattgtctattcaggagttgcaaaaacagatttccgaacttcaggcgaatggtgctggaagctga

SEQ ID NO: 390568 - DNA, 288 bp, Salmonella enterica
atgcgtaaatttatgttagcggcaggtcttgccaccctgctaacggggtgcggtgatgatggggtttacggcaactatatcaatcaacagtatggtgtcaggcttgatattcagaaagatgtgatcaagtttcgtgatggtgtttttaccgttaaaagctgggatgaaagcaagaaacctatctatatcgccaaaacacaaaacaaagatcttggctcttggacttttaaaatcgaaaaagtcaaagatggcgtagtctatcaaggtgctttttttaaaaggaactga

SEQ ID NO: 390569 - DNA, 1125 bp, Salmonella enterica
atggggagatcaccactgtcattaggaaatggtttaatcgaaacattagtctcaatgaatgacaagttggctcaggcaaatataactgccaatgagaatcaaaagaacactgttatgagtaatgctaaccaagctatacaagaacaacgcatgaagaatgtcttgaagagaatacctgatgctaacgcttgtgtggaagcgactgcagcaggaggtcgtggttctgctggttctaacacaaatgctgccaaagctgctttagctgaaaacagcgtaaaaatgtttacaggagcaagcaccggcataaatgaggccaaaaataacgtgatggggcgagtctcgattgatgtctgttctggcgaagacgtgaagtacaacagaggtggatgtagtgccataggccaatatcctgacagagataaatcagcttcatcactgacaaccccgccactatctgtatctgatgctcaggggaataaagtttcaaaccaatcttatgacgttaaacagatgaaagtggctgacgctgctaagcgaaatctgattggtaatttaccgctacagcagctaaatgacaggaaccttgaggacacgaaagaagggcgcgaatacctgtcagcattctcaagttttgttgccagaagcaccgcaggaaccaatgctgttgattctattctggcaataaagaaatccggggatgtatcagtaaactcaagaggggtaaatataggctcaggacttggttctacagcaggagcaagtcaggcgtggaccgatacgtctgtgaaaaccaagtatgcgacattattccccggagcagagttcccgcctaagccatcggaatgggaaatgttgaggtatgagatttattctcgttatgcggataccactggcgctgacgcatggcaggttaaaatcagtagctcggatgaaagagaaacagctcatgggcaggcaagaatgcaggccatcgatctaagattacagatgcttcaaatagaaagaacagaagacacaaatattttattagccgcactattaggacaacagctacaacctgttgataaagtgatgctgaataacctgaaaatcaatgccacaaaatcaacgcaggccgctaagtaa

SEQ ID NO: 390570 - DNA, 240 bp, Salmonella enterica
atgaataaactgagagggaattttatttttcttatcctgatttttattttgtttgattcatgtatcagaaacaagcatgagtacttagttctcgttcctttgttttttattagtgacattttttcggtgtggctctctaagcattttgagaaaaataaggtcttggtaaagatagcatcattcatgattttctatgggttaatggcagtgcttgtcatgggctttataaaatcacgatga

SEQ ID NO: 390571 - DNA, 555 bp, Salmonella enterica
atgggcgtgccgcaaacaaaatcagaattattaaatgcgatggataaggattttagtaagttaatcggttatctgaatgctatcccttcagaactactctcagaaaaatcaatggaaggccatgcgaaagatacgatgatgagtgtcagagatcttatctcgtatcttttgggctggaatatgttagtcataaactggataacaaatgatgctgatctattacacttatttgaatcattaaccaccgagcaaaagattgatatcgcaagacgcttactacaaaacaaagaaataaaatcaactacagttatttcttctgaggaagataaagcgatctcgttttcgcaaccttatgtatttgcttttacttccaactttcgtgttttctctgatcttgatatatccaagaatgaattccgtgtattaacctatatcttggagtatatggagtttggaaatctgatcaacctttcacaatcatcgctgcgcaaagattgcgagcgttgctcaactgttctttacgtttctgatccagttgatgactcattcctttag

SEQ ID NO: 390572 - DNA, 456 bp, Salmonella enterica
atgacgacaaccgccaatgctgctgtctgtacgcctgttatggaaaccgcagtaaaacaggctcaatacaatgcgatgaaaatcgatgcggcgcaactggagcctgtcgccgaaggctttatgaccaatataaataactcattaaatactatcggatgtacggacatatggcctacaggaagcatcggcataaatctgccaagttttgattcaattatcagaaaagcaaaagaagcggcgataagtaaagcctgttcgattgccagagagaaaatgaactctgcaatggggaacatatctgaaagcgtatcctttgatgttcccggtctggggaatattgccggagggagtatctcaacaggtacagggtcatctactggcggaagcattaatgttaacggaaactccacgtcaggatctgatgtatggaacagcattagtgatgcgatgaaataa

SEQ ID NO: 390573 - DNA, 282 bp, Salmonella enterica
atgtctagttataatattgaagttaaggttgaaacagattctgaaggttcggaaatatccaagacgtggaatatttttagtctggatggttcattagtgaaaagtgggatactttctgaatctgaagcgaagaattggattaaagctaccgaagataaagaatttttattcgatgtatccaaagatattaaagccgatatatctcatccaaaaaaaataaatgaagccttaaatcctgtggtacaacccacagggtgtatttattggactctgaatttatag

SEQ ID NO: 390574 - DNA, 408 bp, Salmonella enterica
atgaatgaagaaatgaaactgttatttgataattggactactgaacaagatcaaaaagtgattggaaagaagtctgttgatttttacatcaaacacagtgataacgataatgttctctcattttatggttcggttttgtcagggatggatattgatgctttctcatatactttacgatatcatattgaacaatgtagaaaatataatattaccttatcaagggaggataaaacagaaataacactgtctgtattaaataagctcaagtgtcatgaaggcattgcttttgatgaatatagaaataaatgggaagctataaattcagagtccaataaatacaccctgtgggttgtaccacaggatttaaggcttcatttattttttttggatgagatatatcggctttaa

SEQ ID NO: 390575 - DNA, 360 bp, Salmonella enterica
atgagcaacatcgacaaactcaatgaccatgaactggttgatctgaaaaacgctatcgaaagagagcttaaacgacgcgctgatgggccaaaagtcaccacgtattatgtcgtatcctgcatcactgattctcagaattttactgatttggactgcgctttacgttgcttaaaaagtgtcaccgaagaccttatggagtgggtagcggaatccccagaaaaccgggattatgccaatcgatgcacaggcattgttggggcaaaactccaagtggaggagatgaatctcgatcacttcaacatgtgcgtcgcagaaaaatatttcgacgatatttggtatccaccggagacagcccaatga

SEQ ID NO: 390576 - DNA, 558 bp, Salmonella enterica
atgaaaaacaaatctgagaaaaaaacgaagagaagaaaaggatggataaaaaatcttactgaatatgaacaatcaattttcgttaacatgctgaatgaagcagcaatggttaaaagaagatgggtgactaaaaaagaaaaacgtgaagttatatatagatttcgtgatgttgtccttgctataagagaagcaaataaaactaacgaggataaaggtaatggtgtatcagaacaagaaatagtcaatgaagttgatggagcaacatctgatgttgttaaagttaaaaaagaaagaaaaccacgagtcagaaatatcgatgagtatggtcgtttgagaagagtatcattatcagaaagaaagttcataaataatgcagtatcggaatcaacaaaagcaaaagagtcaaagttgacagatgaagaacgaaggaaagtgttgtgtgttgcccgcgaacagattcgttctcaacgtaaagcgaatcagattaaaagtgtaagaactaaagcaagacatgctgcagtgtttgaatggaaacgccctgattctcctcgtcgctaa

SEQ ID NO: 390577 - DNA, 246 bp, Salmonella enterica
atgaaaaaagttgataatatggtatatggagaaaatatatatgctgaaaaaattgacaatggatacattgaaaatgcaaattcaagtgtaaaaatgaaaataaaaggttatgactgtacatacatttatcgtaaaccaattgaagatgtttccataatcgatttctctgagcaaattaaagctatcgtagaagatttcataacagggaagaaaaaatgggtattgaaaaatggtattgtaaaatga

SEQ ID NO: 390578 - DNA, 177 bp, Salmonella enterica
atgatgattatgtctgtagcaatggtaatactttgtattatgttgggaggttttatgatccgtagctgcacaggaaaaacaaactcttcaagcgaagcaaagcaagcaatatcggatgttagaaaaatgatagataaaaaatcactgattaaatacaaaaggaacaatagaatatga

SEQ ID NO: 390579 - DNA, 471 bp, Salmonella enterica
atgtctgggaaaaacccattctggaattatgattataatgcggcacaacgcaacagagagattgtagattcatatcagcaagctaacgaggcaagactggattctcaacaggctcagtttgaagcatcaatggctaatgacaaagcccgtaatctgcagatgcgtcttaaccaaaccatagccagtcataagagggtgatggatgggtatgagcaacagttggaaggatttaaacataacttctataaaatagcccttcaaaggaatatttttaagacaacgcttgatcgcctccaagaacaatggcccgagcgcaaggaggatattcttgacgaaatccaacgacaacgagaccgctgtaatatgcctgagtatcgtgaaaaatggtggaatgctgtatcccaaaataatatcggtgatagcgttttggaattcccttatgctaaacgcgagctaaaaaacaagccataa

SEQ ID NO: 390580 - DNA, 180 bp, Salmonella enterica; identical to SEQ ID NO: 389068

SEQ ID NO: 390581 - DNA, 1353 bp, Salmonella enterica
atggactttacggaatatcaagaagaaataatcgaagatgttaaatcttgccttgaaaacttacaagtccaacccattttattcatgggtgcaggtatttcacaacgatatataaaagcgcctgactgggaaggtctattaaagcaactagcggaaatatgccccttgatcaaacgcccttatggttactacagccaaacaaagggtgataacaaacctttgattgctagcgatttttgtgacttctatgctgaatgggcttgggatgatggcaaggatcgctatccagagacatactttgaaggaacgactccaaaagatatttatattaagcatgaaattgcatccattctgaatgaattatcaaactccgttgatttctcgaacatggaatatacagaggaagttcagaaattaaggaaagtaaaacctcatgcaataatcacaacaaattatgacgacacattagaaagaatatttgacaattatcaggcaatagttggtcataacgttgttaaagtgaattattcatcttatggcgaaatcatgaaaattcatggtagcagtcatgaagttgaaagtattgttattacaaatgaagattatgttgatttctataaacgtaagaaatatatcagtgctaagttgctaacatattttgctgaacaccccttgtttttctttgggtacagtatcaatgatgaaaacataaaggcaattctctctgatatagatgaaatcatcgctcccaataatgcattgattccaaatatttatcttgtctccttcagtaaggactgcgaggccactggttctcatcaaaaggaattgctaatcggtgttggtgagaataaaagcgttcgaatcaaggtgatatacgcaaataattttggttggatttttgatgcgttatcatctaatacaccggaaattagcgttaatccaaaacttgtgcgtgcatttctagccagaacgtacacattcgcatcagaatcccttgttaaacaagaacttccatacgattttgagatgttccgcaatattgcagagcatgatgatgcattagcaaaaatgtatggtatcgctgaactcaataatgggcaggcactaaatgctagttttccatatacaatgtctgatctggcaaggattctcgacatgggatcgtggcactatgttaatcaagaattcgaaaaattaagaaaactaaccgactttaacattaaagcatcagacaacaattatcatgttttcattaaatctgggaaaagtggtgtcggaaaatactcatctgaggcacttgacttattgcgaaaattaataaacggggaacagtttgagttaaacccataa

SEQ ID NO: 390582 - DNA, 597 bp, Salmonella enterica
atggcgcaaacactatattttgaaaagacattccagaacgtcctgattccggctgatcccggaaccagcgaatttttgcaactgttgccaacgggacagttgctcacgggcgagttccgcaaaccacgtaaatacgcatttcacaaaaaattcttcaagctactgtcgctcggttatcactactggacgccaaccggcggactggttgaggagtcagagcgaaagctgatctatggctacattgaatttttatctcaaaacctatcccatcgtgacgcgctttataactctgctgaaatgtacctcaatagtgtcggtctggcccgctcccgagaaaccatactactgaagcacttcgaatccttccgcgagtgggtaaccattcaggctggtttctatgacgaatatacgatgcctgatggttcacgcaggaaggtcgctaaatctatctcattcgccagtatggatgatgctgaatttaacggcgtttatcagtcggtactaaatgtcctctggaattacatattacgtcgcaagttccggtcagcgaatgacgccgagaacgctgccgcccagctcatgagctttgcggggtga

SEQ ID NO: 390583 - DNA, 591 bp, Salmonella enterica
atgactaaagttatcatgcaaaataaaccatcttatgaatgtatgatgaaagcggagacggcgttggcgttatccagacaatcgacaaacgattcctttatggaatatcactgctcggcaggtttgatttttttagcctttgcagtcgaagctatgttcatattttatcgcaggcaggtagattcagattatgacaaaaagagagacaaaactggtcggacaaactttcacaaaaaaactctggagttgtgtggtataaaaaattatttgggcagtcgtgattatcagattgtaaaaacatgcttcgacgccagagacagcattgctcatggagatttttttgaatcttcttttgaatttactcccactgttgccgatgaacataatatgttcgctgaagaaattctaacccaatcatcagagcaattcagaaagataacattagagatacttgaaaaaggcattattgccgctaagcgaatcgatgaatatatttatgataatggatataaagtagatgaagatatagaacttgagttcatgccaaaactacaacccgcttttggagtttcgggaatatacacatggtaa

SEQ ID NO: 390584 - DNA, 255 bp, Salmonella enterica
atggaaatggaacacatcagcgccagtgaagctaaaaagattaattcttccgtgatacctgacgcagacaaaacacttgatctgatatttggagaaataaagctccgggcaggattgggccagacatcctttaattggcctgtccatgaaaacattcttgagcaagtggtcaaggttctaagggagtctggttataggattaacttatcgaaggctaatgagaataacaaaattattattgagattagctggtag

SEQ ID NO: 390585 - DNA, 468 bp, Salmonella enterica
atgttcagagtgacctgtatcgacctggaaaatggcgggtttgcgctttatatcaacggacattatctgcccagtgaagacggcagcggcgagaagctgtacctgggggatattctggaacgtttatcccgtctgcccggtgtgaccacggaaactgtggagcgacctgtgccggacagtgatgaatggaactggaacgatgtggccgacagtgtgtttccggtgtcagtttctttgtccagaaagatgacagtcgccgtgtttaaacaacgactttctgaataccccgacgatacgttctgctgtggtactttctggctggctgaggattttctggcgctggataactctcttgaggccgcagaaattgacgcggcgatggagctggcgcagcacaaccatgatgcaaatgaggggttcaactggagccacctgaggtgggcaatcaatgaggtgaaacgcgtatga

SEQ ID NO: 390586 - DNA, 255 bp, Salmonella enterica
atgtccggactgaatctcgcggcaacaactaaagaagagcaggacagggtggccattgatctggtcgcttcaggtgtggcctataaagaaaggctggccatgccggtggtcgctgaactggtggccagagatgtacctgaacatttgagagagtatttccgggtgcggctggagcattatcgccaggtcagtgtgcagctccctgacaaaaatgccccggaatatgccagaaaagaggatgaggttaaaaaatag

SEQ ID NO: 390587 - DNA, 303 bp, Salmonella enterica
atgagactcaggaaaggtcatggattgacgttgctcacacttgcgtgtttatccctgctgtgctccctgctgtgctccctgccagctattgcggcaccgtccgttcaggccggtttttcaccggagggcagcgcagagcagctggttcttaagactattgaggctgcgcaacataatatccggctgatggggtattcctttacctctccggaggtggctggcgctcttattagtgcaaaacgtcggggagtggatgtcaggggggtactggactggaaagccaataccgggaaaaaacaataa

SEQ ID NO: 390588 - DNA, 234 bp, Salmonella enterica
atgaagaaaattatccttctgagcctcctgctcgtgacttctgcctccagtgctgttggtagcagccagcacaacatgagcgaacacattacgccgtcatcacccgccagccaggaatacccggtcgggatgcagaacatggaggcgccagcaggaggtgaatatgtctctgcgggtgagctgcgccgtgctcctggtaaggcgaagccgcagatggggagtatctccgtgtaa

SEQ ID NO: 390589 - DNA, 546 bp, Salmonella enterica
ttgcccgtccaaaaacaagctaaccgaagcgctcaccttgcgtggtgcgccctgatagccctgcatcctgcccgccaggatggccatgttcacttagaatcccaggaaaacctgtttctggtacgctggctgtccggcctgaatgcccggcttcgcagcaaagtggggtttctctggcgtgccggcagcggtgatatcctggcacagacagacttgctccggctgaactgggggctggatacgctcaaaggttacaaatggggttaccacgtcctgtccgacagtgaatggtccggtcggcgcagggtgcgcctcagcccggacgtcaatgcagtcagcctccttcagtcttcactggaacgagcatttgcggacgacggcagtcaactgcatccggtcagggtgaaggtgaacagcaatgtcgctgccctggaggcactgctgccggagctgatggctgtcagtagtagcgctgcagcagcccggtcatataccacaccacaaaccagcttcctgccatcaccacaaaccagaataattccctga

SEQ ID NO: 390590 - DNA, 156 bp, Salmonella enterica
atgatgccggcagataaaacaacccccggtaccgtacggaggagagatatcctcccgctccgcgcgctgattctcctgctgctgaccagcgtctttatctccggctttctgaccggcgtcctggccatgctctggcttatctgccgtggggcatga

SEQ ID NO: 390591 - DNA, 336 bp, Salmonella enterica
atggcgtctgctctgagcgctttcccggaagacggggacatcagccgtatatggtacgaccggctttgtatcgaatttaacagcgacggcggactgagtccggctgagctgcgggttatccggctgctgctgcggggctataacagcgggcagattgctgccctctgttttcgcagcgtcaaaaccatttcagcccagaaaggtcaggctttcaggcgcctcggcgtcaggaatgaggccaccctgttgccgaccctgatactgctggggatggtgacactgtacaccgacctgaaccgggttcattcactggacgaggacagcccggaatcatga

SEQ ID NO: 390592 - DNA, 210 bp, Salmonella enterica
atgagtgaatccatcattacgaatatcatctccatcatccgggagcgtcagagtgtagacgacgcgcctgttaaaacccgcgatattgccgatgctgtcggactcggtatttaccaggtccgctcgtatcttgagcagctccgcgatgtcggggtgcttgagaaagtgaatgcaggaaagggagtccccggattatggcgtctgctctga

SEQ ID NO: 390593 - DNA, 336 bp, Salmonella enterica
atggcgtctgctctgagcgctttcccggaagacggggacatcagccgtatatggtacgaccggctttgtatcgaatttaacagcgacggcggactgagtccggctgagctgcgggttatccggctgctgctgcggggctataacagcgggcagattgctgccctctgttttcgcagcgtcaaaaccatttcagcccagaaaggtcaggctttcaggcgcctcggcgtcaggaatgaggccaccctgttgccgaccctgatactgctggggatggtgacactgtacaccgacctgaaccgggttcactcactggaagagggcgggccggagggctga

SEQ ID NO: 390594 - DNA, 132 bp, Salmonella enterica
atgacgcatcatggtaaacataataacctgttgaaatatcatgtaatatttgaccatatctacatgataacaaccaccacattggtgatgtcattacctgtgctgttctttctgatgttgggatggatgtaa

SEQ ID NO: 390595 - DNA, 951 bp, Salmonella enterica
gtgaataatatttttcgtatgttgttgtggggcttttttatgatttcaggcacagtgcgtgctgaaattgagttaggtggggctgagtttgaatacccgccccattctccatcacagagtgtaagtgggtacgtacatattgatgaagtagaattttatttttattctcctaacttggtaatgaaacttccccagtcagtacagggacaacaagtgacattagttttcgaacccgaagttggtgagctgccaactgatcctagcggtgcatcatgtcgtttaacatcgaatattgagccatcatatatttccgctaaattttatcgagataatatacataatccatcgggtatatgtgaaaacggacctgtttttagagttgttggaagtaaccgcgtcagcgttaccgtgcctagactatgtgaaaatgattcttcggcggatgatataggaatagcgggttcgatgatttataaaataccccccatcgtatgtaatagtgggccagccaagggggggcttggagttcggttaaatatccacgcaacatggccgggaggggaggagcatggtgttgcgagtctctatagtaagatgataaaaccagggaataatccaacatgggtggtatttgaccgttcagtgttggcatgtaatggggtagccggtggtgattgcataactgagccagtaacggttcgggttggtgccggcggagcaagtgtaggtcgctggtcgttgtccatgctaatcaatcgcagctatgtagatgatatcgactatataaaatctgatggcactgctagtcggttgggtcgttctccggttattgtatcaaatggagtatcagcaagtcctggcgacatgcttgcgtctgggcgattccgcctgcagaataaaacagccggattttttacaagcaatattctctatgaattatcgtacgactga

SEQ ID NO: 390596 - DNA, 360 bp, Salmonella enterica
gtgcgtggtcaggtaaaagaacatgaacttttgcttattaatattgagtgccctggcgcacagtcaacaaaaacggctcttactgcaaaggttcttaccggaatactggaaagttcccaagataaagtacaaatgatggtgaacggtaaacagaacggcacgtttttgtcatttaaatctgtgaacaatacagggacaaactccctaataaaactgactggagctccgcaggatgcattctgtgaggttgacagtggcgagtctcgtcagtgccagctaatccccgtaactgaagttcatgccgcagatattccaggccatgcctcagccgtattgctgtttgaggtgatttatccctaa

SEQ ID NO: 390597 - DNA, 204 bp, Salmonella enterica
atggtacaactcggttttgtgaacgttgcatttataaccagtatggcatttgccgaattggcagcgtacgcaggggaaagcatgccgactactgcaaaccatattgttatcatggttattttactgaatcgcatagctctgaactcccccccagtcgtttatcgcctctatcgacatactgccgcttacttttttacccagtga

SEQ ID NO: 390598 - DNA, 690 bp, Salmonella enterica
gtgaataaattaggaaaaatagcactggcggtactgatgtcgctaacaataagtggacaggttatggcagcctttgtcctcaacagcacccgttatatctacgaagaaggcaagaaaaacatcacatttgaagtgacgaaccagagtgacaaaacctatggtgggcaggtatgggttgataacacaggaaccagtactgatgtgtatctggttcctgcgccaccagtttttaaaattgcaggaaaggaaaaacagattgtgcgcattatgaaggtcagtgatgcgttaccgtctgatcgcgaaacgctgttctggctgaatgttcaggagattccgccgaagccgacgtctgcagacggggaaaacaccattgcgctggccctgaatactcgtgtgaaagtcttctatcgcccgaaagcgctggaaaagggacgcgagaatgcggagaaaaaactgcagtttatttcgaaggatggagttacctggttagaaaatccgactccttactatatagctgtgaccaaagtattatcggggaaacaggctgtggccctttctgaaaaggttatgggtaacctggcgaagctcgcccccttcagtaagatatcactgggtaaaaaagtaagcggcagtatgtcgatagaggcgataaacgactgggggggagttcagagctatgcgattcagtaa

SEQ ID NO: 390599 - DNA, 2403 bp, Salmonella enterica
atgcgcctgaacaaattcccggtaatgtcattactgtcgttgagtatagcatcatcttttgcaatggctgattcagagttaaaccttgattttcttcagggaatgaagtctgttccggccattcttcagagtggtaaaaactttcctgcaggcgattattgggttgatgtttatctaaataaagagaaaacggcgcgtgcattattaaatattagcacaaaggaagaggctgatgatgttctttgtttgaaacctgagtggctaaaagaatccggaatctatttcgatcagaaacattacgatgcttattttgatgatggacgacaatgttatttgttaggtaaagataaagacactagggttgattttaactatggtatgcaggcgctgaatttatcaatacctcaagcctggttacctgaacaatcagatgcagcccgttgggattatggcataaacggtttgcgtctgaaatattatggcaactttaataaatccactcacaatacaaccagtgctttcggcaatgttgacgccggcattaatcttggagcctggactctatcaacaaactttaatgccagtaaatatggtgatgaaacacgtttttccaccaattcgttgctactttcccgccctgttggtgagatcaaaggtgattttctgttggggcgttctcagacccgttcagagttgtttaatgattttggcttttatggcgtttccctgagatcgaacagcaacatgcgcccttggaattcgcgcggttatgcgcctcttgtgagcggcgttgctacgtcgacttccagggtaaccgttacccagggggggtatacgatttattctaaagttgtgccagcggggccatatcaattaagtgatatttcaccggtcagtaacggggatattactgttaccgttgaggatgaatccggccgtaaaacgagcactgtatacccgattgccactttgccgacaatgcttcgccctggagaaattcaatatgactttgctgttggtcaaaaaaataacagtacggaggtgaaggaggcattcaaatcgggcgagggtatgttcggactgctcagtctggattatggcctgagtaccaccaccctgaacagtagcgcaattttccacgataaataccaaggggctggtttgggaatatctcagtctctggggtatttgggggctatttccgtgtcagccacggtatcaaaagctcaatatgataatggagaaatacagcagggggaaagcttcggtttaaaatacgcgaaatctttcagccagaatacagatattcagttgctgacatatcgttatcagagtaaaggatatgtggaattcgcatcatttgagccggatatgcgctatctggtaggaagagcacgatcccgctacgaagcacgtttatcgcatcgctttggggacaggctttatctgaacgggtctttctggcaacaatcgtactggaactatgaaggccgtaataccggtgcgtcactttatgccagcacagttctgttcgatgatataagtctggggcttagtggggcttataataaacaaccgtaccagcaacgcgcggattattccgtttcaatgaatatgagtattcccttcagtgcttttggtagcaatggaaggtattacagcacaagtaatgttggttacagttcaacgtctggaaccagtttgagtactggggtttctgcaactgtaaatgatcgccttaactacgcagtaaatgctgatttaaccagtaaaaacgaacgccgtgcgggagcatccgtaaactacggctttaaccaggtccagactagcctggcggtgtcccagagcaaagacagcacgtcgttctctggggggctctctggatccgtgctggctacgactgaaacaggcgtattgttcactcgtgagctatccagtgccgttggcgtggcgaatatcagcggattatccggggtgaagtttaataattccctgccaagcaacagtaacggggatgctgtggtttatctgtctccgtatatgaaaaacaacattagtgtggatatgtccaatgtgccggatgacgttgagctgaaaacaacctcatacaacgtggttcctacggaaaacgccatcatttaccgcaagttcgattttgaacaggtgcagcgctacatcctccgggttcgggaccgacagggaaaactcatttcgggaggtgatgcgtcaactgagcaggggttggatgctggttttatatccggtaatggtgttttgctgatgaatatgttggccactccaaaagtcgttactgttaatcgaggggctgaaggggtgtgtcattttgaaatgaaaggcatccgcgccaatacaggtaaagttcaggaggttcgttgtgaataa

SEQ ID NO: 390600 - DNA, 519 bp, Salmonella enterica
atgaaaaagctgattattgcttctgcagttgcgctttctctggcgtctgtggcatcccacgctgcaaacggcaccgttaactttactggtaccgtaacggcaccaacctgtgacattgttgtcggtggccccgccagtggcggcagtaatactatcgatctggggtctgtcattgtagacggtgacggtaccgcaaaagacttcgttctgaaagcttctccgaccgttagctgcaccggtcatactggtgatgtcgaagtgagctggcagactgccgccatgagtgagaagggggtggtttccactggcactgcgactgatgcatttgcctctctgactgcagtcaacagcaaaaaaccaaaccagccaattaacagcactaacaatgcagtgttgtttagtggtgatgatctgaaatccgacactggtgctgggttgcagtttaaggctcagttacatggtggtaaggttgctggtgcatatcagtccactattagctacatggtggcttataaataa

SEQ ID NO: 390601 - DNA, 891 bp, Salmonella enterica
atggatatttgtgaagaaaaacaaacccctttctcaatcaagaagaaagagtccggggatacttatgaactgacacctaacagtaataaaagcgttcagccagtggctttgctacgtctcagtgtgttcacccctgtctctcctaaagagaaaggacggcgggatttccttatcgatgcctctgaagaactttcaagtcttgaagtagcccgacgagaggggtatacgaatgttaaaattcagggggccaaacttggtatgtcaacagatttcaggacctggcttggcatcattcaggctttttccagatacgggtatgcctcggaaaaaatcactttgccatttactgagttcgcccggttgtgtggtctgcgtcctaccgatatcaatgcgagggcaagagcccggttgagcgaagcattgtttaatatttccagtattacgttatcgtttcggaatcaggatggcaaacgaagtctggtcagtcaccttgtgcagcgtgcctgtttaaatgtggatacgaatatggttgaaattgtgggtgaccctggattgtgggagttgtataggtacgatcacaaggttcttctcgggcttaaagttctgtctgtactgtcacgtaaagaaacagcgcaatctttgtatatctactttgaaagtatgccggcaggaacactgtatgtatcaatgaaacgtcttcgtgagagattatccatggtgtcgctgatcaaggatcaaaatacaactattcgtcgtgcgcttaaggacttaaagcggatagggtatctggattacgctgagattaaaaagggacgagaaattatgtttattatttatcaccgctctcctggtcttgcgttaccggtattgagagagcggtcagattcataa

SEQ ID NO: 390602 - DNA, 1020 bp, Salmonella enterica
atgataatcgcatggctgtgcgtctggacttttgatcttttattttcgtataatttgggttctctaatgactaacacttttgaactaaatgctcggcgagctgaggggctgaataaatggtcggcagcgatcaaaaaaaacctgagtttttcaaaagcgaatgtttctgttcccgagggaaaagatgcagacttgtttgaaggtaatatttatatcgatgaaatgaatggtggtgttcttaagacattgataaactcatctgcacagcgtgttaaccttgctcacgaagatttttttaaccataaaaaaaacaagatctttattattaactcttgtaatggattattgttcagaaataatgacaacagaaaaattgtatccattggggatggcattataattccatcgtggaatgagtttacagaagagagcttcttcaatagaaatagtgtttcaattattgttgatatttcattaatttctgatgctacttatagtaatcttgataagattttatggaaaaaaatctcagaattaaattacggaacagagatgaataaactcatggtgaattttctgtcatgttttgatgatcggttttgtgaaaaaaacatcaaggctgtgttgagtttacttgctctggaacttgataatgaaaaaaaaatcagtaaattatcagcacccaaaaataaactacccataattattgactatataaaaaacaaaataaaagatcctaatttagatcttaaatcagttgctgaatatatcggggtttccgaacgaatgatacaatatattttgtccgagtctggagttcgttttaacgaactattagctcaggaacgttgcgctcttcttgcaaagaaaattgaagataacttgtatggaaatgttaatgccgatatttttgattctggtttcaactctatttcaacggcctgcagacaatttcataaaatttatagactcaccccaaagcagtatcagattcgatgcaaagcggcactaagtaagtga

SEQ ID NO: 390603 - DNA, 729 bp, Salmonella enterica
atgccgactgggcgcgaaaaccacagggtaactacaaggagactggattcaatagctggggcctacagttcaacggaacctatcctgccggatgcactgtgcgtgaagctggcgaggggaccccttacgccgatgttcatattgattggggggcgcactattcggaaggatagcactccgaccaagcgtgtaacaaatggggaatcatattacacacaatatgtggactcggaaacccgaggatgggcgttttttttaatggctgatgcgaagttcgcaccaaaattagagtgcgattctgacgcatcggaagtgcaaggcaacatggcgtttgttggttcagtaaatggaaccccattttcagctactatgcctatccgctattatcgaatgactgatccggtaggcataaaattgtcacctgagcaggtatcatgccaagccaacttaggcgatacctgcaaaactgcccccgtcaggttagagtatgagtctaataatatttcaagtcactgggtcgcttcactatttactccttcaaatggaattacgtatataagtgacacgggggaaaaacataccctcacaaatatacctcagattattgcgcagggagataagactcctccgggaggcatgcttgcgtccggggtttttactgtaagtaatttggatggaaatgctgggctaacccgacataatatcaattatacagtaacatttgactaa

SEQ ID NO: 390604 - DNA, 912 bp, Salmonella enterica
atggtcagtaaaagaacgattcagtttattttagaatggattgaaaatcaccttgaacaacgtgttagcatagaagatataaccagactatcgggttatagtcgccgatacattcaacaactattcaaaaagtatacaaacatatctttgggcgagtacatcagacgtcgtaaattatgtcgtgctgcagctttggtaagattgacatcaatgagcatgcttgatatcgccattcttatgagctttgactcacaacagtcctttagtagagagtttaaaaaggtatttggatgttctcctcgtgaatatcgtaaaaaagacacctgggatcttatccatgtatgtccttcatgttctaataacagcaggtttctaccgaaatgtaagctgcttgtattagatgaaatgcaatttactggacaacatattttcaattacgattcgttcgctggaaatggttttaattctcacaaagaacatcgctataaatgcttaactcgtggcttaaaacaatacaaggacgatatatattatctttccaggtttgaggtatccccacagaatactgacgtaatattcgtagccacatattcaggaacaagattttttgatacaagctcagcctcatgctgtaatgtaatttcgtctccgggaggggtgtatgccttttttcactttgaaggaacatgggatgagtatatccatctaccacgccgcatttatctggaggtattgccagcccatcaattagcaagatgtgatggttatgatatcgagcgtttttataaaacccaaactatccttgagaataatatcaataagattgtttgtgattactatattccagtaaagattaaatcgccacagcattcatctatacaagctgatttatttaaatctgaccaaggatag

SEQ ID NO: 390605 - DNA, 183 bp, Salmonella enterica
gtgaataaaacgtatatgctcggcacgaacatctgctcgttcatcatgcgcgagcaaccgaaagccgtactgaatcgcctggagcaggcggtgctgcgcgagcaggtggcccgcctgaccgccaccggagaacacttggccacacaaagcggagctgaaggaatcccgggaggacggccgtaa

SEQ ID NO: 390606 - DNA, 933 bp, Salmonella enterica
atgaatgccatctacacgaaccagtcgaccagagaaaacctggatttactgtatgctcaggcccgcgtttacgacagggtaaaaaaatggaacaggcttaattttctcttcagcatcatcatgccgctcctgctttcgctcgttaccgtatacaaccggagccaggaatttgtcgattcagagctgctgtcttcgctgttggggttatatggactcctggtgcttatctttaacattgttatcagtggacacatctcggctctgcgcaggaaggcagcctcaatccaggaaatgtacgactgccgggtacttggcatccggcgtaatgaactgaaggtggaggagctcccacgggatgacatcatccgggaagctgcatattttagagacagtccggaaaaagcacgaaagcgatttggcgaagaggggtggtacgtcagtaaggtgtatgacgcgccgcaggccgtaatggcgctcctgtgccacggaaaaaatctcggctgggacaaatcgctcagggaggttctgcacgtattttatctttccgcttttattgtctcgcctgtcgcgatgcttgtttacggcatcgccatgaaatccgggctgaatgagatcctcttctatgtggtgttcacactgccggtcatccgctatttcttgcttcagtttctggataatcgcagcagtatgaaaagaagcgagaagctgaaaaagtacgttgagaaggagttatccggcataagggtgtccggaagggcagaagaagagcaactgggttatacgctccggaatatccaggatgaggtgtttgcctaccgggcctcatgtccgcccgttcccaacggtattcagctgataatgaagcccaaaaatgagcgaatttatgttgattactttgaaacgaatctgaaggagctgcaccttcaggagtaa

SEQ ID NO: 390607 - DNA, 996 bp, Salmonella enterica
atggcgaccacagtaatagctgcctttaacgaatttatgaaagataccgtgaatctcagaaaggcagataccgatgacgctcgtgcaagtcgcgactggcttatcggtaagatgaatgattttgaaaatgacgaggtttttccggtgagttatcctgggatccacattgctttcggttcgttcgcaagaagaaccaaaattcgtccgcttgatgatatcgatctgatgtttggcttaaccgggcaaggtgccacctataccatcctgagtgaccgggtaactgtaacctcctctggagagggttcacgtctgcaccgttaccgccatcccggggcaaacaccgtctgctccgtcagaattctgaatgcctttaaaaaccgcctgcaggacattgcccagtacgcccaagctgacatcaggcgtaatcaggaagctgtcacgttaaaactggtcagcaaggactggaattttgacatcgtaccctgctttattaccagcgaagatgtctttggacggacttactacctgatccccgacggcaacggccactggaagtttaccgacccccgcaaagacagggacagagtcacaactatcaatgtgcagaatgacggcaatgtgctcaatgtcattagagcagtcaagtactggcaacggagatcgacgatgccttccatgagttcctatctgctggagacgctgattctggactattatgctggcaggacgtcctgctcatcgtttgtcgatatggagctggaagcgcttttccgccatcttggtctgttcgtacagtactcagtcaacgatcctaaaggcatacagggagatatcaactctctttcagccgaggcacgtaaggcgatatcggacagatgttatctcgatgctcagaaggcagcggaggcaagacggtttgaaaataataaagagtatgaaaaatccatcaataaatggcgcgacgtgttcggaccgtcctttcctgtttacgggtga

SEQ ID NO: 390608 - DNA, 477 bp, Salmonella enterica
atgatgtcgtatatacgagaaaccatcagtggaagagcggaatggaccgtctatgaacagattggttttgctgtcagttgtatgctccataaccgtaattacagcctgtatcctgtgttgaccattcaatactggactgaatacgctatacaacaccatcagattaaattcctgtttgattcgcgtggttttccactggcatatatcacttgggcatatctcgagacagatacagaagcgcgtctgctaaacgatcctgagttcatactacatccttctgaatggaatgaagatggaaggatatggatactggatttttgttgtaagcctggttttgggcgtaaggctattgaatgttttacagatcttcgcccatggggagaaggagaagtgcgatggctgaacagaagaaagaaaatcatgacagtacggcagaataaattacgacatatcccagagctacagaaaaaaatataa

SEQ ID NO: 390609 - DNA, 1551 bp, Salmonella enterica
atgaacccaatatgttcgcttgctgaactcaatgaaaacctggtgccctttactgcccggcaggtaacctcaaagttgatctggcgtgctgaggatagcctgaatatcgaagtattacaaaaagcctgcagctatataatagattcggccagttcatcttcacacaaaatattccatgcagagcgttatggtggaagtggtattcagcgtaacggcgggggcgctcgttgtggttttgatggtagttatcagattaaaggtatgggaaccaatcccttagtcggtaaagggactgatgggcgtcactctaatggtgccctcggtgccatccatgcaatctatgaagctttatggggagaggtgctggcacaaatattaccctatggtgctgtgcgtgccagggcagttttacttacggatatatataccgacaaggcatttgaccgccctcacgggaaatcccgacgagccctgttggtacgcgaaccagtgattcgcccggcgcattttgaacgagccccctatttcagacctcagccggaatatgtcactcagttagtacatgatgcccggcgggttcggtctgtgatccacatgttgcccggaaatttacctgtaccgccagagggagtcagcgaagaggctcaacgtgatcaccgggtttattgtattgaggggttatgtgaactggcccgccgtgaagcatggcagatggcgttttgtcgtacacgcttcctgaggttgacaacttctccttccaatattgcgatagatggcaggttaatggattttaacggactcagttgtctgttccctggagattatcccgatgattttggatatcggctcaggcttgccgaactgcagaaagaaccggtggtactgattcagggactgtcagatctctgtctttatctcgggaaatacctgtttgatcccgatttcacaatggtggcacgccagaaggttgaggagacctttcagaaaactttccatgaagcatgttattactgttatctggaacaactgggtatccccacagagtttatgccaaaggagggtatcccggatacgttgaaaaaacaggtcaacagtttcgttgtattagtcaataaacgcagcgatcggttgtactgtccagatgtcggatgcaaagaggattcaccattgcaaagactcgtggtggaactgattcggcagagccatggcccaatcagacctgtggataatgacgctcagcatgatgttcatttcacagaagcgcaacagtgttttacctgcgcgatacaatggctgatacaggtcggtatcagatacccgactaatgtttcatctcttcttaaggaaatggaaaaccatgccaggaagcgactgcaacccagaaaaggcctggggaaagtcactatgtccgagaaaattgcttcccttctggataaacacggtgatgatcaccattttttgcaggaggcattttctgatatgggtgtccaaatgctggagttttgcagagaagcaatcggccattttagtcctgtcagaattgcggtgtaa

SEQ ID NO: 390610 - DNA, 372 bp, Salmonella enterica
atggtggccacgctgaaaatcccgctggagcgtcgtaacagacgtactggcagaatggaaaaggcacgcctctgggagatcaccggccggacggtccgtacctggattagggaggaggttgaggccgcagcggctgacggcgtgacgttctcagtgccggtgacaccccatacgttccgccacagctacgcgatgcacatgctgtacgcgggcataccgctgaaggtgctgcaggcgatgatggggcacaagtcgatcagctcgacagaggtctatacgaaggtgtttgcgctcgatgtcgctgcacggcaccgggggcagtttcagatgccgggtgctgatgctgtggctatgctgaaaggcacagcctga

SEQ ID NO: 390611 - DNA, 198 bp, Salmonella enterica
atgaccatcgcacaacagctcgaacaaaagggcatcgaaaagggtatccagcagggtatccagttaggtgaacaacgtggtattgaaaaaggcaaactcgaagtagcccgtaccatgctgcagaacggcattgaccgcaacactgtcatgaaaatgaccggtctgaccgaagacgacctggcgcaaatccgccactga

SEQ ID NO: 390612 - DNA, 930 bp, Salmonella enterica
atgaaaaagaaaaacactacgccgactccccacgacgcgacattccggcagtttctgacacaacctgacattgcccgggattttatggagctgcatctgccggcagagctgcgggccatctgcgatctcagtacactgaaactggaatccggctcgttcgttgaggatgatctccgccagtatttcagcgacgtcctctacagcctgaaaaccacagccggcgacggatatattcatgtcctggttgaacaccagtcaacacctgacaaacatatggctttccgcctgatacgctatgcggtggccgccatgcagcgccacctggaggcagggcataaaaaactgccactggtgataccagtgttgttctatacggggaaacgcagcccgtatccatactccacccgctggctggacgaatttgacgatacggcgctggcaggcaaactctacagcagcgctttcccgctggtagacgttacggtcattccggatgatgaaatcgccggccaccgtagcatggccgccctgactttactgcagaaacatattcatcagcgggacctggcagaactggttgaccggctggcgcccatcttgctgacgggatacttgtcttcatcacaggtaatatcgctggtacactatatagtgcaggcaggcgaaacagccgacgccgaagcctttgtacgcgaactggcacagcgtgtgccgcaacacggagacgcacttatgaccatcgcacaacaacttgaacaaaagggtattgagaaaggtatccagcttggaagacaggaaggccgttcagaaggtgagcgcgaagcgactctgaaaatagcccgtaccatgctccagaacggcattgaccgcaataccgtcatgaaaatgaccggtctgactgaagacgacctagcgcagatccgccactaa

SEQ ID NO: 390613 - DNA, 804 bp, Salmonella enterica
  misc_feature (42)..(51): n is a, c, g, or t
atgccttgtatcacgaactttgggcaagagcacttctgtacnnnnnnnnnngaactttgggcaagagcacctctgtacaagcctgggcctcctgacgaagaaaagaaagggctatgggtgtacatgactgaaattttcagtgggaacccccatcttttcaaagggaagcatctcgattatccaacagttaacgatactctctacagtcctccacacatttttatcacggatatcaccaggcttgctgaacttagtgtgatggctcttagtgtgaatcttttcacctgggaggaaggaaacgatgaatattgtgttaatgcgcctcatcacgaagcttatgtgtcacaactcttgtcccccttatgtgagaaaacggtgttgcttgaaatcgatcttggtagtggtactgacgatgaaatagccgaatcgataaaagcggccctgccacaatggagatcggtaaaaggagtggaagttaatgaaaccggtatcgttcgtttcggctatggaaccattaaaaaaatcataaattacaggttggttgcgatgctggacatcttactttgggcaaaaaggaaagaactaagaatctcagatgatcgcctctcccggcttctttatactgatgaagatgaagaaacaactacccgtttagggtatcacattaaagactcagatcgtccgcttgcgatgaaagctgcaacgatagacttcattaggcagttcaattttttcatgaaccgaaatccccacctgaaaaacatgagagtttcagatgtgatgaaactctctgattctaactga

SEQ ID NO: 390614 - DNA, 207 bp, Salmonella enterica
atgaacaatcaaaatacccgcctaattcgcttgccagaagttatgaacagaaccggctatggcaaggcctggatttatcgtctaatcaacgaaggtttatttccacaaccaataaaaattggttcgcgtgcaattgcatttgtcgaaagcgaagttgatgaatggatcgcatctgcaattgaacgttcacgtaaaaatgcagcctga

SEQ ID NO: 390615 - DNA, 276 bp, Salmonella enterica; identical to SEQ ID NO: 180763

SEQ ID NO: 390616 - DNA, 306 bp, Salmonella enterica; identical to SEQ ID NO: 180762

SEQ ID NO: 390617 - DNA, 321 bp, Salmonella enterica
atgaaaacatatgcatttaccacactcattgcgtccatttttttgctgagtggctgtaccggtgaaccgtctgagcaggatatttacactgcgatgaataaggtcatggagcagacgaatgccatcgttaaatccatagcaggtaaagatgtcccgaaagacgcactgcgggaattaaaatctgtcaaaaagcatgactgcgaaaaactatcggataaaagctacaaatgcaatgtaacagctgttgtcgataacgaaaaacgcacagcggctgtcacgctgatcaaaacggatgatggctggcaggtcattgataagtaa

SEQ ID NO: 390618 - DNA, 945 bp, Salmonella enterica
atgaataacaacgcaataaatgcattactctcttgtaaaactccaaaagacattcaggcttgcattaatgcaggctccgatattaatacactggattcgtttggaagaaatatactgttttactgtaaaaacccaaaaatgattgacactctggttaaagcaggaatagattttaaccattctgacaactatggtcacaatgttttgtttaaccagcgaaatcctcacatactgaaaaaattgattgattccggcgtagatatacaccacaaaaatggtctcggccaaacctgtttatgctcgttagctgataatatatcctgttgcaaaaacctgatcaatgctggaattaatgtcaacaatgtggataaatgcggaagaacaatacttttttacgtaaaaaatcactctatctttgatttgatggtacaggccggttgcgatataaaccacaaagataaccagggtcacggtatttttgaaatttgctattcattaggcgatttcaaagccaaaatgctcattcgtcatattagtatgaaggatagcagtccagtaattttcaactacctcaacagcgaaagtctgcagataatggatttgcttcagaagaaaaaccttaactttactatctctgataactgccaggtttatctaagtgccaatgaaaatgaaatgagctctttcttcagtgaactaaagaagaagacagatatcagcaacacacattttcgccatattgtactgcgaggttatgatttacgcggggacattgaaaccattaaatggtttatccgcaatgacatcaaaatagataaaaaacaactggaacagcatattcgacatgatgagatttgtaaatatatagcagaacatgagagaaagaaacttagcgaaattatgaaacaaacaatctctttaatgccagtaaaacgtagattgtaa

SEQ ID NO: 390619 - DNA, 441 bp, Salmonella enterica
atgaataaaacaaaatatccaagcctgactaactatctcgccaaaacaaaaaagaacgcagatctttatagattatataatccacaattttcttttttctgcaaaagtgacactcaggagcaaagattttatttcgattatttctcaagacatatggtctcgaagagaaatattttaaccgtattctctatctatacattcacctcttataacatgaacaaaaaagagacaataaaaaatttcattcgatttctcaaaacgacgaatgaaagtacattccataatgctttttcatttcgcggtggtaacattttgtatgtaagcaacaaaaacatgttgaaagagatctcatggttttcactcgctcgaatttacgaagacattaaaaaaataaaggaatataaaaccaaccatgacaactatatcagattagtcgcttaa

SEQ ID NO: 390620 - DNA, 723 bp, Salmonella enterica
  misc_feature (691)..(700): n is a, c, g, or t
atgaacctggcaattcgtgggattaattctgaacacgttcgctggaataatgaaggttcatttcttaacgatgctcacaaagatttgaaatctgattttatcatagctaacccaccgtttaacgtttccgactggtctggtgagcagcttcgtggtgatgcccgctggcaatatggcattccacctgctggcaacgctaactttgcatggatgcaacattttttgtatcacttgtctcctaaagggcaagcgggtgttgttctggcaaaaggggcattaacttctaaaagctctggtgaaggtgatattcgtgctgcactggtaaaagatgccaatgtgattgactgtatcgtcaacttaccggcaaagctgttcctgaatactcagatccctgctgcattatggtttatgcgccgtgaccgtcataacagcaaccagtatcgtgatcgtagtaaagaaattctgtttattgatgcccgtaatctcggtcatttaattaatcgtcgtaccaaagtactttctgacgacgatataaaaaccatcgctgatacctatcataactggcgtaacaaaggtggcgactacgaagacgtcgctggtttctgtgcgtcagtagacattgctgaagttgctaaactcgattatgtgctgacacctggccgttatgttggtcttgctgatgaagaagacnnnnnnnnnnaaagaacgctttacggctcttaa

SEQ ID NO: 390621 - DNA, 1194 bp, Salmonella enterica; identical to SEQ ID NO: 180777

SEQ ID NO: 390622 - DNA, 3240 bp, Salmonella enterica
atggcaaagatgaccgaatccgatattgaagtaatggcaattgagcacctgcaagggctgggctatgagtatgtttacggcccggacattgaacccagtggaatcaatccgttacgtagctatcagcaggttatccttgaagataaagtgcgtacagcattgcaacgaattaacccgcaccttagtgagcagaagtgtgaagaagctctaaaacaggtgatgcagatcagctcacctgacctaatggcaaacaatctaacctttcatcgccttttgaccgaaggaatcaatatcgaagtcagcaaggatggtaatacacaaggagaactggccagcctgatcgactttaacgatcccactaataatgcatttctggtcattaatcagctcaccatcaaagaaggcaaccatacccgccgacctgatcttattttattcatcaatggcctgccattagtcgttatcgaacttaaaaatgccgctgacgaaaatgcaacggtaacaggtgcctataatcagattaaaacctatcagaaccaaatccccggtctgtttaactacaatgcttttaatgtgatatctgacgggctggaagccaaagcggggacggtttctgccgatttcagtcgttatatgacgtggaaaactgctaacggtaaaacgcaagccaccagtacccaaccacagcttgaagttttattacaggggttgcttaatcctgtaacgctgctggatataatccgccactttatcgtgtttgaggccagcaaacatgaagacagcaaagggattatcagtatccgtactgttaaaaaaatggcggcttatcaccagtactacgcggtcaatgcagcagttctttccactattcgtgcctcagcggtgaatgcggactccccctctgccgaagtggcactgcgccagcagggacgtaacagtaaagatcttgttaatgcgcaaaaaaccggagatcgcaaagcgggcgtagtctggcatactcagggttccggtaaatcgctttcgatggtgttttataccgggaaaattgtgctggcgctggataatccgacagttgttgtgattactgaccgtaacgacttagatgatcagctattcggtacgttctcttccgcgacccagctacttcgtcagacaccaaaacaggccaacaaccgggaagaactcaaagaatatttgcgtgtcgcctctggcggtgtggtgtttactactattcaaaaattccagcctgatgatggcagcaatatctatgagttgttgtcagacagaaccaatattgtcgttatcgctgatgaagcacaccgttcccagtacggtttcagcgccaaagaagttgacgtgaaagacagcgaaggcaacgtaacaggtaaacgcaccgtttacggctttgccaaatatatgcgtgatgccttacctaatgcgacctatctcggctttaccggaacccccatagaaaaaacggacgtcaacacgcctgctgtttttggtaactatgttgatatctacgatatctcgcaggccgttgaagatggtgcaacagttcgtatcttttatgaaagccgtcttgccaaaattgccatcagtgatgaaggtcgtcagcttattgaagactttgatgatgagtttaacgaggacgaactgacgctcacgcaaaaagaacgttctaaatgggccagaatcgaaggtttgattggcagttcaaaacgtattaaagcgattgcggcggatatggttctgcactttgagcagcgcttaaaatccaatgccgatcatggtaagggcatgattgttaccatgtcccgccgtattgctgctgaactatataaagaaatcatagccttaaaacctgaatggcacagcgatgatttaaatgacggtataataaaagtcgtcatgacctcttctgctgctgacgggccagaaattgccaaacaccacaccacaaaaaaagaacgtcaggttctggctaaccgtatgaaggatgacgacgacaagctgaaactggtgatagtgcgtgatatgtggttaaccggcttcgacgctcccagcatgcatacgctgtatatcgacaaaccaatgaaaggccacaaccttatgcaggcaattgcccgtgtgaaccgtgtgtataaagataagataggcggtctggttgttgactatctgggcattgcctctgatttaaaagaagccctctccttttactctgatgcaggtggacgtggagatcctgctgaggttcaggaagaagccgtaacgctcatgcaggaaaagctggaaatcctggaaggcatgatgcatggatacgattacaaagcttactttgccgcaactacctcacaacgcctgacaattattcttgaatcagaaaaccatattttagggctggataacggtaaaggtaaaatgcgtttcctcgctgcggttgcagccttatcgcaggcatttgcattggcgacaccgcacgataaagcaatggaagcggcacccgaagtagcattcttccaggcagtaaaagccagactgaataaatttactgaaaactcagacggatcagaagaagaacacaatgacagtctcgaagttcgggtaaaacagactatcgatcaggctctggttaccgataaagttgttgatatttttgacgctgctgggatacaaaaacctgatatttccgttctttctgaagaattccttcaggaaatgaaggattaccaacacagaaatattgctttggaaacgcttaaaaaactgctttctgacgagatcaaggttcgctcgaatcaaagtatcacccaaggcaaaaaactgattgatatgctgacctctgcaatcaatggctaccagaacaaggtactgaccgcagcggaggtaattgatgagctaatcaagcttgccaagactatccaggaatctgacagccttgccagccagttaaacctcagcgcttatgaatatgccttctattctgctgttgcagataacgacagtgctcgcgagttaatggaaaaggaaaaactacgagaactggcagtcgtacttacggaggctatccgcaacaatgtcagtcttgactggacagtgaaagaagcagcaagagcaaaaattcgcgtggtggtaaaacgtctgctcaaaaaatatggttatccgcctgatatgtcattgctcgccacagagactgttttgaagcaggctgaacttttagctggagaattaggaaaatga

SEQ ID NO: 390623 - DNA, 987 bp, Salmonella enterica
atgatatcaagagaaaataataaaaataacctattccgtgtaaagtctaaaaatggtgtccttcgttgccttaaggctggcatggatataaatatgtgcaatagtaaaggtcaaactgctctttttacctgtaatgtacctgaagctatacaggcaatgattgacgctgacattgacattcaccacttggataatgacggtaataatgcattattctatgctcaaaatgttgaaacagtggaacttcttgtcagcaatggtattaatgttaaccaccggaataagtcaggcacccttgcgattcaacatattgatgtttcaccagggttagtaaaatatcttatcaaagcaggactagatatccataccaaagatagctatggcaattcctttcttttcattccatttgaaggatatgtgtacgatgcactaattgaggctggttgcgacattaatcataaaaatataagtggacagacagcattcgatcactggcagtcagaaaataatagcatagttggtaaatatacgcactgggaatctaaaaacgataactacattcgttttcttatccgtaatattcatcttaaagacagttcaaaaattgtattcacgaacattacatttaaatcaattgagctgttgtcgttacttataaagcaaaaaaatgaatttgagataagtgataagtgcattatcacaccaacaaatgccgacgctaaaaaattaattttacaactaaagaagctgacagacattagtcatgtttggttttacataagcagtacatatctactgacgcactatgcaggaagactgctaattaaatggttaatacgtaatgatataaaagttgatatagaatcgctaaaagaacgctacttttatgaagaaaccctccaggacaaattacagagagagcaaaaggttttacgaacaacgcttcaaccagttacctgtaaagcaattacaaaaaaaagattatga

SEQ ID NO: 390624 - DNA, 141 bp, Salmonella enterica
atgacgcagattcgccggctgtcgccgctgcagtgcaatattctgatcgtgcgacacagcgcgggaccacccgagttagcacccgcgacttggcatcagctgcatcacccgatgttcgggacattcgtctcctcgcgatga

SEQ ID NO: 390625 - DNA, 132 bp, Salmonella enterica
atgctgggaatctggtatgacctggcccttaacggtacaccattgaacaattatgaacaaactaaaacactcattaatgccgatcatcagcgcctcagaaaacttatatggccggaggctgacaaggaatga

SEQ ID NO: 390626 - DNA, 174 bp, Salmonella enterica
atggataacaaagtggcattttcactcagctatgagcatctgacccggatagcggaaaaaatatcttggaatgcgggctggacagccatggcgataaatacatcagagaatcaagcaaggccgccgctatgctgggaatctggtatgacctggcccttaacggtacaccattga

SEQ ID NO: 390627 - DNA, 288 bp, Salmonella enterica
atgacagatgattttttcatgcgtgagtcgggcaaactgtcctttgcagaaatcatgtacagacttgctgaatgcgaagaaatttgggacagcgatgcctcttatgcgggggtttatcgccagattaaggctcaggggctggaaagcctgaccgctaaacagcgctggatctatgagaatgagctgaagcccatgagcgttgaaaagtgtgggtttcaaggtacctgtgaaagaccgtcgttcccgggaaagtattgcgatatgcatgagcagaagtttggctcctga

SEQ ID NO: 390628 - DNA, 198 bp, Salmonella enterica
atgaccatcgcacagcagcttgaacagaagggcattgaaaaggggatccagcagggtatccagttaggtgaacaacgtggtattgaaaaaggcaaactcgaagtagcccgtaccatgctgcagaatggcattgaccgcaacactgtcatgaaaatgaccggtctgaccgaagacgacctggcgcaaatccgccactga

SEQ ID NO: 390629 - DNA, 993 bp, Salmonella enterica
atggaattagtcatatccttattacaaaagggattattagaaaaggcattagaccttgccatttctgaatcattcttcaatgcaagatcacctgatgatataaagaaagctttaaaaataggctatgacattaatgctgttaacagtaacggcaacaatgccatttttgcctgcagaaccctggaagccatggattgcctgctcagttatggaattaatatacaccatatcaacggacatgggcaaaatgcgctctttcatcaaaaaaatccagaaatactgaagaaactgattgaactgggtttagacacctcgcatacggatactaatggctacacatgcatttttgaacattacaggaatgctgaaggattgacagaattaattaatgctggttgtgatataaatcacatcgataaaaaaggaatgaatattctcttcatgcccctttccccggaagttttatccgtagcaatagatgctggatgcaatgtcaatcaaattgatcattcagggaaaggatttattgaaaatgtatatgattatgaattacatgatatcattctctcgcatattgataaatttgacagaagaacgctgcatgtagatttttgtgatctcgactcagcctttttcttgtattacctttctgaacatggattcaaaatagaacttaataaagaccatttcaccattaacagttacattggtgattataaagaaatcttatccatacttgatttcatcagtgaaattcatgatattcacttctataaatataaaggcggccctctctataaagatatcgacaagcgaattgtaaagtggatgataagaaataatctcttggttgatttatcaaaaataaataaacacaaggattatgaagaaattaattcatacaaaatccgtcgagaacagaaagaaatctccaggcatttaaaacctgctaaaagtatatctgcaacagtcaaaaacggcggaagattgtga

SEQ ID NO: 390630 - DNA, 573 bp, Salmonella enterica
atgataattaagtctctggcaaaagtatcaattgaaaaacttagtgctgctttgggcatatctgttgatgccataaaagataaagcgaatgtgatgaacggcatagatccaagtgtaattgcgaaactttctgataaacctatacctaaggctacatttgacgttttgaggaaaatgaagccaattcgccaaattgaagcagtcggtacaatgattaattttgataattatagtaaaaaatttgcaatgagcatcttggatgcaacaccggcatcgatgatagtaaataaagggaaaaacactccctataaaaaggacataaaaaaaaccatacttcgtctggaacaagaaatggcaacaacttcggaagaaacgaaaaagcttcaaaccgagtatggttcagatatgttgaaattcgttataatccagtcatatattaataaattacttggcaattctaaagttcttcattggttcttagaaaacgaggttgattatcttaatgagttaaaaagaatttctagaataaattctttggatgataagactcttactgaaaacagcaagtcatag

SEQ ID NO: 390631 - DNA, 990 bp, Salmonella enterica; identical to SEQ ID NO: 266963

SEQ ID NO: 390632 - DNA, 1623 bp, Salmonella enterica
atgtttaagcggttcagacgtatgctgcccggcacaaagggcacggagcctggcgtggtcgcgccggtgataccggcagggttttatgcgccgctcacggcagaggcactgttatcaccagagcacagggagctgaggctcaggcaggtctgggataacaatccgatgccccgtgatgtatacgacaggatgtgccttgaaccactcagccggctgctgctgaacacccagaacgtcccggcaacacgggaaggacggtggtcccgtgccggtggatttggtgatctgacggtactgtacaccacgtatgccgttcgtctggcaagagggtacatgtttccaccggatgcgaccccggaagaccaggcggctcaggccgcagtctggcatgcggtgattttctggtcagcgctgttttaccacctgcccctgctggcgcaccttgagggggaactgctgagtgggcggggctggcagccagggatttctgtgcctgacgaacctttccgtttccggttcaggaagacggcgccgcagggtacggaagcgcaacaacttgcggccctgactgccggcacgctgttaccggacggcgcaacggcctggcttgtgacggcgccgggcgcactgcagaatctggccggggcgctctggcatcagcatcccgggatggcgctgattcgtgatgtgctgcaggaagcggcaaggcagacagagagtccgctgaatacctgcgctgtcactgcgccggttactgcggaggcttcagcagacatccgtcctgctgacccggtggtgaccggcagcacggacagtgtggtggcagccactgaggtgcagccggcagaggaggtgaagactgagagcgtgcagacagagactgacggtggtggtgagtccgccggagcgtcagaggtgccgtccgcacagcaggaactgacggttcagacagcgccagtggtgacggcagatgatgaagcggtcagtgctcctgcagatcaggacacagcaatgctgctgagtcttttttcagcagatgagtccgaaactgctgaacgggataatggggatgtggtgatgctggctgatgaggaagacgcgcaggatctcaccgatggaccggatgaaggcgattcgtctccgggcagtattcatgaatcgccgtatctggtggagagtgacgcgtcggttaatcagtccgtatccggggaataccgcgcaacagaagtgaatccgcttaccggagatgatcctgatttaaagggagagacgtttttggactggctgaaagcagggctgaacagtggtgagatatcatttaaccagaaaggcgataaaatacacattgttgcaggtctggttttcctgccggtaccaggtattttctttgattacctgaaagcagtgcagcttcccggggacaaacgcccgattgttcagtcatcatttgagcggctctgtatcaataaacgccgtgatgaccagcgtttttattttgctcgtattgctgaggaacccgggaactgtgcacgttacaaaacagtcaaaggttacctggtcaaaggacgtagtctgatgcatgaaagtaaactgaaagacagtccttatctttttatttcgtga

SEQ ID NO: 390633 - DNA, 1509 bp, Salmonella enterica
atgtccctgaatcccaccgatgaacagtcagccatcattcactggcagggggaaaaactggtggtgaatgcctttgccggtacaggcaaaaccagcacactggtgcagttcgccgcagcctgccctgagagccggatgctgtatctggcctataaccgcgcgattcgtgatgaggcggagcgccggtttccctttaatgtggagtgcaaaacctcccatcagctggcgtattcgcggttcggaaagcatttccggcatcgtctggtgccggggctgtcagtgacggatgtagcgagaaaactgaacacccgctactggacgcttgcccgtgttgccatgaccgcgctgaatcagttcatctgttcggcggacgtggcgcccggaatgcagcatatgccgcctcccgacgagatgaagggcatgtcgccacaggatgcgctgcgtgccgtgcagatcctctggcatgaaatgagcaatccggatggcaattttccggtcactcacgacacctatctgaagctctatcagctttcctcaccggatctgtcacgcaggtgggatacgatcctttttgatgaggcccaggatgcgaatccggtgacgtccgcactggtgctggggcagcggtgcagggtggtactggttggcgaccgttaccagcagatttatcgttttcgtggtgccagcgatgcactgtcgcatccggcactgaacggggcggaccgtctctggctgacgcaaagttttcgttttggtcctgccgtggccggggtggccagccagttactgaagcgtgccggcgagagccgtgaggtgaccggcaggggcggggatgatgaagtgctgacggcaggtgaaatgcgtgcgcgcgtgaaggcagggaagatgaccggtcacagggcgatactgagccggacggtggccggtgtgattggcaccgcactgatggcggcaatgcgtggcaggaaggtttactgggtggggggcattgaaggctacagaacggaggcactggaagatctttactggtttcagatggatatgccggagcggatgcacagtgacagactgcggaaggactaccggggttttgacgagtaccgtcatattgcgaaggtgacgaaggatgtggaaatgaatcagtccattcgtctgctggagctgtgctttccgctgccgaagaaactcgaacttctcagaaagcacaccgtcacgaatgaacaggaggcggatatcacggtctcaacggcacaccgcagtaagggactggagtggtcactggtggtactcgatgatgattttcaggatatcaccgacccgctgataagcgagcaggagcggcgggatgaaaccaatctgctctatgtggcggtcacccgggcgcgcagaacgctggttctcaatgaactcatgcagcagctgacggaagctgccggcgatggtggtgcacccggaaacgcgccggtgcaggggaaggaagacgatggcgtggagggagaggatgtttaa

SEQ ID NO: 390634 - DNA, 726 bp, Salmonella enterica; identical to SEQ ID NO: 266967

SEQ ID NO: 390635 - DNA, 438 bp, Salmonella enterica; identical to SEQ ID NO: 266968

SEQ ID NO: 390636 - DNA, 1626 bp, Salmonella enterica
atgaaaaaaagacaacacatgctcctgccactgactgccgtcgccctgctgctgtcaggctgcggtacggccgaacgtatcagcaacacggaaaaagacgccaccgccacactggagaaagcgcgccggcacgcgggcgaactccgtaaatcccggccggtggtcacggagaccacgcgacagtggatcaacccctcccctgtcagcgtcagccccgcacaccagagcctgccgggctgccccatcatcatcaacacccgccgggatatcagcctgcggcagatagcccagcgcatcaccggaagctgcggtatccccgtgaccatcaccgccgacgtctggcaggcgctggccaccaccggccccacacagcagctgacaggcgcaatccccgcaccggacccgaacggcatggtgccgctggccgccgtcggcagtggcgcacaggtcatccccccgggcggcggtgccgtcctgccggaactcagcgccaccgggctgcggcagctgctggataccgtcgcctcccggctcggtatctcgtaccgttacgacagtgaccggcgcgccatcaccttttactggctggagacacgcaccttcccggtcacctacatggactctcaggtgacctacaacgcccgggtggtcagcggcaccgcctcctcctcatccggcagcagtaccggcagtaacgccggcaccctcagcggggaggccagcaacacccagaccaccacggtcgacatgaagtccaccctctatgaggacctgaaaaatgccgtcggtgccatgctgacccccgggaccggccggatggtgcttgccaccggctttctcaccgtcaccgacacccctcgggtcctcgacaccgtcagccgttttgtggaggcacgtaaccgcgagatgcgacgtcaggtggtgctgaacgtggaagtcctcagcgtcagaaaaccccgccgtgaccaggccggcattgactggaatgccgtcttcagcgacggacgtctcggcctcacgctgggaggggcattcagcagtgccgccgatgacatcatcaccagtggcgtctccattgtggacggtaagctcaccggctcgaaggccttcctgaaggcgctctccagtcagggcaccgtcagcgtggtcacacagaactccgccgtcaccaaaaacatgacgccggtgcccatgcaggtggccagccagcagggctatatcgaaggtgtcaccaccgacaccacggccaacgtcgggaccagcacctccctgaacgccgccaccatcaccaccggcttcaacatgaccctgctgccgttcattcagccggatgcgcgcagcctgcagctgctcttcagcatgaacctctccgacaaacccacctttgaggtgttcgagagcggcggcagccgggcacaggtacccacggtggacctgaaaaccatcaaccagaccatcgacctgaaatcaggtcagaccgtcattctcagcggattccggcagtccggcagcaaatccgtgcgccagggcgtcggcagcccggcattcttcgggctgggtggcggcactgacagcggtgacgatgacaccattctggttgtgctgatcacaccgcacgtaatctga

SEQ ID NO: 390637 - DNA, 1299 bp, Salmonella enterica
ttgaacgggtcaatgcagaaaaaaattcgtccggtttcactgatatcgggtaaacaggcattccttgcgggccttgactggaagagcatacctcccggttaccggaatgcccggcggtttgcccggtcacagggcgcagaactgtatctttcctgccacaaccacgacggtgaaaacggtgatgaaatgatgattgccctgctcagtcgtcaggatgcagatatcccccgtaacattcgccagtgcctgtcactggcaatgttaatacgcccgctactcaaatcaggtgggtatgccattttcatcatcgagaacgacgacgctgaactcacctgtgcgtttgtatcggtgattaatggcattctggttaacgacgttaccggtaccccgactgaaatcacggaagcccgcaacacgttcctgatgctcaatgcggaaccggaaaacggctgggtacgctacgaacctgacggtttttcaccagacagtcggtgtatcccgctaccgctgtcaaacctgatcagcaccagaaagcatccggcagaagcgcgtctgctccccgtgtccagaggcccacagttaatgacagccttactcatcatcacgctgcttggcgcatcgtggtacggctggcaacgttatgaaatctggcaggcggaaaaagcggaacgggaagaaagcgcccggaaagcagctgaagcacgtataacgccaccatggacgaggcagcctgaaagcggagaatttatccggcaatgcagcacaacatggaaccagacgccactgtctgctgccggatggcgttataccctggctgaatgttctactgacggtaacagcggtaatctgcggtcttcatacaccaatacagcaggcacgacagtgacagccttcatccggcgcatcactgaactcacagacacccggccgtttattgttatgcctgaagggaactctggcggcgttgcactgccggtcacattccggctcccggataatcctgtcccggttgattcccttccggaaacccgagacctgcaggaacgactgaccacgctcgcacagtcagttcaactgcagattgactggcaggaagtcaataacagcttcactgatgaaaacggaaacatcatccagccaccgtggaaagagtatgacctgcagatacagacgctactcccggctaaccagctggcagagcgcttcagcgagccatctgtccgttttctctctgtcacaagacaactggaaaatggtcgtttccgttatcagttcacaggtaaatattatgcacgataa

SEQ ID NO: 390638 - DNA, 462 bp, Salmonella enterica; identical to SEQ ID NO: 266971

SEQ ID NO: 390639 - DNA, 1521 bp, Salmonella enterica
atgccagagactatcgaactgcctcctgaagatattcgtgatttcgtcgcaattcagcatgacgctgacggaaaaatcagggtgaaagtcgtcgaggcgaagaagcacatcacctctgtacaacgttacctgacgctcttacgctcccgctatccgggaaaaatcagcaaattcgattttaccactcttgacgttatcgcaaccctgaacagcaataatacggaacgtgcaccgggcgttttatccgacggagggatcaacacagtacaaagaaaagttcttgattacatcagaaaagccgctcaactggatgcctcagatctgcatatcacaccaggacgcgacaacacggacttcacctatgtggaagcccgggttcacggcgaactggaagtgctcgatatcctccggaaagaagaaggtctcgaattactgggggccacctattccggcatgaccgacgtcatcaagggcacacagtttgatcccggggtgcctcaggatgcgcgtctttcagagcagtacctgaaactggccggtctgtttggtgcacgctactcccactatccctgcgtgggcggcctctatgctgtgctccgtctgatcaaggatgacagtctgcaaatcccgaccttcagcatgctgggctaccaccctgagcaggagcgcaccctgcgccgtattctgcagcgccctgaaggtattatcacgctctcaggaccaacaggttcaggaaaatccaccacactgagaaccgcctctgcggcgtaccttgaacagtacggcttcaacaataccggcggtattcttctgccccgtcgcaggctgttcaccattgaatccccgccagagggccgtatacccggtgccattcagactgccgtcatggattccgcacagggctgggtggactccattaaatcagcactgcgtcttgaccctgacgggatcctgaacggcgaaatccgtgaccacgattccgccattacggcaataaaagccgccatgaccgggcatctgatgctgaccaccatccatgcgaacgacccgattaacatcctcgaacgtcttgagatggagggggtacaggccaggatgattgccgacccgcaactgttcattggcctgctgagccagcgtctggttcagctgatatgtccgcactgccgtcgcccctggcatgaggtggctaccgagcgcacggatgatgaacggcgcctggtggaaagcgtctgcaacccggaccaggtatatctgcgaaatcatgaaggctgcccgcactgctggcgtggcgtgacaggacgaacagtgatcgcagaagtcatctccccggatgcccgttttttccagttgtaccgggaaaaggggcgtattgaggccagaacatactggcaccgggaactgggcggaatgacccgtaatcagcatctgctgggaaaaatcaacagcggacaggttgatccgctggcggcccattatatatctcccgtcgatgaggacagctatacgctgctgcactga

SEQ ID NO: 390640 - DNA, 1101 bp, Salmonella enterica
atgaaatttctggaaaaactcaacagcaccgacattgagctgacagcgctgaccatctggatggccagaaaaacctttgccctgaaccgggtggagttctacgaagccctgggcggcatgatacgtgacggaacgccgtccctgcgtgcactcgaatttctctgcgagatcgaaaccgattttggtgaaaagaaaggcacatccggcatgtattttctggcaaaagaatgcatcgattccatcaaagccagcggcatgttatccggtgccctgttaacctgggtgccaccggaggaagccacgttaatcagaaacggggaagagcgcggaaatattgccgacgcccttttccaggtggccagaaccgttaaagcccggcgggaaatgacatccagcctcattgccgtctgcctctacccccttctgctgctttcgctctgtgtggtgaatatgtacaacgcccatacccgtatcatccccatcgtcagtgcgtttgcttcagaagataaatggtcattccagatgaaattgcttgccggcatgtcggaatttttcatcgggtacggattctggctctgtgggaccattttcgccctgacgcttctgatccgtttttcattcagccggtataccggccccggccggaggatgctggacaaggctcccccctggtcactgtatcagaccttacacggggtgaattatctgttcagtatttcatccatgctgcagattaatattcctctttcgcaggcgctgctccgaatggaaaaaggtgcagaaaagaataaatggttaaaggagagaattcaggcaatacgaaaacatgtattatccggtcagaatctggccacagcaatgcgaaattccggttacgattttccgtccagaatatgcatcaataaactgctcctgaactccgaaagggaggacagtgtggcaaccatggcactctatgccgatcagtggctggaggaagcaaaaaaacgggtaaaacgaattggattaattattaccggtatatcaggaggttttgtcttcttttttattcttaacatgatctctgccatctacagtatcagcgacatgctgaaacaataa

SEQ ID NO: 390641 - DNA, 537 bp, Salmonella enterica; identical to SEQ ID NO: 266974

SEQ ID NO: 390642 - DNA, 477 bp, Salmonella enterica
atgaaatggttatatctctctgtcctgcttttattcagtcacacatcaatcgcatctgtgatgaataataatcatctcgatttctgttttattcaggccggaaaacgttacctgattgcccctgagcttctgaaaaccattgcacagcaggaaagcggcctggtcgccactgcgataaatcacaataaaaacaaatccggaaaaatcatcagtacggattacggaataatgcagattaattcagtgcatattcctgaactaaaaaaactgggcgtcattaaaaacaaggatgaactgcttaaaaagccctgcctgaatattcataccggtgcctggatactggcccgccattttcaacgctgcggcgttaactgggaatgccttggcagttacaacgcaggattcagcaaaaataacacagcccggcgcatgatatatgcccgaataatccacaaccggtatttcagaaaagattaa

SEQ ID NO: 390643 - DNA, 651 bp, Salmonella enterica; identical to SEQ ID NO: 266976

SEQ ID NO: 390644 - DNA, 1164 bp, Salmonella enterica
gtgaaaaaattcagacacgatgacgataaaggttttattctgcttgaaattctggcaggcctgatagtaattggtatcgccacgccaatgatttattcagaaattgaagactggctgaatgaacaactttatcaaagtgcggctttacatgctgatgaatataataatgcaataaagaattatgtggctgataaaaccagctcactttccagtaaaaccatcacggtaaatgaattaattcagcagggatatctgaacaacggtttttcccgctccccctttggacacagctatattaccggtatcagaaaaaataatttatccggtcgtctggaagcacttacctgcacaaccggaggacaggatattaaagaagatgggttacgtcgcatagcgggccagattaatggactcggtggttttatgctccagaataattccgttacaggtgcctttggcggctggaccgatctgggaagtaattatcagattacctgcaacaaggggcatatcgccatgcgaatggctggaaaagatctggaggaaagcgatcggctttaccgctacagcgttcagggaagacccgatttaaacagaatgcatactggcattgatatgaataataacagcatcaccaatatcaatgaagccagtggtaaaaacgccagattttcaggcgatgtcacatcaaatcgttggttacatccaaatggtggcggcttcaccatgacggacagccaatggatacgtgctgttaacaacaaagggatcacaaccgaaggagagctcaaaggaggaaaagtcagtggtggaactgtccggtctgaggggcgtctttccacgggtgagtatttacagctggataaaacagccaccgcaggtacttcctgctcaccggacggacttgtaggccgcgacagtacaggggcgatactttcgtgccaatccggtgtgtgggttggaggcaataaagtgaactattctgcctgtaaatggtatgaagcgacctccgcacattttatcggtggcagaagtggaggttctatttattacaagccgattcagtgccctgccgggtacgtcatgacaggtacaagaatgtacggcatcggagatggtgttgatgaagagcacgtcgatgcttactgttgcccttttggttag

SEQ ID NO: 390645 - DNA, 1125 bp, Salmonella enterica
atgtttcgaaaaataaaaattcgcaaaatgactctcaaccgggcgctggacaaatacctgaagacagtatccatccacaaaaaaggtcatctgcaggagttttatcgcgtcaatgtgattaaacgtcaccctattgctgaacgctatatggatgacattaccactgttgatattgccaattatcgggatcaacggttggcgcaaattaacccccgaacggggcgtcaaataaccggaaacaccgtccgtcttgaacttgccctgttgtcatctttattcaatatcgcacgagtggaatggggaacatgccgcatgaatcctgtcgaactggtcagaaaacccaaaatcagtagcgggcgcgatcgtcgcctgacttcaggagaagaacgccgactttcgcggtatttcaaagaaaaaaaccaggttctttacgtcatttttcatctggcactggaaacagcaatgcgacaaggtgaaatcttgtcattgcgttgggaacacgtcgatctgcaacatggagtagctcatcttccaacaaccaaaaacggtgctccacgcgatgttccgctatccaggaaagcccgtagttacctgcaaatgctgccgacacagcttaacggtaatattttttcttatacctcttcgggattcaaaagtgcctggcgaacagcacttcacgaactgaagatagaaaatttgcattttcatgacctccgtcatgaggctatcagccgatttttcgaacttggtacattgaatgtcattgaagttgccgctatttcaggccatcgctccctgaacatgttgaaacgatacacacaccttcgggcttatcaacttgtcagtaaactcgatgcccgacgcaagcaaaccagcaaaatcgctccctattttgttccctacccggcaacggtcgagaacagaaacgggcaagtcgttgtgactctgagtgatttcgacctggaaacaagcgcagccacaaaagaacaggccatatttcatgccagcgtgttgctgctacgaacactggcacaagccgcccagcgaggagagcgtgtcccaactcctggcgaacttcctacaaacattgatgaacgggtaatgatttgtccgttaacaaactga

SEQ ID NO: 390646 - DNA, 822 bp, Salmonella enterica
atgaaaactgacagcacaggtattgccgcccgtatgatgctctccctggacagggagcgaatttgcgaatgcctgctcagtcatcgccagctgcagtccacacccctgcaggttcgttatccgcagggagtcagggatgcccttggtatcatgagcgaacagctttctctttccgtctctgacctgacgcgtatcctggtcgaagacgcgttaagtgaaatgtttcttcctgcagataacatcgtccgccgtcttctcagcaggatggagcacatcatgcaggcacatgatatcagcgcaacaacgatggctgcattactggccccctggaatatccgccctgccgtcttccgggagccggacagactcactgactatctgaccggggagattcttgcagcactggctgactggttttatctcagtccggaatggctgaacggcagggtgcattatccactgtatcgtccgggagactggccagccacacaggagatattctgcaggattatttcagcccgcgagaatatggacattattctctggcatggttttccgtttgccggaacgcattccggagaatattgcggcgttctgctcaggcagaaaaaagaaattaataacaccattatttatccggtactttcgttatatccggtcagaatggatatagaaaaagaaggctggtttcagatggccctaaaaatatctccggatatccctgttcgcgccgtaacactcactccggcacaggcagaatatctgataacaggaaaaatattacccactgcgttattcagggttccgttatccccctggtaa

SEQ ID NO: 390647 - DNA, 1203 bp, Salmonella enterica
atgatgatgaaaaagcatattacccgtactctcatcgcttctgccgttttattttcctttaattcgactgcagcaacgtcatattttgaagcccgcaatgatgcgatgggaggaacgggggttgcctcctctcactatggtgtggccccactggcaaacccggcactgctgacaaaatccggtgcaaaagatgacttcagtcttctgcttccgtccgtgggtgcgcagctgtccgatccgggtaatatcgccgacaacgccgacaaaatcagcgatgactggaaagccttcgaccgtgccgtcgacagccactccggggtaccgcagacagcggcccgcctgaaagagagactgcaggacttccggaacacccatgccagcgcacaggccgggggatctgctgtggcggcccttcccggtgataccctcgctgctgcactgatgctgaaaacgttcgggactgtcagcgtcgacggtaaagtcagcgatgccgacctgaactatctggaaagcattgcagacagtggcagccaggatgtggataaaaacagactgacctcacaggcttttgcccgtgccgcactgatcaccgatgtgggcgttgcgctggccactgaactggaaacggccggacaaaaatggtctctgggtttcacaccaaaattccagcgtgttgatctgttcaactacaacgtgctggtcaaaaattatgacagcagcgcattcaggggggaccgctaccacaacacgaaaaatggcatcaacgccgacatcggtgccagcatggacctggatgacaactggacgctgggtctggtcgcccagaacctgatcccacgcagcattgagaccaaagaagtaaatggtgtcactgaaaccttcaggatccgtccgcaggtaacgaccggcgtatcatggcacaacgacatattcaccacggcactggatgtggatctgaccccggccagtagcttcacatcagacagcaaacgtcagtttgccgccgtgggtgctgagtttaatgtctggaaatgggcacagttacgtaccggttaccgccagaatctggccagcaacaacggcagtgcattcactgccggtattggtctctcgccgttcgatgtggtgcacctggatattgccggtctggccggtacggacaatacatacggggcagtggcacaactgagcgtcacattctga

SEQ ID NO: 390648 - DNA, 480 bp, Salmonella enterica; identical to SEQ ID NO: 266978

SEQ ID NO: 390649 - DNA, 282 bp, Salmonella enterica; identical to SEQ ID NO: 266979

SEQ ID NO: 390650 - DNA, 1176 bp, Salmonella enterica; identical to SEQ ID NO: 266980

SEQ ID NO: 390651 - DNA, 603 bp, Salmonella enterica; identical to SEQ ID NO: 266981

SEQ ID NO: 390652 - DNA, 732 bp, Salmonella enterica; identical to SEQ ID NO: 266982

SEQ ID NO: 390653 - DNA, 963 bp, Salmonella enterica; identical to SEQ ID NO: 266983

SEQ ID NO: 390654 - DNA, 435 bp, Salmonella enterica; identical to SEQ ID NO: 266984

SEQ ID NO: 390655 - DNA, 339 bp, Salmonella enterica; identical to SEQ ID NO: 266985

SEQ ID NO: 390656 - DNA, 360 bp, Salmonella enterica; identical to SEQ ID NO: 266986

SEQ ID NO: 390657 - DNA, 510 bp, Salmonella enterica; identical to SEQ ID NO: 266987

SEQ ID NO: 390658 - DNA, 192 bp, Salmonella enterica; identical to SEQ ID NO: 266988

SEQ ID NO: 390659 - DNA, 387 bp, Salmonella enterica; identical to SEQ ID NO: 266989

SEQ ID NO: 390660 - DNA, 594 bp, Salmonella enterica; identical to SEQ ID NO: 266990

SEQ ID NO: 390661 - DNA, 741 bp, Salmonella enterica; identical to SEQ ID NO: 266991

SEQ ID NO: 390662 - DNA, 918 bp, Salmonella enterica; identical to SEQ ID NO: 266992

SEQ ID NO: 390663 - DNA, 654 bp, Salmonella enterica
atggattttgctgttatatttttctggagctttgcatgtgttgttatatttctgtgtctgaaatcatcaataaacaaccaggaaaaaatgcagtcattattatttatatttttgttgctgacaggtgggtatctttcatcccatatctttaatacaggttcaggtaaatggttatttataacaattgccatcacatttctgttaaacactgcgcttatttttctttttatatttacaaaagcatatttcttttcgcaacacgtaaataagatgcgagaaaaagcaaaacaaacaaattccttagactttataaattgcctgataaaacttcataaaaaatatccggtatacgtattatacgcaccttcagaaaacacagtggaaatctgttacaatattttcaatgtaaatcctgttattggaaagaaactttatttaaaaacactgagtaatcgtcatatccggttcacagtaaaaaacataatcctgctacctgcattaaatgatgattttatatgcacacttgaatctttttataataatagtgatgaaacaaaagatattattgataactacatccgaaaaatacagggtaatcaacaattgccgtggctaataaacaatgcagtacccactgacacaaaagaaaagtga

SEQ ID NO: 390664 - DNA, 318 bp, Salmonella enterica; identical to SEQ ID NO: 267002

SEQ ID NO: 390665 - DNA, 264 bp, Salmonella enterica
atgaaaccgaatatccatcctgaataccgtactgtggtgttccacgataccagtatcgatgagtactataaaattggttcgaccatcaagactgaacgtgtgattgagcttgatggtgtcacctatccgtacgtaacaattgatgtttcctctaagtcgcatcctttctacactggcaaactgagaactgttgcttcagaaggtaacgtggcgcgctttaaccagcgtttcggtcgttttgttgacaccaaaaaaggcgcatga

SEQ ID NO: 390666 - DNA, 573 bp, Salmonella enterica
atgaaaatatcaaaactggttgttgtggctacagtatgctccacgctgagtgcatgttccgtggaagagatggctgctgtgaacaagaaaatcagtgacggtgcatttgctgtgacgaaagcgctcaatgggggaacgggcgacgcggataatggtatgccgatccttaacaagcaattgccgccggagcaggataaacgcgaaaatgttattgatgtccctgttgatgtggataccgcagcaggccgactgaaacgctattacaagttttactcgaatgatgaggtaaatgcgatccgcaataacggcacaactgacggaaaatggcaggcaagtgcgattattgacaatgggcatatctgggatgcgatgccgggcagttactacaaaatgggaggaaactggcgtaaaggcagctttgatgatcacctgacgattgaggtggaaaagaacggtaagggaagccgggtctatatcacctatgcttcagcttctcaggcgcatttgcaggcaagttctcttgagcctctgtttaagcgagtgaaggatgtggctgaaggaaaggttcgttga

SEQ ID NO: 390667 - DNA, 246 bp, Salmonella enterica
atgaccaatgaaacagaaaaagcaatgtggagttgcaaaacctctgataccccatggactttcagctctctgctgaaaaaagctgtttgcgcggttttgtctaacgctggaccagactctacttgcaatgaaaaaaacaagaacgatattgaacttgtaaaaatccggtcatatggagatagcgagggctggattgaatcaaaaggtggtcccatcaacatcgttaattcatacgatcgatattaa

SEQ ID NO: 390668 - DNA, 1509 bp, Salmonella enterica
gtgaccacgaataactatctggaacactttctgaccctgctgggctggctggtgaataacggcctgtgggatctgctgacggggacggggctgtttgccctgccactggccttcagggttatcgggatctggctgaaagtgcgggaagagggagcggatgagggaaataaagggatgctctcactgccccgcattgagaatgccctgtacggtgcattttttgtgatgatgacctgttgtgtgccgctggtacaggtgacgctgggcacgctggatattgataaaactcgtgccaagacctgcggtgtgtggacaccgaacgcacccggtgataccgggtacagcggtgtgatcagcagcctgggtgacaggactgcttcagcgccgctctggtgggtgatggtgcataaactctccaaaggtgtgacacaggctgcggtggcgtccattccctgccgaccggatatacggcaactgcgttttgaggtgcagcggacctacattgcgaaccgggcgctggccgacgagctgcaggacttcaccaacgactgttactcgctggcgctgtatcagtggaagcagcgtgaccaggggatgacgaaagacaggaagctgctttcggatatcagctggattggcagcagtacgttcattcagggtgactacgggacactgcagtcgaaaatgccacgtgcggcattcccgtggaatagcgcccgagacagcggccggccggatacgggacggggtggttatcccacatgccgtgaatggtggagtgacagcagtgtcgggctgaagaagcgggtgacagaggaagtcgatgaagggctgtggttgcgtctttcggcggcaatgaaaatgctggggaacgcgcaggcgaactaccaggatgaaatcatcaaacgtctggtgagtccggtgaacctgaccctgtcacagggtggtgaggtgtaccgcggctatggcggtaatgcagacatgacggcggcgaatgcggtgacacgtgcagcaggcacggcggggtctgccgttgctagtctggcagcgtttccggcgtttgatgcgatgcggcaggcgctgccgatggtgcagagtattctgctgatggcggtgtatatcatgctcccgttgattctggcgtttgcggcgtatgaattcagcacgctgatcacactgacgtttgtggtgtttgcactgaattttctgacgttctggtgggagctggcgcggtggcttgacagctggatgctgacggccttgtacagttcggacacgcattcccgagtgaacatgatggggctgcagaatacgtcggacgatatcatcatgaattttgtgatgggcacgatgtttattgtattgcctacagtatggctcggagcgttaacatgggcagggattagtgttggaagtattggagcagctattggcaaaggtgtatctgacgcacaacaagcaggaaaacaggcaggaaatattgtcaatttattaagtaggaaaaaataa

SEQ ID NO: 390669 - DNA, 360 bp, Salmonella enterica
atggcgatgactcaggggacaaaagcggggctggttctgaagggcgttaaggtggccggcatgtggctgtcgggccttattgccatgatgattctggccctcctggtggctgatacgggcatgcggcatacgcaggaagtggaagcattacggctctggctccacgagacacgtttcggatggctggggtggcgggtgtgcctctacggtgcgctggcatggggatgccggaaaatctggcgtgcgccggggttcagaccggaataccgccgtccctttgcgcggatttgtctggtcagtgccctgtttgcattactttgtgagtacagcatttttttcggaccgggggctgaactgtga

SEQ ID NO: 390670 - DNA, 1419 bp, Salmonella enterica
atgatgaagatgaaaacaggtgtggtggcactgagtgtgatgctgtgctgcagtactccggtgatggctgatcttctttctctgccgaaactgaatgacagcacgttcggttacgggaaatccgttgatggcgccgtatccgacaaactgttctatacgctgggtggcggctcggtgatctcacagccggccacgcgcagcaacatgcagaagctgggtatggacctgggctggagcagcgatctgatgtgcggcaactttgacctgaagaccacggtgggtaatcagcttaacggcgtgactgaaggctttaaaaatctgatgggggatgtgattcagggggcgaccggcgccgttgccagtctgccggcgatggtgatacagcgtgccaatccaggcctgtacgacatgatcaccaacggtgtgctgcaggcgaatgtggctttcgacaaggcgcaactgaactgccagaacatggcaaaacggatgatggacttttctgatcgcagcaaatggacgcaggctgcgatgctggaagagtacaagaaggtggtgaacagcggtgacggtgatgcggtgaaaggggatgaggccgggcgtcaggccaccgggaaggagggtaagaaatggattggcggacagcagcgcggcggggcaggtcagcccgccatccggccggtgcatgatctgacagcggccgggtttaacatgatgaacagtctgcccgtgaccagtacggccagcgtcagtgccggtaactgtaacggcagcgcctgtgagatgttccggaatgcagaagaggccgctaaggcggtggtaaaggtgctgggtgatcgtaccatgcgcacctgtacggatgcgaaggcctgtaccagcggggataatgaacagcaacagggaaccgttgcaggaacggggtttgcgccggtgctggaagaggcgactagggtgaacacggaacaattggtccgtctggtgaatggtcaggaaaaacccactgcagagaatctggcaaaactgaaaaccggcagtctggctgtatctgcaggggtgatccatgccctgcgtcgtgacccggacaatatgtccctgacgtcacggctggcgggagaactggcgatggcgcataccgtggaaacggctctggtgatgcgcagaatgctgctcaccgggatgtctgagccgtacgcggccgcagaagatgccgcgattcaggaaggcgaccggcgtatcgctgcactggacagggaaatcatggcgctgaagaacgagatggagctgaaacgcgatctggcacgtaacagcgtgctgaccatcattgaacgcgacaatgagcgcgtgggcagcaacccgatgatccagcctgcagacaatactgacagtcgtgtccgggcactggaaactccggatggggagtaa

SEQ ID NO: 390671 - DNA, 972 bp, Salmonella enterica
atgaccctgaaaagtcgtctacgtgcctgcgtactgttactgagtgtggcatcactgcctctggcgtctgcgtcactgaatactgccagcattatcgccagtgcggcggcaccggactgtatcagctggcgtgtcagcgggatttgttactggctttactgcagcgcgtctggctgtacggtcagaacttccgtgaaggtgacacatttcatcccggaagtggttatttccacctatacggcaccgggtggtaatccctggaaagagatgtcgctggtcagccggaccgcaggtggcccggagaatgccatcactgacggcctgtccgggctgagtgccggcgggggaaatccggcggatatgaaaatacaggggaagcgccgttcagccattcgtttcaaatacgcagatgcgctgggtcatccggccacacagcttatcggcgggatggtacccggattcagctgtgattcaccggtgacaccggccatgccctatttcctcagtaccctggacagcatcgtctggcgaacgggattacctgaatccctgtatccagaggcacaggttcccggcaaacgcgagattggcacccaggccgataaaaacatgtgggggagcgtttatccccggagtggttttgtgatgcagaccgatgatgaccgggccgcggcggtggtggcccagcgggtggccgacattatcacgcggacgggggagccgcatgtctacagggaggttaagggcgtgaaacgtgacggctactggcccccggaggcggtggaggaaaacaccggcacccgaaatcacaaatggcagcgactgacgccgtcagtgtcgcgttcctgtgccgttttcccggatggtgaacatcaggcagcggagaacggtaatgccgccttttcactgtggcagccctatagctgctgtaaaaagcgcgggcagcgatttcttggcagtacgaatttttaa

SEQ ID NO: 390672 - DNA, 396 bp, Salmonella enterica
atgtaccggattttctgttccctgtttttcctgccgctggcagcgtctgccggcacaacaatttataccgattcacagcatctccccgttaatactcccgatggtgtcagggtggttctgctggatgcaccggagcagcttcagaaccgcttttttggctcgttgcctgctgatgcggataaggctgaagcgctggtcagggcacgtatgcagtctcccgaatggcagatgatgcaggcggaactggctgctcattaccgcgatgtggcacatgcctggtcgctgggcgtgaagaaatatcctgccgtggtgtttgatgacagtgaggtggtttacggcaccactgatgtggtggtggccgggaaactccgtactgagggaggagttcagccatga

SEQ ID NO: 390673 - DNA, 2088 bp, Salmonella enterica
atgcgaataaccactctggcttcagtagccatcccttgtctcggattttcagtcagcagcatggctgcggaagatgtgatgatagtcaccgcatccggctatgaaaaaaaattaaccagtgcagctgcgagtgtttcggtgatcagtcaggaggacttgcgatccagccagtatcatgatcttggggaggcactgagatccgtagagggggtggatgttgaaagcggtacgggtaaaaccggtggactggaaatcagcatccgtggaatgcctgccagttatacgctgatactgattgatggtgtccgtcagggcgggagccgtgacgtaaccccgaacggtttttctgccatgaacacggggtttatgccacctctggccgccatcgaacgtattgagattatcaggggccccatgtccactctgtacggctctgatgccatggggggcgtggtgaatatcatcaccaaaaagaatgcagacaaatggcattcttcagttaatgccgggctgaacctgcaggaaagtaacaaatgggggaacagcagccagtttaatttctggagtagcggccccctggtggatgattctctcagcctgcaggtacgtggcagcacgcagcagcgacagggctcatcggtcacatcactgaacgacacctcagccacgcgcatcccttatccaacagagtcacagaattataatgcaggtgctcgtcttgactggaaagcaacggacaaggatatgttctggcttgatatggatactgcacgacagcgttatgataaccgggacggccagctgggcagccttactggcggttatgatcgtaccctgcgctatgaacgtagtaaaatttcggcaggttatgatcatacatttaccttcggaacctggaagtcatccctgaactggaatgagacagaaaataaaggccgtcagcttgtacgcagcgtactgcagcgtgataaatggggacttgccggtcatccgagggagcttaaggagtcgaatattatcctgaattccttactgcttgcacctgtgggtgaatctcacctggttactgtcggtggtgagtaccagaactcctccatgaaagacggagttgttctcgccagtacaggcgaaaccttccggcagaaaagctggtcggcatttgttgaggatgagtggcatatcacggatgcggttgcactgactgtgggcagtcgttatgaacatcatgaggtgttcggaggacacctcagtccacgggcatatatggtctgggatgtggctgatgcgtggacgctgaaaggtggggtgaccacgggatataaggcacccggcatggggcagttacataaggggatcagcggtgtgtccggtcaggggcgtacgaatcttctcggtaacccggacctgaagccggaggagagtgtcagctatgaagcgggcgtgtattacgataatcatgccggtctgaacgccaatatcacgggctttatgacagagttctccaacaagatcgtctcttattctattgatgataatacccgcagctatacaaacagcggaaaggccaggactcagggtgtggagtttgccggcacactgcctctgtggtcagaggatgtgacgctgtctctgaattatacctggacgcagagtgaacaacgagatggggacaataaaggtgcaccactgagttacacccctgagcatatggtgaatgcgaaactgaactggcagattactgaagatgtgtcatcatggctgggcgcccgttaccgggggaaaacgccacgtttcacccagaattattcgtcactctcagctgtacagaagaaagtgtatgatgagaaaggtgaatatctgaaagcctggacggtactggatgcgggcatgtcgtggaaagtgacggatgcactgacgctgaatgcagcggtgaataatgtgcttaacaaggattacagtgacgtaagtctgtatcgtgccggcagtggtacgctttatgcgggtgattacttccagacgggggcatcgacaacaggttatgtgataccggagagaaattactggatgtcgctgagctatcagttctga

SEQ ID NO: 390674 - DNA, 387 bp, Salmonella enterica
atgatgtgtctgaaatacccgaaaccggaggtgatgacagaggtcatgcccgggggcagcgtgttttttctgccgccgcagggaaaaccgggtgttgcggatctggcgcaaccgcatctgcagcgcctgcggtcacagcttgaacgcaggctgggtacgctgcatcgtgtggtgtgtcagccccagcgggtggggcagagcagcagtgtggccgtgacagcagaaggggcgtgtggcgaggtgcatcttctgctgacagtaggggggcatgagagctggccctctgaagaggaataccggcatccgcgctggtatatccaggtggtggatgcggccgatctgttctacctgctgctctggctgtgtgatgacggacaggaagcgtga

SEQ ID NO: 390675 - DNA, 2850 bp, Salmonella enterica
atgacattctcgcttttcagacgccgtgaggaaaaaggtacagcagagaccagggaacgaccggaagcagaagcgggggcatcttcatcggcctttgttccgccctgtcctccgggggcacagcccctgcgacgtccgggacagatgacccgtgatgctgaggcggcggtttatcatgccggtccgtcggttattgattttctgccatgggtggaatatctggatgaggagcagtgtctgctgcttgacgacggggtgtcggtgggagcggtctattcggtgacgccggccgcaacggaagggcgtacggaagagcgcctggcgcaaatcagggacatggtggaggatgccctccaggacagttttgatgagtacgacacgcatccctgggtggtgcagttctactgtcaggatgaaaatgatgtggatgcgtacctggactatctgaaggggtatgtgaaaccccacgcgcagggaacggcattcacggaggcctggctgggtgaaatggcccgccatctcagggggattgcccgtcctgagggactgtttacggacaccctggtcaccggtcagccctggcggggacagcagcgacgaacccggatggtggtttaccgtcgtatcgggaagaacaataacgatccgatgtcgccggtggcgatgctgaaccaggtctgcgaccgcgtggtgtccgcactgggtggagccggtatccgctgtacccggatgaacggtcagcaggtgcacagctggctgctgcggttatttaatccggcaccggactggattgcccgtgaagagctgtaccggatggcctcacgggttgatccgcgtgagcgtggtgatgatgtgatgccggtgatgacggattttgccgagagcctgtggtttaacccgccgtattccgatccggagaacggggtgtggtggctggacgccatgccgcactgtgccgtggtggtggaaaagctgcgtacgccgccggagccggggaccatcaccggagagatgccccgtggggaaaaaacggtgaatgcgctgatggacacctttccggagggaacggtgatgtgcatgaccatcgtggtgcagccccaggacaccctggaggaccgtttcacccggctgtcgaaaaatgcggtgggtgagaacacggaatccatccgggcgcgtcaggacgtgaaggtggtgaaggagctgctggggaaccggcacaagctgtaccgggcagggctcacctttcttctgcgggcagaggatatggacagcctgaaacgccggcgtgtggagctgaccacggtgcttctgggggctggtctgcagccggtgcggcctgagtttgacgtggggccgctgaacagctggctgcgggcgctgccgatgtgttttgatccggatacggacaaaaagcagtggtacacgcgtctgatgtgggtacagcacatggcaggattgttgccggtgaccggccgggatacggggaccggacatccggggttcagtttttttaaccggggtggtgatgtgctgactttcgatccgctgaacaagctggaccgtacccagaacgcgcatctgctgctgttcggaccaacgggggccggtaaatcggccacgctgtgtgcttcactgtcgcaggtgatggcagtacaccgtccccgcctgttcattgccgaagcggggaactcgtttggtctgctggccgattattttgagagtctcgggctgtcggtgaacaaaatcagcgtcagaccgggaaccggtgtgaccctgccgccgtttgcagatgcgcataaactggttgaggaagggcaggatctgcagtgcgtggatgagcattcactgcctgatattgaggatgaagccggggatgaaggggaggataaacgagacattctgggcgagatggaaatctcagccaggatgatgatcaccgggggggacccgaaagaagaggccgcgctgaagcgtgcggacagggcgatgatccgcgaggcgctgctgatggccacacaccggacataccgtgaggggcggcagatgctgccggaggatttgcagtccgccctgtgggagatctcccgtgacagcagccgtaacgatgtgcgcaatgcaaaggcggcggagatggcggagtctctggggatgttcacccagaaggggagttttgaggcggagttgttcaaccgcgagggcgaactgtggccggaagcggatgtgacgctgattgacctggggcatctggcccgtgaggggtatgaggcacagatggcgctgaccatggtgtcgatgaccaacatgatcaataacattgccgaacgtgatcagtatctggggcgtgacatcgtgtttgcggtggatgaggcgcatatcgtgacggtcaatccgctgctttcgccgtacatgacgaaggttgtgaagatgtggcgtaagctgggagcgtggctgtggctggcgacacagaacctgaaggattatccggatgtgtcggagaagatgctgaatatggcggaatggtgggtgtgtctgacgatgccaccggaggaagtgaacaacattgcacgctttaaatcactgacggaagagcagaaagcggtgctgatgtcggcgagtaagctgtccggctgttataccgaaggcgtggtgctggcgaaacagattgaggcgctgtttcgtgcggtgccgccaagtctctatctggcgctgggcatgacggagaaggaggagaaggctgagcggcgtatgctgatgaaggaacaccagtgcagcgaactggaggcggcgttccatgtggcgcgtaagctggacaggctgcgtggtctgtcggccatggaggcggatgtatga

SEQ ID NO: 390676 - DNA, 405 bp, Salmonella enterica
gtgaaacgattactgttcgtgatgagtgtggcactggtgctgtcgggctgtgccacctctaaagaagagctgctgcctgccggagagcagacgatgctggagctctggcagggtaaaaccgcaggtggcggtcagcggcatgcgctggccgcccgggaaacgttgcgccgtccccttacggtaacggagcagcaggggatgaacgcggaggcgtacagctacagccggacgcaggaaagcgaaatcagccagcagtttccgcgtctgccgaatcccgacatggtgatgtatgtgtttccgcatctggccggcggtacgtcgccggttccgggctacagcacggtatttcctttttacagcaggacgcagtatgcgctgccaggtgagcgtacggaggctctgtaa

SEQ ID NO: 390677 - DNA, 1479 bp, Salmonella enterica
atgcagattaagtccaataccctggtgaaatttgtggtacctgctgtggtactggcggggctggtgatcacgatgaaaagctgcagcacaccggagagcgggagtgagagtacagcacagagcggtgcgctggccggattatcgtcagaagagctgcgtgcgctgggcgtggaaggggacacgccggaggataccctgcggaccctggttgcccgcctgaaccaggtcagggataaccagaaaacgctggagagccagaatgcgcagttgctgaaggacaacgaacagctgcgtcgccgggggacggatgtgtccggccaggtcagtgaagccgtggcgggaatgcagaaaacctacgatcagaagcagcgtgaactgcaggagcagcagcgctccctgatgtcgcagattgatgtgctgcgggggcaactgagtgaccagctgacgggaagtcacacgaagctcagcgatattcctgacgggctgggactggattcaggcagtggtgccgggtcgttgatctcgcagggggcggacgggctgatgtgggtgagtccggccgatcagtcacaggatgatccgctgagcagcggcggaaagagcggtccgcgttttccgacctccttccttgaagataaccccctgacccggcagaaagcagcctatgagcagcaggtgaaggggtacagcaatgagcagcaggcggccaccacgcaggccgtgtacaccctgccggagaactcaaccctgacgggcagccgtgccatgacggccctgctgggcagggtgccggtaaacggcacggtgaccgatccgtatccgttcaagatcctcgtggggcgcgataacctcacggcaaacggcattgaactgccggatgtggagggggctgtggtgtcagggacggccagcggtgactggacgctttcctgtgtgcgcggacaggtgaacagcatcacctttgtgtttgctgacggcacggtacgcacgctgccacaggcggatgtgaacggtaccaccaacagcaatcagcaggcgaaaaacgggaataacgcaggcgggattggctggatttcggatgaggatgggatcccgtgtatcagcggcacccgtaaatccaatgcgtcaacctacctgccgacgatattcgggctggccgcagccggcgcggccggggatgccctgagtgaggggcagtacacctcgcagaacaatgtcaacggtatcacctcgacgctgaccggcagtgccggtgaagcggcgctgggtaaggccctttccggcgggatgaatgagaccgcggactgggtaagacagcgttacgggcagacctttgatgccatttatgtgccgccgggaaaaacgctggccgttcacattacccgtcagctggcgattgattatgaagagcgtggacgtcgtgtgcgttatgacttcaccctgccgggagaagcgggcgaccggggcggccttgactga

SEQ ID NO: 390678 - DNA, 921 bp, Salmonella enterica
atgagaacctgtgtactgcgcaacctgctgcgtcctgccgctgtgatgttgtcgctgtcagtgatgtccctgacggcgcaggcagatgaactgatgaagtgggagcgtattccgctggatgtcccgctgatggtggggcaggagcgggtcatttttgccgataaaaacgtgagggtgggctttccgccggcactgaacggcaggctgcgggtgcagagcaccggcggtgccgtttacctgaaagcggacagcgcgtttccgaaaacgcggatccagctgcaggatgtggaaagcggggagatgatcctgctggatgtgacggccgcagaaaaggggcccaccgagccgatacggattgtgtatgacggggaggtgaacacggtgagccgtgccggcggcagcgctccggagagcgcgaaggcgggcagcagtgacggacgtcccgggaaagtcggtgcggatgacggcacgcaggcccgccggaccgccccccgttatgacgagcccctgccggttctgctgacccggtatgcggcacagtccctgtatgctccgctgcgcacccttgaaccggttgcggggatcagaccggtggtgccacctcttccccggcaaatcaccacgctttacccgtctgaacccctgacggtatccccggtggcggcatggtccgccggcggacgaaccgtggtggccctgaaactcaccagtacggtgagccggcgtattgtgcttgatccgcgagccctgcagggccgttttgtggcggccaccttccagcaccgctggctgggtgctgccgggacaccggaagacaccacaatgctgtatgtggtgacggcaggccgcccggagaaggcctttgtggcagagcctgtggcaccgcgcaggacgggcggggaggtgaaacatgcagattaa

SEQ ID NO: 390679 - DNA, 648 bp, Salmonella enterica
atgagtcgttttcgtcatgccctgcaggatcgtgaccagcatattttgacgcttcgtgtgttcagtggtgtgctggcggggctgcttctgatggtcaccctcggctggatgtctgcacctgaccggctgaccatccataatccacctgatttacgttccggcagtacccgtccgtggtgggaggttccgccttccactgtctattcctttgcgtattacattttccagcaactgaatgcctggccgaaaaacggtgaggtggattatccggcaaaaattcatgccctgtcggcctatctgacaccgtcgtgccgggaaatccttgaaacggatgcacgacgccgtaaggacgcgggggaactgctggatcgtgttcgtgtggtgtatgagatccctgagcacggttacggcggacgttacaaccgtaatccggtcacggtggaaggccgggacaactggcaggttcgtctcgacctggtggtggatgagtattttcatgctgagccggtcaaacgggcgctggtccgctatccgatgaaggtggtgcgtatggagggcgatccggaacttaatccgtttgctctggcgctggactgttacagctccacgccgcagcgtctggaagccgtgaagggaggtggtgaatga

SEQ ID NO: 390680 - DNA, 366 bp, Salmonella enterica; identical to SEQ ID NO: 267016

SEQ ID NO: 390681 - DNA, 366 bp, Salmonella enterica
atgtttaaaaacgcttttactttccgtcacctgcgtctggcgggaatggggctgattgcttttctgctgggcagtctgaccccggcactggccgatttgcccaaaattgagccgccatcatccggtgggggtggtggtttttttaatcaactcaaaggctatatccaggatggcattgtgctgtttggtctggtagttgcagcggcggcctttgtgaaggtggcggaggctgccgttaccactttttctgaggtgcgtgacggcaagacgggctggggacagttcggggccattatcgtggtcggggtggtgctgctggttgcggttatctggctgctcggcaaatccgcgaacatcatcctgtaa

SEQ ID NO: 390682 - DNA, 243 bp, Salmonella enterica; identical to SEQ ID NO: 267018

SEQ ID NO: 390683 - DNA, 342 bp, Salmonella enterica; identical to SEQ ID NO: 267019

SEQ ID NO: 390684 - DNA, 192 bp, Salmonella enterica
atggaatttctcctcaccgcccttccgtaccgggccctgttcagtcttacctggttttttgttgtgttatatatcgtcagggaagagccacagtgccctgtctggttatatgacgtcatcaggggcatcaacctgctcatcatcgtcatcaccattgttgtcattcccttgctgtcggtgctcttacgctga

SEQ ID NO: 390685 - DNA, 762 bp, Salmonella enterica
atggcggaagcgcgtcgtgatgcggaacgcagcccgcagtcccgggcgccccgtcagcatggtctgctgtacaatctggtgtggggctggccgtgggcactggtggggctgattttatcctccctgctgctgagtctgttgattgagtatgccggtatgacgtttttctggagtgaggagggggcggcgcacagccgcgctgtcatgaacacggagctgggctggctgtcaacggagttcacccgcagtctgctgctttccgcgccggcagaaacggtgccggcgtggatttccgccgcgtatcagtggctgtttgtggacagtggcatgcagacatggctgcatgcacagcaggcggggacggcggcaggcagaagcgtgtctgaattcagcagtgagctgagtcagtggctggcttatcatcttcatgactacctgctggcgacggtgtatgtgacggtggtgacgatggtcagggtggttattctcgtcctgtccgttccgttgtttgtgatggtggttctggtggccgttgtggaggggctggggcgccgtgatttgcggcgttacggcgcggcttatgagtccagctttgtctatcatcatgcaaaaaaatcagtcagaccggcgatttatgtcccctgcattatttacctttcctggcccggcgcggtatatccgaacctgctgatatggccggcggccatgctgctgggactggcggttaccgtgactgtggcatcgttcaaaaaatatctctga

SEQ ID NO: 390686 - DNA, 2118 bp, Salmonella enterica
atgagcaaccgctatgtcattgaggcattgctgagaccggctgtggagttcaatacggcagtggtggcagcaacagcagcatgtatctgtgtgacagccccctgggcggtggcgctggcacccaccgtcagttacgccactgccggtggatttgccctgctggccgtggtgcgtttccggcaggggatgaacatcatccggtatcgccgtaatctgcgccggctgccccgctatgtgatgagtacacggcagatcccgctcagccgtcagcggctgtttctggggcggggatttcgctggacccagaagcatacccagcgtctccaggatacgctgcgaccggaggtggcacactatctgcagccgggcggactttaccggctggcgcgctggctggaaatgaaaacggaacaccgtctgcccgcgctggggaaactgctccggcatgagtcgtcgctgaatcctgtgcgtcctctgccgccggtggggggaaatcccgccctgcatggtattgagccggatgaacaggatgtgacgctggctctgggggagcgtgtggggcataccattgtctacggcaccacccgtgtcggtaaaacccgcctggcagaactgctggtcactcaggatatccgcaggggagaggtgaccattgtgtttgatcccaaaggtgatgctgatctgctgctgcgtgtctgggcggaagcacaccgtgccgggcggggtgatgaactgtatattttccatctgggatggccggaaatttcggcccgatataatgcggtgggacgcttcgggcgtgtttcggaagtggcttcccgtgtggccgggcagttgtccggtgaagggaactcggcggctttccgcgagttcgcctggcggttcgtcaacatcatttcccgcgccctggtggcactcggtgagcgcccggactacctgctgattgtgcggtatgtgaacaacatagccgatctctatatccgctatgccggaaaggtgatccgcgagcgcatgccggaactggagcaggcgattgcgaataaccagaatgtgatcagcgaggaggatgttccccgcaccatgcagaaccagccggatgcggtacgtatctggtccatcgagatggccctgagcagtgaggagggtaaaaaaatttacgatccgatcctggacgggcttcgcagtgcggtccgctatgaccgtacctattttgacaaaatcgtggcgtccctgctgccgctgctggaaaaactcaccacgggcaggatcgcagagctgctggcaccggactatctggacatgaacgatgcgcgaccgatttttgactgggaacaggtgatccgtaaaaaggcggtggtctatatcggcctggatgcactcagcgacagtgtggtagccagtgctgtggggaattcgatgtttgcggacctggtgagcgtggcggggcatatctacaagcacggcatgcatgccggtctgcccggtaagggggaaggcaaaaatgtggtgaacctgcactgcgatgagtttaacgaactgatgggggatgagtttattccgctcattaacaaggggggcggtgccggtatgcaggtcaccgcgtacacccagacatcgtcagatattgaagcgcgtatcggtaatgcagccaaaacggcgcaggttcagggaaacttcaacaacatgatcatgctgcgtgtcagggagaacaggacggcagagctgctgaccacacaactgcctcaggtggagatctacaccaagacgctggtctccggtcaccaggatacggcggacgtgtctgccggtcaggatttcacgtccagcacccaggatcgtgtcggcacggtgaaggtacctctgctggagccgtcagatattgtcaccctgcccaagggacaggcgtttgccctgctggaaggggggcagctgtggaaaatccggatgccgctgccggcaggggatacggatgacgtgctgatgccggagaacattgcccgggtggcagaggcgatgagacagaactatcacaccggtgaaggatggtggaatgagccgccgtcagcgcaggccgccggaacagatgaaggaggcggatatggcggaagcgcgtcgtga

SEQ ID NO: 390687 - DNA, 786 bp, Salmonella enterica
gtgaacgtttcatttactgaacaggtgcagagggatatgccgcaatgggcgaatgacccgttactggcatgggatgccaccgcgtttgcggcaatgtcggattttattacagagcactactggacgggacagggcagcatcaatgtgttccgcattgtgggaactgaccatccacagtatgccggaatgacctggctggagctgctggagcgcggtaaccgtatggacatcaatatcccgttactggaaaaaaatccgggatactacacgcaggcagagcaacagcatgccgggatgagttttgtcagcacggatggcgttgactggtatgtcagtgcagacggcaatcaccgcagttgcctggcacgctttctgtttcacctgcagggggaggagcgcacacagcttcacaacgtggcacagagtatttatcacacagaccgggcgttctggtctgcctgccgggaaatccacaacctgactgacgcgctgtcccggcatggtgtgtatatccgtctgcagacccgacggcagtgtgttgcccgcgaagacctggcctgctggaaagtggaccgtttcagcacagaggcgcagctgacagtggatgacgtgcgtgccggcggacatgatatgcctgcggtgtataagacgttgctgctgaatgcagcagacgcatggcgtgaggtgatggtattacagcgcagactggaggcgctgtctgcatcaccggggaacgatttgccacgcacatggtggcgacgtcttttacggaagggggacatgtaa

SEQ ID NO: 390688 - DNA, 513 bp, Salmonella enterica
atgatgacggtaaaacggatgtttatgtttttattcagaataacgattgtctggccatccgtgctgacaggatgcgtgatgatgctgtatttcgcgaaggtcgccggcggtggtgtggcgggactggagcagcgttacggggtggaatccgcccgctggcgtgatgcgccggaagggatggtgatgacagtgcagtgcccgtcgcgtccctttatggcgtctgtgagcaccggggagtggcgtgcactggctgcatctgatgatgaatgcagccaggtttcgcgctctttcagagaagctgcagagggcgatgcgcagtcgctgcgcagagtggcagtgacactgctgctggcatccgtggttctggaagcgttttcagcctgcattctgcgccgggtaacggcatccgtccgggtatcaccacactgtggatatggctgcggacgtggtgcggtggcgcactggccagagagcagcgttcacactgcaccggagaaaggagagcgggtgtga

SEQ ID NO: 390689 - DNA, 591 bp, Salmonella enterica
atgcagagacaactgacggacctgttacaggaaggcgcgtggcacggcattctgctgtgcgttctggtcgtgctgtttctgttttttccgcgcctgtgggggcgatgcaggcatcgtgaacgcgccagtgagcgtcgtcaccgccgttaccgtgctgtggctgaacgtgtgctgacaaagctgccggaaggtggggcgggtgtgaaatacctgcgaaaaattaacccgtatgtgtttgaagaactgctgcttctggcgtttgaacgcagggggatggcggtcatccgtaacacacgttacagcggagatggtggcctggatggtcaggtgctgattgacggcgagcggtggctgattcaggccaaacgttacggacggaccatccgtccgtcgcatattgatgattttggtgacctgctgcgccgtgaaggctgccgtggattttttattcacaccggtcgtacgggaccggccagccgggcacggctggcgctgtggccggatattgagctggtcagcgggcagcgtctgctgaaactgctgaacggggcattgctgccggatgaacttaccagaggagcgcggagatga

SEQ ID NO: 390690 - DNA, 528 bp, Salmonella enterica
atgaaacgatttaaacgatatgtcatgacgaccgcaacgtgtctgttgctgtgcgcggctcaggccggcgcggagctcagggtgattgctgaccttggtggcagtgatgccggcaggttttatgaagcaataaaccgccaggcggacagcggaacgtcgtcgcctgtcacggcgctgctgccgcagggggagagtgcgatgctgccggtttccacgccggaaatgtctcccggagaggtgacgccgaggccactgcagttaccggggctgggggcactgttcctcgtgggggatgatgcactctcccgtcagtggctgcaggcgaatgcggccgcgctgcttgaaaggaaggctgccggtatggtggtgagcgtgacgaatgagagcggtctgcaggcgctgcgggcgctggctcccggtgtgatgatggtaccggcttccggttcagcactggcccgccgtctgcagcttgaccactggccggtgctgataacggacagtggtatcagcagtgtggtgatgccgtga

SEQ ID NO: 390691 - DNA, 657 bp, Salmonella enterica; identical to SEQ ID NO: 267027

SEQ ID NO: 390692 - DNA, 720 bp, Salmonella enterica; identical to SEQ ID NO: 267028

SEQ ID NO: 390693 - DNA, 780 bp, Salmonella enterica; identical to SEQ ID NO: 267029

SEQ ID NO: 390694 - DNA, 579 bp, Salmonella enterica; identical to SEQ ID NO: 267030

SEQ ID NO: 390695 - DNA, 249 bp, Salmonella enterica
atggattttgctgaactttctgaagcaatattcacacactatcccagccacaagggggtgattatgacgatagcggaacaactggaagagaaaggccttgagaaaggccgtgcagaagagcgtcaaaaagcgcttgcagaaacctatgcatctgtccgtcgcatgagcgatatggggatgtcaacagaagttattaagcaagctcttcagctttctgatgaacagattcaggaagcgcttaataattaa

SEQ ID NO: 390696 - DNA, 969 bp, Salmonella enterica
gtgagtgaaaaagttaacaaaatcactatgattcatgacggggcgttcaagaagacgcttgaagatcccgccgcagtaagggactttcttgaacaggtcttgacacacgatcagatatcccgctgtaatcttgatacaatagaagttgaaaagaattcgttcgtgacggaaagtttgcgtcagcatgcctgtgatgttttgatcagcatgaagacaaacgacggcagggacggatacatttataccttaatcgagcaccagagttcgccggataaattcatcccgctgcgtatgatgcgatatatcctggctgtaatggagcaacatgttgaaaagcataagtgtgcacctgtggtgatccccgtgttgttttatcatggtgcaatgcggccatatccgtatccgctgaactgggtggattgtctggatgacccggagtacggacgggagatttatggcgagtcaaagtcattcagtctggtggatgtcagtacgcttgatgatgatgaaattgagcagtatcgccggatggcggcgctgatgtacaccatgaagtccggaactcaaggtgatttgattgagctgattggtaaatcgatcacactgacggataagtatggcagtagcattcacctgaatacggtgcttacttatctgatggaactttaccagatggatgttgctgaactttttgaagcaatatccacacactatcccagccataagggggtgattatgacgatagcggaacaactggaagagaaaggtcgggttgaaggtctggagaaaggccttgagaaaggccttgagaaaggccgtgctgaaggccgtgctgaagagcgtcaaaaagcgcttgcagaaacttatgcatctgtccgtcgcatgagcgatatggggatgtcaacggaagttattaagcaggcacttcatctttctgatgaacagattcaggaagcgcttaataattaa

SEQ ID NO: 390697 - DNA, 558 bp, Salmonella enterica; identical to SEQ ID NO: 267033

SEQ ID NO: 390698 - DNA, 204 bp, Salmonella enterica; identical to SEQ ID NO: 267034

SEQ ID NO: 390699 - DNA, 465 bp, Salmonella enterica; identical to SEQ ID NO: 267035

SEQ ID NO: 390700 - DNA, 2019 bp, Salmonella enterica
atgcgtctctttttgtgtgagaaaccttcacaggccggtgatatagccagagtacttggggctgccagacgtgttgatggtgcgattgaaggtaaggactttgttgtgacctgggcctttggtcacttgctggagcaggcgccaccggaggcgtatggtgagcagtttggcagtccctggaaaattgacgttttgccggtctttcctgaacagtggcagatggtggtgaaggataatgtcgggaagcagtttaatgtgatcagccgccttctccgtaaggctgatgaagtggtgattgccactgacgccgatcgtgaaggcgaaattatcgcaagggaactgctggattattgtggttataccggcgttgtgcgccgtctctggctgtccgcactggatgagagcagtatcagggaggcgctgggcaggatactgcccggagaggagaccgagaagttatatgaagccggtaagggacgcagccgggctgactggctgacggggatcaacctgacgcgtctgtataccctgaaagccagggagtgtggtgtgtccggcgtcctctctgttggcagggtgcagacgcccacgcttgcgatggtggtcagacgggatgcagaaatcaaaaattttattccggtaccttactggcaactgtatctctggctggagaaggacaatgtgcgttttcgtacctcctggattgcggcagcgcagtactgcgatactgaaaaacggtgtgtgaatgtgcaggcggcaacagccgtcctgtcacagtgtcgtcaggccggtgttgctgttgtcagggatgtcagcagcagacgggagaaaaagcagcctccgctgtgtttttcgctcggaacgctgcaggaggtctgttcgcgcaaatttggcctcggcgcgcaggccgttcttgatatagcccagtcgctgtacgaaaagcataaggcgacaacatatccgcgtacagattgcggttatctgcctgtgtcgatgtacaaagaagtgcctgacgtactggcagcgctggaaaaaaccgatccggatattgccccggagctggcaaaactcagtcctgatattgtgtcggggatctggaacgacaggaagatcaccgcgcatcatgcgataatccccacccgtcagccgtttaatattggggcgctgagtgataatgagcttaaggtgtaccggttaattcgtcagcattatctggctcagtttttacccgttcaggagctggatgtcacagaggccacttttcttgttgcggggcagttgtttggaacgcgggggcgagtggaggttgtcaggggatggcgtgcgctttttgtgtcagattcggcgggagaggaagaggatgttgcagacgatgagcaggcgatgccccttcccgtactggcaaaaggcgatgaatgtcgtcctgctgaagctgaactcaaagagatgcagaccacgccaccgcgtcattatacggaaggcacgctgattgcggcgatgaaaaacgctgcggggatggtgagtgatccggcactgaaaaaagtgttacgcgaaaatgcggggctgggcactgaagcgacccgcgcagaaatactggaaacgttgttcacccgcaaatatatcgagaagcagggtaagcatatccgtgccacgcaactgggggcggagctgatagcgggattgccggaggcgctgaccagtccggggacaacggcgctgtgggaacaggctctggatgatattgcacagggtaaactgtcactgtcgtcatttatggaaaagcagaaacagtggcttaaccacctggtggccggtgcaaggcagcagcaactgcagatcacggcaccggttacgccggcatgccctctttgtgggagcagaatgcggaaagtgaagatgaaaagcgggaaaggggaattctggagctgccagcgttatccggagtgtaagggagtgatttcagagcagaaaccgacatccgggaaacggggcggcagaaaaattaaaaagcatggatga

SEQ ID NO: 390701 - DNA, 726 bp, Salmonella enterica; identical to SEQ ID NO: 267037

SEQ ID NO: 390702 - DNA, 435 bp, Salmonella enterica
atggttaaaaatcgtacggtgttggcagtgccaacagtggttaaaaattgcgcggtgttggcagtgccaacagtggttaaaaattgtgcggtgttggcagtgccaacagtgattaaaaaatgtacggtgttggcagtgccaacagtggttaaaaattgcgcggtgttggcagtgccaacagcggttaaaaagtgtacggcgttggcagtgccaacagtgattgaaaaatgtacggtgttggcagtgccaacagtgattaaaaaatgtacggtgttggcagtgccaacggtgattaaaaaatgtacggtgttggcagtagcaacagcgattaaaaaatgtacggtgttgccagtggcaacagtggttaaaaagtgtccggcgttgccagtggcaacagtgtttgaaaattgtactgagttggcactgccaacatga

SEQ ID NO: 390703 - DNA, 1266 bp, Salmonella enterica
atggcgctacctgcagaaagccttattgcgcatacgctcagaaaaatgaaggccagcatggcagagaaagccagtcgtgaggacgggaggatacgcagtgggctgttgtttaccggcaatgttcacgattcgtatccccgcaggctgttgctggatacgcgcctttctccccttgataaaactgcgtggatgatgattcgtctgcatgccctgaataatgagggcgcagtatttccgacgtacgatgaactgcagttacaactggcatctcccgggtgcgggaaggcgtcccgtgaaacagtgagccgggtgctgacaatgctgcggcttacgggctggctgagtctgtgtaagcgggtcagggatgaaaaagggcgggtccgggggaatatttacgccctgcatgatgagccactgacctgctgtgatgcagaaaagtttgacccacgatacctggatatggttctggatactgtgagcaggagccggaacaagacaatccggcacacagccagtgaagtgctcagtgatatcaaaaatgagcccggtatgcggcattaccacagccatatcactctgtttgaatcgcgtatgggggcagcacagacacctggtcagctggcggcgcgtcagcgggtgaacccgatggtgaatgaaaacacaggcagagagagtggttcggattccgtacatacccctgcacctgtcgtgcaggtaaccgaactcagtgctccgttaaccgaactcagtgaaaaacaggaaatgagcccactcagttcggattccgtaccgcctgaaaaatcagtaacttatcactcggttcggaaaccgaacaattacgtacgtaatatcacacacagtgtgattaaaaatacgtacgtattgcctgagtcggtgaaatcgcaaatcagcacagaagacacggacatgctgacaaaacaactgcaggcgttgccggaagaactggcaggtagtgtgctgagcagcctgtcacagatgctcagcaaaaacacgctccagaatccggttggctggatgctggctgtgatgaaacgtgcgcgtgagggaagttttaatacgccggatatgtccgtgcatgaatcccggtcgccagcccgtgcaccatatcagcctgtgtacaaccgtgatgaacgtgaacgtcgtcgcaggaaagtggcgtcacctgaaacggtgagcaacattgtcgcagaattccgtgccagcctgaaacgtacaaatgctgcccgtctggcggcgcgtgtttga

SEQ ID NO: 390704 - DNA, 222 bp, Salmonella enterica
atgaaactgaagatgcaggcaatggacggcccggtgattatagagagtagtgatgtgacacagttttaccctgaccatgaaagtggcggggaactcaccgctgttgagtaccttgctgacgggggaagaatcaccgcgagggtgaggcactctttttatcaggttgctgcggcacttgccggggcatggcgtgcggatgatgcatcaaaaagcggtgggtga

SEQ ID NO: 390705 - DNA, 216 bp, Salmonella enterica; identical to SEQ ID NO: 267039

SEQ ID NO: 390706 - DNA, 198 bp, Salmonella enterica; identical to SEQ ID NO: 267041

SEQ ID NO: 390707 - DNA, 222 bp, Salmonella enterica; identical to SEQ ID NO: 267042

SEQ ID NO: 390708 - DNA, 213 bp, Salmonella enterica; identical to SEQ ID NO: 267046

SEQ ID NO: 390709 - DNA, 177 bp, Salmonella enterica
atgactgattttggttcaactaaatataacgccagttttgaagaatggcatgaagtgttaatggactatgccgggttacgtggtggaagtgccgccgatgccgaagcatggcgcgatgactatgaagctggaaaaacgcctgtcgaagcatattgcgatgagtggggtgatgaatga

SEQ ID NO: 390710 - DNA, 249 bp, Salmonella enterica; identical to SEQ ID NO: 267047

SEQ ID NO: 390711 - DNA, 579 bp, Salmonella enterica
atgagtaataacttgtcacaggccaccaacggactgttgatgcagctggtgatggatctcaaaagtggctatctgcgccgctgtgaagcgctggggctttcccgggaagaaatgcagatgctgcaggggctgagtattgaggaaattcactatctgtcaaattcagaggtgtcagtgctgcggctggatattaaccacaataaccttgtacgcatgctgcagcaggccaggactgaacagaaacgcctgcagcgaatcgatcgcgctcttgcactggggggatcgattgaactcatggcgttttattttggcctttccagtgtggacgttgcagcacggcgccgtatttcaggaattgatgtgcgcccggggcggggtatcacactcagcgatgatgaaaactctgaactctggagactgtggcagaaagcagggattaacgatgtggagagcgctgacgggctggacgtcatgatgctctgtgcagagcagatgaatatcccgctcacggccgtctggcatgctgtcagggggtggcatacagccggaagccctgaacaggtaaggaatgcgtcatga

SEQ ID NO: 390712 - DNA, 732 bp, Salmonella enterica
atgaataatgatgcagcacgtcaggagcaactgattaaacggataagaaaactgctggcgctgagccggaataacagtaatccccatgaggcaggtcaggctctttcccgcgcacaggcgctgatgcggaagcatggtatcaccgaactggatgctgatatttcggtgataaaaacctcatcatcaaagggagcaccgtcagaagcggaaaaagttccggtatggatggggcgtcttatgaatgttgttgcaggggcattcggatgccatacatacctggattggcgtatcacaaccggaggatactggcggcggattgtcacattttatggttttggggagcgtccggttgtggctgcgtatgcctttgatgttctctgccggcagatgcaaaaggcgacaaaagagtatctctcaacccagagccggaaattaaaacactcaacccgtcgtgcaagagctgcgatgtttcgtgacggctgggtttatggggtgcgtgatgtggtggatgcattccggctcacggaagatgagacgcgtgtaatgaatacgtggctgcagaaccagcaatttgagggaatggtcgtcttccgggaggtaaaggactgccatggcggtgaccatgcacgctggcagggatacaacgaggggaaaaaggcaacgctgaatcacggtgttggttcccgggatctgagaccggaaagcctgatatcaggcggaggtgaggtatga

SEQ ID NO: 390713 - DNA, 1650 bp, Salmonella enterica
atgtcaattaaacgaaatcattccgttgatctgggggctgccatcatgcaaccgggccgtcaggccagcacggcaggtaacgtggtggcgctgggggaaacaccgatgattctgacgctggatcaactgcgccccaacccggataacccgaggaccacgcgtaatccacggtacgacgatattaaaagttcaattttctcccgtggactggatacggtgcccaaagtcacccggatacctgagagtgagccggatatctatattttcagcgatggcggtaacacgcgatatcagatcctgaaagagctgtgggaagagaccggtgatcagcgtttctaccgtattcatgtgcttttcaagccatggccgggacggcttcagtgcgtcattggtcacctggcggagaatgaagtcaggggcgaactgacgtttattgaaaaggcccggggtatccataaagcacggatgatttatgaagagcagttaagcaaaagtgtgtccatgcgagagttgtcatcccttttgactgagcagggattaccggtggatgcatccagtatcagccgtatggagaacaccctgaaatacctgtatccgtggatccccgaacttctggaatcaggaatggggagtcctcaggtcagggctttactgtctctccggcaggatgcggaacgtatctggggacagtttgcggtggcaacagagaacgggggggattttgaccgcgtgtttggtgaatgctgcagcaaattcaattcaccggagctctggtcactggagatgttccgggatgagctgattggtgatctgctgaaagcgttaccacatccggtgctggattatgaccgctggctgcttgaactggatccgcgggaacgtaaccgacgtcatcattttggtgaacctgaaccggtgctcattcccgcagacagtgatgcgatgccagagcctgtgactcacggtacgtcggcagtgacggtggagaaggacagcggaagggagcagtctgtgatttccgcaccggctgaccatgacacagtcatgaatacggagcaatcccctgttggaaaggcggagagttcagttactgaacaacgcgaagaacgccgcagaaaggaagtccagccggatatgtatggtggtgaagaaacatacagcggcgattacgaagaggatggcgatacccgtgatgctgcggatctgccggtaacgtcaccggaagagggtgctcagcagagcagcggtgaaattttcagtgagccggaattcagtgttggtgaactggatgatatcgaatatctgcagaatgaggcatttcacctggcatgggagctggcttcacacacaggctgtgtcgatgaactggctatggacagggaaagcgaactgtctgcgggattcggcgcggcagaggcgaattgttctccggtcatggcatttcttgtcaggctgaccggtgaggaggttctgcgggttaatccggtttctcttgatgcactgatgattggtggcagtactgaagaagagccaccactgctggatgatgagcatgccgggaagttactccgtctgcttggggtgttgcgtcgtctgcgggggctgcagcgccaggtggaagaagagaacgtggaggggcgtgatgaataa

SEQ ID NO: 390714 - DNA, 1389 bp, Salmonella enterica; identical to SEQ ID NO: 267051

SEQ ID NO: 390715 - DNA, 477 bp, Salmonella enterica
atgaacacaaatcatcagcaactgccgtccggcattgataacaaccatgatgaggatggcaacatggcaaaatattatgaaaactggaaagtcggaggtatgagcaccgacgatgtggaacggtgcaaaaccttctttgaccagggaacagaaatctttcccggagctgaccggaagctcgcttaccgactttgctggctcggacactggctgattaacagccgccgctggttttttctggacgataacagtatcagcgttcaacaagccgttaagtttgctcttattcatcaacatcactggctccctgcaacggttgaacagatgacacccgctgagatgtcccttgctctgacagattactgggctgactactggacacagccgactgagccggagaaggcgctggttcacatgactgactggcagtatcaaaaactttgttcaaatcgaaaaaaggtaaatggtgaccaatga

SEQ ID NO: 390716 - DNA, 495 bp, Salmonella enterica
atgaataacagcagcaataccacaacccgtaatacgctttcacccgttgagtcagcctgtcatgccttactggattttattgcccgggaagtttttgagaataaagcaccggaagaggacgtcagggaacgttgcaaagtatttacagcgctgcttaacgaaggatttaaagccctgcttgatgaggcagggctgaatctgtcaaaccttcgtaaacagtgtgaggaactggaatctcagataaccagacttgattctcagtccgatgctatttgtcgcagaggtgctcaaattgaacgcttcattggtcaccatttaccttttttcgatttgaacaaagtttttgatactgccagtcagtcatgtgaaccagcgccttctccggctcagtcggctgtgtccagtagtcagcccagtaatctgtcagagcaagggacatctcagcgggtgtcatctgttcaaccgttgcagggagccagtgatgttgatgaataa

SEQ ID NO: 390717 - DNA, 963 bp, Salmonella enterica
  misc_feature (861)..(870): n is a, c, g, or t
atgaagattaagatgttttttctgacgactgcttttattacacaaagcacatacgccagcgagcttccggtcattcctctaagagatttagttaatgccgcattaacgcatcagccctctgttgctgtttcatattatgagactgaaaagaaaaacagtgacttagatctttcacgggcagcactttatcctaccctggatctaacatctggccttaataataacaggaaagagtcatcaggtaccgagaggaacgttgaaaataaggtgtctttatcataccgaataacggattttggagtgaggggggctaatatcaggaaatctgaatatgaaagagataatagtaaaactgactatgaaaaaacaaagaatatagtgtctcaggaggttgtgacaacctattacaacatcagtaaatatcgtgaaatgattgatggcgtaaatctggagaaagagttttataaaaagatgctggaaactttttcgttgctggtatcttccggtgtagcgatgcaatctgatatgcgtaaagtacaagtatctatcgatgcattaaataccagaagcattatgtatcagtcgatgttggatgatgaaatgtataaaatgcagaatatgactggtctgaatttatcaccagatcagattcaaagcgatgaaaaattcaacctcttcaaaaaatatatctttgtcgaaagccctgaaaaacttatggacatggtgatgaaatacaacgatgactataagatgcttgtcaatacccgaaaagccgcgaccgaagatattaatgccgcaaaatcatcctattttccgactgtagatcttgtttccagctatgtacagaataacccgagcggnnnnnnnnnntcaacatttttaatgggttcagaaattcagcccaggaaagaaaaatggtggcaagttactcgcaggctaagctgcaaattgacgattttttga

SEQ ID NO: 390718 - DNA, 435 bp, Salmonella enterica
atgggcttttgggatagcataaaaaatgcagcaatcaaggctaagtgtggggtaggtatacacggaggaaactataagcttattgatggtgagacttgtaaatattctaaactatgccctgactgcaatcgcactatacaaaaagaacagcataaatacggagaggaaaattataaatacgatttcaagtgcataactgtaaaaaagtgtatcgactgtggcgctgaacaagaaggcgaaaggcatgaaagatttgttgaaattgcagtcgatgattattgcaatgtgaaagaaagatgcgtgagatgttttacagagcgagttcatggtaaaagacacaattggtatcttagtgggagttctgatacctatcgccattacaaatgttctgtatgcggggaagaaaaagaagaaagaaaaacaagcttccgttaa

SEQ ID NO: 390719 - DNA, 885 bp, Salmonella enterica
atggaaaacaatacgcaaggtataaaattaatcaaagaagctgtggatgttctacctaaagagattcgcaagtctgtctataacaaaattagaaatgttattaattacgaaccagtaatagggattatgggtaaaaccggcgctggtaaatccagcctatgtaattctatctttaaaggtaatgtatgtgcagtgagtgatgtagaagcatgcacgagaaaggttcaggaattaataatttcatttggtgatagaacaattaaaataatagatataccaggtgtaggtgaaaatgaagctaaagatatagaatatgaagagttgtataaaaatcttctcccagaattagatctggtgctttgggttgttaaaggtgatgatcgagcattttcagctgatgagcacttttataaaaatgttttaaaaccagttggtggtgatgaaaaagtgttgtttgttttaaaccaagtcgacaagattgagccattccgcgaatgggatgaagaaaaacaccaaccatcaccctcacaacaaataaatattagaaaaaaggaagaatacttaatagaacgattcggttttaccaaacatcccgttatatctgtatctgcgaatgaaggttataacatttcaaggttagtggaggcaatagtaagatcgctcccaaaggaagcacagagcggagtggtgcatcaagtaaaagacgaaataaaaacaaaagaaattgtagaaacggcaaaggacgggttcgcagacaccgtagatagagctattgatgatataatagacaccgtactacctaaaccaatagcgtcagtggctaaagtcgccaagaaagccattgtttctgtagctaaaagtgtttggggattgatcttcggataa

SEQ ID NO: 390720 - DNA, 351 bp, Salmonella enterica
atgtgcgctgccgtcactgctgcgggtgacttccgtggtacgtatccagccctgcacaggccggaactccttgcgatccttcagtcgctggaaagctgcattcatccggttcagtatctcgcccagctccccgatcgcacagttgcgcacggtcagggtcaggaacatccagcgggcatcagggtaatccgccacgatacgcggcagggactggtagaaacgggcttgccacatcagggagcgcctccactggcagacaggacagtgccggacacggcagaaatgcgcctcacgcagcctcagacgcgtttctccggtttccttgagggtagaccacccgaaacgcaataa

SEQ ID NO: 390721 - DNA, 237 bp, Salmonella enterica
atgtgggaatgtcggaccgcgcacgctcgctcagacattccccacctggtcagggcttcgccccgacaccccgccaacgcctcacggcacgcgaaaaaattccgcgtaccgctcaccgttcttgaactcgtcaaacagaaaatcgcggggccccgcgcctccggcgtgggttccgattttgtgattgacgacggcacggggaaaacgctgggtatggtggttggtgtcacggagtga

SEQ ID NO: 390722 - DNA, 885 bp, Salmonella enterica
atgaaattttatactccattgagataccccggcgggaaaggtaaattatcttactttttgaaagatgtcattgaacaaaactcgttgaatgatggggcttatgctgaaccatatgctggcggtgcaggggtagcattagaattgttattggaggagtatgtccgtaaaatttacattaatgatgcagatttcgccgtttattcattttggtcgtctgtaataaatgatacagataatctttgcagacttattagtaatgcaaaaataaatatggatgagtggcgctttcatcgttatgttatctctaacccgactgagtttactaaacttgaaataggattttctgcattctttctaaataggactaatcgctctggaattttaaaggctggtgttatcggcggtaaggctcaaaatggtaaatggaggatggatgttcgttttaatagagatgatttaatatcaagaatcgaaaatatagctaattataatcaaaggatagttgttacaaatcttgatgcgctggagtttcttgaagcattaaatttcttggatagtgtagataaagctgataaaaataagactcttctatatttggatcctccatattatattaagggacaagggctatatagaaacttctatgagcatgatgaccatgtattggttatggaaaaacttagggatataaattttcctaaatggcttgtatcttatgataatgcaaaagaaatcaaagatatttatagcgactttccacaggttgaatattcattgcaatataccgcacaacaaaaaaagtctggagaggaggtgatgatattttctccagaagtagtgattccagatactcttaaaggtgtatcgatgaaaatctctgcgtga

SEQ ID NO: 390723 - DNA, 1500 bp, Salmonella enterica
atgaatcaaataaaatcaatgaatatcaataagctcttactggatgttgataacccacgcttccctacatcagcagaaaatcagcgtgatgctatagcaaaaatgcttgagttacagtatgagcgtatttatcgattggctaaagatattgtcgctaaggggctggatccatctgaaaacatcttagtttatcctagtgaagaggaagatggatttttcattgttgcagaaggtaatcgtcgagttacggccctaaaacttttattatcaccgaagttagctccgaacgagagagcaaggaaagcctttgaaaaacttaagattacgcaagctaaagatattaaaattatagataactgtgtactttttgatgatgatgattacgagcattgggtaaatcttaagcatacaggccaaaacggtggtgtcggtagggtcgagtggactgcaccagaaaaagcccggcatatggctcgtatgggtaagcagtctttcggtaaccaaatacttacttttttagatttacactctgaattctataaagatattttagataaaaagaaattattgaaaattacaaacatcacccgtcttttcggtgatttaaaagtacgagattactttaatttaaaaagtattaatggggtgttatattcctttcagtctctccaacgatttaaagaacagcttaaaaacattttaaatgtaatggttgaggaagatgaaaaaggtaaagcttgctttactgttaataggattcgtagtcaggatgacagggttacattcattattgaacaaaaaatcaaagcgtcagataatattctcaataaaccttggagtttacttgatccaaatccggtagtttctgaaggacctgataacattgatccagatgataatgatactccagatacacaaggaagccgttcaccaggggggagttcctttagtggggaagatggcaaacatgatagatattataaagataaggacgaatcagattctaagcctgaacaggatgacgaaccaaaacctaaaaacaagggcaaaaacccacctaagatggatcgtaataatttgattccgtcttatgtgaaatttaattttagaggccataaaaagtgttctcgtatatataatgagcttaaaactcatttgacgtttgacactactcccaatgcaatttcaatcttattaagaatatttattgacctttctgttagtgcatttgtcgaagataataagatagaggcaaaggactcaaatagaaatccgggtcttcatgataaggttataatgtgtgcgcattttcttcgcgataataaaaagatgaccggaagtcaatgcacagccgtaataacttattcgagtcaaataactaaacataatggttctttgcaacagtatgtacataatcctcacttgattctctcaaaagaggctgtaaacacagagtgggataactttgaattgctactcagccttatctggagtgattga

SEQ ID NO: 390724 - DNA, 225 bp, Salmonella enterica; identical to SEQ ID NO: 377187

SEQ ID NO: 390725 - DNA, 186 bp, Salmonella enterica
atgcaggtgcatgaaccgactcagggcgcgccggtactggtgttgcgtgggataaaaaatacggggatttgcatgcaaaaccatgcaccttatgaatgcatggcttttttcgggaaaaatagcggaattttcggggatttttttgcgtgctaccgtgtggccagttctgcacgtcggcgggtgtaa

SEQ ID NO: 390726 - DNA, 207 bp, Salmonella enterica; identical to SEQ ID NO: 372435

SEQ ID NO: 390727 - DNA, 312 bp, Salmonella enterica
atgacgtatcccgcaaaaaagcgttttatctttaccgtcctcatgcacactcaccgtggacatccacaaattattggcgtgatgaatattcttggtatcccaactgcatacgccctttccctcataagcactgggaaagatatcttttgcgccgattttcatctctgctgcagggagctgcgtgttggtatagtgatgcccgttatgcgtgagtgtattttttatggtttgccagggctggttattaagctgcttgacctgagcatctctaaacgctactgccgcaaagcgatgagcttcttttgcaggtaa

SEQ ID NO: 390728 - DNA, 471 bp, Salmonella enterica
atggtgggatcgatcgtaaccgtatcgatagtgaatctttcctgcgtttgcgcagtatttcccgcgacatctgttgcgacgacgttgatggtatacatgccatccggcagtatattcggcgtcacactccagttgccatcagcgccaaccgtaatcgtttgttttaaaacctcccgacctgacttatcgtcaacaatggtaatcaccagtttcgcattgggctctgcagtaccttcgaatttgggattttgcttattcgtaaggttatcgctattggaatttccggtatcagacgctggctccattctgacactgacgcttgtcgtggtatcaatggtaaagggcagcttagtttcagaagtatttccggcaatatctctgaagacaacaacggcttcatatacgccatcgtttaacgcaacgggaacctggaattcccagaggttattgccatttgccgtaaccggataa

SEQ ID NO: 390729 - DNA, 417 bp, Salmonella enterica
atgctcaatactcaattccacgtgtcgaacatctttatcgatactccccaacacaaatactggctgagtgacgctggtcagattatcgttcttattctgtccggtatcctgatcgggcgccagctcaatggttggcgtcatcaacgtgatgtcgatagtgaaattgagcgtctccgtcatcttattacccgcaccgtcagtcacttccacggtcagggtatgctgtccctctggcatatccgtcggccaggtgtaatcccaaatgccagccgtcgaactcttgattgcggtaacccaggtcgtgccgccgtcgatactcagaagaaccttttccacatcatccggtaccgagatctggaactgcggacgcacatgttttgtcacattatcgccagggacgccgctatcgttgactaa

SEQ ID NO: 390730 - DNA, 138 bp, Salmonella enterica; identical to SEQ ID NO: 379500

SEQ ID NO: 390731 - DNA, 339 bp, Salmonella enterica
gtggcggtagccgagcaggttctggccgcgcagcagcatctgcaggggagtcttcggcatggcttttttgagctcgcgcaggcgcagccacgggtcctcgccgagaaagcggatgcaggcgtcaaaggtggcgccgccccagcattcgagggagccgtagcccacgtcgtcgagcgcggcggcaatcggcagcatatcgtcaaggcgcagacgggtggcgaaaagggactggtgggcgtcacgcaggacgacgtcggtaatggaaatggtcatggatccctccgggaattaagcgttaaggcggtgatggtgaatggcggcggcaatcaccggctttaa

SEQ ID NO: 390732 - DNA, 1212 bp, Salmonella enterica
atggacgaggtacagaccaaagcgccgctggacagtccggtattcactggaacgccgaccacaccgacgccgccagatgacgctaagggacttcagactgcaaacgctgagtttgttcgtaaactgattgctgcactggtcggttccgtacctgagtcgctggatacgctgcaggaactggctgacgcgctgggtaacgatcctaattttgctaccactatcactaacatgattgcgggcaagcagccgctggacgatacactgacggcgctgtcaggaaaaagcattgaaggtcttatcgaatacgttggtttacggagcacaattgataaggctgctggtgcgttgcctgctggtggtacggctgtcgcagcgaacaggcttgcatcacgcggcgcgcttccggcactgactggcacgacaagaggcagcgatggcggcctgataatgggcgaggtctacaacaatggctatccgacgcaatacggaaatattttacgtctgaccggaaccggtgatggggaaatcctcattggctggagcgggacaaatggtgcgccagcgcccgcatatattcgcagccatcgagataccgccgatgctgagtggtccgaatgggcaatgctttacaccacactaaacccacctccggattcgcatccagtaggggcggcgattgcatggccatctgatgctactccggcaggttacgctctgatgcaggggcagtccttcgataaatctgcttacccgttactggctatagcgtatccgtccggcgttatccctgacatgagaggctggacaataaagggtaagcccatcagtggacgtgccgtattgtcgcaagaaatggacggcaataaatcgcactcgcacaccgcgcgggcgcaggatactgacttagggacaaaatctacctcatcttttgattacggcacgaaatcgaccaataccacgggcaaccatactcaccagttcggcggttatatcaattcatactggggagactccaatcacacctcatttcagcctggaggtggtgcatggacacaggccgctggcgaccatgcgcatacagtttatatcggaggacacgagcacaccatgtatatcggtccacacggtcacgtcgttattgtggacgcagacggtaatgcggaaaccacggttaaaaatattgcatttaactacatagtgaggctggcatga

SEQ ID NO: 390733 - DNA, 189 bp, Salmonella enterica; identical to SEQ ID NO: 376354

SEQ ID NO: 390734 - DNA, 453 bp, Salmonella enterica
atgatgagaatcagtgaaaaaggcattaccctaatcaaagagtttgaaggttgtagcctgaaagcttatccggacccgggaacggggggagatccctggacgattggttatggctggacccactctgttgacggtaagccagttaagcccggaatgatgattgacgaggctactgccgagcgcttgcttaaaactggtttagtcggttatgaaaatgatgtgtccagactggttaaggtcaagttgacgcaaggccagtttgatgcgctggtgtcgttcgcgtacaacctcggcgcccggacattatccacatcaactctgctgcggaagctaaacgctggtgattacgctggcgccgctgatgagttcctgcgctggaataaggctggtagcaaggtactgaacgggcttacccgtcggcgtgaggcggagcgtgctctgttcctgtcatga

SEQ ID NO: 390735 - DNA, 336 bp, Salmonella enterica; identical to SEQ ID NO: 370400

SEQ ID NO: 390736 - DNA, 696 bp, Salmonella enterica
atgctgatgacgaggcggctgttgcgctggccgctgctgtacttgctgacgttgcagcgtttgtctcagatatttttgctgcggctgccgatgcggctgccgccttttccgacgctgccgccgcagtggctgacgcacctgcatcaccggcactggaagccgcctgcgtttctgacgtcttcgcggcggtttcggatgctccggcgcgcgctgctgatgtctgcgccgccgtcgcgctggcggctgcggcagcagctgaatcgccggcggcagtacgggagacatctgcattcgcttcagatgttttcgctgcggctgccgatgcggctgccgccgttctggctgtgtcagccgacgccgcgctggctgatgcctccccggcttttgtggtcgccgtacctgcgctgctctccgcagatgctgcggatgaggctgcctgtgtggctgatgcttctgccgctccggctgcattcactgctgccgtggcgctttccgctgcctgacctgctgatgtctgcgcctgttcagatgcctgccctgcggcggtggcattccgcgatgcctccgatgcctggcgggcaacttcttccaccatcgcctcaaaacgtcgcagcgcctccgggcggacgtcgtcttccgtcatggcccccagaaaatcattcagggtgcccggctttgaatcatcgtaaaccgtaa

SEQ ID NO: 390737 - DNA, 291 bp, Salmonella enterica
ttgctggtcgggggttatacacgggatgcaaataccgatactgtccaaagtattccgtttttaggcaaattaccgcttattggtagcctgttccgttattccagtaagaataaaagtaatgttgttcgtgtgttcatgattgaaccaaaagaaattgtcgacccgttaacgccggatgccagcgaatcggtaaacaatattctgaagcaaagcggtgcctggagtggggacgataagttacagaaatgggttcgtgtttatctggatagaggtcaggaggcaattaaatga

SEQ ID NO: 390738 - DNA, 663 bp, Salmonella enterica
atgaaaatgtattctgtgcatggtatcaaggattttattatctgctgtggttataaaggatatgtgattaaagaatattttgcgaactacttccttcacatgtcagatgtaacattccatatggctgaaaaccgtatggaagttcaccacaaacgtgttgaaccatggaatgtcacattggttgatacgggtgattcttcaatgactggtggtcgtctgaaacgtgttgctgaatacgtaaaagatgacgaggctttcctgtttacttatggtgatggcgttgccgaccttgatatcaaagcgactatcgatttccataaggctcacggtaagaaagcgactttaacagctacttttccacctggacgctttggcgcattagatatccaagctggtcaggtccggtcattccaggaaaaaccgaaaggcgatggggcaatgatcaatggtggtttctttgtgttgaatccatcggttatcgatctcatcgataacgatgcaacaacctgggaacaagagccattaatgacattggcacaacagggggagttaatggcttttgaacacccaggtttctggcagccgatggataccctacgtgataaagtttacctcgaagggctgtgggaaaaaggtaaagctccgtggaaaacctgggagtaa

SEQ ID NO: 390739 - DNA, 483 bp, Salmonella enterica
atgcaacaggcgatagacaacgatgaaatgcccttatcgcagtggttcagacgcgtggcagactggccggatcgctgtgaacgggtccgtattttgctaagagccatagcctttgaacttagcatatgcatcgaaccttcggagcaaagtcgtttggccgcagcattagtacgtttgcgtcgtttgctgttattccttggccttgaaaaagagtgccagcgtgaggagtggatttgccagttgccgcctaatacattactgccgctactactcgatatcatttgtgagcgctggcttttcagtgattggttgcttgatagacttaccgctatagtttcttcatcgaagatgttcaatcggttactccaacaacttgatgcgcagtttatgctgatacccgataactgttttaacgacgaagatcaacgtgaacaaattctcgaaacgcttcgtgaagtaaagataaatcaggttttattctga

SEQ ID NO: 390740 - DNA, 357 bp, Salmonella enterica
ttgaatatttctgatatgagcgtagtgcctgtaagcactcaatcttatgtaaagtcctctgcagaaccgagccaggagcaaattaatttttttgaacaattgctgaaagatgaagcatccaccagtaacgccagtgctttattaccgcaggttatgttgaccagacaaatggattatatgcagttaacgataggcgtctcggatgattttttcagccttacggtaagcggagcgtcgattatcttgccagaatatcaggcgcagcatcgcaagcgcttaataagctggataacatggcatgaaggttcatcgtatagtatttcttactgtccttacgttctttcttacggcatgtga

SEQ ID NO: 390741 - DNA, 243 bp, Salmonella enterica
atgtcaatccctgggttgcaatacagtaagattagtatcttgatgcagcctgctgaattcagaatggtacctgatgtacccgcgagacaaacattctggattatggacgtgatcaacgccaataaagggaaggtggagaagtggttgatgaaatacccttatcagttgatgttatcgttgacaggactgttattaggagtgggcatcctgatcggctatttttgcctgagacgccgtttttga

SEQ ID NO: 390742 - DNA, 408 bp, Salmonella enterica; identical to SEQ ID NO: 388445

SEQ ID NO: 390743 - DNA, 174 bp, Salmonella enterica; identical to SEQ ID NO: 388454

SEQ ID NO: 390744 - DNA, 810 bp, Salmonella enterica
gtgattatttccggcgatagaaccgtcaacacgctcaccggggactccagtgtgaccgacggtgccaccggcatggttatctccggtgacggcaccaccaacaccatttcgggccactccacggtggacaacgccaccggcgcgctgatttccggcaacggcaccaccaccaatttcgccggtgacattgccgtgagcggcggcggtaccgccatcatcatcgacggcgacaacgccacgattaagaataccggtacctctaacatcagcggcgcaggctccaccggcaccgtcattgacggcaataacgcccgcgtcaacaatgacggtgatatgaccatcaccgacggcggcaccggcggccacattaccggcgacaacgtggttatcgataacgccgggagcactaccgtcagcggcgcagacgccacggcgctgtatatcgaaggcgacaacgcgctcgttatcaacgaaggtaatcagactatctccggcggcgccgtcggtacgcgcattgacggcgacgacgcccataccaccaataccggtgatatcgcggtggatggcgcgggctctgccgccgtgattatcaacggcgacaacggcagcctgaccctggcgggcgatctgctggtcaccgacggcgcgatgggcatcatcacctacggcaccggaaatgaagcaaaaaataccggcaacgccaccgtgcgtgatgcggactcggtgggttttgtggttgcaggcgaaaaaataccttcaaaaacaaaggggatattgacgtcagccttaacggcaccggcgcgctggtga

SEQ ID NO: 390745 - DNA, 510 bp, Salmonella enterica
gtgaccccgcccgacgatagcggcgatgacgatgtgaccccgcctgacgatagcggcgatgacgatgtaaccccgcccgacgatagcggcgatgacgatgtgaccccgcccgatgatagcggcgatgacgacgacacgcccccagatgactctgttattaccttcagcaacggcgtcaccatcgataaaggcaaagacaccctgaccttcgacagcttcaaactggataacggcagcgttcttgagggtgccgtgtggaattattcagaacaggacaaccagtggcagctcaccaccgcggacggtaaaacgctgaacgtcaccggctgggacgtgaccgacgccaatgccgccgtgattgaaggcacccaggaaaacggtctctactggaagtacgacagccggggctatctgattacgacgataacaccaccgttatcagcggcgatgaccaggcgcataattccgatcgcggcatggatatcagcggccaggatcgcaccggcgtga

SEQ ID NO: 390746 - DNA, 147 bp, Salmonella enterica; identical to SEQ ID NO: 388451

SEQ ID NO: 390747 - DNA, 642 bp, Salmonella enterica
gtgggattttttaactcattgtttactaagaaagagtcgttaatgctgtcgaataaatgggaattctttataacaacggtggatgaccatgttacgggtatacgtgtggatatcggcgccattcaggatgaaaaatttgatcgccttatccataccgggttcttacgtgttcattacaccaactgttatgaaaatggtttaccgcagcccgatgaaacacagcgtttaaatcgtatagaggactggcttgatgaaaaggggaagacgtttccgatctggctggtgggtgtggttacccaacaaggctggcgcgattttgtgttcatgtcggaagaggatcttaactgggaaaagacgctggataaattgctcgctggtggcccggaaatctcttttagttatagagagagtcacaatgataaaggaaacttttaccgccagttcttgtatccaacccgatacgactggaactggatacacgattcccgtgtgtgccggggattacaggaacaaggtgatgatctgacgcttccgcgcgcattattatgcgacattgcctacagaggtcgcagcgcgcgacttggcgcaagatattgctgcattaccgtatggcataacgctggtcagtattcgaatgaatga

SEQ ID NO: 390748 - DNA, 954 bp, Salmonella enterica; identical to SEQ ID NO: 388456

SEQ ID NO: 390749 - DNA, 495 bp, Salmonella enterica; identical to SEQ ID NO: 388467

SEQ ID NO: 390750 - DNA, 1434 bp, Salmonella enterica
atgaacgtagttaataatagccgtgatgttatttattcatcaggtattgtgtttggaacgagtggggctcgcggtcttgtaaaagattttacacctcaggtatgtgctgcttttacggtttcatttgttgccgttatgcaggaacatttttcctttgataccgtagcattggcaatagataatcgtccaagtagttatgggatggctcaggcgtgtgctgctgcattggcggataaaggcgttaactgtattttttatggagtggtaccaaccccagctttggcctttcagtctatgtctgacaatatgcctgcgataatggttacgggaagtcatattccattcgagcggaacggcctcaagttttatcgtcctgatggtgaaatcacgaaacatgatgaggctgcgatccttagtgttgaagatacgtgcagccatttagagcttaaagaactcatagtttcagaaatggctgctgttaattatatatctcgttatacatctttattttctactccattcctgaaaaataagcgtattggtatttacgaacattcaagcgctgggcgtgatctttataagcctttatttattgcattgggggctgaagtcgttagcttgggtagaagcgataattttgtacctatagatacagaggctgtaagcaaagaggatcgggaaaaagctcgctcatgggctaaagagttcgatttagatgccatattctcgacagatggggatggtgatcgccctcttattgctgatgaggccggtgagtggctaagaggcgatatactaggtctattatgttcacttgcattggatgcagaagccgtcgctattcctgttagttgtaacagcataatttcttctagccgcttttttaaacatgttaagcttacaaaaattggctcgccttatgttatcgaagcttttaatgaattatcgcggagttatagtcgtattgtcggttttgaagccaatggcggttttttattaggaagcgacatctgtattaacgagcagaatcttcatgccttaccaactcgtgatgctgtattaccagcaataatgctgctttacaaaagtaggaataccagcattagcgctttagtcaatgaactcccaactcgttacacccattctgacagattacaggggattacaactgataaaagtcaatccttaattagtatgggcagagaaaatctgagcaacctcttaagctatattggtttggagaatgaaggtgcaatttctacagatatgacagatggtatgcgaattactttacgtgatggatgtattgtgcatttgcgcgcttctggtaatgcacctgagttacgctgctatgcagaagctaatttattaaatagggctcaggatcttgtaaatacaacgcttgctaatattaaaaaacgatgcttgctgtaa

SEQ ID NO: 390751 - DNA, 414 bp, Salmonella enterica
atggctcacccacatttattagcggaaagaatttcccgtctgagctgcgcccttgagaagggactgtatgaacgtagtcatgccatacgcctttgcctactggcggcgttaagcggtgagagcgtctttttgttgggcccgcccggtatcgccaagagtctgattgcccgccgcctgaagtttgctttccagcgcgcccgcgcttttgaatatctgatgacacgcttttccacgccggaagaggtttttggcccgctctctattcaggcgctgaaagatgaaggtcgctatgaacgcttatttcgtttatacacgtcacccttcacgctacctccttgtcggctgcattcgcttaccccagtcacacgtttaagtcagtgccaggggattcactcctttgccgccttgatgtag

SEQ ID NO: 390752 - DNA, 366 bp, Salmonella enterica
atgggcggaaagaaccgggcaacacccgctcatctgagtccggacgatgctccggcgcaggatgaacaacgcacgctgcgggagccgttgtttcaggacgcctgcgcctgcaattttttcgcgctctctgagctgctgcaccggctggcatcagaaggcggcgaaacgccagtgttatccctggatacccctccggcgcaggaaaccattcgtttccaggcggacgccagcctgggatttccggtaagcgatgtcagcgcgctggagcaggatgcttccgggttgttccggatgaccaccacctttatgggattgcagggcagccagtcgcccctccccggctattaccttgatcacctggcctag

SEQ ID NO: 390753 - DNA, 660 bp, Salmonella enterica; identical to SEQ ID NO: 388473

SEQ ID NO: 390754 - DNA, 402 bp, Salmonella enterica; identical to SEQ ID NO: 388479

SEQ ID NO: 390755 - DNA, 273 bp, Salmonella enterica
atgcagagcatatcgcttttttatttgttcccggctcagttcagtaaagacggggcgagccatcagggcattataaagttgctcgtatttgtaaaaaatctcccttcgttgagttgtgctgaacacctgttctgcatcaagaaccccgatgatttcatcatagtgtttctgttcctgatgtctttcatcctcacgattaccgaaaaagcgctgatggctggaaaaggtcgcagccccccgtatagcagcccgcctgttccctttactgaataa

SEQ ID NO: 390756 - DNA, 639 bp, Salmonella enterica
atggaaactcctgtttcacgcagtgcgttgtatggaaaactggccggcccactattccggtcgctggaatcggcaacggcattttgcaaactacgctctaatccttgggttgagctgactcactggctgcaccagttaacacagcagcccgataacgatattctccacgttcttcggcattaccaaatccctctttctgatgtggagaaagtgttactccggcaactggatatgctgcccgccggggccagcgccatcagtgatttttctcaccatatcgatctctgcgttgaaaaggcttggatgctggcgagcgtccgttacggcgataacaaaattcgcagcggctggttgctgctggccttgttgaccacgccagaactgcgtcgggtactgagcagtatctgcgcgccgctggccacgcttccggttgatgaactgacggaaattctgccctcgttgatcgaaacatcgccggaagcgcaggagcgcccttacgacggctcctgcctggcatcagccattcccggcgaaagcagccaggcgattcccggcggcgggcaggacggtaaatccgcgctggcgaaatactgtcaggacatgacggcacaggcgcgcgacggcaaaatcgcccggtga

SEQ ID NO: 390757 - DNA, 372 bp, Salmonella enterica
atgaataagagcactctggcaatagtggtgagtatcatcgcatcagcatctgttcacgccgccgaggtttacaataaaaacggtaataagcttgatgtgtatggaaaagttaaagccatgcactatatgagcgattatgacagcaaagatggcgatcaaagctacgttcgttttggttttaaaggcggaacgcaaattaacgatcaattgaccggctacgggcgctgggaagctgagtttgccggtaataaagccgaaagtgattcgtcccagcaaaaaacccgcctggcctttgctggcctgaaattaaaagatatcggttcttttgactatggacgtaacctgggcgcgctgtacgatgttgaggcctag

SEQ ID NO: 390758 - DNA, 1068 bp, Salmonella enterica
atgtctcaagagtgggtagatcgcttaggcactctgagaggtaactttgaagaatttcttgcgaagacccgatcacttgtatgtgggacttgtgtgggtctaggacgctcacaatttggtgtagcaaaaaatcgctatgattgggtgatagtcgacgaagctgctcgtgcgacacctggcgaattggctatagcaattcagtcgggtcgcagggtgttactggtcggcgatcatcgtcaattgccacctttgtatcctgaaccagtggtgcgaaaaatatcgatagaactaaattactctgatcgcgcggtactaacacgtagtgattttgaacgtgctttcgaatcagattatggtaaacaagtcggagcaacattacgtactcaatatagaatggccccaccaataggtgaaatggtttcagcttgtttttatcccaaaccgttagaacctggacgtggaaatccagaaccttggtttaatcaattacctaaaagattaagttctattattacttgggttgatacttccgatgctgggggagaatcttatgaaagagcaaaacatcctggatttgacaatccttatgaagctagagaaattattgatacgctgcgttcaatatgtacagcagaatcattcatcaaatatttaattgatgaaacttcagatgaggaaaaaccaattggtgtaatttgcatgtatgcaaatcaagaacgcctattgcaacgtttacttagcgaacaagattgggctactggttatagacatcttattaaaattgatacagttgatagttatcaaggtaaggaaaatcggatcattatcgttgcaacgacgcgcaataataatcagtgtattcaagggttccttagcagctcggagcgaataaatgtggcgatttcgcgtgcaatggatagattagtaatcattggggctgctcgtatgtggcgtgagaggcatcaaacttcagcgttaggccgtgtattaaaccacattgaaacacatcgtgatgggaataacttcaatttggttcaggcattagccattgaggagggacagaaatga

SEQ ID NO: 390759 - DNA, 885 bp, Salmonella enterica
ttgctatccatccagaacgtcatagccgataccgatccgttctttcttctccgtttcttccaccataccgttctgattgaagaaggaacaacgctggcaagtatctttctggcaatagaaccgtggaaggctttgttagcagcttatctggacagagatgttggtgcttatatagatgaggtaagaaaaccgtccgggccaacgacatgggatattgaatggattgggattgatcgccgtagcatggtttaccgcgcttataaacgtcaggagatgcaggatggagaggatttttctgactatttaaaccgggaacgcgttctgacagatgaatttgagattgaaagtggctgtgaggcttctggcttcattaaaggtgataaagaacgatggagcatcagtggtgatgttcacgagataaagaatctgcctgtaatcctctatagaaaacagacattgatgacttcaccgaaagacggtttgttgaagaaaaacatatcgggtgtgaagagttcgaagcacagttgcttcatttatggcgatacctcgttttctttcagtgaggttatggaagccatcttcattagcgggctgttcttctatgcaccaaaagacgccgccagcagtcttgatgagctgaaagcgagtctggctgaactggaagaagaacgcgctgaaaatccaaatgcggagtcgactggcaatgaaacagatgaagaacctacaatcgttgtagccgaaggtgcatttgattcgctcgctgctcacatggagtctgaaaaagcggagtggcaatccattaagaagttatgcaagcaagaaggtgggctgcccatacgcattggcaacattaaaatgtctgagtctattcagattataccttag

SEQ ID NO: 390760 - DNA, 954 bp, Salmonella enterica; identical to SEQ ID NO: 21439

SEQ ID NO: 390761 - DNA, 1053 bp, Salmonella enterica
atgaaagatacaattactccactaaattacactaaggaagccataaaagacctgtctgtcatggaaaaaggattaaggtcaaatgcacctcttacatcatatattatgcgtcaggtcattgatatgctggacagtagtgttaagttcatcttaccgaactgctgcgatattattgaaccagaagaataccgccagacgcatttcgatttggcacgattaccatatccagttgtaacatttgaaataccatggttcaaagacaatgtagaaacccaaataggtgattttaatatatcaccatcatccagaagaattgccctgtgctgggaggccagacagagttttgaacccatcccgggatgtaattcaatccttaacacttatattgatggcggagtgtttatccttcctgtttcatggtctgatgatttaaaaatatggattcttggtgtcggtggaatgtttttcccatataacaacaaactcactaaatacgaacctgacaggacattgcctgcatccaggcttgtaatcgacacattaaaagagaatggagtagccaaatataatgcagcacacttcaaagcagagccttttataacaagcatggaatttaaagatgatttgataaagcaggtgggaagtattgaaagattatatgcgcaaattattatggatactcgcgatgaactacaggctttcatacaggcatgtagcgtgttaaattgcgaaaatgtgtgtcctgtcacacttagcactaaaccagaaagaaaattcataaatggtcgtaaagttcagccacctgaaaaaaacaagcgcccttcatatacttataaagtattgcaactgtctgaaactaaggtgcaaagtaatcatactggaacaggaaaatccggtgggacgaaaaggatgcacttacgcagaggacatattcgcaggaaaaataacaaactaatatggatcagaccagcaatgattaatgcaaacagtagagcaggcattgttgataaggattaccagataaatataagaaaagaagaaaacaaaccttag

SEQ ID NO: 390762 - DNA, 801 bp, Salmonella enterica
  misc_feature (761)..(767): n is a, c, g, or t
atgattactcttcgcagactgaatgaaatagccattactcgaggtaatgatatttgcattattgataaagaacgacaatatacgtggtatgatattattcgccgtactgagtctcgcattgtctttctccgtcgggcatttaaccctgagcagttacggtctgtttgctatttatcaaaaaatagtgtcgatctaatttgttggttggctgcttttgctactttaggaattcctgcaaacggtcttgactactcattacctattgagaccttgagggggttgctaattaaaattaatcctggactaatgttagtctcttttagcctttactctccggatgaactcaataagttgcatgtccgtactataaccatgctggcagtcgatgctccaactgatccagttattggcagtataggtgaatttcatcaccctgaattggaaagtctacttgcgacacatattcctgcaccatttcgctcagtttcactaacttcaggaaccagttcagcacctaaaatcgtattacgctacaactcttttgatgcccggcgtttcgactggtttactcagcgattcaacttcacgcaccacgatggtttcctgcttatcttacccctttatcatgcagcaggaaatggctgggcaaggatgtttatggggcttggggcttctttacatttggtggatcaggatgatgaatctgctcttattcctgtctcttatacacatctgacgctgccgacgaatagagaggggtnnnnnnngctcttattcaggcactttctctcaactccgtaa

SEQ ID NO: 390763 - DNA, 201 bp, Salmonella enterica; identical to SEQ ID NO: 290306

SEQ ID NO: 390764 - DNA, 2895 bp, Salmonella enterica
atggtaataactgattatcaagcaaaatactttgcgcaggaattaaccattcgccacgctgaaaatggcgttgataaattgtctcaatctctttttgatgccagtgttgatctcaatccgcaccaaattcatgcggcactttttgcgctcaacaacccgttaagcaaaggtgttgtactcgctgatgaagtgggcttagggaaaactattgaagcaggcttagtactgtcacagtattgggcagagcgtaaacgccgcatattgatcatctgcccggcgtcattgcgacgccagtgggcgcaggaattgggcgataagtttaatttaccaacgcaagtgcttgatgcaaaaacgtggcgcattagtgttaacaatggtcaaactaacccgctagctaatcactgcgtttctattatgtcctatcactatgctgcgcgaatggaaactcagctaatgctggagccatgggatatagtcgtcatcgatgaagcgcacaaactacgtaatgcgcaccgtcgcagtaacaaaatgggtcaaacgcttcgccgagcattagatggcagtaaaaaactattacttactgcaacgcccttacaaaattcgcttatggaattgtatgggctttcaaccatcatcgacgatcaaatcttcggcgatgagcgaagcttcaaacaacactttgtcaataatgaaagtgcactagggcatctaaagaaacgacttaccgggtttatacagcgaaccttacgaaaagatgtactcgaatacgtccgctatacccaacgtcaaacactcaccgtaccgtttacaccctctagtgctgaaatggcgctttacgaaggtattaatgccttattggaaaaggacgagagctatgcactaccaaagagccaacgtcatttaaccggccttatactgagaaagctattagcatctagttcgcacgcagtgctcaacacactcgaaactataaagcgccgattggttgacttgaaagtacaggctaaatcggatctcgatattatcggtgagcttgttgagagtgatgatttaggagaagagtacagcgagtatgtagaagaaacacaaagcaatacccctgagagtgatattgactttgagttactcaatgctgaaatagccgagcttgagcattatatcgagcaggctaaatccattaccaccgacagtaaaacccaagccttgctaacggcgcttaatcaagggtttgccaaaatggaggagatgggtgcgccgcggaaagtcatcatttttaccgaatcgaagcgcacgcaagaatacttagctcgtttcctcgaggcgaatggctttgctgataaattagtcacctttagtggcagcaataaccatccagaagcaaccaaagtttatcagcagtggttagttgaaaaccaaggtagtgataaggttagtggttcaccacaaattgaccgccgtaccgccctaattgattacttccgccatcatgccgaagttatgatcgcaaccgaagcagctgcagaaggggctaacttacagttctgttcgttactgattaactatgacttaccatggaacccacaacgggtagaacaacgtattggccgttgtcaccgctatgggcagcaatttgatgttgtggtaatcaacttcctcaacgaagaaaacaaagccgatcaacgtgttttagagttactgactgaaaaattccatctgttcgatggcgtgtttggtgcatcggacgatgtgctaggcagtatcgaatctggtattgattttgaaaaacgcatccaaaatatatacgagacttgtcgacaaccggcagaaataaaagctgcttttgatcaactgcaaaaagagctagaagccgacatcaaccaaaaaatgcgcgagacccagcaactgctgctggaaaatttcgatgaagatattcacgacttactcaaaattcaactcgatgccgcgcagcaacgccttgataaagtaggccgctggttttggcaactcagtacgcatgagcttacagctatcgcagacattgacccaagcaaccatagttttacgcttaatcagagcattaatcaggctcctacaggtagctaccaacttgtacgccgagggccgcaaagcggcagtattgaaaccggtaaactagccaatgcccatgtttatcgtatcacccatccgctgggtgaatgggtgatcagcaacgcgcttaaacgtgaattacctattgccagcgtaatttttgattacagcaaccaccaaacaaaaatcagtatgctagaacccttagtgggttcgtcaggtgtactaagcctacaaaaattcagtgttgaatcactagagcgtagcgaagaccatttactgttcgcagcgcaagacgaacatggcaacctgctaccaagtgaagtcgtgcaaaagctgatgcagcttagtgcctgtgtgcaaagtgaagtaagtgagcaagaacttgccgccttatatcctggctatcaaaatgcgctgcagcaagcgttacagcagtcaagactaggcatcgaaaagcaagttaacgatcgtaatctcagcttcttcgagcaagaggtaaacaagttagattcttgggcagacgatttaaaagaagggcttgaacaatctataaaagagcttgataagcaaatcaagcaagtacgccgcgaagccaaaatagctccaaccctggaagagaaacttgccctgcaaaaacagcagcgccagttagaaagtcagcgtaataaaagccgccgtgaactgtttgataaacaagatgaagtggacgaaaagcgcgaacagcttattgaaagcttagaaggaaaattgaataaaaaaaccaaaacggaagaattatttatcatccaatggagtgttcaatag

SEQ ID NO: 390765 - DNA, 738 bp, Salmonella enterica
atgagcgaaagcaacagaaaccgcccagctcgcaaggccccctacaacaagcctccaaccacttttagcgaacaagttaataagctaataagccgtggtttagtcatacccgatcaaagcaatgccgagttctatctgtcgcaactgaactattatcgctttgcggcctattgcctgccttttgagcaagatcatgccaatcatcgttttcgggacaatacggcctttgatgatgtactcaacctgtatatttttgaccgcgaactacgcctactggtgcttgatgcaatagaacgcatcgaagtgtcattgcgtactcaactggcctaccatttaagccataatcacaacactgcccatccacagctaaatcccgaactgttttataatcccatcatttatggcgctagcattaataaattagagggtgatattccgcgcagtcgtgaagattttatcaagcacctgaaaaataaatatgaggagcttcagcctcctatttgggccgtggtagaactgatgaccatgggacagttgtcaaaatggttttccaacataaaaagccgagcagaccgccaagcaatctgccgtgtgtatggcttagatgaaaaaattatgacgtcattttgtgagcacttatcgctggttcgtaaccacgccgcccaccatgcacgcctatggaatcgtgatttcaccaaaacctccatgctgccaaaacgggggaaaaagcattgctag

SEQ ID NO: 390766 - DNA, 1689 bp, Salmonella enterica
atgagcaaaaccaaattagaactgacctggataggtaaaaacgagcgcaaaaagctagagccgcgcattttattagaagacccaagtaagtcttaccatgccagccaaaaagtcaccgaaaacgatatttttgataataagctgatttttggcgataacttattggcgctgaaggcactagagcaagattatgcagggcaagtgaagtgtgtctatatagacccaccattcaataccgggagtgcgtttgaacactatgatgatggtgttgaacattcattgtggctgtccttaatgaaagatcgcttaagtattatttataatttgttaaaagatgacggttgtatttttgtccacctcgatgacaacgaattggattatttaaaggtattaatggatgagatctttggtagaagtaactttctgagtcgaataacaattgaagcaagagctccttctgcatttagtactgtgaataaaggcgtatttaaagcttctgaatatatcctttggtttgctaaggataaaaccagatttgaagaaaatagggtccgaactaaaaggatgcctgactatgcttataataagtggttagaaaatccgaatgacgatcctagcctgtggtcatttaaatccattcaagatgcttttgaagagatagtcaagcctcgtagcagaagaccagatactctattagaggcatttaacaagtttattgtagagaatgcagggcaagttactcgcctagcaagtattagtgactctaaagcgggagcatcgattgttgagctcaagaaagaatcgttgaaaaataaaggtaaagtattccatatgcctcgtgaagggctcgatgatgtatatgttgtcgatgggcagcagttaatattttattccaagaacgtgacagaaattgatggccaattaagtgcctcaactcctctaacgaacatttggactgatattgcatgggaaggaattgctggcgaaggatctgtaaagtttaatcaaggtaaaaagccggagagattaattaaaagatgtctggaattatcaactgcacctggtgatttggtgttggattccttcggtggttcaggaacaactggcgcagtcgcccataaaatggggcgtcgttggatcatggtggagctaggcgagcattgccacactcacatcatcccgcgcttacaaaaagtgattgatgacgaagatctgagtggtatctcgaaaacagttaattggcaaggtggtggtggttttcgttattacaaacttgctccgactttaattgtgaaagacaagtttggcttggacgtgatcaataaagaatataaccctgaaatgcttgccgaggcggtttgtaagctggaaggttttacctatgcgccatcggaagtgaattggtgggatcacggttattcaaccgagacggatcatatttatgtcaccacacaaagcttatcggtagataaattagaagcgctgtcagaagaagttggcagtgaccgaactttactggttatgtgtggtgcatttcgctgcgagccaggtcgttttgcgaatttaaccttgaaaaaactgccaaaagccattttgaataagtgccaatttggtcaggacgattattcgttaaatgtggcaaacctaactgacgatgcgtctgccgatgacgatgcagcgcaagattaa

SEQ ID NO: 390767 - DNA, 2739 bp, Salmonella enterica
atgaccatggatttatcaaacttaaaacccgagcaattacgcgccatcaacaatgttattggccgtttaagtttacgccagccacagcaagactcgctgcgtgcgctggcggtggcaattagtgcttctgagcacaaactacttaacccaaaacgcgatgtgccggaattattagaaaccttaaaagcgcagtttcctaagctcagtgattttgaacgtgactttccttcactgtgttttgccttggcaacaggggtcggaaaaacccgtttgatgggggcttttattacctatttgtatcaggtgcacggcattcgcaattattttgtgttggcacctaacctgactatttatgaaaagctgatcagcgatttctcgcccgcctcaccgaagtacgtgtttaaaggcattaccgattttgtgctagcaccgccagaagtgatcaccggtgataactatgagagccgcggcgcacaagtcatgggcgatctatttggttcggttcgggtcaatgtgtttaacatcgcgaaaattaacaccgaagtacgtggaggcaaagccccgcgtattaagcgtttagcggaaaccctaggcgaaagctactttgagtatctatcgaacttacctgacttagtgctgctgatggacgaatcgcatcgctatcgtgccgatgccggtatgcgtgcgctcaatgagcttaatccactattcgcattagagctaacggccacaccatttaccgaatcaagtcgtggccctgtgcactttaaaaatgtggtgattgattacccattggcctgtgccatggatgatggttttgttaaagagccggccgttgttactcagcgtaactttgatgccagccaatatgataaagacgaactagaaaccattaagttaatggacggtattcgtttacatgagcaaaccaaggtggatttaatcacttatgcacatgaaaacgatgctaagttagttaagccttttatgttggtgattgcccgtgataccacgcatgcagcagagcttttaaccaaacttgaaacagtgtttgacggccactaccgtggcaaagtcattcaagtggatagcagtaataaagaagaagaaactattcaagcactgctcaatgttgagcatgtcgatgaaccaaccgagatcgtcattcacgttaacatgcttaaagaaggttgggacgttactaacctgtacaccattgtgccactacgtgcagccaacgccagaactctaattgaacagtcaattggccgtggtttgcgtttaccttatggcaaacgtacaggtgttgaagccgtcgatacgctgagcattgttgcgcacgacaaattccaagaaattgttgatgaggctaacgacccgaataacccactgcgcctgaaaacacgcgtattagatcgcccagaagacgatgtaaccaaacaaagtgtgcaggttaaatcgaacctagagcagcaactgactggttcaggtgtaaccgcaaccggtgcagacggtaaccgtgaggtacaagaacctaaagccacttataccacgcctaaccaacaaaccgttgcccgcgctgcattggacgtgatcaagcaatatcaaacacgccctaccgatgcgccgaccagcaaagcattgttaacgactgaggtaaaagcacagatcaccgaacaagtagaagctcagttaacccaagagcaacgggagctatttactgaagaatcggtggatattgcggcgattgttgagcaagtcacccagctcacggtggataacaccatagatattccgcgtattattgtttcaccatcaggtgaagtacgtaccggctatcacccgttcgatttggacattgctgccattaaaggtttaaaacctatcgaccgaactctgattcaacaaagcctgcaagacaatcaccaaaccattcgtggcgaaggcgattcgggcaactacgagccggtgaaacaaaactatattttgaagaagctgttcgattacgacgatattccttacgacgagcaagctgaacttttgtttgacctagccactcaagctgtcaatacactggccgctgaaaacgacgacgatgtggttgagaacattctgcaaaaccagagtgatgctattgcgaagttaattcatgcgcaactgaacaaccacttctttgaagaagcaaccgagtacgtcgtcgatgtacgcagtggctttagtaccttacgtgactgcgcttacaccatagcgcaagaccagccggtgcaaagctaccgtgatacagtacgcgatgtcagtcgcatcaaacaaatgctctttggcggctttagccgttgtctatacccattgcaaaagtttgattcagacactgagcgccgttttgcggtgattttagaacgcgactgcgagaagtggtttaagcctgccaaaggccaattcaagatatattacaaacgcggtagcgagcatcctgaatacgtgccggatttcgttgctgaaaccgccgactatgtattgatgattgaaactaaaagtactcaacatcaaaaccaagacggcagttggaatgaggaagtcaccgaaaaagcccgcagtggtgtgaagtggtgtagtcatgccagcgaataccttgcacagcacggtggcaagccctggaaatacttactcattccgcatgatgctgtgaaagaagctaattcgttggtttacttcacccagcagtttgctaaagctgagtaa

SEQ ID NO: 390768 - DNA, 213 bp, Salmonella enterica
atggctgatgtttcgtatgtagagggtacgcttcgaatagcacccaaaggcttcggatttgtcgaggatacttttgttcctccctttgttataggtaatttaaaaaatgaaacaaaagtcagagcactccgtatcatgagttgggacaaatctaaagctcgccacaactggaaagcgattaagttaacggaactaaattttaatgaatactaa

SEQ ID NO: 390769 - DNA, 153 bp, Salmonella enterica
atggttgatcgcttcctcgccgctctccacggcgacgatggccgccgccatcagcaagtgcgccagttcccctatggtgccctcgctgcgtgtgagcaggtagcgagccatgtccaggggtctgacgctcagtggaacgaaaactcacgttaa

SEQ ID NO: 390770 - DNA, 1227 bp, Salmonella enterica; identical to SEQ ID NO: 148463

SEQ ID NO: 390771 - DNA, 390 bp, Salmonella enterica
atgcatcgccactcccacgcgagaacactgatgtttgccaacgccgcttccgtgctcactcaagcagttgttcgcatcttgaagtttggcgttttactggcaagcagttcgttcaccgggtgcagcgtcatgtctcaatctactatcaccggtttgggtgcttcaacgaagtcggcgtgtctgtcacactctctggaattctggcagcagcagcaaaaaatcaccgtggcccgccctcacctcaacctcatctgtcgtgtgtttccagggcttgccaatggtcaaaaacctaactgtgcgttcaacgtggacgccaacagcggccatgcctgcggcattttattggccgctgttggtgccctgcgcccttcgggctccggcgccagttaa

SEQ ID NO: 390772 - DNA, 573 bp, Salmonella enterica; identical to SEQ ID NO: 263951

SEQ ID NO: 390773 - DNA, 855 bp, Salmonella enterica; identical to SEQ ID NO: 315142

SEQ ID NO: 390774 - DNA, 333 bp, Salmonella enterica; identical to SEQ ID NO: 266550

SEQ ID NO: 390775 - DNA, 621 bp, Salmonella enterica; identical to SEQ ID NO: 266551

SEQ ID NO: 390776 - DNA, 261 bp, Salmonella enterica
atgaacactctttcagccaatgaagcaaaaattcactttggagatttgttgctcaaagctcaacaagctccaatccaaattaataaaaatggcaagcctgtggccgttgttatttcagctgatgcataccaaagtatcgagacactaaaattacatttgcttcaatccaaagcggtgaaagccataactgacatcaaaatgggcaatttggttgatggtaataccttttttgatgagctggccgcagggcagtatgactaa

SEQ ID NO: 390777 - DNA, 312 bp, Salmonella enterica
atgccggtaacttatcatttaacgcccgatgcacaatctgatctgataggtattcaccgctttacgttagcccaatggggaacgactcagtcgaagacctatttatcaggacttagacaaacgattcaactgctggctgaaacacccacccttgggaaaaatagacccgaggtacgcatgaatgtgtttagcttcccttattcaagtcatgtcatctattacatccaacatgagcatcaattcgttgtatttgggatcttacataaaagtatggttccacttgcacatctcgcggagcgggaaattatttga

SEQ ID NO: 390778 - DNA, 1497 bp, Salmonella enterica
atgaaaaatgatgttcggcggctatctattttgtcaactgatgaaatagatgaactgtttggattacctcatttctcagatgatgatcgtcgattatattttgacttaagtgctaaagagcgcgagctattcgacaatacccgaacgttttctgtggcagcccatttagtattgcaactgggctatttcaaagccaaacggcagtttttcagttatgaacaagaatcgtcagtactaaatgacttggattacattgccgcgctgtactttcccaccaaaacgctttcaagactgaaaagtccctcaagaccgattagggctgaacaacaacgagcaattcttgatttattccagtataaacaatgtgataatgaggtaaaagttgatttggaagataaagcacagcgggttgcgatgttatcgacacaacctatctttatctttcgtgaattaacccaatacttagcattacaccgtattgtcatgcccagttatcggtatatgcaagagatgattggtagagtggtggcttatgaacgcacccgtattgctcgattacttagcacttgcatgacttcacttatcgatcagcaattagcggctttgcttcgggctgagtcaggagtatttcgcgtcagcgcattaaaacatgaagctaaagatttcagttataaagaattgcgacatgaagtcgcacggcggcagtttttccagcctctacatgagtttgccaagcagttcctcataacagcggggatctccaatgaaagcggcaagtattatgcttctatggttaagttttataccacttataaacttcaacgcatgaaaaaagagactgcacagttatatctgctgttttttgcttttcatcggtttcagcaaattaatgacaacttaattgaagcattgctccattgggtcgatcaatacgagaaacaggccaagcgtgccgctgaagaagcaatgaataatgcggttaccaatgcagcgaaaaatttacaggctgcgggtcatgtattgagcctgtttacggatgacaccatcaccgatgacacacctttttccattattaaagaaaaagcctatgcattgcttgaacaagagagattcccattagttgctgattacttacgcaatattgctttcgacaaaacggcatttgaatggtcacattacacaaaattatccgccacattcaaacgtaacttaaggcaactttttactgatctggattttgccggacgtgtagaagactctcctttgcttgaagctatcgcgtttttacaaaacttattgcgcacagaaaaatcaccaaggcaaactgaccctaattcatttccgactgagattattcctaaaggtttacgccgatatttgtttagtaaagagggcaaaacatttaaaacgcttgatgtagatcgctatgagtttttggtctatcgcctactacgcaactcactggaagcgggtgatgtgtacgttaaacccatataa

SEQ ID NO: 390779 - DNA, 582 bp, Salmonella enterica
atgtcttactctcctgctactgtagcccgccgtttttcgatactggatggagtaactattcagggcgtgctttaccagatcatctgggatccagagactccgttcgctgcggtaatcgaagctgcaccttctgttattgatggtgatattcgccataaggttgttgccactctggagcttcagcgtcgttcacagcttgaaggggtgtttgtccggaaattctgggaagaacaggacgttgctcagattgaagggattgttgtcgatggcgctgtacgtgatgttggccttgctacgtttgtttatgaaacaatagccacaaaagcaggcgttatactattaagtgataacgagcaatatgaaggaggtaaagccctctggcagcatatagcgcgtcgttcaacgaatcttaaggtgtttatcttagatacagattccgcacggtattatccgtttgatggtgatcggatctgctatgatggggaaagtattcctgaatcagaaatctggagtgaacatcctgatcgaaacaaacacggtgttgttcttgtggccgaatctgttaatggaaaagccgcataa

SEQ ID NO: 390780 - DNA, 1617 bp, Salmonella enterica
atgcaacaaaagtatgatcgtgttttatccggcgaatcccacccattccctggcatatacgaggcggtttccgaacaactccttttactcatttttaaggctcgtcagctatatcagaatccagagtatcgcccctggtttgaagaacagcacagagttctctctgcattacgtgctaatacaaagctcttgagaatctttagagaacaaagaaacgcggatgaaccagagcttattattaaagaatctacatttccccaactcactaattctgatcttacagatgcgcttaatattatgtgccatttatacaatggttttgatgaaggaaatatcagcctgaaaacctggggggcgatgcaagaagtacagacaacatcaacctttatcagcccgagaccgggaacctggaaaacacctgaactgacaaagtttgtagaagatgatttatttaatattctgactgaatgtaaagcctggagttcaccaattccagcagaggcccgacaggggtattgccaccaggatctctctgttgcacactcctgcacctcagagttactggcacacctgaatcaataccatgaaattgatgaatcagcaatacttgccagagttattagtacgacgattaacggattctacaagaaaaaaaatacagaccttacggaatggctatccccttttaaagaggaacataaaatattcagggattgtccggagcaaaataccggggatgtaatcagactgaaagagcaactgttgaaaacaggacgtacagaattcgtgaataatttgtgtcaagtcgccaactggtatgaaattaagtcaatatacgatgaatatgtccgtctttatgccaatgaaatcattagttggttcaacaaaaccatggcgtattttaaaccaacagattttatccgatatacatggaaattcgcaacagttactccggataaagatacagaaaccgggcatacaactgcatgggaaaaggattattgccagataaccatacaacgtgatgaacttctgaggttgattcacactaatacccttcaggatgcagtaatttatctttgtcattgtctgcaggagaaatacaagaaatcatcccagaatgagacagagtttccaggaataaaacctccggcatcagagagtgaaattaatataacagataatattgaattttattctcttctggagctcagtaaagataatgagaagcggctggaaacatttcaaaaatggtatgaaaaaaataaagttttgttagaaagtcataaacaaaaacgaacagagaagattgacgttgccgtacgacttgtagggctgaaagcctatgatctgcatgaaggtattccggataggccaaaacgaaaagttaaagatggcataaatgaagacatcaaagccgataccagtttacgcctgtcaaagacaaatataagtgatacgtcgctaaaccgttatcgccgcactgttaaggagattatcaataacgaaatcgacgtattcctgttggaacagaagaaaaaaaataaaagatttccctacagtgaagatagagatgtgattcgacctttatggggcaaatgcctgaccggacagtaa

SEQ ID NO: 390781 - DNA, 1158 bp, Salmonella enterica
atggctggctggcatcttgataccaaaatggcgcaggatatcgtggcgcgcactatgcgcatcatcgataccaatatcaacgtaatggatgcccgcgggcgtattatcggcagcggcgatcgggaacgtattggtgaattgcacgaaggcgcgctgttagtgctgtcgcagggccgggttgtggatattgacaacgccgtggcgcgacacctgcacggggtgcgtcaggggattaatcttcccttacgtcttgagggcgaaattgtcggcgtgatcggcctcaccggcgaaccagagcatctgcgtaaatatggcgaactggtgtgtatgactgccgaaatgatgctggagcagtcgcggttaatgcaccttttggcgcaggatagccgtttgcgcgaagagctggtaatgaacctgattcaggccgaagaaaatacgccggcgctggtggaatgggcgcagcgtttggggatcgatttgaaccagccgcgtgtggcggcggtggtggaagtcgacagcggccagcttggcgtcgatagcgcaatggcggaacttcagcagttgcagaatgcgcttaccacgccggagcgtaacaacctgatagccattgtttctctcaccgagatggtggtgcttaaacccgccttaaactcgtttggtcgttgggatgctgaagatcatcgtaagcgcgtagagcagcttatctcgcgaatgaaagagaatggtcagctacgttttcgcgtagcgctgggcaattactttaccgggccgggcagtattgcacgctcataccgcacggcgcgcaccacgatgatggtcggcaaacagcggatgccagaaagccgcagctatttttatcaggatttgatgctgccggttctgttagatagcctgcgtggcggctggcaggccaatgagctggcgcgcccgctggtaaaactcaaagcgatggataacaacgggttattacgtcggacgctgacggcgtggtttcgccataatgtccagccgctggcgacctctaaggcgctgtttattcatcgtaatacgttggaatatcggctaaatcgtatttcggaactgaccgggctggatttgggaaattttgacgatcggctgttgctgtatgtggcgctgcaattggatgaacagcgttaa

SEQ ID NO: 390782 - DNA, 1434 bp, Salmonella enterica
atgtccgtacttgcactggaaaaaccttacccgacatatgcactaccaccgctggtgagaaatgcaataattgaaactcaaaaaaatacacaggcacccctggctctggtggcaacatccgcattaacagcgatgtcagtttccagccagaatcaggctgatgtatgcaggccaggaaatttatgtgggcctgttaatctttactctctgattctggctgattccggtgaaaggaaaacgaccgtggataaagtgtttatgaaagcattttatctcagggatgaagccctggcggaagaatacgcgaaactggttgagaattacagtacagaaaaggaaatatgggagcaaaagcaaaaagcactggagtcaaaattgcataaagaaattcgcgccggtaaagattgtaaggcaacagagtcagagcttaaaagacatctgaataaatgtcctgttccgccgcagatacaccggacaattttcaatgagacaacgatagagggaatgttaaaatattattccgacagcaatcgctcttttgctcttgtatccagtgaaggaggaataatttttgatggtcgggcaatgagtaaacttggaatacttaactctttgtgggatggtggttctcttttcatcgacaggaaatcatctcccggaattattttgaaggatccaagactgacggtatcggtgatgattcagcctgatgtttaccagaaaggtttttgtacacgaaaaaaagaacttgtgaaaacgtcaggacatcatgcaaggtttttgatgtgtcaaccaacatcaacgcaggggacaaggataataaccggagataattattcatcacagtatcagtatttgtttgaacagaggataaatgaactcattgatgaaagcctggctatgaggggagagcggcgttgccttcacttttctcctcaggcggccagaatctggatggactattacaacgatgtggaatcgaagatggcggttctggggcctttaagagacttcagagaatatgctgctaaaaatgcagagtatatggcaagactggcaggacttattcaccattttagcggtgaggaaggtgacatttccccctacactgctgaaatggcgagagaattagcaatatggtatggtaatgagtatattcggttatccagtccgctaacgtttgaaaactctgcccagaccgtaactatgcgactcattccagaggagcttgaactttttagctggataaaaagctattgcattgagaaggggataccctgtatgaaaaaaaatgacattttacagcgtggtccgaaccgtttccgtaaaaaagataaactcaactggttactggatttactgcatgaacaaaacagagttgtaccggttattgagggaaaaacgtggtatgtcgcacctaactttgacctctga

SEQ ID NO: 390783 - DNA, 180 bp, Salmonella enterica; identical to SEQ ID NO: 30791

SEQ ID NO: 390784 - DNA, 564 bp, Salmonella enterica
atgtataatgctaatcccaattacgagatgaatttcatgattctgaaagatgtgaatgaacacatggaaggtctgtttcaacgtttttctaaactgttgcctttcagaattgattttgcctacaagaaaggcacgcccagtttcggctattcctgtaagcacagtatgtgtatggaaatataccgcttacttagtgaaacccaaacgatgctggcaggatattactgggtaatggaatatacaccagacaaaggactccatattcattttatcggctacctggatgggcaacgttacaagaaatcttatcggttatccaggcaactgggggatatctggaggcgaatcacggaaggggaggggtactttcacctgtgccgggctaaagacaaatacccggtgcgtatcgatcacgtgattcactatagtgataagtccgcggtagacgacttacgttacgccctcagctacctggccaaacaggatcaaaaagaacttggtattatttggtggcatagcagacttcccgaaaaaagtaaccggggccgaccacgacataactga

SEQ ID NO: 390785 - DNA, 1164 bp, Salmonella enterica
atggtatggactaaagccgcttacagtgaacgccttgatgagaacattacttctctcatcgtgcgtatacgcagagggacgtatcacccgcaagcggcaagaatcacggagataccaaaagaggacggcagtaaacggccgctggctctctcgtgcatcgaggataaactggtgcaacttgctgtcagcgatattctcagcagtgtctatgagccactgtttctgccctgctcatacggtttccgaccgggattaaattgtcatgctgctttgaaggctttgcaacagcaaacgttccgcaactggaatggcgcggtggtggaaatcgacatccgaaagtatttcaacacaattccacatactgaattgatgaatttactgcggaagaagacatcagatcgtcgttttctcaggctggtcgaggtctcaataacggcacctgttatcagggggaaagagatatcagagaatgaacagggttgcccgcagggttcggccctgtcgccaatactcgctaatatctacctgcatcatgtaatagacgaatggtttgctcaaatcacgcgttcacacatccatgggcgggctgagatggtgaggtatgctgatgatatggtatttacctttgagttctttagtgaagcaaaacgcttctttaggaggctaccgaaaaggctgaataaatatggtctggagttgcattgtgataaatcacaattaattcccgcgggtcatatagcagcaatgagagctaaccagtcgggaaaacgcctgcctacgtttaattttctgggattcacatgctactggggtaaaacacgaaaaggacactggcgtttaaagttaagcagccggaaagatcgtttcgcagccaaactaaagggcctcagagatttcctctggagaaatctgaatgcccccaataaaaggcttgttctgaataccatcatcagagtaatcagaggctggataaattatcactgtatatctgataaccagaggcgtgtgaggcagtttatattccaaagtacgcgaataatctacagatggtttaatcgtaaaggtgtgcgtcgccgaatgacgtggaaaacgctgaatataatcctgaaaatgctgggttttccatcgagatggaaaacccgttcactgttcgcttcttgctga

SEQ ID NO: 390786 - DNA, 186 bp, Salmonella enterica; identical to SEQ ID NO: 30793

SEQ ID NO: 390787 - DNA, 126 bp, Salmonella enterica; identical to SEQ ID NO: 30795

SEQ ID NO: 390788 - DNA, 234 bp, Salmonella enterica; identical to SEQ ID NO: 30796

SEQ ID NO: 390789 - DNA, 1110 bp, Salmonella enterica; identical to SEQ ID NO: 30797

SEQ ID NO: 390790 - DNA, 1233 bp, Salmonella enterica
atgaaaaagaacacgcttgctgcactaatccttaccaccctggcggtggggcaactcaccagcctgcaggcgcacgccgccgggcagctcaacgtctgggaagacattaagaaatccgcgggtattaaaaccgcggttagcgattttgaaaagcagtacaacgtgaaggtcaatctgcaggagatgccttatgcccagcagctggaaaaactgcgtctcgacgggccggcgggcattgggccggacgtgctggtgatcccgaatgaccagctcggcggcgccgtggttcagggacttctctcgccgctcagcgtcgatcaggcgaaacaggatgcctttacgccagcctccatcaatgccttccgcatggacaacgcgctgtatgggatcccgaaggcggtggaaactctggtgcttatctacaacaaggacctgatcgacaagccgctggacagcctgcaggcctggctggactactcgaaaacccagcgcgagcagaacaaatacggcctgctcgccaagtttgaccagatctactacagctggggggcgattggcccgatgggcggctatatctttgctaaaaacgacagcagcggctttaacccgcagcaggtgggcctcaatacccccggcgcagtggaagccgtcaccttcctgaaaaaattctatgccgagaaggtctttccggcggggatcctcggcgataacgggctgaatgccatcgattcgctgtttaccgagaaaaaagcggcggcggtgatcaatgggccctgggccttccagccatatgaagccgctggcattaactatggcgtggcgccgctgccgaccctaccggacagtaagccgatgagctccttcctgggcgtcaaaggttatgtggtatcgacctggagtaaagacaaagcgatggcgcaacagtttatcgagttcatcaaccagccgcagtatgtgaaagaccgctatgtcgccaccggcgaaattccgccgctgaaggcgatgattgacgatccgctgattaaaaacgaccaaaaggccagcgccgtcgctatccagtcggcgcgggcggtggcgatgccgggcattccggagatgggggaagtgtgggggccggccaatgccgcgcttgaactgagcctcaccggcaagcaggcgccgcaggccgcgctcgataatgcggtgaaacagatcacgatgcagatcgaagcaatgcaggccagcaatcagtaa

SEQ ID NO: 390791 - DNA, 1308 bp, Salmonella enterica; identical to SEQ ID NO: 30799

SEQ ID NO: 390792 - DNA, 852 bp, Salmonella enterica; identical to SEQ ID NO: 30800

SEQ ID NO: 390793 - DNA, 1203 bp, Salmonella enterica
atgaaaagattcacacccgcatggcttgcggtttgtctggcatgcagtttttccacctcttctctggccgcggacgagcttgaaacccgcgcctttcaaggcatgccggcggactttatcaaaggcgcggatatctccacgttgctggacgccgaaaagcacggggcgacgttctacgatcagaataatcagcgcaaggatccgatcgctattctgaaagagaacggcgtcaactatgtccgcctccgtctgtgggtggatccgcaatcggcgagcggcgaggactatggcggtgggaacaatgatctggccaccaccctggcgctggcgaagcgggcgaaagtccaggggatgaaactgctgcttgattttcactacagcgatttctggaccgatcccggcaagcagttcaagccgaaagcttgggaaaagatggattacccgcagctgaaaacggcaattcatgactatacccgcgataccatcgcccgctttaagcaggcgggcgtgctgccggatatggtgcagattggcaatgaaatcaacggcggcatcctgtggccggaagggaaaagctgggggcaggggggcggcgagttcgaccgactggccggcctgctgaactcggccattgatggcctgaaggagaatctacgtaacggcgagcatgtgaaaatcatgctgcatctggccgaagggaccaagaacgataccttccgctggtggtttgatgagattgacaagcgccatgtaccgtatgacgtgattggtctgtcgatgtacacctactggaatgggccgatcagcgccctgaaggccaatatggatgacatcagcaaacgctataacaaagacgtcatcgtcgtcgaggcggcctatgcctataccctagccaactgcgataacgcggaaaatagtttccaggcgaaagaagaaaaggatgggggatatcccgccaccgtacaggggcaatataactatattcacgatttaatgcaggcggtggttaatgtgcctgaccagcgtggtaaaggtattttctattgggaaccaacatggattgccgtgccgggaaatacctgggccacgccggcgggaatgaaatatatccatgacgagtggaaagagggtaatgcgcgtgaaaatcaggcgctatttgattgccagggaaaagtattgccgtcggtaaaagtatttaattga

SEQ ID NO: 390794 - DNA, 2058 bp, Salmonella enterica; identical to SEQ ID NO: 30802

SEQ ID NO: 390795 - DNA, 315 bp, Salmonella enterica; identical to SEQ ID NO: 30803

SEQ ID NO: 390796 - DNA, 1272 bp, Salmonella enterica; identical to SEQ ID NO: 30804

SEQ ID NO: 390797 - DNA, 1071 bp, Salmonella enterica
atgaagtctaaaagcgctactctggaagacgttgcccgtcatgcgggcgtctcttaccagaccgtgtccagggtactcaacaaatctgccaatgtatccgaagcgacgcgccgcaaggtggagaaatcgatagaggcattacgctatgtgccaaaccggctggcgcagcagctggtgggaaaggagagtcagacggtcgggctggtgactatttcgctggcctggcatgcgccttcccaggtggcgacggcggtaaaacgttatgccaatctggaaggttatcaggttctgatttcgatgatcgatgagagcgtcaaccaaagtatccaggattctatcaatgagctgaaatctcagcgagtggacaaagtcattatcaacgtgccactggagaccgaacaggcgcagaaaatcgccgctgacaacgatgatatcgtctgcctgtttctcgatgttgatccttacagctccgtgtttaacgtttcgtttaacccggcggacggcacgcgggccagcgtcaaatatctctatgagatggggcatcgggagatcgcgttgctggcaggaccggacaattctgtatcggccaaactccggttaaaaagctggctggagactttgcagggctacggtctgaagccggtgaccgtcctgcacggcaactgggatgcgcaaagcggctatgccggtgcgctgcagatgctgcgcgaaacgcccaattttagcgctgtgctggtaggaaatgaccagatggcgttgggggtgctcagcgccttccatcagcatcaggtggcggtgccgggtgagaagtccgtcattggctatgacgatacctacgaaagctcttttttctatccgtcgttgagtacggtgtcgctggatctcgatctgcaggggaaggaggcggtgcggcggatcctcgccagcaccagcggtgcgccgcatacctcatccattctgcctgcgcgcttggtgatacgccattccagcggcgcccgaatcgagcagggaaaagatctgcaggccattgcggaacagctccgcgccatcgcccacactctggcaccctga

SEQ ID NO: 390798 - DNA, 648 bp, Salmonella enterica
atgaatactcaaataactttcgctgcgcttttgccagcattagcgtctttcataccgcttcatgctcatgcctcgtctacttctgaagatgaaatgattgtcacgggcaacaccgccgccgacaccaccgattctgccgccggtgccggtttcaaaacgaacgatatagatgtcggcccgctgggaacgaaatcctggatcgaaacaccatattccagcaccactgttactaaagagatgattgaaaatcagcaggcgcaaagcgtcagcgagatgctgaaatactctcccagtacgcaaatgcaggcgcgcggtggaatggatgtcgggcgcccgcaaagtcgggggatgcagggcagcgtggtggccaacagccgtctggacgggctgaatatcgtttcaacaaccgcgtttccggtggaaatgcttgagcgcatggatgtgcttaacagtttgaccggcgcgctgtacggcccggcgagcccagcagggcagtttaatttcgtggcgaagcgcccaaccgaagagacgctgcgtaaagtgacgctgggctatctccggatattttctgaaccaggtcgccagcgcacgctgatcgcagccgggaagcaggacgaggggactgtgagtatcaagattgacgattaa

SEQ ID NO: 390799 - DNA, 873 bp, Salmonella enterica
atgaatccgtctgatgccattgaggcaattgaaaaaccactttcttccctgccttattcactttcccgtcacatcctggaacatctgcgcaaactcaccagtcacgaacccgtgattggcattatgggtaaaagcggggccggtaaatcctcactctgtaatgccctgtttcagggagaggtcaccccggtcagtgatgttcacgccggcacccgggaagtgcagcgcttccgtctgagtggccatggtcacagcatggttatcactgacctgcccggggtgggcgagagccgggacagggatgcagagtatgaggccctgtaccgtgacattctgcctgaacttgatctggtactgtggctgattaaagccgatgaccgtgccctgtctgtggatgagtatttctggcgacacattctgcaccggggacatcagcaggtgctgtttgtggtgacgcaggccgataaaacggagccctgccacgaatgggatgtggccggcattcagccttctcccgcacaggcacggaatattcgcgagaaaacggaggcggtattccgtctgttccggcccgtacatccggttgttgccgtatcggcccgcaccggctgggaactggatacgctggtcagtgcgctcatgacagcgcttcccgaccatgctgccagtcccctgatgacccgcctgcaggacgagctgtgcacggagtctgtccggtctcaggcccgtgaacagtttaccggtgcggtggaccggatatttgacacggcggagagcgtctgcattgcctctgttgcacgcacggttctgcgtgccgtccgtgactcggtggtctctgttgcccgcgcggtatggaactggattttcttctga

SEQ ID NO: 390800 - DNA, 3120 bp, Salmonella enterica
atgaaacgacatctgaataccagctacagactggtatggaatcacattacgggcgcttttgtggtggcttccgaactggcccgctcacggggaaaacgcgccggtgtggcggttgccctgtcccttgccgctgccacgtcactcccggcaccggctgctgacacggttgtacaggcgggagaaaccgtgagcggcggaacactgataaatcatgaccgccagactgtttcaggtacagcggatggcgtgactgtcagtaccgggctggagctggggccggattctgatgacaacaccggcgggcagcagataactccgggtggcactgccagaaacaccactgtcaccgcagacggtctgcaggatgtcatggccggtggcagtgccacggatacggttatcagtgccggtggaggacagaatctgcgcgggcaggcttccggtacagtccttaacggcggtgagcaatggatacatgcaggcggcagtgcatccggaacggtgattaaccgggatggttaccagaccattaaacatggcggactggcaaccggaaccatcgtcaacaccggcgcagaaggtggaccggattctgaaaatgtctccaccggtcagatggtcggggggacggctgaatccaccaccatcaacaaaaatggccggcaggttatctggtcttcaggactggcccgtgacaccctcatttacgcaggtggtgaccagacggtgcacggagaggcacataatacccggctggagggagggaaccagtatgtgcataaggacgggctggcactgaatacggtgattaacgacggtggctggcaggtggtgaaggaaggggcggtggctgagaataccaccgttaatcagaagggcagactgcaggtgaacgccggtggtaaagcgactgatgtcacccagaacacgggcagcgcactggttaccagtacagcagctaccgttacaggcacaaaccgtctgggcgtattctctgttgtggaggggaaagctgataatgtcgttctggaaaatggcggacgtctggatgtactgagcggccataccgccacaaacacacatgtggatgaggggggtaccctggatgtccgcagtggtggcacagccaccaccatatccatgggggatggcggtgtactgctggccgattccggtgccgctgtcagtggtacccggagcgacggaacggcattccgtatcgggggtggtcaggcggatgccctgatgctgggaaaaggcagtgcattcacgctgaacgccggtgatacagccacggataccacggtaaatggcggacaactgactgcacatggcggaatcctggaaggtaccaccacgctgaataacggagccacgctcaccctttccgggaaaacggtgaataacgataccctgaccatccgtgaaggcgatgcactcctgcagggaggcgctctcaccggtaacggcagcgtggaaaaatcaggaagtggcacactcactgtcagcaacaccactctcacccagaaagccgtcaacctgaatgaaggcacgctgacgctgaacaacagtaccgtcaccacggatgtcactgctcagcgcggtacagccctgaagctgaccggcagcacggtgctgaacggtgccattgaccccacgaatgtcactctcgcctccggtgccacctggaatatccccgataacgccacggtgcagtcggtggtggatgacctcagccatgccggacagattcatttcacctccacccgcacagggaagttcgtaccggcgaccctgaaagtgaaaaacctgaacgggcagaatggcaccatcagcctgcgtgtacgcccggatatggcacagaacaatgctgacagactggtcattgacggtggcagggcaaccggaaaaaccatcctgaacctggtgaacgccggcaacagtgcgtcggggctggcgaccaccggtaagggtattcgggtggtggaagccattaacggtgccaccacagaggaaggggcctttgtccaggggaacaggctgcaggccggggcctttaactactccctcaaccgggacagtgatgagagctggtatctgcgcagtgaaaatgtttatcgtgcagaagtccccttgtatgcctccatgctgacacaggcaatggactatgaccggattctggcaggctcccgcagccatcagaccggtgtaaatggtgaaaacaacagcgtccgtctcagcattcagggcggtcatctcgggcacgataacaacggcggtattgcccgtggggtcacgccggaaagcagcggcagctatggcttcgtccgtctggagggggacctgctcagaacagaggttgccggtatgtctgtgacagcgggggtatatggtgctgcaggccattcttccgttgatgttaaggatgatgacggctcccgcgccggcactgtccgggatgatgccggcagtctgggcggatacctgaatctggtacacacatcctccggcctgtgggctgacattgtggcccagggaacccgccacagcatgaaagcgtcatcggacaataacgacttccgcgcccggggccggggctggctgggttcgctggaaaccggtctgcccttcagtatcactgacaacctgatgctggagccacaactgcagtatacctggcagggactttccctggatgacggccgggatagcgccggttatgtgaagttcggacatggcagtgcacaacatgtgcgtgccggtttccgtctgggcagccacaacgatatgagctctggtaaaggcacctcatcccgtgacaccctgcgcgacagtgccagacacagtgtgcgtgaactgccggtgaacgggtgggtacagccttctgttatccgcaccttcagctcccggggagacatgagcacggggacagccacagccggcagtaacatgacgttctcaccgtcccggaatggcacgtcactggacctgcaggccggactggaagcccgtgtccgggaaaatatcaccctgggggttcaggccggttatgcccacagcgtcagcggcagcagcgctgaaggctataacggtcaggccacgctgaatgtgactttctga

SEQ ID NO: 390801 - DNA, 375 bp, Salmonella enterica
gtgtcagacaaactctccgggataactcatcccgacgacaatcacgaccgcccctggtgggggcttccctgcacagtgaggccctgttttggcgcccgtctggtgcaggagggtaaccgcctgcattaccttgccgaccgcgccggtatcagaggccggttcagagatgcagatgcgtaccacctggaccaggcctttccgctgctgatgaaacaactggaactcatgctcaccagcggtgaactgaatccccgacatcagcataccgtcacgctgtatgcaaaagggctgacctgcgaagccgacaccctcggctcctgtggttacgtttatctggctgtttatccgacaccggcacccgcaaccacctcataa

SEQ ID NO: 390802 - DNA, 849 bp, Salmonella enterica
atgtctgatatcacagtctcccgtccggaagtggtcaacgggcatacggacgttatcggctcaaccagtatccgacacgttgtgacggtacggtatgcagcactgcaacaagccgaaatgcttatccggcaactggctgaaatttcagtgctgacggaaagcatcggaggtaaaactgcactggactgggccatgaaacaggattttcgctgcggctgctggctgatggagaaaccggaaatggcaatgaaagccatcacccggaaccttgaccgcgaaatctggcgtgacctgatgcaacgttcagggatactttccttaatggatgcacaggcccgtgatacatggtaccggtcactggagtacgataattttccggaaatcagtgaagcgaacattctgagcacattcgaacaactacaccagaataaggatgaggtgtttgagcgaggggtgatcaacgtcttcaggggactgagctggaattacaaaaccaattgcccctgcaaatttggcagtaaaattatcgtcaacaacctggtgaggtgggaccggtgggggtttcatcttatcaccgggcaacagactgaccgggttgccgacctggaaaggatgctgcatctcttcagtggcaaccccattcccgacaaccgggaaaacatcatcattcgtttggatgagcacatccagtctgttcagggtaaaacatgctatgaagatgagatgttcagcatcagatactttaagaagggctccgcgcacatcacgttcagaaaaccggaactgattgatcggctaaatgacatcattgcgaagtattatccagaaataatcccatacaatatctaa

SEQ ID NO: 390803 - DNA, 1320 bp, Salmonella enterica
atgacttttactattacacaagacagacaattggcttcattgaccgttactaaagaagaaaaagaaatcttatttgctgtaaaatctaaagctgggggaggactctttatacgtgttcgttatggtagcgacaataaaagctggatttatcgttatcgaatagctcaaaagccagctaaattaacactaggtagttaccctgccatgggattagctcaagctcgtaaagctcatgcggatgcaattgaattagtaagaaaaggtatagatcctcgtcatattagaaaaaatgaaaaacaaaaaaatgaacaaatgattatttactctgaattatggaaagattggatagaattcagaaagacaagtaaaccaattagcaccagaacccttgcagattatgaagggacttatcaccgccaccttgaaaaagcattaggaaaccttcgcattgacgaacttaccaaaagcgttatttttgaacatctcagtaatgtaagaaaaaccagttctgaagcagttcgtaaaggattaattattctaaatatgactcttgatcatgccaacttacagggtatgcttgagcataacccagcacgactgctcaaaccagcaatgtttggtgcatcgatgaataaacctcgcgagcgatggcttcctgagaatgaactccggatgctatggaaggctttggatgatgctactgttggaggaggctccattgcatctggtggctatggagtttcctctagtgtggtattatctcattctgtcgcaaatgcactccgtttgattattttcacaggagtgcgccgctctgaagcggcacaaatgcgctgggatcaaattaatggagagcgttggaccataccagccactaaaaatgggaaaagccatattgttactttacatccgtatatgctttctttaataaaaacacaacgtgaattcactgaaggtgcatatgtttttggttctactagcaaacctggctttcccatcacaaatgacgctctgactcgcgcgttagaaagggttcgctctaagtatctagctgaacttactccattttctcctcatgatctgcgtagaagtgttgcgactggatgcgctgaataccttgatgctccagagcgcctaatagagttactgttaaatcatgtacccaaagaccgtttaatacgaacatatcaagtcggacaacaagctgaaaaattaaaaaatttatttatagaatgggggaattttattatgaataacgtcattactgtgcagaagaatgctccggataatgttattcatataaaatttgggaacagatga

SEQ ID NO: 390804 - DNA, 351 bp, Salmonella enterica
atgcctgaaccacaaaacgggcgcggcgcgctcttcgccggtgggctggccgccattcttgcgtcggcctgctgcctggggccgctggttttgatcgccttggggttcagcggggcatggatcggcaacctgacggtgctggaaccctatcgcccgatcttcatcggcgcagcgctggtcgcgctgtttttcgcctggcggcgcatctaccgcccggcgcaagcctgcaaaccgggtgaggtctgcgcgattccccaagtgcgagctacttacaagctcattttctggatcgtggccgcgctggtcctggtctcgctcggatttccctacgtcatgccatttttctattaa

SEQ ID NO: 390805 - DNA, 456 bp, Salmonella enterica; identical to SEQ ID NO: 25798

SEQ ID NO: 390806 - DNA, 1725 bp, Salmonella enterica
atgaaaaaaaatttctttatcattttggttgctctgcttttgttgatagcattcactgtgtctagtgttgttaagtacaccagtcttttatcggagaaaaatttatacaccgtcgctggcacccaagaaaactacggtttctcagtggcaaaattcattatacagttgaatgagctttacacgctaatcaatagcgataatactattgacgatgttaggcttaaattcgatatcctttattctcgtttgaatgttatttatgtaaagagtgaggcgactgcacctctatataaacagcaaggctatgaagaaacaattgattcgataaacaaaaagcttgaagacatagacgggctgctttcgcataatcaccctgattataaaaaaataagtacaatcatagctgatataaaaccgctaactaaaaccgttacaaatcttgctgatatggctgaaatagcacaaaggaatgacgctcttaaagatttcaggagcaaacgtcagcagttatggactctgctttttattacaggtgggttgatttccttacttctttttgtcctatttatttacataagtaaaattaaccgattgttactatcagaacgggctgcttttgccagtaaaaatgcatttttaggtatggtaggccatgaactcagaacatctttacaggcaatagtgtctatcattgatgtcgtaaccaataatctgagtggagggattaaatctggtcagatagaacgacttgaaactgctgtttcgaaaatggagcgccagttaaatgatttggctgaatttgcaaaaattgacaacggatctgtagagataaaaaacacctataatagcttgcaagcaattgttactaacgctgtgcaggattgcattgctatttatgaaaaaaaggatgtcacagttaaaataaaaaacaataatgatgcagtgatttttacagatgctctacgccttaatcaagtaattgaaaacttaaccagtaacgctattaagtacactgagcgcggggaagtcaatgtagattactttatagaaaaaggtaaggtgttaaatattgtcatttctgataccggaaagggaatccctaaagacaaactaaagtttatatttaaaccatttacacgagttgtagattcgaaatccactgtacctggatttgggatgggactcgctattgttgcagggataatcagactattaaaaggtactattcatatatctagtgaagtaaatgtaggtacaactgttacagtaagaatacctatcaagttgggagatagcagccttgcaacagctgaggtatctgcttcagctcccggagatgtcttcggcgttcttagcttgcttgttattgatgataatgaaatggcctgttcgtctctttccagtctgcttactaatgctggatacattgtcgaggctacaacctcgcctgaacgagccctggaaaagcttctgcgtaaaccttatgacgttgtcctgagtgatttacaaatgccaggcatgacaggtgatgagctgtatgcaactgttagtagcagtcagaatcctaatcgatccacgcctttcatattcatcagcgcatacagtgatgcacactctatcggacaggctcctttgttaactaaacctgtcagattaaaagatataaaccttaaaatacatgaggttatgtcaaatcaaggggtcgtctcagaattcggaaaataa

SEQ ID NO: 390807 - DNA, 489 bp, Salmonella enterica
atggttaaaataatatcattcttatccctaatgcttttgtcaattagtgcatatagcaatattggggatatagttatagatggttcaatcgctaatgctaacagtgataaaggttatgtgattactgaaaagcagtttgattcgttcccacgggataccatcgtaacgacaacaccttggacgccaaccggtaaaaaagtaaaattcaagggcgtcgacctaagttatgttttaaaactcgctggcgctaatggagcaaagctaaaattccatgctctgaatgattatgaaatcattgtagacatgaatgacgttgaaaaatataacattttattggctacagaaatggatggaaaaaggcttcaaataagggattttggaccttattttttggtatatcctttagatgaacattatattgagcttaacacgccacactatcttgcacggttcatttggcagatagacaaaattacggtgctcaaatga

SEQ ID NO: 390808 - DNA, 984 bp, Salmonella enterica; identical to SEQ ID NO: 259852

SEQ ID NO: 390809 - DNA, 915 bp, Salmonella enterica; identical to SEQ ID NO: 259853

SEQ ID NO: 390810 - DNA, 309 bp, Salmonella enterica; identical to SEQ ID NO: 259854

SEQ ID NO: 390811 - DNA, 216 bp, Salmonella enterica; identical to SEQ ID NO: 251554

SEQ ID NO: 390812 - DNA, 663 bp, Salmonella enterica; identical to SEQ ID NO: 259855

SEQ ID NO: 390813 - DNA, 300 bp, Salmonella enterica; identical to SEQ ID NO: 259856

SEQ ID NO: 390814 - DNA, 2751 bp, Salmonella enterica; identical to SEQ ID NO: 259857

SEQ ID NO: 390815 - DNA, 717 bp, Salmonella enterica; identical to SEQ ID NO: 259858

SEQ ID NO: 390816 - DNA, 285 bp, Salmonella enterica; identical to SEQ ID NO: 259859

SEQ ID NO: 390817 - DNA, 1008 bp, Salmonella enterica; identical to SEQ ID NO: 259860

SEQ ID NO: 390818 - DNA, 141 bp, Salmonella enterica; identical to SEQ ID NO: 140612

SEQ ID NO: 390819 - DNA, 687 bp, Salmonella enterica
atgtctgaacttaccgccaaagccctgagcgactcgcgctcgtttgagaacgccattcttgagcgggatatgcgcatgaaaaaggcgggctggatcgtggcggcgctcgccggtctgctgctcgtcttcgcccttgccgcccttatcctgctgctaccgctcaaaaccaccaccgtggagctgtacacgctcgaccgtcagaccgggcgcatcgagcgcgtcaccaccgtcggcgaggacaagctggacacctccgaggtgctcaatctctcgcagactgcgtcctacgtgaagcgccgcgaggggtacaactatttcgcccttcagcaggactacagagagacgcagatgttcaacagcgacgaggtcaacaaggaatacctcgactggtttaacagcccggacgcgccggacgctgtgtttcagcaggcggcctatgtggtcacggtggaagtcctctccaacgtaccgtcagagggcaccggctccagcatggtggagatgctgcgcatcaagcgcaccattcgaaaggtcaaggacaacaccgaaacgtatgattactggacggtgcgcatgacctaccgctatttcccgcagaagaaaatgacggcctccgagcgcgaggtgaacccgttcggcttcatcgtcaccagttaccagcggtttaaggagaaaagcgatgaataa

SEQ ID NO: 390820 - DNA, 894 bp, Salmonella enterica; identical to SEQ ID NO: 259861

SEQ ID NO: 390821 - DNA, 1197 bp, Salmonella enterica; identical to SEQ ID NO: 259862

SEQ ID NO: 390822 - DNA, 1050 bp, Salmonella enterica; identical to SEQ ID NO: 259863

SEQ ID NO: 390823 - DNA, 402 bp, Salmonella enterica
atgatgctgcctaaactgaccggcctgacggcgatcgtcgtcctcctggcgggctgttcttcgccgccggagcctgcggccgttgactggtcacaaccggcgcagccggtaacgaccacccggccggtatgggaacccaaccgtcttatcgtggcctcgccggtgacggaagggcactggtcgcaggtgcttgcgcgttttgaacccggcgggatttacccggccgcacagtggtacgcggttgcgcacgcctcgcgcgcggtagtaaatgccccggacggccagcgcttctttgcggccaaaacctggctccgcgagggcggctacaagggtgtggtggagtttcgcccccgctccggctgcctgacctgcgacacctcagaaatcgtcttctaccgataa

SEQ ID NO: 390824 - DNA, 318 bp, Salmonella enterica; identical to SEQ ID NO: 259865

SEQ ID NO: 390825 - DNA, 336 bp, Salmonella enterica; identical to SEQ ID NO: 259866

SEQ ID NO: 390826 - DNA, 309 bp, Salmonella enterica; identical to SEQ ID NO: 259867

SEQ ID NO: 390827 - DNA, 2202 bp, Salmonella enterica
atgagactgtggattgcagaaaaacccgcagtcgcgagcgatatcgcgaaagcgctgggcggcaacttcacccggcacgacggctatgccgaatcggcgaccgatatcgtgagctactgcgtcggccacgtgctggaaatggtgcccccggagacgatcaacccggcctacgccacctggtcgctcgacaccctgccgctgaagctgtacccggtacagcttcagccaaaagcgagcgtggcaaagcaggctaataccctggtgaagctgattcgtcgcccggatatcaaaatggttgtccactgcggcgacccggacgacgaggggcagctcctggttgacgaggtgctggagttcgccggaaacaccgcgccggtgaaacgggcgcttattaacgacaacaccgcgccagcggtgaaaaaagccatcaactccctgcgcgataacagcgattttcgtgggatgtacctgaaagccctgatgcgcagcgcaggagacgcgatttttggcttcagtatgagccgctgttacaccctcaaagcccgcgataagggctataagggcacgatttcggttggccgcgtccagacgccggtgctgggaatgattgtgcgccggtggcgcgacaatcaggcgcacagcgaggcgttttactaccagctcgcagggcagtttatcagcggtacggacgttgtctgcgcccgctggcagacgtccgaatacgcgccggtggacgataaaaagcggctgacggataaggcctggggggaaggactcgcgagggctctggccggaaaaccggccagcgtgctcgcggccgccaccgaccggggaaaaaccactgccgcaccgctgccgtttaacctgctgcgcctccaggtgtatatgaaccgcaggcacaaactgaccgcgcagcagacgctcgatatcacgcagaagctcaaggacagtaaatacattacctacaaccgctctgactgttcttatctgtccgatgaacaattcaacgacgcgccacaggtggtggcggccttaaaaacgctcgacgtttttaacggccttaccaccgacacggcgcaaaaaagtgcggcgtttgacagtaaaaaagtcaccgcccacaccgccattatcccgacgacgaacatgccggatttaagccgccttaccgacaaggaaaaggcggtttatctcgccatcgcgcagttttatctcgcgcagttcgtggcgaaaaagcgctatgacgagtcgatcgcggagattaaatgcggtgacgagatgtttaaagtctcggcgcgtaaaaccacggatgcgggttttacgacgttcctgaacgacgcggaagaagacgacgaggaggacgaaaacagcaccgcgtttgaggccatcagccgcctgcaaaccggggcgacattaacctgccgcgaggtggtgatttcggagaaaaaaactaaaccgctgccgctgtttaccgaggcgaccctgctcgctgccctcgttcgcgtggccgattttgtcgccgatccgcgcattaaaaaattgctcaaggagaaggataaagacaaaaaagatgaacacggcggcatcggcacaccggcgacccgcgcggccattattgagacgctgaaaacccgcgattacatcaccgtggaaaagggcaaatttatcccaactgccgccgggctggcgttaattgatgctctgcccgactcggtgacgcagccggatatgaccgccgtatgggctgaaaaacaggcggcggttgaaaccggcgaaatgaccatcgagcgctttattgatggtctttacgcggaagtttcccgcctggttgagagcgccgatattgccatcagcgcgacggaaaaacagcccgttaaaacggcgcttaaccgcctcgcggttaaatgtccgtcgtgcggttctgagctggttatgacgccgaaaacctgcgcctgtacgggctgtcagttcaaaatatggctggaagtgcgcggcaaaaagctaacggaaaaacaggccgagaagttaatcggcaagggcaaaaccgacgttattaaaggttttaaatcgaagaaaaacgacgacacctattcgatgatcgtcacgctgaaaaacgcgcaaaccggggaactcggttttgaatatccaccacgcgatccgctgaaaggattgaacgtatctatgccgaaggagctgaaattatga

SEQ ID NO: 390828 - DNA, 393 bp, Salmonella enterica
atgaaccgtatccaggacgaattaacctcagagcgcgcgctgaaaaagtttttacgtgaaagtgattttgcctttctggagatgctgagtgcacgtatttcagcagcacttgatgaaaaacgcgcagagcatatcgagcaggaaaagctacgccgacagcgggaagaaaagcgcaatgaattgctggcgctgattgaatcggagggcttttcaccgacagagctggttagtacaagtcccgccaaaaagtcggcaaaacgcaaagctaaatatcagtattttgaaaacggcgtgcataaaacatggtcaggcgtcggacgcgtgccggttgtaattcagcaagaacttgacgccggaaaacctcttgaatccttccttattaccaccgactaa

SEQ ID NO: 390829 - DNA, 1908 bp, Salmonella enterica
gtgatattcgacaaactgaatcatttgctgtcgccgatagcaaatgccgtcctggcctttatcgcctttttgcaggcgcatcagctggcgttagcactgctgtccggcgtcatgctgccttttatattttctgcgaaacacggcggtcaggaaaagccgacgtttctgcaaaggatcttaattctgctttccatgatctgttttgttttcggctcgatagcgccagtggccgtttggtttttacagcgcatttatggccgggaagatatcgccagtccgccgctgcttacctggacaatggcgctactgtttaccgtcgccggttttattctgcacgtggttttacggcgtttgatctcgcctgaatttgataaggtcaaacgcggcatggtgaaaaaaaccagcatggagcgcgaccgcagaaccgacgttcgcagggtaaaagaaattttacccgtcaccaccgaatacgatccgatggattacatcgatctgactaaggggatttttatcgggctgagccgcgagggtgagccgcaatatattccgttaaaagaatggcagacccagcacgccgacattatcggcaccactggtgccggtaaaggcgtcgtaaccggtattctgctttatcagagcatcctcgccgacgagggcgtttttgttctcgaccccaaaaacgacgagtgggcaccgcacctgtataaaaaagcgtgcgcggacgccggaaaaccctttgtgcttatcgacctgaataaacaggaataccagatgaaccttatcgacggtatcaccgccgaccatctggaggaattattcgtggccggtttcagtctggcggaaaaaggcgaggcggcggatttttaccgtatcgacgaccgcaaggcggcgagaacggcggcgcagttcgtgaaggataatccgggcgcaaccgtgcgggatatttataacggcgattatgttcagggcattggcgagacgattaaagcctttcacggtaaaaccgaggagctggcaatgctcaacagcattaacgcgccaggcggttttgcgctgaaggagattttcgacaagggcggctgctgctacatcatcggttcgatgcgtaactctaaaatcattaccgcgcagcgcatgattttagttcgcctgttccagctcgcggaattgcgcgaccgcgtcgcggggaatatccgccccatcgccatctttaaggacgaggtgaaatatcacctttccaaaccggcgctcgaagggttaggcgcggcacgcgataaaggcgtccatatattaatggcgcaccagtcaattgccgacctgcgcgactgtccggcggatttaaacggcgacgccgtggttggggcggtcgtggaaaactgcaagtttaagctggtatataaacttcaggatccagacaccgccgaatggattgcgcgcatgtctggcacgattttagtcgatgatgaaagccgaaaagtcaccaccacggcggtgctgacagaaaaagtcgataacgagcgcatgcttcggcaggcggaaagctattacatcgacagcaatatgctccagaacctgccgaagttcgtcagctatatcttcagccagaacgcgctcgcgttcccgtcgttaatctcaccgctcaaggttaaaaaagccccactggagctgtttaccctgccgccggtcgcagtcgctacggtggcagaagttaaaccggtgctggatctggattttgataaaacggttccggcagttccggcacctgacattattccggtcagcgcaacaaccaccaaaaaaccctcagcaacgccaatacccactccgccggtgcaacctgacgaggagtggctgatggcatcacagcccgctccaaatgacgaaatacattcgttgctggatttataa

SEQ ID NO: 390830 - DNA, 747 bp, Salmonella enterica
atgcttatttcgtcgtatcaggaacgttatgcacgcagcactgaaaaaattcgcgtactgctgaattttctcaaggaggaaacctacagcgattttcaaatcataaagctgctttttgattttaaatctgaccgccctctctaccggttgttggagaaggtggagaaaatggggctgattcagaaacacgtgcatgaatcccgcgcgtcgagaatatccctgtggggcattaccgccgacgggctggccgttatcctcacggcggacgacaacataatgcccgcccgctttgaaccctaccgcctgaccggctggtcactcgaccatcaccttgataaccagctagtgcgccttacgctggagaagaacggcgcgacagggtggattaacggcgaccgttcaacgttcctcagtcagtacagcgtcaaacaccgtcccgacgggcttatcagcctgccggacggcaggctgatcgccgttgaaaccgaacgacgtatcaaaacaaaggcgcgctatcagtccatcatggcgagccacctgctggctatcagcgataaaaaatggcggtacgcgttttacgtcgccccggacgaggcgaaaaagcgcgccctgaagattattttcgacagcatcgccagcgtgatcgtgaaaaaccagcatgtgcaactggaggcaaaacaccgcgacgtcttccgcttttacaccctcgatgaactgaaaaacctggagctggacaactatgcgtaa

SEQ ID NO: 390831 - DNA, 528 bp, Salmonella enterica
atgcgtaaaaccacccttctggtgctggccgccgccctctgcgtgcccgcgttcgccaccgccgcgcccgtcctgacggcgggtttttcgccgtctgacgggcgccctgctcttgaaatcgtgctcggcgccataaacaacgccaggcagagcattgacgtcgcggcctacagcttcaccagtaagccggtcgcgacggcgctcgccggtgctaaccggcgcggcgtggccgtgcgcgtggtggccgacgaaaaggcgaacagcgaccgctacaccgcagtgacgtatctgataaaccagggcgtgccggtgcaccttaacggccgttacgccatcatgcacaacaagtttatggtgatcgacggcaaaaacgtccagaccgggtcgtttaactacacggcaagcgccgtttcacgcaacgcggaaaacgtgctgctgatcgaggatgcgccgcagctggcggagacgtaccagcgagaatttaaccgcctgtgggatgagggcaccccgctgaatgccctgtactga

SEQ ID NO: 390832 - DNA, 432 bp, Salmonella enterica; identical to SEQ ID NO: 227502

SEQ ID NO: 390833 - DNA, 177 bp, Salmonella enterica; identical to SEQ ID NO: 141505

SEQ ID NO: 390834 - DNA, 966 bp, Salmonella enterica; identical to SEQ ID NO: 227501

SEQ ID NO: 390835 - DNA, 1488 bp, Salmonella enterica
gtgatgtacggagaggagaagtcggactcgctcatagtagcggcgaagcaggcgaacaacccgaaaggagcggagtcagtggagcgaaggagcggggccaaggggaacgcggaacagccacacatgcgccggacacagagccgggaaagcatgtcacagaggctgtcacgcgtgcgggaagctgcgaagcagcggaagaaagaacggtttacagcattgttccacctgctgacagtcgaagcactggaagccgcattcctctccctgagcaggaaagcggccgccggagtggatggcatcaggtggatggactacgccggaaacatgaagaacaacataacagatctgcaccggaggctacatcagggcagctacagggcgcagcccggcaggcgtcactacatcccaaaagcggatggaaaacaacgcccgctcggcatcgcctcgctggaggacaagatcgtccagtatgcgctggtgaaaatcctgaacgcagtctatgaaaacgactttatggggttctcatacgggttcagacccgggcgaagccagcacgatgcactggacgcactggccacagggctggtacgcactaacgtaaactgggtactggatgccgacatcagtcagttcttcgacagggtgagccacgaatggctgatcaggttcacagagcatcggatcggcgaccggagggtaatcaggctcatacgtaagtggctcacagccgggacgtcggaggagggtcaatggcgagcaacggaggaaggcaccccacagggtgcggtcatctcaccgctgctggcaaacatatacctccactacgtcttcgatctgtgggcgcatcagtggcgacgtcgctatgccacaggcaatgtggtaatggtcagatacgccgatgacatcgtcatcgggttcgacaaacgatacgatgcccggcgcttccgtatagccatgcagcgcagactgagggagttcggactcacggttcacccggagaaaacccgtctgatggagttcggccgcttcgctgtcgaaaaccgtgccatcaggggaaaaggcaaaccagaaacgttcaacttcctcgggttcacgcacatcagcgggaaagatcgcaacggcaggttcatgctgatacgaaagacccgccgggatcggatgacggcaactctgaaagccatcaaagacggtctgcgaaggcgctggcattactcaatccccgaacagggaaaatggctcaggagagtggttcagggatacctgaactatcactcggtaccgggcaacttccccaccatgcagaagttcaggacacacgtaacaaacctctggcgccgggcgctcaggcgcaggagccagaaggatgatacgacctggacgaaagcaaacaaactggcagccgcatggctaccaagggttcgggttcttcatccatggcctgtggagcggttcaccgccagacacccgaggcaggagcccggtgcgtaa

SEQ ID NO: 390836 - DNA, 1284 bp, Salmonella enterica
atgtacactcggttctttaaatttttatttcgttatatagttattgcgtttgctgtatacatcatctggttttacatacctgataatgagatgaagtttaatgataagattacagccagtattgcactcatcgctttgataatagcttgggatagtgccgtaagttctaaaagctcaggtgatatagctcaaaagacatttgaagaaaaccagagaagtgcaaacttcaataattttgaacagcgttataactcactgcttgctcttcataatgacctacataaatcggtcggtattttccttgattctcctgataagatggatgggaaaggtggtatagcagcatctggcggtaagtcatactttcaaaatatacgaaaaatgaaaacacttgaggaagcccataatacactaatggggcactctgttatcagtccctatatgagagttctttaccatcttttgaaacacatctttacgtattcaactaatcctgatatttataaaaaatatacatccccattacgctcacttattcgtaatgatgttctttatcttgttgcactaaatacagcaattatctacaaagatggttcgttagatgataatggctatcaagagtttcaggagtatcttcaaaagagtgatttctttgaacatacaatattcactgctgatgagtataaaaattttaatgctgttaaaagtgaagtagaattcagttttgatcaaaactttaatatcccgattaggaattatatttttaattatgtgaaaacattgaggttccaaaatgatgtgattgatttgcacaaggatttaatgctttgtgttatttttaaaaatccgtttactcctcttgttaactcttatattgacaatgtttcactggttgtcaaagaatcatataagtatcacttaggtcaggtttgtaaatccgaaaatagatacttgggtcttctgaatgatttatgcgcatattatgaaaaggagaataaagaaaaggaacttacattgataaataatttctctactcttcgtgaaattgcgagtagtaataaagataagtatacattattcttcgtaagacgatctgatggattctcagataattgcgccaatgtagcaaactggattgttgagtttgatagatatagagaagtattgcggcagcatgaaaataataagttaaaagtagaaaaagatcttgacaatatatcaaaattattttcgagtatgtttaatgaaagtatagctaaatataaattaaatggtctattttag

SEQ ID NO: 390837 - DNA, 1437 bp, Salmonella enterica
atgataaagaaaaaaggatttaccttactggaagtcagtattgttttaggtattggaacactcatcgcttttatgaagtttcaggatatgagaaacaatcaggaagcggtactggctgataatgtcggaacacagattaaacagcttggtgaagcggttaaccgctatatcagtattcgctatgacaagatttccacactgtcatcttctcacaatcagagcagtgatccgggtccaagaacctgtacggctgctggttgtgaaatcacttaccagacgttgattaatgaaggtcttttacctgtcggctatactggaaccaacgcgcaaaaatccacgtataagattttgttgaagcgttcgggaacagcgcctgattatgtgattaatggtctgataacaaccagcagcccttggaaagaaggtgggcgcattcgctatgacctattaggcaaagcagttcaggctgcgggtgttgatagtggtatgagcagaacaaccaagatagcttctggctatggtggtcagtggagtgagaattcaggcaactacagcaatattactgatggtggattgctggcttaccgcgtgggctataactcttctatgtattctgtttacttgcgtcgtgatggaacattgcctatgactggcgatctaaatcttggcggtaagagcatcaaaaacatcaaagatatgacggcatcaggaacaacaacgaccggaacacttaatacaacgggtaaagcatctgttgcatcagatcttgctgttggtggaacctcaaccctgaacgggcaggtaaatatcaataataacctgaaagtgaaatccgatacttatctgaacacgctatctacaacagggctggctaagtttggtagtcgtatcgcgaccaatggactcaatcccaacgatctaccatctggttgggctggaggtgttcgcacctatgacttgtatgcatcggggactgttggcgctggaaccgggaaaacggttaatgcttatatgaatagtgcaggtaatatttttgcgtcaggcaatattacagccggaacgataaaatccaatggtacaattgaatcagttggtagagttaaagtgggtgaatatctccatctgaatggtcaggcaacgctgaatgcgaaatgtacgcctaatggtctggtggggcgagacagtgcgggtaaggttttatcctgcgtcagtggcaagtggtccgaactaacacctgcagcagcgtcaggcatctatgttcgctactacaatagcattaaatggtcctgtactgttcctaacagagcgacaggtggttgttcttgttcatcaggtctaaacagtattttgataaatacggattcacaacagtcatgtagtggtggtaagaacgatcactgtaggacatataccaaatatttttatgcttgtgtttaa

SEQ ID NO: 390838 - DNA, 438 bp, Salmonella enterica
atgagtaaaaacctagtctctttatcgaatgaagttgatgaaaaaatattgaagatgaaagataaagtcaaaaccacaaagaggaaagcaaatccccttaagctgcttggtttattttttgcagctctgacaactattttagttggcttaagtaatggtcgtgtcaatttatctacctattcattaataacaagcgcacttttaaccttagttgtcggtcttgaatcccatttttcatatcaagagcaatgggcaagacaaaaatggacattattgaaactttatcaaatacaaaataaaatccggctgctcaatgaaagtgatagaacaaatcaagatattataaatatctatatttcagattacttgtcaatatgggatatggatctttctcggtgggaaaagattaaaacacaagaaaaacacaaggcgtcttaa

SEQ ID NO: 390839 - DNA, 990 bp, Salmonella enterica
atgaacgaagttgacgagtttatcgcagcattcaaaaaagaggaggatatttactcttcttggggtgaactcgtccgtcaatacataaaaaatacattagcagaaaaaaggatggattctatactaaaaattgaaccatcctgtagattaaaagatatatcatcccttattgaaaaagctttttatcgttcaaaaaattacgaaaacccgtacaatgatattacagataaagttggggtacgatttgttgttctactaacggatgatatccctgttattaaagatattatagaaaacagccctctttgggagtattcagacgatcgtgattatataaaagaaaaggaagataaaccatatttatttgattaccaatctgtacattatgtagtcaggaatttaaagtgcatacctgtaagcgaaaacattataattcctgatggtactccatgtgagatacaaatcagaactcttcttcagcatgcctatgccgaagtatcacacgactctgtatataaatgtaaagctaagccttcctctgaaattaaacgaagaatggccagaactatagctttaatggaatctacagatgaattatttttattagcaaagaatgaattaaataagagcaatgaaaaaatagaacaatgggcaacttattctatatctatgtgccataaaataaaccccagttatgatgaaaagataaaagataagatactataccatataattaatgtgtattttgacgtcttaacagatcaactaatagaaaaatatgctacatattttgaagacaatgaagattatgagcaatattttactgaaagattaagctcagattatatctcaggattttatataaaacaaagtgctgctattattttttgtttgtttatggcggaaaaaagaacgcagatctttaaaagcaaatggccattctcggaaaatgatcttaacgaaataatgctaataatgggtaagcaatga

SEQ ID NO: 390840 - DNA, 129 bp, Salmonella enterica; identical to SEQ ID NO: 388177

SEQ ID NO: 390841 - DNA, 606 bp, Salmonella enterica; identical to SEQ ID NO: 107131

SEQ ID NO: 390842 - DNA, 1245 bp, Salmonella enterica
atgcggacacgctttagtctacggttatctccctttacttcatttcctttctcacaggccagaaaacataactggcctgaatattctctctgggaccacggtcccacctgcatcgtctgtcaggttatctgcctgggaccacggtctcacctgcgtcatcggtcaggttatctgcctgggaccacggtcccacctgcgtcgtcggtcaggttatctgtctgggaccacggtcccacctgcgtcatctgtcaggtaatctgtctgggaccacggtcccacctgcgtcatcggtcaggttatctgactgggaccacggtcccacctgcgtcgtcggtcaggttatctgcctgggaccacggtcccacctgcgtcatcggtcagcttatctgtctgggaccacggtcccacctgcgtcatcggtcagcttatctgtctggggccacggtcccacctgcgtcgtcggtcaggttatctgtctgggaccacggtcccacctgcgtcatctgtcaggtaatctgtctgggaccacggtcccacctgcgtcatctgtcaggtaatctgtctgggaccacggtcccacctgcgtcatctgtcaggttatctgtctgggaccacggtcccacctgcgtcatctgtcaggtaatctgtctgggaccacggtcccacctgcgtcatctgtcaggtaatctgtctgggaccacggtcccacctgcgtcatcggtcaggttatctgactgggaccacggtcccacctgcgtcgtcggtcaggttatctgcctgggaccacggtcccacctgcgtcatcggtcagcttatctgtctgggaccacggtcccacctgcgtcatcggtcagcttatctgtctggggccacggtcccacctgcgtcgtcggtcaggttatctgtctgggaccacggtcccacctgcgtcatctgtcaggtaatctgtctgggaccacggtcccacctgcgtcatcggtcaggttatctgactgggaccacggtcccacctgcgtcgtcggtcaggttatctgcctgggaccacggtcccacctgcgtcatcggtcagcttatctgtctgggaccacggtcccacctgcgtcatcggtcagcttatctgtctggggccacggtcccacctgcgtcgtcggtcaggttatctgtctgggaccacggtcccacctgcgtcatcggtcaggtaatctgcctgggactacggtcccacctgcatcgtcggtcaggtaa

SEQ ID NO: 390843 - DNA, 270 bp, Salmonella enterica
atgtatatacagtataaagaggtaaatctgatgccacgacgctatgaaattgacgctgcctggcgtgcggccatcacccgcgaacaggatggccgtcagaccgtcacgaccgcagcctttgtccgggagcttcacaagttcaactggcactggacgccccgccaggctaaccagtggatagaaacgtatgtgacggtgttccgggacgtctcgcccaatgagggagaaaaccggacgttccagctgtttaatccgaacggagggcgctga

SEQ ID NO: 390844 - DNA, 384 bp, Salmonella enterica
atggggtttccgtcaccggcaatggattaccaggaaagccgcctctcgctggatagctactgtaaaaccgggcgtccgggcgtgttcctatttcgtagcgactgcacctcgttccgggagggcatcaggccgggttcgctgctgatcgtggatttcggcgcgcggccggttgacggcaccctggtgctctgcgtgctggaagatgaattcaggatcatgcgactgcgtctccatccggcaagatgtctacaggagctggacaggccggagaacgtccgcgccctgccggataatgaggatgaaggtatcgagatcaggggcgtggtgacgcacatcgttaccgatgccagaacgggggagttcgaggatttccctgtaatttag

SEQ ID NO: 390845 - DNA, 282 bp, Salmonella enterica; identical to SEQ ID NO: 141564

SEQ ID NO: 390846 - DNA, 303 bp, Salmonella enterica; identical to SEQ ID NO: 141565

SEQ ID NO: 390847 - DNA, 1026 bp, Salmonella enterica; identical to SEQ ID NO: 129696

SEQ ID NO: 390848 - DNA, 1029 bp, Salmonella enterica
atgagtaaacttattatccccggtaattctggcatgtttcttcgtgatattggtgctgagtaccaggaagccgccaaaaatttcatgcagttccttaatgaccagggtgcttactcacctaatacactgcgcgatctgcgcctggtctttcactcctgggcgcgttggtgtcacgctcgtggtcttgcgtggtttccgatctccccggaagctgcccgcgaatacctgcttcaactgcatgatgcggatctggcttcaaccaccattgaaaagcattacgccatgctcaatatgcttttgtcacaatgcggactgccgcaactatctgatgacaaaagcgtatccctggcgatgcggcgcatccggcgcgaagctgcaaccgaaaaaggcgaacgcacaggccaggcagtgcccctgcgctgggatgacctgaaacttctcgacgtgctgctctcccgctctgacaggctggtggatctgcgcaaccgggcttttctgttcctggcctacaataccctgttgcgtatggctgaaatgtcccgcgtgcgtgttcgcgatctggaacagactggtgacactgtaacgcttcacgtatcccacaccaaaaccatcacgaccgccgccggacttgataaggtgctctcccgccggacaactgcggttctcaatgactggctggacgcgtccggactacgtgatcacccggatgcgatacttttcccgccagtacaccggagcaacaaagcgcggatcactaccacgccactaaccgcgcccgcgatggagaagattttcagtgacgcctgggcgctgctgggtaagagtgatgccacccccaataaaggccgttaccggacgtggacaggccacagtgcgcgtgttggtgctgccatagatatggctgaaaaacaggtgtctatggttgaaattatgcaggaaggtacatggaagaagcccgaaacactgatgcgttatcttcgccgtggcggtgtgacagtaggtgccaatagccgcctcatggattcatga

SEQ ID NO: 390849 - DNA, 159 bp, Salmonella enterica; identical to SEQ ID NO: 171887

SEQ ID NO: 390850 - DNA, 1221 bp, Salmonella enterica; identical to SEQ ID NO: 40278

SEQ ID NO: 390851 - DNA, 135 bp, Salmonella enterica
atgcagaaaaccctcaaggttggaagccgaattactttgctggatcagttgcaacttatgatgcaaatcgaattgttaaatgtggtttttatgatgaatacaatttccataaagggacatttagagctgatttaa

SEQ ID NO: 390852 - DNA, 474 bp, Salmonella enterica
gtggaaacaacaggtattatatttttggtagtgatttttatcattatattgactgtttctgatctacagaagaaaaagcactacaacagctttacagaagttctggatggcgatgttttatcttatgaatgtcagcgaaccgggatcgtcatagacaccaaacagcgcaccattcgttttttcgataaagaaagagacaagacatattcctatgacaatatcagagagatcaattatacgctttcagagggtggtaagttttacgacaatggaacactgaaaggcatgaataatgcggctattgctaactggagagaacaacttgcagctaataaaagatctggactaaatattttaactgatgatattaaaaaccccatgtggaaaattaatgttcccttaaagaataaaataacttcaaaccaagaactgtacgaacgctggcttcttgtatttaaaaaatatgttttttaa

SEQ ID NO: 390853 - DNA, 249 bp, Salmonella enterica
ttgatatatcaggagagtagtatgtgggtttcattaacagatgaacagcgtctggtcattttgaaagcttatgggattgaatacgacagactggtacgtgaaaaggaacgatatgagatcacgtcagtttctcgtacacaagcgtggaaacttgaacgggagggaaaatttccaccacgtaagtctatcggaaagaaatcctgtggatggttattcagcgaccttctctggtggatacagaccagatga

SEQ ID NO: 390854 - DNA, 135 bp, Salmonella enterica; identical to SEQ ID NO: 390851

SEQ ID NO: 390855 - DNA, 180 bp, Salmonella enterica; identical to SEQ ID NO: 389068

SEQ ID NO: 390856 - DNA, 654 bp, Salmonella enterica
atgaaccagccgctttcctggcgcgttatcgtaggctacagcctgggtgatgttgccaataatttcgccttcgccatgggggcgctgttcctgctaagttattacaccgacgtcgcaggcgtcggtgccgccgctgccggtacgatgctcttactggtacgaatatttgacgccttcgccgatgtggtggcgggacgcatagtagatagtgtaaatacccgctgggggaaatttcgcccgttcctgctgttcggatcggcgccgttaatgctgtttagcgtactggtattctgcgtcccggcagagtggagtcatagcaacaaagttatttacgcatatctcacctatatgggacttgggttctgctatagcatggtcaatattccctatggatcgctggcgacggcaatgactcaggaaccgcgttcgcgcgcccgtctcggcgcggcgcgcagtattgcggcctcgctaacgtttgtctgtctggccttcctgatcgggccgcgtattactcatattccagcccgacagaaatggcgtcggtctacctcttctgggccattatcctggccattgccggtatggcgctgtatttcatctgttttaaatctacccgcgaaaacgtggtgcgtatcgtcgcgcagccgtcgttaa

SEQ ID NO: 390857 - DNA, 1686 bp, Salmonella enterica
atgaaaaataatataaaacaccacattaaaaatacactgacatctattaattggttgaattttacttttctttttctgagcttttcatattcaatttatttactgttaatctttggtgctcttgctcaaggctatataagctcattcggaatttattcatgtgaaaactgctttactgaagttgaggatttcacaaagattattagcaataaacctgacatttattacctcaccatgtcgatgattattttcatattttcattggcatttaaacaaaggattaaaatacttattacaacttggctggcggcagcatttactattacagtatttgacgtcaccttagcaaaggaaaatataagtttaattccttacaccattgaaaacttgatgtttaatagttttggtggattttttctttccctattcgttttattaaaccttgcgagcattagttatttattgaaaaataccaaaactagcattggtattgctacaatcattccactatcctcctccttcgtacttagctttatgatttatgggtttttatatctaatttatgaaagaagtcctgttcatatagatgcgcttttcaatgaaaaattattaggttcgatacatactgcggatgatgagggttttggtttcctcactgcctcaaaaacgataaatgatgagataaccatacagtcctatttaaataacaattttacatggaggtctggcgatcaaagttatgatgtcgaagcttatctattctctgattgtattttaaactcaacatcactcaataagtacaaacaacaacctgtgaaattaactgatgtaaaaacattagagttttcatctgacagaccagtgatctatttcatcaagggagaaaaactttcaacatcaattcaaaactcaaaagaggtcaactatagcaacaaagacaaaataagaagtcaaattgaggatggttcagctaaatttaaaagtacttatttgccatttacattaatggttaacatagcaccatttgatgaaaaatcatttttagaaaaaacagaatacaaattaaccatcaacaagcaagaaaatttaatcaccaatattgtgcaacagtacaatataataaataaaaaagaattaaaatgtcgtcaaatagttacaccagataatagaattcctactaagaataacattactggtgttgcatcaattgcttttagattcattcctaaaggtcacctcactttatctaacgtcccacttttgacaattaatataaaaaacggtgacttcacgaaaacaaaggacagtaaagcccctctttcggatattagtaatggctatctaaaacacattaatttgatcgggcttgaagaactaaaggttaacaataagaagatagatgtttctgactccgaccttctatatgcaaccggaaataaccttgttggatttgtcaccaaaaataacaaaattaaaatttttggtactgcggaaaaactagcccttaacactaagattatgaatttaaagcccatatccactttaaacagcaaactatcttattttaacacctctttaatagatgttttaaaagtgatatttggaatgggggttgttatattcatttccaactattttgttaagttcataaaaagaaaggaagaaattagagtattacgaaagtag

SEQ ID NO: 390858 - DNA, 771 bp, Salmonella enterica
atggaattatacacaggcagctccgatgaaaaagatgcaagttatctcctttcttatttggatgatgttttaaccccagcatctgaagagtttttcacaatactaaacaacaataaactgaagcttcatcatgtattttcatttaacgcaatcttggctcacgttgttgattacatgatatttattgcaaaaaagaaaactgaaataaccagaactgattttattaaaagctttgataaacgatatgaagtggatgggagtaagcacattagcaataagttttctcttttggatgcgattaacaactcattcaagcatgttgaactggataaaaaaagatataaggaacttatagaaaaatatggagatttatcttttcatagtcttaaagctgataatggtaaggttttctttgaaatgcccttatacaaatttgattatgcgagggtagtccttagacctatatcaaatattttcgactgccagttaagaaatattagtgacattgacgacttcataaatggaagaatttatggcagtagtggttatggacatttcgactacgattatgaaccctgggatgccattgataggatgatagattactgtaatgctgaatgcatggactgcggcgaaagtgacagcaattgtgattgtcaaaatttcatttatgaaagtaaaaatggccaatttaatccagatacagatccaagattcaacttcgacgatgtgatgtctaacattagtggaacaagagaatggcgaaaatga

SEQ ID NO: 390859 - DNA, 1224 bp, Salmonella enterica
atgattataatctcatacattacattatgtttattgtttgttgttttcctttacgccatttctgtcaaagtagagggaaagattgtaaatgtaatggttccctatttaataataactgttccaacactatacatttttgagggtatatttgtttacctttcaggcattcaggaatacaactcagaatatttatttttctatacttgttatgtgctttatatagcatcattcgtactttcatatctttactctcaaagaaaggaagtagatagcgttacaaaaataagtaatgatccaaggtacgtattctcatctattttattcacgctacttgcattctttttctatcttccggttcttattgagttcagagagtacatactgatccctcgcaggatttatgaactaacacgtacagggtatggtatttatttttatccttcattaatgttttcactggtagcttctatttgtgcttttttcacacacaaaaaatcaaagttattttgcgttgctattgttttaattaactgcgttcttatattccttcacggcaacaaaggacctatatttagcatatttatagcatttattctttatctttcttatattgaaaataaaagaattagattcatgttcctagttaaatcgtttgctgtcatagctttcattgttacagcattttttgcttatacttttactgacggaaaccctattgagaacatggcaaattactctgactatacccgtaatgctgttctggttgcatcatcaaactttgacttcatgtatggaaagcttttgatggagagcgaggtttactcaaggattccgagagccatatggcctagtaaacctgatgattttggcgcgttgcatctggcaaaggtattcttccctgatgcattctacagaaatgagggtgctccagcatttggttacggtgagctatatgctgattttgggctcttcacacctgtctggcttattgtgtcaggtgtatttaagggtattctcgcaaaatatttctccaataagacacaagagaataaatcggctcattatttcataatgttccttttttgtattggcataagtataatacctgtaagtatgggctggcttttccctgagcatttaatggtggcatttatggtatacattgcatcttctttcgtatttttcaatagaaaaaagttcgtttttcttaagaatagtgcataa

SEQ ID NO: 390860 - DNA, 2223 bp, Salmonella enterica
atgtcagatatcaccgctaatgttgtagtatcaatgccgaaccagctcttcactatggctcgttcttttaaagctgtagccaatggcaaaatttatatcggtaaaattgacactgaccctgtaaatcctgaaaaccagattcaggtttatgtggagaacgaagacggttctcacgttcctgtttcgcaaccaatcatcattaacgctgctggttaccctgtatacaacggacagattgccaagtttgtgactgtgcaaggccattccatggctgtatatgatgcttatggtgctcagcagtattattttcctaatgtgcttaagtacgatcctgatcagtttgaaacaaagctctctgatagtaatggttatcaattcattggaacttgccaagatgtgcaaacattaagaacattaactaatgttccaacaggaagaaaaatccaattacttggatattattcgtcaacaccaggtgtaggaggaggaactgtttattcatcaagcgactcctctctttcagatgatggtgttcgtgtctttgtaacagttgatggaacaagattggtacgcgagactaatggagaattatacgcctcatgggcaggtgcagtaggtgactggaacggaaataccggcacggataacaaagcggcaatagaacggcttatcgctgcatcagggactaaatataagtgggttattgacctaacaaatgttggcgtaagttctgtggttatcgacagcaaagataactggaatggccacatcaatggcagcgtagtcaatatttcagccaagcctgctcctggtgcagttgatcgtaaagaccaggatggtggcgtacatccaacattcaaaataaccaattctgatgggtggaagttaacaggctcgttcgtcgataaccgttatcgggaggctttctacgtagagaactgtgattactttgagcttggttgctctaatattgggagcggaattaacgataaccttacagccaaccacttcaggtattgcaaccactttactttatcaggtgtaaggattgagaaatcaggtttcatcccagcaactggatattatgactgggttcaggccgccagattttgggattgtagcggttttgttatagatggatatgtttcccgcgagaacgctggaaatggattatacattgcaagtaactgtaaggattatgtagttacagatttcgacattacaggcaatgccatgtccggaattcagcttgcatggtcaggttttggtataatgccaattcggggtgttatctctaacggaactattacaggaaacagggctgatggcatagacgttaataataccagcggtgtccaagccagagttgatctaataattactggtgtcgtaagtgcaaataacggttataaccaagacggcacagcaactgttgacggttctggattgggtacattcattcaggttacacattttacagtttatggctgctccacaacatcgccagctaatacaggggtgggggtgagtaactgctctaactttaaaataaacggtataattaaaaaagatcaaccatctaacagcaaagggcatggggtatacattgaaaacagcactgacggtgaaataaacgttgatgtaattactgactcggaaaatccagaaatgttctctattagaacgtttggctatctagaaaacattcatttttcagggaaatatattggatatagtttgttcggagatgatgcaacttatgttaactgttcattacgcaacgcatccattatatctccaaccacagttggaaatagattttactgggagggtgtgaacacagttgttgcgggttcaaacgctgttgatattaaatcaaaaatgaatgattgccgttgcgtttccaataacggtcacggaggagtagtttctgcttccagcatagacatccaaaatactgaattcattggtacagatggcggcttatatgtatccgataatatggaaatgatccgcatcagaggaggtatagcgcagggggtaacatcggcaggattaagaataagtggaggtgaaaagcatatcattgaagggattactacaaaatcaacatcaggaaattcaagcgctattattagggcatcaaaagtaatttacgtaggtaattatgattcagcaaaccctacggactttacaggaacaactttcacgcttcagaactaa

SEQ ID NO: 390861 - DNA, 438 bp, Salmonella enterica
atggcgcgcccaacaaagtatcaagaggcgtatgccgaacaggcacgcaaactgtgcttgctgggctacaccgatgcagaacttgctgatttctttgaagtcagtgagtcaactattaacaagtggaagcttgattatcctaagttttcggagtccataaaaaagggtaaggccgtcgctgatgcagaagttagtgaccgtctttatcaacgcgctatgggctttgtggctccagacatcgatattcgtgttattgaaaacagaattgtcgaaactccgcttgagaagtattacccgcctgatacaaccgccgccatcttctggcttaagaaccgacagaaggataaatggcgcgacaagcaagaagttgaacacaccggagaggttaacctgattcagcgcattcaggaggccagaaaacgcgcgagaggtgagtaa

SEQ ID NO: 390862 - DNA, 723 bp, Salmonella enterica
atgaatgagttaataaatggcaatgccatcaaaatgacaagcattgaaatcgctgagttggtgggaagtcgtccagataacgtaaaaatatcaatagagcgcttggctaaatctggagttattcaacttcctgcattgcaggttttcgaaaaaatcaataacttaggtctgcgccgtagtgtcgaggcttacgtcttcgaaggcgaacaaggtaagcgcgacagcattattgtcgtcgctcagttgtcgccggaattcaccgctcgtcttgttgaccgttggcgagagcttgaagacgctgcggttaatatccccaaaacgctaccagaagcgttgcgccttgctgctgatcttgctgagcagaaaatgcaactggaaaaccagctcgcaattgccgcacctaaagttgagtttgccgatcgcgttggcgaggccagcggaattttgattggaaactttgcaaaggttgttggaattggtccaaacaaactgtttgcgtggatgcgcgatcacaaaatccttattgcttcaggttcccggcgcaatgtgccaatgcaggaatatatggatcgcggctatttcacagtgaaagaaacagcggtcaacacaaatcacggaatacagatatcgttcaccacaaaaatcaccgggcgtggtcaacagtggctgaccagaaagctgctcgataacggaatgctgaaagtaataggggaggctgcttaa

SEQ ID NO: 390863 - DNA, 528 bp, Salmonella enterica
atgactatcaaatcaaatacgccagcacacgacaaggactgctggcaaacgccgctttggctttttgatgcactggatattgagtttggattctggctggattcggcagcgagcgacaaaaatgctctgtgtgctcactggctaactgaggccgacgacgcgctcaattctgagtgggtaagccacggtgcaatctggaataacccaccgtacagcaatatcaggccgtgggtggaaaaagccgctgagcagtgcatacaacagcgacagacggtagtgatgcttgtgccagaggatatgtctgtcggatggttcagcaaggctctggagagtattgacgaagttcgcatcatcactgatggacggattaattttatcgaaccatcgacagggctggagaagaagggaaacagcaaaggttccatgctgctgatttggcgaccgttcatcagtcctcgacggatgtttactaccgtatccaaagcggcattgatggcgatcgggcagggcgtcaggagggctgcatga

SEQ ID NO: 390864 - DNA, 291 bp, Salmonella enterica
gtgactggaaaagaaatcatcctggaatatctgaaaactcatgaacaattctccccacatgaattagcactgatcaccggaataccaaataacagaatcgctcaagcagcaaggcatatggtgaaacaaggacatttgagtgttgttgagcgtaagtggaagacggttatttatgcaaaacgcaaagtgaagaaggagccaattaaaagaaatccagatggtacggggtggggatgtgcaaatccaatgacggcgtttattaatagggcgcttatggaggtaaggcaatga

SEQ ID NO: 390865 - DNA, 846 bp, Salmonella enterica
atgacgctggatgaaaagatctcccaactggagaaaaaacttgcagaattgagttctccgccaattgctatcgagcatacagctgtagaaattggcactggcatctgtgaaaaacatggtgagtttgagcagcgtaaccgttactcgactgggccaattaagtttgcctcaagacctagcgaatgcccggaatgcatgagagatgagcttattcggctacaggcagagaagattaaaatcgacgaagaatcacgtaagcgcaatgtcgagtttctgttgaataatcttgatattcctgaacgattcaagggttgcacactacagaactacgagccagtcaacgacgatgcaaagagagtgctcagggtgtgtcaggcatacgccagcaaatggcctgagaggttacagaaaggcggtgggctggttatgtgtggaaagcctggtactggaaagaatcatcttgcactggctatcgcccggcacgcaattacggaacatcaaagctcagctattttcacaacggcgctgaaaattgccagagaatataaatcaacatggtcgaaaaactccacccgcacagaggatgaagtgatccgacagttcactaaacctgacctgctaattatcgatgaggttggtgtgcagtttggaagcgaggcggaaaagatgatcatgttcgaaatcatcaacacccgctacgagcgcatgaagccaacaatcctgattagcaaccagagcaaagatgaactgtctgcattcattggtgagcgtgttattgacaggatgaatgatggcggcgggtgcactcttgcgtttacatgggatagttacaggagcagatcgtga

SEQ ID NO: 390866 - DNA, 843 bp, Salmonella enterica
atgagccttgctgaagtattttacctgccgaagagtgaacctgttgaacaggagcgaagagtggctgatatcgatgatggttacaccagattcgctaacgagctgctggaagctatcgcaagtgccgatttaaccgctcgccagttgaaagttatgctggcctacgtccggaaaacatatggattcaataagaaaacagatcgaatagccgatgagcaaattgctcagttaacaggactgtcaaggcagaatgttaacaaggctaaaaaagaactgatttcaatgaattgcctgtttatggatggaaatcaaatcggtgtaaacagtgaggtatctgcgtggcaattcagcaagtgtctccaagttagcaactttgtctcgaagttagagacaaaaaatgtctccaaattagagacactcaatgtctcgaagttagagacacacaaaagacattctttaaagacaaaagaaaatattaataaaccccctatatcccccaaaaaagtttctcagaagttcgacccgctagaaacagagttgcctgattggttatcagcagaaacatggttgtcgtgggttacctatcgcaaggagataggtaagtcgatcaagtctaagcaaagtgtcactcaggctatcaacgttctaagcagaagtctggagaagggatatacacctgaagaaattataaaccagagcatcgccagtggttggcaggggatttttgagcccaagactccaaaggggaaatctcaaccgaggccgcagcatcgagctatgcaggaaaactttgccaccaaagattacggacaaactgaaatgccttcatgggcgcaggagtga

SEQ ID NO: 390867 - DNA, 645 bp, Salmonella enterica
atgacatacgaaaatgacaaattccaggttctgaagagcatgaaggtgccagatgattttaaatcaaatggctttgtttatgtgctttcgaatgagtgcatgccaggaatttataagattgggatgactaagcattcaccagaagttagggctaaagaaatttcagcctctactggcgttcctaagccatttaaggtgatagcagcctttcattcaaataatcccgcatcagatgaaaaactcattcataaagcctttgcaaaagagaggcttagtgataatcgagagtttttcaagcttgaagataatgatctttctgaatctctaaatgaaataagggcgctggttggccctgaaagaaatggcgagacggcagaatacgcaatttacgactcattcatttcttttcgccatgaaaatgagcttgatcttaatgaggagcttatagagcaaggtctgggtagtgtagttggtcatcttcctgcggtgaaaaatttccttattcgcgccggaattgattacgcgaagcaactgataagcaaatataactcatcgatagttattaatacagatggcagtgtggtgatggttaagtctcttgaagcccaatgctttgatgcggaggttggaaatgagccttgctga

SEQ ID NO: 390868 - DNA, 282 bp, Salmonella enterica
atgaacgtagttgcaactaaaagcaagaaggcggctcgcattgagtccactttactcaacaagttagccatgatgggacagaagacattcgctaaagctatgggtgttcctgaataccaggtaagccgatggaagaacggtttcttctctcaggtcagcatgatgcttgcggttctggagtatggaatcgaagacgaggaaatggcagagctaaccaggcgacttgctacctacctgacaaaagaaaaagccccgaagaacggcgaattcttcgaggcctga

SEQ ID NO: 390869 - DNA, 1023 bp, Salmonella enterica
gtgtctgctactatccataattttattgttcatcaaattaagcgtgacagctctagagcggcaatgttaatagagcgctttcaagagaatgatatagatgagcttactactgatgttgttagtagtcttttaagcttatttagtaagaccggattacagacaggaacttttagccaagttagcggaaaacctaaatttgaacaggttttagaaaaatattcttccatcaatgatgatgttttttctttccctgacttcactcaaatgtcaattgatttggctagaattcttgagggtgaaatgaataaaggcgcaggtaaaatagctaagccaacatatattgtgttttttcatcactcattcggttctaaacattatttatcagttattactcttctcgaaacaaaaggttttactctagaggatctatcgttcaagcttattgatagacttgatcttgataaattgcatcttgcagcaagaataagacttaatgattggaatgatgaaatagatgaaagatatatatcttttagagtagggcgtgcaagcgaaatccgtgattactttaaagatttcataggttgtgaagaattcactcaggctaaaattgaaactaaaggattagttgatgctatcaaacattgcctgcaattagttcatgaaagtgaaccacaaataataaatgaaaagctagaattggctgaggatttttgtaaaaagcataaggatgatgatgggaaaatcagtctcgaagttttaggcagacatttgtttcctgaacatgagcatcttctccttaatgtggcacaaaatgaaccgtacagtttaagtgaacgtgttagtattgataatacaggtttgaaagcgttagttcgttatcgcggcagtgataaaaggatgagcataagttttgatgctgatttattaacatctaaaacggttgaatttgactcaacaactggaaaattaacattcaatcagataccaatggttttacgaaaagcattagaaaagggataa

SEQ ID NO: 390870 - DNA, 303 bp, Salmonella enterica
atggtaaacataatgtttgtaatgaggttgttcaatatgttacataatgtttctacttcagtatctgtgcctgattcttcgcttatgaggtgtgacaaggaatggggatatgcgcctagccatttgcatctatgctgcacgcgcggcagagaaactccgcagcgagcaccagtactgccgtttcatttcaacattcgtcaaacattcccctttgccctgaacgaaccctgctacggtaacagcgccgcggtgaagcttctcaccccgcgcaggattcacgcgatattatcaatgcggctgtga

SEQ ID NO: 390871 - DNA, 1542 bp, Salmonella enterica
gtgaaacagagacaacacagcttaataattatcatcagtttaatgatagtctcatatactgttaataaagtggttttcgcgagagactcatctataccatttctttccactttatcttttttattaatttctttttatttattgagatgtaggaatctggtaccacgtattactggttacatccttgtatttttactgtcatctgaaatttcatacttcatcgttttcaatgaacagatatcttttgacgttatcagttccattgtggaaacaaaccttatcgaagcgaaaggaatgtttttaagtgatgggataaaaatttttggaatagcaattctattaacattagcaataagttatggaataattaagctttataaaaaccaggataacttcaagtggattccaaaactatcaatcctcctgtatttattaatagcgataatgatagtaaatgatttgcggccacaaataagcaatatcaaaatgagcatgaacgaatcgcgctcaacaataggcaaaattattaaaagctacttccccgctgttataggtgacgtggcatatttcgccagtacaatgctattgaatgaccgttactcggatacatcattaataccagatttcaacgaggctataacaggtaaagaagacaacgataataataccattgttatcgtaatgggagagtcttctctattttcaaggtatagcatttacgggtatcctaagctgacaagtccaggcttacaaaaaatattcacacaacccaaatcatgcattgtcagaaacgttcattccagtgcccctcaaacaagggattctcttgcaatgacattctcattcagtacgccagaaagcgataataacctcttcaagaataaatccattatagaaatggcaaaagctaacgggtataaaacctggtggattggctctcaggaacttgagggattattcagctcaaaatatggatttattgcaaggaaaagcgacattgtcaggctgacgaatggacacgatgaacatctgataccaatgctgactgacgcgctggaagactcgtctgccccccaaaaatttataatagttcacctgctcggcaaccataagccttatcataactacgatgcagaagataagaaggcattacccggagctgaagaatacgatttaactattcataaaacagacagagttgtttctgaattgttcaacaatgtagcaaaatacagtaacaactatatattcctgtatacctcagatcatggagaggtggttaataaaggtcatggacttatgaaaggtaaggatcaatggtacataccttttctgtataaatctacctatgacaaatttgattgttcgttcattgaacaattcagaaataaggatggatggctgagtggtcttatgaataagtatatcctttcacgtctcattggttatacgcttgataaaaacattgttaatagtgaaatgaataacgacagagtgaaggcagcaaatgaaaaacccgtcttatttaaagatacagagtaa

SEQ ID NO: 390872 - DNA, 561 bp, Salmonella enterica
atgaaatactcacagcaagaaaaactacagatcatgatgctcagtgatattcaccgagcattagaaattgaaaactcatttgatcctgacctcattgacgaagcagtcagcacggataactactgggctttatcctgggaatacccaagccttcaagatgaagacgaggagaccccttgggaggtcaaactattcgttgatacctatgatatgtatgacattctccaatacacatacgaacgtttcagtgcggaagataaagcagaggttgcagaatctattcgtaatttcgatgagaaattctcactcacattccctgggtttgacggtaacaacgagtcaaagtttcttttgattggtagtttattgaaacggatgggacggtttagcggcaaagacgatctcactcggaactctcacatgccctctgttgcaatttaccaacgtatgcttgaagttttccttccagctcgagctaaaaattggattcacaatgtgggcataactaaacaagattttatcgatacactcaacgcgagagtgcatccagaaaatcgttaa

SEQ ID NO: 390873 - DNA, 1257 bp, Salmonella enterica
atgggtattacgtcccgcttaaaagtcatgtcgttcttgcaatattttatctgggggagctggctggttaccctgggctcttacatgatcaatacactggattttaccggcgcgaatgtcggtatggtctacagctcaaaagggctggcagcgattatcatgccgggcattatggggatcattgctgataaatggctgcgcgctgagcgagcctatatgctttgccatctggtttgcgcgggggcgttattgtacgccaccaccgttaccgatccccagacgatgttctgggtgatgttggttaatgcgatggcgtatatgccaacgattgcattatccaatagcgtttcgtactcctgtctggcgaaagcaggtcaggatccggtaacgtcatttccgcctgtgcgcgttttcggcacaataggttttattgttgcgatgtggacggtgagtctgatggggctggaactgagcagtgcgcaattatacatcgcttctggcgcatcgttattgctggccctgtatgcactgacgttaccgaaaattccggtagccgagaagaaggcgaacaccacgcttgccagtaagctcggactggatgcttttgttctgtttaaaaatccacgcatggcaatcttctttttgtttgcgatgatgttgggggcggtgctgcaaattaccaatgtcttcggtaatccgttcctgcatgattttgcccgtaatcctgagtttgccgatagttttgtggtgaagtatccctctatcttgctttcagtttcgcagatggcggaagtgggctttatcctcaccattccgttcttccttaaacgctttggtattaaaacggtaatgctgatgagcatgctggcatggacgctgcgtttcggcttctttgcctttggcgatccatccccgtttggctttgtgctattgctgctgtcgatgattgtttatggctgcgcatttgatttcttcaacatctcagggtcggtatttgtagagcaggaagtggactcaagtattcgcgccagcgcgcaggggctgtttatgaccatggttaacggcgtgggggcgtggattgggtctcttttaagtggtatggccgtggattatttttctattgatggtgtaaaagattggcaaaccatctggctggtctttgccgcctacgctctggcattggccgttatttttgcattgttctttaaatatcagcaccatccagaaaaactgtcgaccaaatcattagcacattaa

SEQ ID NO: 390874 - DNA, 1395 bp, Salmonella enterica
atggcaattgttaatattaatgtgtcggtgacgaacccgccaaaaccgacaaacctgctgaaatccggtgccatggtctctgctggcggaactaccctgacgcccggtagctttcaactgctgacctcaaaagacgacctgaaatcgttcatctccccggctaaaactatttcagccatcgcctgggcaaccaataccgttaccgtcacgctggtcgagtcgcatggctgggccgatggcgatgaggttcctgtcattattgccggggtcgtgccgacaggttacaacggggcatttacagctacggtgaccggcgataaaaccctgacctatttgctgaacaccgatccgggctctgcaactacgatgggaactgtcactgccgtcgctgcgggtgaaatccagcagatgaacaccacgtactgggcgcagggaaccagccgggcggtatatgttctggaactgggggaactgagtgttcctgctgctgttgccgcgctgggcggcttcattgatgaagatatttccctggggaacacataccagaaatttttctcttaccttgtgccgcgggaatgggatacggagcaggcctttaaaacgctggcgaacaactacacctcaccaggttcgctggttaaatttttcgtcaccacgacgattgccacttacgacgcatgggtatcaggcaaatatccgaacgttttcgcaggtgttgaggcaccgtcaatcggcgcaactgaattctctatggctgcgccgttccagtcctctctggcaaatgatccaggttcctccaatatggttccgcccatggcttatcggtacatgtacggcgtgacggcttatccgatagcaggtaatagtacgcttctgaaaacacttaagaaaaaccatatcaactatatcggtacagcggcagaagggggactcagtaataaaatgctggaggctggccatatgctggacgggaaaccatttaactactggtactcagtggcctggtgtgcgctgaatcttgaactgaatctggcaaatgaagtaataaacggttcaaacactactgtgaacccactttattacgaccagaaggggattgagcgactccagcgacgtgggcttaaaacacttcgctctggtatcagttacggattaattcttggtcaggtaatcgacacgcaactcattcaggctgatttcaatgaagcctatgaaaaagggacttatgcaggaaatgcggttatcaatgcggttccgttcgataactataccagccttaatccctcagcctacgatgaaggtgattacggaggcctgagtgccgtcattacgccgaagcgcggctttgaatccatcacgtttaatctcaacgtaaccaactttgtgggggcgtaa

SEQ ID NO: 390875 - DNA, 321 bp, Salmonella enterica
atgaaagatggtatctattttgttgttttcagaagtaatcaacgggattttggcaatggtaccgtagttgtcaaaaacgaagcagtaaacggcggggattttggttttacgtatcagggcaaaattgaaggtaaccaacttattctgcgtgtatcacagcatgatttaagtgccacctcggttttcccaggggtaaagaattttgaactgagtctttcattgcaggaacgaggacgtgattaccagttaaatggctctgtagtcggaatgcctcatatgcaaatttcaattggtgcaaaatacattggtgatctgatttag

SEQ ID NO: 390876 - DNA, 294 bp, Salmonella enterica; identical to SEQ ID NO: 390338

SEQ ID NO: 390877 - DNA, 636 bp, Salmonella enterica
atggagtctctaagttcagaattatttaatattctgaagttcttactgcccgggttcttggctgcttggatttttcatgcttttacttcttatccaaaaccctctcaatttgagagggtggttcaggctcttatctttactatatttgtgcaagcgttgacattcgtagtgaagttcctgtgtttggccgtaggtactaaaatttcattcggggcttggaccgcaaatgtcgctttgacatggtcctatatatccgcagtacttattggcttggtttttagttatgccgcaaatactgatagatttcatgctttgcttagaaaggtacatttgactaagcaaacttcatatcattgcgaatggtttggggcatttcatgcaagggaagagtgctgggttgtacttcatcttattgatgataaaagaatttatggatggccgcatgagtggccttcagatccaactaaaggccatttcgttctgatgtacccagcatggatcgatggaaacaagtatatcgatttacctcaggttgaaagtattatgttcaaagtatctgatatcaaatgggttgaattcatcaagcccccagaggagtctgaaaatgtcaaggaaacaaccgaatccaccacctag

SEQ ID NO: 390878 - DNA, 579 bp, Salmonella enterica
atgcgtagtactttgcactcttttctttggcgtgaaaaacgctctgattcattcagaaagttactagcagaattcactctctttagtcttgtttttgaagaaaactatcgagctttttcagttggatttagttttgataaaatacggaaagagtattcagaacgatttagagattatttatcaaaactaaatggaataatgtacgatactttgacaagagcattgtcaatacctatttctagcttaataagttttgtagcaatgaaaggggatttttctggtagctctgcaattattaacgttggggcgttattacttgttctctttgcatcaataaatatatggtatttggttaagtttcagtcgtctatgatcaggatttcacagtctgaatataaagatttgtttgataatattaggacagaattaaaggatctcgaattaattgagctgagtcagaaggaagaggagctaaatgaccaatcaaaaaaagtaatatcaatattgaattttgtgcaatcaatttctatctgtaatcttattcttaatgcagcattatttatcataactattttttaa

SEQ ID NO: 390879 - DNA, 906 bp, Salmonella enterica
atgctcttttttacctcatgtctagttttcagttctattggaatcggagccattgcttataaaatactttttgccgaattggtcgggtggaaagctaatctattaaacgcattatcttatatgataggtatgcttggcttgctatatatatactatagggggatttcagttgacataaaattatcactaatagtcctgtatcttccagtgggtatgatttcattgtgctatattgtatatagatacataaagctttatcacgttaaaacaacaaaatcttattatatagcgattttacgtagatcttcagggttttttctttttactttattatcgatagtggtacttcaaacagattatatggtcatttctcaaaggctaactcctgctgatattgtccaatatacagtaacgatgaaaatttttggtttagtcttttttatttatactgctattttgcaagcattatggcctatatgtgctgaattgagagtcaaacagcaatggaaaaaacttaacaaaatgataggtgtcaatattttgcttggctcactatatgttgttggatgtacaatatttatttatttatttaaagaacagatattttcagtaatagccaaagatattaattatcaagtttctatgttatcttttatgttaattggcatatatttctgtattcgtgtttggtgtgatacttatgcaatgttattgcaaagtatgaattatttaaaaatactttggatattagtaccactacaagcaataattggtggaatagcacaatggtatttttctagtaagcttggaatcagcggagtgctacttggcttgattatatcttttgctttaactgttttttgggggcttccactaacttacttaattaaggcaaataaggaataa

SEQ ID NO: 390880 - DNA, 450 bp, Salmonella enterica
atgcggatgctggattggctacatcaaggggcagttccatttgcaccacaaatgcttttttctgattcagctatatttacgttaccgacttttctttttgatgaaaaatcatctttaatgtatataaataaatttggagaacttagccctttaggtggcctttccggttatgctagtgcagtaatatatttttcgtattattattttctgtggtattttattctcggtattacatcaagcctattattaagatttacatcgagtgtaaactttgtaatattatcgagagtcatttatatttattttgtatgtgattctttatttagatttaatcgtgatccttggtttattgccattaagatgtttgtgaataatatagtgtttatattgtttgttcttatgattattgctttaaagatgcgtatggaaaaacggagagctattcaatga

SEQ ID NO: 390881 - DNA, 177 bp, Salmonella enterica
atggaatcggcaagtaataccagcgtaatcctcgacgcatcagccccggcgcgtcgggcagggatgactgaaagcgaatggcgtgaagccatcaaatttgatagtaccgacaccggttgggtcattatgagtatcgggatggcgattggcgcagggatcgtttttcttcctgtctag

SEQ ID NO: 390882 - DNA, 681 bp, Salmonella enterica
atgacagaaccattaaccctattgatcgttgaggatgaaacgctgctggcggagatgcacgcagaatatatccgccatattcctggctttaaccagatatggctggcgggcaatctggcgcaggcgagaatgatgattgaccggttcaaacctggattaattctgttggataattatctgccggatgggaaggggattacgctgctgcatgaattaatgcagtcgcgctatcccggcggcgtcgtgtttacgaccgccgccagtgacatggagacggtagcggaagcggtacgcagcggcgcgtttgattatctggtcaaacctattgcttatgagcgtttggggcagacgctgacccgctatcaacagcgcagacgtatgctggcgagcgcggatagcgcaagccagaagcagatagatgaaatgttcaacgcctatgcgcgcggcgaaccgaaaggggatttgccgaccggtattgatgccttaacccttaatgcggtgatgaagctgtttgccgatccaaccgtacgccatacggctgaaacggtcgcgcaggccttaacgataagccgcaccacatcccgacgctacctggaatattgcgcgagtcggcacctgattgtcgcagagattattcatggcaaagtgggcaggccgcagcgtatttaccacggcggctaa

SEQ ID NO: 390883 - DNA, 231 bp, Salmonella enterica
atggggcgggtattggcggcagtctactggaggcggattttgtattatctggtggggggggttgtatcactagcggccatcgccgatgccgaaaaggctgtagccgacaacaccagaagcaatggggaaaatatacgatgtctcataatatcacccgtgaatattcagactatccttactgttgacttccttcatttccagcatagttcatacttcattgtcattgaataa

SEQ ID NO: 390884 - DNA, 654 bp, Salmonella enterica
atgcgcggccacattttcaacttcttccagagaggaaaatttacgaaacagaatccagttccacaggacgttcagcacagctttatagacctgttgaaactcggtttcgtccatactggcgaacgctatggatttcgcccggcgcccgcggctgccatccggataaaaatgcccggtataaaacccggcctgaacggttacccattcccggaaggcatcaaaagatttaagaagggcgacgtccccggttcgcagggtagctacgttatggaggtactgttccgccgcctcgttaagggccggggtatattcctggcctgcggagtcgcaaagaaaattaacgaacccggagataagtttctgttcccgcgatgtgaccgtgccacccgttggcgtccagtagtcgaaaccaagctgaaggagtttaaaaaatcgtttatgaaaggcgtagtgcggacacgcttaaaatcggcgtgtatccactcaccgatttttactgagcgcaggaaatccccactctccggcgtcgccgggagcagaagccctgatgaggtttgcttgaccagttgtaaatgcgccatcgttctctccggtggcgcagtagattgggagttcagcccacagacgagtataacaaaggatgattattcatga

SEQ ID NO: 390885 - DNA, 588 bp, Salmonella enterica
atggctaatttgttagattggaatacacttcatcacaaagtacaagcatacttggatcctgagaatggaatcgataaaccacaaaaagcttttccaattttgatggtggcaacgttactaaatgtatctgatgaagaagctgaagatgccataactgatggttcaatggatagaggtgttgatgctgtttatgtcgatgaccgtgatggcaggaattctatccatatatttcagtttaaatatgctgatacctttgagaatactaaaaagaattttcccagcaatgaaatcgataagttagtgtcattctttgatgacttgttggatttaaataaatctctcgagaaaacttgcaatccgatattatggaataaaattaaagaaatttgggctgcacttgagaaaagtaatccttccattgaagttcacttttgtggtaacacaatggaaatgcagaacggagaaaaagaaagagccaatgcgtcattaagtaaatataaatatttcaatgttcaccatcatagtttggacactattgttaattattttgttgaaagaatagcgttattgatgagcagttacagatag

SEQ ID NO: 390886 - DNA, 1158 bp, Salmonella enterica
atgtcaaacgaactatttaaagcattcagggcatcagaattacatgacaagaatattaattttctaattggatcaggtgcttcagcttcatttataccaacacttaaaattaatgatgatttcacttatgaagatatactcacagatagtgattatagtgaaataaaggatttcatttactaccagtactacaaaaatattttacgcaagagtttctgcttcttcaaaagagatgacgatgcagacttgcgtaaaacccgtagggaaacactcagtgcataccaagagttaattgataatattgtaaaccttataaataggaagggcgccaatcaaattcggcgagccaatattttcacaaccaactatgatttgtttttcgaaaatgcttctgataagttacttcgtaattccactaattttatttttaacgatggtgcgagaggattaaaaacacgctaccttcaaatcagtaattttcacacatcaacttggcatcagggtacaaatgatctttataaatttgaaataccaacaataaacctcataaaaatgcatggttctgtttcttggagaaaagtaaatgaggaaaaaattgaagtaagttatccaaactcttatccaaaagatttggaagttgatttagatattccagacatccaaacggcaattaaattaattgaagattttacacttactcatacggctaaggaaagtttagccctgacaaatgaggacgaattggcgcttaaggaattcagaaaagaatatgataaacttgccatcgtaaatccaaccaaagcaaagtttgaagaaactgttttccaacagcattattatcaatcacttagacttttaagttatgaacttgagaaacctcaaactgttctaatctgttttggtttttcttttaaagatgaacacattcgagaaataatttctcgatcgctcagcaatccctcattgatagtttacgttttttgctataaacatgaatccaagtctgaaataaaagagttgataaataacaagaaaattatttttatttacccagaaaacaatgatgatggccatttcatcgacttagatagattcatagattgtattttttctgtcagcgggattgattcaatggaggggttaacatgcagtttataa

SEQ ID NO: 390887 - DNA, 1776 bp, Salmonella enterica
atgcagtttataattgggtatgttacagctgtaagaggaacgtctgtccgtgcgatcgttcacccaaacctctatcagaccacgtatatatatgatggaagattatatcgtggcgttgctataaatgaatttattgttataaaaaaaggatatcatgatattattggaaaaattgagggtgaagaaataattgaaaagaaaaactttgacaactctcagcctaatcatgaaaaatttgatagatttgtagatataaaaatcattgggtacatttctgaaaataaattcaaatcaggtattaaataccttccaatgattcaggatgagttacatttaatttcggacaaactcatttccgcagtatattctttcgaaggaaaagtagatgccaaaacaatacacattggtaaatcactccttgaagagatacctattcacatcccaataaatggtatatttaattcacacatagggatatttgggaatacaggaagtggtaaatccaattctttagcaaagatatatagcgaattatttacttgcattggaaaaagactatttaaaaaatccatgtttgtattcattgattttaatggcgaatataaacccatccacaaccaattgaatgataaaagcaattatattgtgcttgacacgcatttaaagaatggcaatcaaaaattaaaaattaaaaaatcagaattttgggatgtggaattactttcagtcttgttttcagccacagaaaaaacccaaaagccatttcttaacatccttgtaagaaatagactcaagtatggtgatgagcttaatgactacttccatgaaacaattagggttatgtttggtcaaaatcagcatcgtgaaacgatcagcgttttacggtcaataattaacatagtcaaccctgcgaaatcaaaagaaataaattccgagttatctgagtttagttggtactcaaaaggggaaagtaacaagtattataggaatgggagtttttataacactccggatggttaccttgctcatcttccttcactgactgacactaatatagatattgaaacgctatcatcttttcagcaaataattgtcagagcaactcttcaacttataaattccgtttctaggaattatgtacaatacgaacatatcagtccattaattgccaagataaatgcctcaactggctcactagaaaaagtaattgagataattgatgatattgaaatagaagccaaaccattattattcatatcattaaaaaactgcaaccaagaaacaaaaaaaacaattccgatgttgattgcaaagtgttcttttttggaacataagaaaaaagacgcttcaaaaaacagcttccaccttatcattgacgaggctcataatatattatcagagacatcaactagagaatctgagacatggaaagattaccgactagaattatttgaggaaataattaaagaagggcgaaaattttcatacttcgtaactattgcgagtcaacgaccagcagatatatcaccaacaataatttctcaaattcataattacttccttcatcgtttggttaacgaaaatgatttgttcttactaaaaaattctataagtaaccttgatagttcttcgcgcagtttagttcctatattaccatccggagcctgtgtcgtatcgggcaccgcatttcatactcctatgatcattcaagttcagcgcctcccatcagaattagcgcctgaaagtgatactattaatctcgatacattttggtag

SEQ ID NO: 390888 - DNA, 264 bp, Salmonella enterica
atgtgtattggcaatgccaacatcattccgcgtcagccgcgtctgtatttgtatcatgcctatctggcgtatatggaagcccacggctacaggaataccctgagcctgactatgttcggtaaggggttgccagccatgctgaaagaatacgggctgaattacgccaggcggcgaacaaaacaggggatgcagacgaatcttgcgctcagagaggaaagtaacgccgactggctgccccggtgcgacgaaaccaccgcaacataa

SEQ ID NO: 390889 - DNA, 780 bp, Salmonella enterica
atgaaactacaatcctcatgtccagtgtgtttgaaggaattcattacaaatcaaatgattggcactagtgaaagctctcttcctatgattacgaacttgtcgtcagttggattccgagaggatggcagatatgaaatgacgtgccttaaagggcatacctccatcacgtttttacaacaacaaaaattcgaaattcttttcgatattggcgcatatgcaatcatcgatggttactatcgagaggcagtttcatcatttacttcttcattggaaagattctatgagttcttcataaaagtagtatgcatttcgaaaggtatcagtgaatcgaaagtggttgaagcatggaaagaagtttcaaatcaatcagaaagacaactaggtgcattcatattcctacatctattggaattaggttgtaaacccactttgctcaataataataaaataaaatttcgtaatggggtcattcataaaggaatgattccgagtgaggaacaggctttagaatatgggcaagctgttcttgatgtgattcgcccactccttaaaatacttaaagaaaactatagcgaagctatatcaacggccgtttttcaatatttaaatagtatcagaaacccgtctgatgatggtgtaccagtttccactatgtgtcttacgacaattttaagtctttcttatgccgaaccggcccatgagactcaaagtttgagtgaggcaatttcacaactgaagaattggaaatcgatagtagaaaacacagttttccccgagtga

SEQ ID NO: 390890 - DNA, 732 bp, Salmonella enterica
atgggctacacgccgggggtgctggcgctgttctataaagtggcgattggctccggtgtcgcgccgctggtcatctttatgggcgtcggcgcgatgaccgacttcggcccgctgctggccaacccgcgcaccctgctgctgggggcggcggcgcagttcggtatcttcgccacggtgctgggggcgctgacgctgaactacttcggccttatcagcttcaccctgccgcaggcggcggccatcggcattatcggcggcgcggacggcccgacggcgatttacctgtcgggcaagctggcgccggagctgctgggggccatcgcggtggcggcgtactcgtatatggcgctggtgccgttaatccagccgccgattatgaaggcgctgaccacggagacggagcggaaaatccgcatggtgcagctgcgcaccgtcagcaagcgggaaaaaatcctcttcccggtggtgttgctcatgctggtggccctgctgctgccggacgccgcgccgctgctggggatgttctgctttggcaatctgatgcgtgaaagcggcgtggtggagcgtctgagcgacacggtgcagaacgggctgattaatatcgtgaccatcttcctcgggctgtcggtgggcgcgaagctggtggcggacaagttcctgcagccgcagacgctgggcattctgctgctgggggggttgcctttggtatcgggacggcggccggggtactga

SEQ ID NO: 390891 - DNA, 363 bp, Salmonella enterica
atgtcaccagcgattattactttgttggttttagtggttgcaataattatctttgttagcgatcgtcttcctatgggattagttgcatttatggtcccaatggcactttattttaccggtgttatcgatgctaaggatatttttgcttcaatcgtaaatgcgaatgttattcttatcgtcgccatgtgtgtactcggtgcggcattttttaaaacaggtttggcatggcaatcaagtaaaattttactaaaatatgctaaaacagaaagaagccttagtgtattgatttttcttattggtggagttatgtctgcctttgtttctaatagcggaacagttgctgtgctaattctattgttttag

SEQ ID NO: 390892 - DNA, 138 bp, Salmonella enterica
atgcactttcaaaacaagaacgtccgcaaaacaatagttttatggattttattcattattttgattattcgttatttgaacgttatgtttcgaatgatgcttttgatttgcgtcgatatgttcaagatgttcatttaa

SEQ ID NO: 390893 - DNA, 459 bp, Salmonella enterica
atgggggacgaaaagagcttagcgcacacccgatggaactgtaaatatcacatagttttcgcgcccaaataccgaagacaagcgttctatggagagaagcgtagggcagtaggtagcatattaagaaaattgtgtgaatggaaaaacgtacgaatcctggaagcggaatgttgtgcagatcatattcacatgcttctggagatcccgccgaagatgagtgtgtcgagcttcatgggatatctgaagggtaaaagtagtctgatgctttacgagcagtttggggatctaaaattcaaatacaggaacagagagttctggtgcagagggtactatgtcgatacggtgggtaagaacacggcgaagatacaggactacataaagcaccagcttgaagaggataaaatgggtgagcaattatcgatcccttatccgggcagcccgtttacgggccgtaagtaa

SEQ ID NO: 390894 - DNA, 1167 bp, Salmonella enterica
atggctggttttttgtttagagggtgtcacttctgcaagatggtagacgccaataatccaagcggaggtaaagatggcattataaccttcgaaaaccttagcggcgattgggggaagggtaactatgtcattggcggacgaaccagctatgggtcagtaagtagcgcccagtttttacgtaataatggtggctttgaacgtgatggtggagttattgggtttacttcatatcgcgctggggagagtggcgttaaaacttggcaaggtactgtgggctcgacaacctctcgcaactataatctgcaattccgcgactcggtcgttatttaccccgtatgggacggattcgatttaggtgctgacactgacatgaatccggagttggacaggccaggggactaccctataacccaatacccactgcatcagttaccactaaatcacctgattgataatcttctggttcgcggggcgttaggtgtaggttttggtatggatggtaagggcatgtatgtgtctaatattaccgtagaagattgcgctgggtctggcgcgtacctactcacccacgaatcagtatttaccaatatagccataattgacaccaatactaaggatttccaggcgaatcagatttatatatctggagcttgccgtgtgaacggtttacgtttaattgggatccgctcaaccgatgggcagggtctaaccatagacgcccctaactctaccgtaagcggtataaccgggatggtagatccctctagaattaatgttgctaatttggcagaagaagggttaggtaatatccgcgctaatagtttcggctatgatagcgcagcgattaaactgcggattcataagttatcaaagacattagatagcggagcattgtactcccacattaacggggggcccggttctggctcagcgtatactcaacttactgctatttcaggtagcacacctgacgctgtatcattaaaaattaaccacaaagattgcagggggacagagataccatttgttcctgacatcgcgtcagatgattttataaaggattcctcatgttttttgccatattgggaaaataattctacttctttaaaggctttagtgaaaaaacccaatggagaattagttagattaaccttggcaacactttag

SEQ ID NO: 390895 - DNA, 366 bp, Salmonella enterica
atgctggccgatgtgaaaatattacccaaataccgtgaccaaatatatgtagatgaagccgttaaactggatgtgcagtcaattatccaaccaaagataaaatcgtataatgcgactatcgataatattagccctgattcctatgaggaaaatgccggaggaacaattcagcgttattataaagtaattattgcattcgatgttaatgaagatgatttacggtggttaaaaccaggtatgactgttgacgccagtgtaattaccggaaaacacagcattatggaatacctgttatctcccttgatgaaaggcgtggacaaagccttttcagaaccagttaatactaaacgattagatacaccttga

SEQ ID NO: 390896 - DNA, 534 bp, Salmonella enterica
atggacgaaaagaaactcaaagcccttgcggctgaagtggctgaaggccttaaaaccgaagccgatctccatgctttttcccgcatgttgacgaagcttaccgtcgaaacagcgctcaatgcggagctgcctgaacaccccgggtatgagaaaaatgcgcccaaaacaggctcatccccccgcaatggctactcgtcaaaaacggtgttatgcaataatagcgagatcgaactgaacacgccgcgtgaccgtgaaaataccttcgaaccgcagctgattaagaagcaccagacgtgcattacgcagatggacagccagattttatccctctgcgctaaaggcatgactacccgcgaaatcgttgccaccttcaaagaaatgtacgactccgatgtgtcgcccacgctgatatctaaagtcaccgacgccgtaaaagagcaggtcactgagtggcaaaaccgacaaatggatacgctgtatccctttgtttatatggactgtatgttgtcaaagttcatcagaatggcagtgtga

SEQ ID NO: 390897 - DNA, 390 bp, Salmonella enterica
atgattattgatcgaaaggtattgaataaccatcttaacgatatccatgatgaacttttcctttattatgatgattttttctttggttataagctagtattgtccgggcagaaaattcgttactccccagaaattaaatttattcatgatatctctattcatggaaagtgtatctgccccgaatggaaagtatattatctttgtagaaatttgttgctgctgagaaaacttttacccgttcccaggatattcagtgttctttctatagtgttacgcctctctaaatatctcgccatattaccatggcagcgtaagaaatttcgttatctatattttatctggcagggaatacttcatggacttaaaggtattagtgggaaatatcattag

SEQ ID NO: 390898 - DNA, 267 bp, Salmonella enterica
atggattattcacagttaagtgattttgaaattaaccgaatggtaggagacataatttttaaaggcctttgggcatgtaagccggaaacgtcagggaataacaccaacaaattgtattacggaaacgctgatacaacttttgagccattaaaccagttaactgaatggtgtgtggatgcaaaaggcgtaagcccaatatttgataccagacctctccgcgccgccatgattgtctttctcatgatgcaggacgccaataatgcttag

SEQ ID NO: 390899 - DNA, 219 bp, Salmonella enterica
atggctaaggacgaaaaatttttagctcattctaattatggtaaaggctatgaagggaattatatagaggctcatattcatggtgatgtatgtttattcagagatataaaacacgtttatttgtctttgcaagaaaactcttactcgaaaagtcaactatatgattatgcaaaacaaataaaccaggcgcttaatagagactgcataatattatattga

SEQ ID NO: 390900 - DNA, 264 bp, Salmonella enterica
atgcaatatactgatattcaaatttggcagcctggcattctgcgcaacaccgattatcttaaccccggtcccgctaagctgctggccgccactctggataaagacatcaaaatctttaaagaggggggcgttctgccagaattatggcactggctctattttcttcctgtcgaccgccagtcagatctatctgctgatggtcatccgataaaaggtcattttctaccccctgttggcgctggtttattgaggaaaaaattatga

SEQ ID NO: 390901 - DNA, 681 bp, Salmonella enterica; identical to SEQ ID NO: 390882

SEQ ID NO: 390902 - DNA, 219 bp, Salmonella enterica; identical to SEQ ID NO: 390899

SEQ ID NO: 390903 - DNA, 264 bp, Salmonella enterica; identical to SEQ ID NO: 390900

SEQ ID NO: 390904 - DNA, 651 bp, Salmonella enterica
gtggccgtattcgcctttcagaatgcccgccgtttctttggcaatggttttgtagcgctcgccggtcagcacgttgagcaccgcctgggtgccgacaatctgcgaggtgggggtcaccagcgggataaagccgaggtccttgcgcacgcgggggatttccgccagcacctggtcgagtttgtccgccgcgttctgctgcttcagctggctttcgaggttggtcagcatcccgcccggtacctgcgccaccagaatacggctgtcgtagcctttcagctggccttcaaaggcgtgatattttttgcgcacctcgcggaagtacgcggcgatgttttccagcttcaggatatccagcccggtgtcatattttgtgccggcaagcgtggcgaccagcgcttcggtggccgggtggccgtaggtggcgctcatggaggaaatcgccgtgtccacgccgtcgacgcctgcttcaatggctttcagcagcgccatctccgccatcccggtggtggcatgagcatgcagatgcaggcgcacgtcatagcgttttttgatttcgctgaccagttcatacgccgccatcggtgtgagaatgccggacatatccttgatggcgatggaatcgacgccggtttccagcagttgttccgttaa

SEQ ID NO: 390905 - DNA, 168 bp, Salmonella enterica
atgtacgtcgaactcgtttatgacaagcgaaatgttgaaggtttgccaggcgcacgcgaaatcatcctcaatgaactcacaaaacgcgtacatcaactttttcccgatgcgcaagtgaaagttaagccagtttggcgaataaaagagtctaatgggataggctcttaa

SEQ ID NO: 390906 - DNA, 633 bp, Salmonella enterica
atgctcatgcacccgcaaggccttgtcgctggcgctcatggcggtaaattccgcctcgctcatggtgtcgaacgggctttgcgccggtggccggatagcgtcataaatcgctttccgcgtggcttcctcgccgtactgtataaacgcatcattccagtcaccgaacaccggcggcagggcaacaacgccctcacaggcgtctgcggcctctgcggctttactctggccgtcgccgttcaggtcacggtcggcggcgaggacaatctgacaggccggatatttctgacgggcaaggctcgccagagaaaggaggttcacggaggacagcgccaccatgacggtttccccggtcaggtgatgcacggtgagtgcggtcgcataaccctctgcaatccacagacgttttccggcctgttttttcccttcgatgacatgacatgtccctttgacctgaccgcctttcagggtgcgtttgaggccgtcagcattgataagcgaaggttaaccagtgtgccggtatcctcatacagcgggacaaccacatccccggcgcggaacgtcacgccgccggttttatgcatgacggtgagcgtcagacattccagaacggggaaacccttgcgggtgaggtag

SEQ ID NO: 390907 - DNA, 387 bp, Salmonella enterica
gtgatagagatatttacggtaattacgcgggatgatgctggcattccccataaacatcccgttggtctgcgggagcatttccagatagccgcaaaaatcaaacgtcgggtcagcatcgcgcttgatgctgagtgcctcgtcggagttctgctgcgactggagcagtgcgcgtgcagtcatcgggtcgctgaatttctgcataagctggcgcacaatcacagccagctcgcgcgcaattttatccctgagctgcgggtcgcgttcctccggcgcaatctgctccgggaagtggataatcacccggcggcgcgacacaccgccgctgcggtcggtgaagcgcatggggttgttgttcacggccagaatcaccgccggaatatgtgttga

SEQ ID NO: 390908 - DNA, 660 bp, Salmonella enterica; identical to SEQ ID NO: 371992

SEQ ID NO: 390909 - DNA, 816 bp, Salmonella enterica
atgctacgacacaacgtaccgatacgccgggatctggataagatcgcctgcgatcacggttttgactttcatgttatcgataacgaaatttactgggatgaaagccgggcctaccgttttacattacggcaaattgaagaacagatcgaaaaaccgaccgcagagcttcatcagatgtgtctggagattgtcgagcgggccgtccgggatgagcagatcatgcagcagctggcgatcccgccattgtactgggatgtcatcgccgaaagttggcgcagccgcgatccttcgctttacgggcggatggatttcgtctggtgcggcaaagatccggttaaattgctggaatacaatgcggatacgccgacgtcgctctatgagtcctcctactttcaatggctatggctggaggatgctcgtcgtagcggcgccatcccgcgtgatgccgatcaatacaacgcgatacaggagcggctgatcgcccgcttcagcgagctgtacagtcgggaaccgctctacttttgctgttgtgaagataccgacgaagatcgcacgacggtgctgtaccttcaggattgcgcgcagcaggcgggccaggaaacgcgatttatctatattgaagaactgggacttggcgtaggcggcgtgctgaccgatctggacgataacgtgattcgccgcgcctttaagctctacccgctggagtggatgatgcgcgacgacaacggcccgctgttgcgaaaacgtcgtgagcaatggattgagccattgtggaaaagtattctgagtaacaaagggctgttgccgttattgtag

SEQ ID NO: 390910 - DNA, 660 bp, Salmonella enterica
gtgggcgagcagggacactggcaggcgaagaagctgactacggatgcttccgagtgggaagtgtggctggacggcgaaaaagtcggcgatgtgaaatggggcctggtcggcgaacataacatgcacaacgggctgatggcgattgccgccgcgcgccacgtgggcgtcgcgcccgcagaagcggccagcgcgctggggtcatttattaacgcccgccgccgtctggagctacgcggcgaagcgaacggcgtgacggtgtatgacgattttgctcaccacccgacggcaattctggccacgctggcggcgttgcgcggtaaagtgggcggcaccgcgcgcattatcgcagtgctggagccgcgttctaacacgatgaagatggggttatgcaaggatgacctggcgccgtcgttagggcgtgcggatgaagtgttcctgctgcagccgccgcatattccgtggcaggtttcagaagtggcggacgcctgcgtacagcctgctcactggagtggagatgtcgatacgctggcggaaatggtggtgaaaaccgcacagcctggcgatcacatcctggtgatgagcaacggcggtttcggcggcatccatcagaaattgctggatgggctggcgaaaaaagctcagaacgtaacagcgtattaa

SEQ ID NO: 390911 - DNA, 339 bp, Salmonella enterica
atgcaaaacagcagatcgcactggagtcacagagaacccaggaagatatcaaagtggctgttgcggatgatgattgtgcttcacgtcctgtgcctgctgccgctgctgaccggttgcggaagtacgcggacggtttacgtgagcgatccggtggcaccgctgccagccagcctgacttctgatactccagtaccgtttatacccaatccgctgacgtatggtaccagtctggagttgaatgttgctctattgtcagccttgggacaatgtaattttgataaaactggaatcagaaatattgaatcacggcgcgctattttgcattcgaaagacaaatag

SEQ ID NO: 390912 - DNA, 1527 bp, Salmonella enterica
atgaagcttacccataaaaaaactcaaaatcatcatgttaatctgaacaccagagcaattttgacgttttttcaacaaatcatatctttcatatatggcaaaaccagcgcggcggttgagcttatctttgcaaccctccaggggagcatggctctggcctgccaggatatgtatgatgttgaaattgatgatgatattatcgttcctgtatcgcattttcacataatactggcaaggtccggaagcaaaaaaacgacagtatacaggctcattatggcgcaaattcatcagactgaacgtgagctggcagaggtgttttcagtcagactgaaggagtatgaacggcaacacgtgctatgggatgaagaatgtaagagccttaagaaatcgtttcagaaagctgtacgccagaaagagggagtggagacagccagaaatgaactggatgaatgtctcagaaatgaaccggttaagcctgtaagggtgcatctgacggtaacggatcccacgccggaagcccttctgaaagagctggggcaatactccagtctgggtatcacctctgacgagggaagtgctctgtatgaaagcatcatgcgccgtaagatcgcaattcataatacgctatggtgtggtgatgattatcggatcagtcgtgcgtcaacgggtatcacagatattaaagatccccggcttggtatgctgttgatgacacagccggagccacatgactgcacactgaaatcactgggtaacgcaatacgagctacgggaatttatgcgcgtacgttaaccatggatcttacgttactcaccagacagattgatattgatgagctggtttctggcgatgagtccgatctggaaaagttttatgccattcagaaaaaacatttacttgccgggattgaacgcagaaaaaaaaatcaaccccgaatctgtatgacttttgctcctgacgcaaagaagcggttgcgttatgttggcagggacgtaaagcgtctgatgcagcaggggggaaagctgtaccattataacgactgggctgcgcggtactgcgaacataccgctaggagtgctgctgtgatgcagttgtttatcacccctgactcaaccgttattacgctggaaacactggaagctgcgttgttaatatcggaatggcaccttaatcattttattgtaaaaatggatgtggtcaggggaccttcccattctgaaagagtactcagttggcttgaaaaccatcttgttaaaaatgggtcttatgattttttaaggcgtgaaatgatgcaagagatacatcgttcactcagaaaaaaagctgatcttgagcctgttctggaacagcttgctgaggagggtaaaatccagttgtgggaggacgaaagtgggacgcattacatcaaatacctggcttccgaaatggcaccttcagaactggatacagaacacaaggctttgaaaggtataccagaatatcatgggggaggtagtgctatcagtagcgtcccgctgaaaggataa

SEQ ID NO: 390913 - DNA, 1050 bp, Salmonella enterica
atgaagaatgaaatgacgtggacgaatatgacgtggtgttggctgactctgttgcttacaggtataacgccattaaacgtgtgggcagatagtgatatctacaacaaacctattgaacaaactcaggacgtcagtcagccaggtgaggacgtgtttatcttacataatacctggattaattttactgacgatcctgcggatatggggacattactttgtttctctgagagcgatccccgcaatggtgcatgtgctacgagcggtcactgggcttctaggtataaccctgctaatccaatcaggttgatgtttacagatttaaatacaggtaaaacaacagtattggctcttcagggatatcgtaaaagttattgtagtggtaatcgttatgcttttgatgccggcgggggatgctacgcaatgagagaatttgagttatggatacccgctagcgaacggagaaaactccctgttgggcaatggactgcacatttacggatgcgggttgaaggatggattaacattccaatcggtagtcttatgtcggatatcacgttgaccgttacagaccactttgcagaaaatgctgctatttactttccgcagtttggtactgcaacacctcgggtggacctgaatctgcaccggctgaatgcctcacaaatgtcgggcagggctaatctggatatgtgtctgtatgacggaggtgtgaaagcccgttcattacagatgaagatagaaggaagcaataagtcaggtacgggatttcaggttataaagagcgattctgctgatacgattgattatgcggtcagtatgaattatgggggacgaaatattcctgtcacccgtggcgtggagttcagtctggataacgtggataaagcagcaacgcgtccggtggtacttcccgggcaacggcaggcggtacgttgtgtgccagtgccccttaccctgacaacacaaccctttaacatcagggagaagcgttctggtgagtatcagggaacgctgacagtgacaatgctgatgggaacacaaaccccctga

SEQ ID NO: 390914 - DNA, 681 bp, Salmonella enterica; identical to SEQ ID NO: 390882

SEQ ID NO: 390915 - DNA, 402 bp, Salmonella enterica
atgagcgaatattattacagctttaaagaaaaaggttttttctggcaaccggataccgaatccgataattaccctgacgatttaattcccctgacagatgagtattatcgcgagctgatgcagggccaggtggacggaaaatatatcgagcacaggaaaggaggcccggtactggttgagcatcgcgaatatacgcctgaagagctggttgcacaggctgaagccagaaaagcggaacttcttgctgaggcagagtcagttattgcgccactggtgcgggcggtaaaaatgaaaattgccacagatgaagagattaaacggctggaagcatgggaactttatagcgtaatggtaaaccgggtggatacagctaacccagactggccggatataccacgctaa

SEQ ID NO: 390916 - DNA, 534 bp, Salmonella enterica
atgagtgatgcgcgcctgttacctgtaggctcatcacctcttgaggtggctgctgcccgtgcctgtgcagatattgaaaatacccccattccgttacgccgcctgtggagccctgacacctgtcctgcaaaccttttgccgtggctggcgtgggcgttttccgttgaccggtgggatgagaactggccggaagaaaccaagcgtgacgttattcgcagtgcgtattacatccactgccacaaagggacgataggcgctgtgcggcgtgtggttgagccgctcggttacgtcattaacgttactgagtggtgggagagtgacgacccggcgggcacttttcgtcttgatatcggtgtactggaaagcggcatcaccgaagaaatgtatttagaaatggaacggctaattgcggatgcaaaacctgccagccgtcacctgattggtctgaatattatccaggatatagcgggctatatgtacaccggcggtgtggcatatgacggcgacattattacggtttacccggatgagtga

SEQ ID NO: 390917 - DNA, 663 bp, Salmonella enterica
atgctttggaaagtgattacatttgtacttgtcggtgtttgtatttttgttctagggttatggctaggttctattcaggctgaatggtcgaaaccagagcataaagatgctgttgcttatttaactatgttaggcggatgggtttcaggaattgcaacatcattcgcagtaatcatttcactgtatgcgacatatcaatcatcacaaaataatattgaaaaattaaccttatcctataaatcttacccgagcgataataatgaaaatcattgtgcagttgtagaagtgaaaaatatgcggagtattccggcgcatatacaagagttttgcttagagattagtggggtggatggttacttaaatataaataaactaaaggccaatgggctaccaatcccgtattctttataccaaataggtgagatatggaaatttgccttttatcctgatgcacaacaggcaaatatgaagttctatcatgaactgagcaccaaagggagtccaactttccggagtggtttctttgtggttaaaacatcaatgaagcaatacaaactaaggatacctgaagggttgttgagagtgatgaaagctagctatgaaaaacaaataaaaatacgggagaaatataaggaaatgtctggtaaagatatggatatataa

SEQ ID NO: 390918 - DNA, 573 bp, Salmonella enterica
atgcttgaaaccaattttaataacgaagcgttgctaaacagaatctgcgaggtttatggttttactcagaaaatccaactcgctaatcacttcaaaatcgcagccagttccttacagaaccgctatacgcggggcaatatgtcgtacgactttgccgtacattgcgcgcttgaaacaggcgtaagccttaaatggctaatgactggtgagggagagaaaaaccttgctgctagtgaacctcaacactcaacggaacttcccctcttcgaattaagtgaaggtgaactaaccaatattgggactctttcgtttgaccaacagcttttcactaagcagccgaaaaagggtgcctctgtgaaaagcgataacagcacctatgtaatcgagcaggaatcctctttgtctgatggcctttggttagtagatattgaaggtgcattgagccttagggaaattaccgtattgcccggcaaaaaattacatgttgctggcggtaaagtgccgtttgaatgtggaattgatgacatcaaaatgattggtcgtgtggtgggtgtatacagcgaggttaattga

SEQ ID NO: 390919 - DNA, 1077 bp, Salmonella enterica
atggatgctgtgacagatttaagaaaaaaatacattttaaaccttgaggtattgaagccgggggatatcatacttgaacatggttacaaacctcatagtcttgtaatcatgaaagtcactaatagtcattactctcacgccatgttatacgaaggttcaacaataattgaagcaacatctagcggcggggtattcagtaaggttccaaatagatttgcagtcgtaaataaaaatgacttaaaagtgcttagacttgtaaaagaaattcccgcgaaggatatggaaaatattacaatgacagcaaggagcttgacaggatctgattataataaatctgaggccatgaaggctggtaagaaaaaaaaaccaacaaaaaaaagatcaaatggccaattttgttctagattggttgcgcaatgttataataaagcagggataaaactcgttgaaagtattcactactgttcacccgcagatttagaaaaatcacctttactaacagaagttgatgatgctgtcaaagaggcatccgaggccgagttagcccacgctttagcaccaagtattcatacgcagcatctcaaaagctcggtcgcatgggttaaagaagcaaaaaaaatccttaaaaaatcaggcgttgaagctgaaaccattaatgatatttacagcgcaacccttaacctgagaaaccctaaggttgataaattaatactaaaagagattaaagcatcaggacattatagcttttatttagaggataaaaatgcaaatccatttagatacgacgcagctaaatttgccgaaaaaatcggagacaacatcactgcaatcaatgctgaaatacacaaagagatatcaattgtaaaaattcattctcagaatctcagtaatatcaaagaatattttaaagtttaccccagttgtctaatggcagcagaagttgatttatacacaggaattttaaatataaccaatgaaagactaaaggttattattgagcattgtgacaataataacttaacgccagaactccttacagtagcattgagcatgatcaactatattgacaatctttaa

SEQ ID NO: 390920 - DNA, 123 bp, Salmonella enterica
atggtacaaaacgccgggagcgcaagtgtgggttcaggcggcttgctttttcgttttactcgcggcgtccttttcaaccgcctgcggagaaggcaacttaccggttttgaggatagtgcttaa

SEQ ID NO: 390921 - DNA, 147 bp, Salmonella enterica; identical to SEQ ID NO: 388658

SEQ ID NO: 390922 - DNA, 870 bp, Salmonella enterica
atgagaccacgtcgcagtatgttgtttatccccggcgcaaatgcggccatgttgagcacctcgtttgtctacggtgcggacgcggtgatgttcgacttagaagacgccgtagcgttacgtgagaaagataccgcccgtcttttagtccatcacgcgcttcaacatccgttctatcaggatgttgaaaaagtggtgcgcattaatccactgaacacgccgtttggtctggccgatcttgaggccgtcgtgcgtggtggcgcggatatcgtgcgtctgccgaaaaccgacagcaaaaacgatgtgctggagctggaagcgcaggttgaacggatcgaacgtgaatgtggacgtgaagtcggcagtaccaggctgatggcggcgatcgaatcagcgaaaggcgtggtcaatgccgtcgacatcgccacctccagcccgcgcatggtggcaattgcgctggcggcatttgattacgtgatggatatgggcaccagccggggcgatggcaccgagctgttctacgcccgctgcgcagtgctgcatgcggcgcgcgttgcgggtattgccgcctatgatgtcgtttggtcggatatcaataatgaagaaggcttcctgaaggaagtgcagttggcgaaagggcttggttttaacggtaagtccttagtgaacccacgtcagattgagctgttacatcaggcttattctccgacacgtaaagaagttgagcatgcgtatgaggtgattgccgccgctgaagaggctgagtctcgcggtctgggcgtcgtttcactcaacggcaaaatgattgacggcccgattatcgaccacgcgcgcaaagtggtggcgctgtcggcttccggtattcgtgattaa

SEQ ID NO: 390923 - DNA, 525 bp, Salmonella enterica
atgatggttagcgtgctgtacggcttattaacctggattccgctctatttagtaaaagagcgcggttttgatgtcatgagtatggggtttgtagccagtatgccgtgcatcggtgggtttattggcgcgattggcggcggatggatttcggataaagtattaggccgtcgtcgtaagccaacgatgatgtttaccgctatttctaccgtggtcatgatgttaattatgctgaatattccggcaagcacctgggcggtatgtgttgggttattcttcgtcggtttatgcctgaatattggctggcccgcattcacagcatacggtatggcggtttcggacacgaaaacttatcccattgcctcttctattatcaatagcggcggcaacctcggcgggtttgtcgctccgatggctgcgggttttttacttgataagaccggcagctttaattctgtatttacctatttcggtatctgcgcagcaattggtctggtggttattctcttcctcgatgagccacaataa

SEQ ID NO: 390924 - DNA, 567 bp, Salmonella enterica
atgtcatttgaagataaaaatggcaaagttactgatgcgggttacgcgcttaaagttggaaatgattattatgccgctgattacgatgaaaaaactggtgagataaaagctaaaactgtaaattatactgacgctactggtgcgacaaaaaccggtgctgtgaaatttggcggtgcgaatggtaaaactgaagttgtgaccaccgttgatggtaatacttatcaggctagtgatgtaaaagggcataatttccagagtggtggcgctttaagcgaggctgtaaccactaaaactgaaaacccgctggctaaaattgatgccgcgctggcgcaagttgatgcgctgcgttctgacttgggtgcggttcagaaccgtttcaactccgctatcaccaacctgggcaataccgtaaacaacctgtctgaagcccgtagccgtatcgaagattccgactacgcgaccgaagtctccaacatgtcccgcgcgcagattctgcagcaggccggtacctccgttctggcgcaggcgaaccaggttccgcaaaacgtcctctctttactgcgttaa

SEQ ID NO: 390925 - DNA, 567 bp, Salmonella enterica
atgaatttagaaacaggtgctcgtgaagcaattgagcgtatatgtgaggcttacgggtttacttcgcgcaatcagttagccaaacacttggggatcactaacagctccttgggtaacagaatcatgagggacaatttccctgcggatattgctatacgatgttcattggaaaccggggcatcattacagtggctcgtcactggtgaaggggctacgtttgatcacgccataagcgatacggtgcgagttccgtcattcaagtttgaaggggctacgctggttaaatcaccctcgcttatgttcgacaaggtgatgattcctgatcacatcggaaacctagaaatcattactgaagggaatgttaagtacctaattgatagggctgaatacactgctgccgatggtagatacctcatagaatattccggaacgcagagtattaaagaattaacccttttgcctggtaacaagctacgtatcgactgggggaaatatcctcttgattgcgaaatcgatgatgtgactatcatcggaaaagtgattttgacaatggttgctagcgcttaa

SEQ ID NO: 390926 - DNA, 204 bp, Salmonella enterica
atgaccaacaccgtttcaacacactcagagaatcgttgggtgaaattggatgttttttgtgaacgttctggtatccctctgcgtcgtgctcgctactggtatcagaatggccgcttgaaaattaagcccaaatccaagcctggcgagcatgtatacgttgactggctggcatggactgctgatcaggggccgcgtttttattaa

SEQ ID NO: 390927 - DNA, 186 bp, Salmonella enterica
atgaacggtaatgattctaaacctgtcgaaaccatccatgtaaaaaggtattacgtcaatggtgctcatgccggaaatatcagttttcatgtggttatgtgggggccaaacggcctcaaaaaaaaagctgaaatagcaaaacgtttggacgaagtgatcactcagctatttcaggaggatgtatga

SEQ ID NO: 390928 - DNA, 330 bp, Salmonella enterica
atgacaatcaaaatccatacggtaaaaattgcgccaaaataccttgatgctgtggtggctggccagaaaaaggccgagctgcgtaaaaacgatcgcgggtataaaaccggtgatgttctttcactgtgcgagtggaagcatgggaaatacaccgggcgtgagtgggcggcggttatcacccatgttttgcctgtaaatgaaattatcgctgataccgaaaactgggcggttttgtccatccgttcactgtcgccacttgaagtgctggaatacatcatttcaaacggtgtcactgaggcgttagctggcggaggtcaatatggccgttaa

SEQ ID NO: 390929 - DNA, 831 bp, Salmonella enterica
atggccgttaaaactccgcttaaatgggtgggcagcaaagcccgccttatgccgcaattacgtccccatttgccggaaggaaagcgcctggttgaaccgttcgcaggttcctgcgccgtcatgatgaatacggattatgacgaatatctgatcgcagatgtgaatccagaccttattcatatgtaccgggctattaaggaagtaccagatcagtttatttggcaggctaaaagcctttttgaatcgggcaataacgtttctttttattacgatattcgggaacggttcaatacatcttcggatgttacagagatttggaaggcagtagcgtttctctatctgaatcgccattgttttaacggcctgtgtcgttacaacaaatatggtagtttcaatgttccttatggcaaatacaaaaaatcatactttcctgaaactgaaataaaagcgtttgcggagaaagctaaacgtgcaacatttctttgtgccagctatgcggaaacgctggatttggtgcgcgatggtgatgtggtctactgcgatccaccttatctcacagagtccgaaaacttcactgcgtatcactccggcggttttaaccatatagatcaaggtcgtttgtcacgcaggcttcggaagttggcgactaagggcgtgccggtagttgcctctaatgccgatctggaaatggtgcattacctctacgcaggttttaacgcggtaagggttaatgcgccgcgtagtgttggtgcggcagctgacagtcagaaaatggcggcagagctgattttgaaatggccttctgcggccacgtgtgaggtcagcgcatga

SEQ ID NO: 390930 - DNA, 447 bp, Salmonella enterica
atgacgctggcttatgaagggcaacatcacgccgttgaagcatggcggtgtgatgttacgcttggattttgttcatttaactggcgctgtatttttgggaatgtctgtcatcctgaaagtaccgtcagccattgccgttttaacttcagggctggccaggactgcatcataacctctgaatgtagctgtatcatctatgaggttgaccagtccaatctcacccagaaaattacggatagaaacgtattcactcattccgtgacctgtaattatccggtaaatgtaccctccgtgataaatcgccacgggatagctcatcattccgtcatcatcatcaaacgtgttcagccagtcagtaatcttatcgtcataaacagggcggggacagtcacgggtatatcggtgtttcatgtttttttccatatggtctggagggtttatgcataa

SEQ ID NO: 390931 - DNA, 2016 bp, Salmonella enterica
atgcataacctaacggaaagcacacccgcgatcaaacaatgggcttatgcctggaatgcaccccggcaggctattgaaagtccactgcccacatacgaagaattacaccgcagggagcgtgataacgctgtgttagcgcgtgcgcaggaactgttacaaaaacagtctgtaattgttcgtatgtcggtgaatgctgccgctaataagttggagaaggaacagggagcaaagagagcaaatgcttttctggcaaagacatttcttgaacgtatctggccaagagtcaatattgtttctgaacggtacaacgtggcaaaaatgacagttgataccgtccggtttatgcatcgttttaataaccttcctgatatgtccaaagaggatattgacctgctggcgcaggatcttgccacttttatcacactggaactcagcagtataaacgacgaaatgcaggatgccggggaactgaaactactgcatgctttttatgtccgtgctgccgcaatcacacatgctttccgccagcccgcccctgattatgaaaaattgacgcgtcgttattttgatgaacctcaatctgccgctgcgctttcccgcatgatgtctgaacaatggtgggcggggcggttgcgccgccacgcctctgaatggcgggaacacctgcatattgcactgaatcatgtgagcaaaaaagccagcatctacgccagtaaacagcttatccgtgactggaaggagcaaaagcgccgcacgcgggagtttctgaagtccatggagctggaagatgaatttggcaaccggatcagcctgatagataaatactggggtagcgtggctaacccggccattcgtcgtactgaaatgatggtgcgcattcgtggttttgaaaacgtctgcaatgaactggggtatgtgggggaattttacaccatcaccgcgccgtctaaatatcacgcgactaccattcacggccaccgtaatcgtaaatgggatggaagtagcccttctgatacgcaaggctatttacgtaaagtctggggacgaatacgggcaaagttgcaccgcaatgatttgcgtgtgttcgggatcagagttgccgaaccgcatcacgatggaacaccacactggcacatgttgctgtttatgcgccctgaagtggttgagcaggttcgtggcattttgagcgattacgcgatggaagaagaccgcgccgagttaatcaccgataaagcgagaaaagcccgctttcatgcagaaagcatcgatccagaaaaagggtcggcaacgggctatgtggctaaatacatttctaaaaatattgacggttacgcgctggatgatgagctggatgatgaaagcggaaagccgatgaaagaagcggcggtggctgctgctgcctgggcttcctgttggcgcatccgccagtttcagtttgttggtggtgcaccggtcaccgtctggcgtgaactgcgccgaatggccgatcacgatacggcgatagggttaagcgtggagtttgcggcggtgcatgatgcagcagataacggcgactgggcaaagtacatcaatgaacagggaggtccgtttgtcagaagggacgagttaattgtcagaacatggtatgaaaccagccaggaatttaacgcatacggtgaggaaattatgcgggttaagggggtcttctctcctgttgttggtatggggagtccgatcttaacccggctcacgaagtggaagattgttccgaagttaaccgccgatcaggcggttgcagtcagcggcgcgaatgcgccgcctaggagttctgtcaataactgtacggagggtggaacccgcagacggttaaaactggaattgcgcagccggggttttgatggttctgacgatgaaatagccattctcatgcgggggagtggtttgagatttggccaggtggcattgatttaccgtaatggccggttgcaagagacacgaagcgagccaatgcacgagctgtggccggggtggttgtag

SEQ ID NO: 390932 - DNA, 408 bp, Salmonella enterica
atgagcgattattattacagctttaaagagaaaggctttttctggcagccggataccaaatcaggcgattacccggatgatttaatccccctgaccgatgagcattaccgcgagcttatgcggggccaggtggacggaaaatatattgagcacaggaaaggaggcccggtactggttgaacatcgcgaatatacacatgaagagttgattgcacaggctgaagccaaaaaggcagaacttcttgctgaagctgagtcagttattgcaccactggcgcgggcagtaaaactaaaaattgccacagatgaagagattaaacggcttgaagcatgggaactctacagcgtaatggttaaccgtgtggatacagcttcccctgactggccggaggtaccggatgtggcgtga

SEQ ID NO: 390933 - DNA, 1008 bp, Salmonella enterica
gtgtttgaggagttgttaaatcttgcagaagaaagtcttaggaaaagtgggaatgcctatgattatgcagctgttatgaatttgacagccaatattgtgatgaaagaaatggataacaatgaagaggacgaactaaatcttatattgtcccaacatgatgaatttataaaaaataatcgtgaaagatggaaggatggctttgcaaaactacatttattgagaagtatttgtttacaggttggtatgaattttcagcaacggtttctgaaaatacctaagtatgaaactgatgaagtattaggggttcttatgcgacagcatgcccatgcctgtagagtctctgctgagattattcatttgcttgaaggggggtatcctgatgctgcattagcacgatggcgtacactttatgaaattgcaattacttgtcttattattcggaagtgtgggaggcccgcagctatagattatattaagtacaatgaagtgaaaaaagctgaagcagtggcagaacatagaaaaacagcgggtatgatgggaaaaaaaacattctcagatcaagaggctgtattttaccagaatataaaaagtgaaatcaccaatggcaatgagggatggcattgggcgagaaaacacactgggtatggaaaaatagcaaaattagctgaatttgctgggcttggacagtggtctcatcactacatgattgctagcaatattattcatccggaaagccatgaaatggcttcgttgtatgcaatgaaagaagcaaaacatcccgctctactttgtggtcaatccaatagtggtttaaccgatccggctcactttacagctattagcctttctcaagttacatcggcgtttgtgtcggtatatgccgacgaggatgctaatgaaatagattacacagactcagcattgttcctgatgctagtggacagctacgttgataaagttggagaggccttccggcgttgtgaaaacctcacatgcagtggacgctaa

SEQ ID NO: 390934 - DNA, 741 bp, Salmonella enterica
atgactaatacaaactccgtttacgttgcatggcaagctccagacactagagactggcacgttgtcggcaatttgcaagagcgcaattcggggtatgtttttaagtacaccaagggtgctcttaaatctgcaaaatttaccaagtttagtggcatgactgatgtccgagaaacctatgtatcggaagagttgttccctctctttaaaaatcgccttttgtctcctcgacgtccagagtatccaagtttcattaagtggcttggacttgaggatgatagtgtaaatcctatcgatattttggcccgctctggtgggttaagaagtactgatcagctacagattttcaaaaaacttgaagtagattccgagggtagatttgaacatttcttctttttgcatggcctaagctatctaaatcccatggcgaatgaacgagtatcagagctgaaaccggggcaaattttacgcctttgcttagatcttcaaaatgaatatgacggtgacgctgttgtagttcgtgccgacaagccggcagaaattatcggctattgccctaggtatttatgtaatgatattaagaagatgctgctaagtgattcaaaagcaatcactttaacagtcgagaaaattagcgacgatgctccgcataactatcgtttgctatgtaaattatctggaacgctacatccgtcttgtcagtcgacgctgattcttcaggatgagttcgaagctatcgaatag

SEQ ID NO: 390935 - DNA, 513 bp, Salmonella enterica
atgaatccttcaatcgttaagcgctgccttgtcggggcggtgctggctatcgcagccacgctgcccggatttcagtcgcttcatacctccgttgaggggctgaaactgatcgccgattacgagggatgccgcctgcagccttatcagtgcagcgcgggcgtctggactgacgggatcggcaatacgtccggtgtggtgcctggaaaaaccatcacggaacggcaggcggcgcaggggttaataaacaatgtgctgctgactgaaaaaaggctggatgcctgcctgacggttaagcccccgcagcatgtctacgatgcgctggtgagtattggtttcaatgtggggaccggcgcgatctgcaggtcaaccatggtgtcatatatcaatcgccagcagtggtggcaggcatgtaaccagctaccgcgctggatttacgttaacggtgtgaaaaataaaggtctggagaaccggcgcgcgcgggaaatggcctggtgcttaaaaggagtgtcctga

SEQ ID NO: 390936 - DNA, 375 bp, Salmonella enterica
atgaaatggttaaaaagttactggctgccgctttcggttctggtgcttcttgtgatggttgatgtgattttccctgcctcccatgcgcttttcccgctggcgctgatcatgtggtttgagtttgccgcgttttctctggtctgctttaccgggctttattcctgcactctgacaggtaatgaccggctaaaggtcagattcctgctgggcagggtattaagggtgatggacgcaatcactctcacctggtatctgcgtctggctgttgcctttgtgatgttgcttgccgggtggaaactgacggggctggtttatgtatctaccgttgccattggcctggcaatcaaggatgaattaaaggcattgcgggaatga

SEQ ID NO: 390937 - DNA, 1512 bp, Salmonella enterica
atgcgcccaaaaattggtgattttgaatttggtgaggtttatggagagaatgaggtattatttctcgataattactcgaaatatttttatgatataaataactcattaagtaaacttgatagaaaaaataaaatgctcgtaattggcaggaaggggacgggtaagacattgcttgttaatgtctactgtaatgccaagcgaaaaaataatgatattgcagttgtggaatcattaaaggattttgtttttcatgaacttactcactttcagggtcaggatgtgtcttccacaaaatatgtgccaattttcaagtggatgatattggtcaatcttgctaagaatattgtaagtaataaaaaaggatttagtgaggataaaatagttcatttggaaagttttttacgttcttttggccatgccgcgggcgagttaagacctgagcaaacagttgaaataactagggagtaccaagcgtcgggtgaggttggcatcggatttagattcccagtattacgtggtgaagccaaagcaaaaggtggtgaggtcgagaaaacaaaagaaacaaaaaagagttatttggaatgtatggaatctttgcagtattttattgttgacatgctaaaagagagtaataaaaagatatatgtattttatgatgagttagatgataagtttgatgcaacagttgaatataaaaatgcaatgataagttttttaaatgctgttgtgtcaattaataaaactctaatgcaaaatgaaatagatgcaaaaattggtgcagttattcgtcatgatataataaatactttttcatcgccgaacattaataaaatcattgaagataactctgttacacttgattggtgttctgctggagaacgagcaagtgattctgagatttttgatatgattgcttttaagatcaaaaactccactgattattataatgacttaaatggttctaatttgttcgggaaaattttcactgagagagttgcaggtgagcatagttctatttatattttacatagaactttgggtcgcccaagagatgctgttaggatgctaacgtatattcaagatgaatatggagaaaatactgaaagatttgaaggccccatgtttacaaagatttctaaaaaatactcatcttatcttttacgtgaaattagatctgagcttgcgggacatttaagtgattcagaaatagatgacagtttttctcttttacgttcagtaaaaaaaagaggtttcactacacatttaatcaaggaaaaatttgaagaattgaagttaggagatggttcattaacgcttaataaaatactgagttgtttatttaaagtcggtgctatcgggaatgtactcaggagatctaaaacagatggcggagatgtttatttgtggtcatttaatgatgaagatttagaaatggacccaacgttgaattttgaaatacactgtggtttgtgggatgcattaggaattatcaagcctaaacttaggcaataa

SEQ ID NO: 390938 - DNA, 264 bp, Salmonella enterica; identical to SEQ ID NO: 390888

SEQ ID NO: 390939 - DNA, 228 bp, Salmonella enterica
atgaaacaagacatgtgggaattacggaaaatacagtcgcagggtataacggataacgcacagtatcccgcagggacatacatcgtatttactgccgccccccctacattccgctttttgagcaacatgggaaagacgatatcgcgctcagtcttgttcgccacgaagaggcgtggtggattgttaatcactctgatgaactgtgttgtgccgtcaatgagcaggtga

SEQ ID NO: 390940 - DNA, 1527 bp, Salmonella enterica; identical to SEQ ID NO: 379344

SEQ ID NO: 390941 - DNA, 315 bp, Salmonella enterica
atgggattcaaaggaatagataactggatagatcagacactgaagaatttggaagaattggagaacactaaagaaattccttttcatcttttatttaatcctgagtttttggctaaatgttcctcttttgcatctttagacgatatgtttgaaaaatcgggctttaaggttgagactgcggcagattttaaggctatccctgatgaagagtgggaaaacttcataacacaaaatactacatatagtagctgggaagagatgcagaaagacgcagcaagccaatacctacaaggaatctttgataaaaaagactaa

SEQ ID NO: 390942 - DNA, 588 bp, Salmonella enterica
atgggaagatttcgaattgatccagacactgacagcacgccagttttagacagaatcattgaggcttacggcttcacacagaagatgcaactagccgagcatcttgatatggcggcaagttctttatcttctcgttacaagcgcggcggattacccgctgacattatggttaagtgcatggctgaaactggtgtgaaccttgaatggctagttactggcagtggcaaaaaatttgacgatgaagaactagatattttgaagttcccgcgtaaaaagctggtcgatggccaactctacgattctggttatgtcatgtttgacaaggtatttttccgagctggtacaccactgccggcagcgccaatctgtgttcaggatgaaaaagcgcagtacatactagatcagcaatttgcggaggttttcgatggtgaatggcttgttaacattgaaggcaaatccagcataagaacacttactcgtattcctgttaaaaaagtacgggttagtggcgtgggcatggcttttgactgcggcttagaagatatcgaaattatcggccgcgtcgtgatgactattactaattcataa

SEQ ID NO: 390943 - DNA, 1032 bp, Salmonella enterica
atgggcatacgaaagcaggcagacgggaaatggctgctggacttttacccggaaggaaaaccccaggggaaagccagcaagcgcatccgtaaaaccttctccacaaaaggcgaggcgctggcctaccaaagccacatcatggaaaacgtccatgtaaaaccctggctggatggaaaagaagatcgccgcaagttgcgcgacctggtgaaccagtggttcgatgaacatggtgtaacgttagacgatggtgaaaaacgcaaaggtgctatggaatttgcctgcgagagcatgggcgatcccttggctcatgaatttaatgcaaccatgttttccctataccgaaaaaaaagactatccggtgagatatcccgcaccgctcgcgttaaacaagtttcgcccagaactatgaatttagagctggcgtattttcgagcagtatttaacgaactaaagcgacttggtcactggaagctagacaacccgctaaccaatgttcggccgttcaaatcagaggaagctgaactagcatatctggaacacgaagagatcgcgcgactccttgaggaatgtttaaaaagccgaaacgatagcgtttattgggtggcttatttatgcctattaaccggggcacgatgggatgaggcggaatctataacaaccaaacaaatcaagaatctaaaggtcagttttttcaaaacaaagggaaaccgtaaccggacagtacctattagccagaaatgctttgattctttacccaagcctgaaaaaccaggtcgtctttttaagccatgctattcggcattccgcaaagccgttgaacgagctaatcttgagttaccagacgggcaactctcccatgttcttcgccatacatttgcatcccattttatgatgaatggcggaaacatactggttcttcagcgcatacttggtcacaccgatatcaagatgactatgcgttatgcgcacttcgcacctgaccatttggaagaagctattcgttttaacccgttagagaatcaagtcaaatga

SEQ ID NO: 390944 - DNA, 528 bp, Salmonella enterica
atgaaacttagtgatagcatagccttcatcagtctgattgtttcaacttttgcatttttggcatcgacataccctcacattatggattggaagcgaaaccgtcgaaaatctattacctatttcaagagaatcattacatctactaaatggacaaacgaaggtgatatttatttcagccctaaatcacatttcgatttaagctttttagaagtgcccggccgtaccaatgtttacgctgaactgattgttaacggggatgagtctgcgaccctacgaggaaagattaagccagatggctcaatgaccttaactttgaacattaccgttggctggcgtgaaatcccttctgccgaaattgagttaagttatgatgaagacgaagacttattaaactatcgcttcaaacattaccttggtcaacatggtctcaatgatgacttatccaggttcgatttcagcgggatgttatggcgaaatacgcttgagcttgattaccccgatcacttgggtaaaatgcccccttcttga

SEQ ID NO: 390945 - DNA, 513 bp, Salmonella enterica
atgaaactaaagaccacattgttcggcaatgtttatcagtttaaggatgtaaaagaggtactggctaaagccaacgaactgcgttcgggggatgtgctggccggggttgccgcggcaagttcgcaggagcgcgtagcggcaaaacaggtactgtcggaaatgacggtggcggatatccgcaacaatccggtgattgcctatgaagaggactgcgtgacgcgcctgattcaggatgacgtcaacgaaacggcctataaccggattaaaaactggagcatcagcgaactgcgcgaatacgtactgagcgatgaaacctccgtggacgacatcgcgtttacccgcaaagggctgacctccgaagtggtggcggcagtagcgaaaatctgctccaacgctgacctgatctacggcggcaagaaaatgccggtgatcaaaaaagccaataccaccatcggtattccgggcacctttagctgccgtttgcagccgaacgatacccgtgacgatgtatag

SEQ ID NO: 390946 - DNA, 798 bp, Salmonella enterica
gtgatcggcgttaacccggtgaccgatgacgtggagaacctgacccgcgtgctcgacaccgtttacggcgttatcgataaattcaatattccgacccagggctgcgtgctggcgcatgtcaccacccagatcgaagcgattcgtcgcggcgcgccgggcggactgattttccagagcatttgcggcagcgagaagggcttaaaagagttcggcgtcgagctggctatgctcgacgaagcgcgggctgtgggggcggagttcaaccgcatcgccggggaaaactgcctgtactttgaaaccggacagggctcggcgctgtcggctggcgcgaactttggtgccgaccaggtgacgatggaagcgcgtaactacgggctggcgcgccactacgatccgttcctggtgaacaccgtggtgggctttatcgggccggagtatctctacaacgacaggcagattatccgcgcgggtctcgaagatcactttatgggcaagctgagcggcatctcgatgggctgcgactgctgctataccaaccatgccgacgccgaccagaaccttaacgaaaacctgatgattctgctcgccactgccggttgtaactacatcatggggatgccgctcggcgacgacatcatgctcaactaccagaccaccgctttccacgataccgccactgtccgtcagttgctgaatttacgaccgtcgccggagtttgaacgctggctggaaacgatgggcattatggcaaatggtcgtctgaccaaacgggcgggcgatccgtcactgttcttctga

SEQ ID NO: 390947 - DNA, 2007 bp, Salmonella enterica
atgtcaaaagaaagagtaattgtaaatgacaggggtattaaaaacagattaaaatctattaagccttttagtgccatatctgaatatatttggaatggattcgatgccaaagccgatgaggttgagataaagtggttaagtaatgaacttggtactcttgattacttatctataaaagataatggtacaggtatatccgaacaagaattggacataagatttaaaccatttctctcttctgagaaaagaaatggtacagatttgaagcatattaatttagttcatggaaaaaatggattaggcagacttacattttttaaatttgcaaacaaggctacttggtacactacttatttaaacaatgataatttattatacgactattcaataactattaactcagatagtttagacaatttttccaagatagatggctcattatccagctcaaaacactcgggtacaaatgttatttttacaaatatcattgaattatcagacttttatattaaaaacaccctaactccatatgtagaaaaagagttttcatggttcttatatttgttcagagaatctggctactcattaaaaattggtgatcatgtaatcaacccagaaaacatgatcaaagaccaagaaacattcgaaatcataattaaagaacattcttttaatatacaatatgttagatgggcaagtaaattaaactcgcaatcttcaagattttatttttctaacgaaaatggtaatttctgtcactcagaaacaacacagttaaataacaagtcagactcattttatcacagtatttatgttaaaagctcatattttaatgaattcatttccagcaatgaccaagatgatctctattcaaatagcaccggttcagaaatttataaaaaattaattagcgaacttaatgcctttttaagaacaaaacgcaaaccatttttggttgaatatgcaaaagaacttgtcgatacatatgaagaaagaggagtattccccacctttaactacaataacaaatgggagaaaatgaaagccgatgacttacgtgaagccatacaggagctctataaaatagaaccaagattttttaaagatctaaataagccccagcaaaaaatcttggttcgcatgctgtccttaataattgatggtggtgaggtcgaaagctttttcaatatagttgatagtgttatatctctttcatcagaagaaaaagaccgtttcgctgaacaattgaaggtaactcaactatcttcaattttaaagaccatcgaattattaactgacagatataaagccgtggccgaatttgaaaagctagtatatgacccagaaatgtatgctggtgaagttccacacttacaaaaaatgatggaaagaaattactggttgctaggagagcaataccaactagtaactgccgaggaacccgattttaatgaagcagttaggcggcatacatatatattacgtggagaaaaaatcagaaaacataaagtagggcacgtttctgaacaaaaagaaatggacctatttatgattcgtcaaagaatgaatgaaaataagatagagcatattgtcgttgaacttaaacaccctgtaaatattaggctagggaaaaaggaagtagaccaagtatatgagtattatcaagttataagaaatgaaagcctattcaatgcaagtaacatgacatggaagttctatttaattggaaataaatatgatactacaggatatattgagcatatgatggaggcttataaagggaaaggtgattatggcttggtttataaaggagaatatgaagtctatgttagaacatggtctgaagttttctcagaatttaaaataaaacacgatttcctgaatcaaaaactgcaggtagaaaaagacaaaatccaagcagggctatatacgaatgcagatgagatagtcaacaatcaccgaacctcagactcaccagcacaatttaagtgggctccaacacaataa

SEQ ID NO: 390948 - DNA, 918 bp, Salmonella enterica
atgtttaatttattaattacaagcgatgaagaaggttgggcaacaggacggtatgtaatgagccgaagcaggtcgatagtagaatatactgctcctgagattattgaacgttatagagatttaaataagaaaaatatagaggagctaaagaaatttccgtgtctatttgttgtagagggggaacctgttccttcattgattggctatattacaggcataagattacgagataaggaatatgttatagagtttaatgttgataaaaactttccacctttaccaccgggggcaattaagtcgattcgagcagatattgatgttggggaatgggagttgtcaaggactcattgggctataaaagatgagcctttatttgaaattcttttggaaaataatcttataacaaaagaaaatatacaatcttcttatttttaccagtcatctgataggtttgaaaaccaacctgtaaataatattggaatgtctcaatataaccataaacaagtatttatagttcatggtcatgacgaaataacccgacttcaggtagaagatttcttaagatctataaatattgaaccaatagttttaagtcagcaaccaagctcaggaaaaacgattatagaaaagattgaacattactcaaatgtagggtttggtgtggttttatataccgaatgtgatattggagctaaaaaagactctctcatttataagcacagagctaggcaaaatgttgtttttgaacatggttttttgattgggaaattaacaagaaatagagttgctgctctagtaaaaggtaatgttgaaactccaaatgatatcagtggagtggtctatattagcatcgatgaaagcgaacgatggaaaactgaacttgcgcaggaaatgagagtggtaggatataatatttaa

SEQ ID NO: 390949 - DNA, 576 bp, Salmonella enterica
atggcacgagcactactggaacaggcctttgaaacctgtcagaagaataaatcggactggatgagcagcaagtcagcactggcgcgggctgaaatggcgctgaaagagctggagctgacctgcacccgttatgaaccggaggaaacacaggcgctgcgggatgatattgacctgaaaaaatgggcggtaaatcagtcggccgggcagtacatccggtcacatgaggccgtgcagcgtatcagtatccggcgtcaactccacgcctttatgcaggtaagcggcgacgcgctggccgccgcactggcaccggaattaatgcatctcagcgaacaaccggacattgtcagagaacgtgctctcgaccgggcggccgccagtgttcgcgaagcgctgtccgttcatgtaacccgcggaggaaatattgattacgcagaggaagattgcgacattctgacaaccatcggtttccggcctgacagagcatcgagagacgacaaccgggcaaaatatacgcctgaacagagtcagattttcatgcgccgacaggccgcgcagacccgcaaaaaatccgcataa

SEQ ID NO: 390950 - DNA, 243 bp, Salmonella enterica
atgatgcgctgcccgtactgcaaacaggctgcccatgtccgtaccagtcgctacctgtcggataacgtcaaacagagctacctccagtgcgtgaatgtcttttgctccacgacctttcgcaccatcgagtctattgacgaggtgatacggccaccggcagaagaaaagcccgaaccaccacaaacagtgccagaaacaccgccccgaattctggactgcgcccgctcatcgctgcgccactga

SEQ ID NO: 390951 - DNA, 804 bp, Salmonella enterica
atgaaaccagatttgtttaccgcagtaatgaaaaccatcggcagcacgcaggatgagaaaatccgcacggccattgacagcgcactggatacccttaacgagaaagcaaaccagaacgccgaggccacgataaataacgctcttgatgtgttcagcaaggccaaatccgcacacacggaaaatatgctgaaactgaatgatattgatgccgccattatccgcagcgggaaagagcgtcagaacgcgctgaatgaaagtgccgaagccgaacagaactggcgtacccgttttcgcgaactgcgcggcatgatgaccccggaactgaaaaccgaacacagtcagcgagtggccggtcgggagctggcggaagaattcaccgccatgattgatgagctcaacgatgataaagccagtaccatgctggccgcctgtacatcaggaaaagaatacgtcagcgcccattcagaggcgctttctgcccatgcccggaatgagtggtcggcggtcatgaaagagattcccccggcgctggtacgcgcttttgcgttacgcctgcgtgagctcgaaattaagggagaagaacaccctcacaacgttctcattcaggagctgggggagaatgtactggcgcaaagcaggttctacacattcaacatggcgcaggagccggtaatttcaataattgggcttcaccgtccggctcttaccggcgtggacatgaaactctataaaagccctgctctcagaatggcgcgggctaaagagctggcgcagaagaaaaaatcacagggggttaagccatga

SEQ ID NO: 390952 - DNA, 414 bp, Salmonella enterica
atggcgtggtgtgcggatcgtcgtgcagacgtcactttgtgtcacctgtccgcaatcgcatatcatgctgtcatgtcaatggtagctcaggcggggcagccctcgggctggccggtattcttcgaggccggtatttccacccccgtctgggctatcgccactgagcgtggaaactccggcgatagcaataatttgctactcgaaggaggttgccttatggctacgaccctcaccccgtcacacccgcagtttgtctttgtgtttgccgccgtccgtcgcgcagaccgtaaaccccgtatctgtatgctccgcaccgttgccggtgacgagctggccgcacgccgcacacttgtccgggaatacgtgctttcccttgccgcccgtctgccggttgtggaggtatcacatgcataa

SEQ ID NO: 390953 - DNA, 300 bp, Salmonella enterica
atgcataataaaaacacccctcagaccgtctcagcgcgtcgtgatgaccttaaccccatgaaggaacacctcagcatagaggcgtaccataaactcaatcgcgccagcgccgtctcgcagttcatcggtggagatttgctgcgccgtgaactgaacggtttacaccagctatacctgccgcagatttttagttatatccatgaggacgtcagctacgtcctggaagagctgaaagccaaaggcctgtgccgtgactttctcgccacgacgtcgggaaacggaggtgagcatcatgtttga

SEQ ID NO: 390954 - DNA, 450 bp, Salmonella enterica
atgtttgattttcctcagccgggtgaaatatatcgctgtacaggatttcctgatgtggtggtatcgggcgtgctggccgacgggattccgtgggatatgccgtaccgctgtccggggctggtctggaacccgtaccggcgcacctacaccatcctcattcgtattattgccggtggccgtatggcagaaattccgctcagtcgttttttgcgggactttacctgtgagcatcccgatgtatttaagcgcaaccctgaaaaccgccatgccgtattgcgcgaaatagcggccgacccggcattacagcaataccgggcgcggaatatcgataactatcctgatgatattcccccggttaaacgtccggcgccggtggcgcataaatggcggaataatttcaggccggaaacggaaataaaaccggataacagctaccgccattatctgtaa

SEQ ID NO: 390955 - DNA, 261 bp, Salmonella enterica
atgcctgttaacagtacggaacggccgcagaatataaaccagcccaccctcagccgggcagaccttgaatgcctcgaacatttgcgcaacgtcggccagctcgtcggcgaactgatgcaggtgcagggctgtaccaccgtgcgccacaatccggcgcagcagctacagctcacctcggtgatttacctcatgactgcccggctcgacggcgtggttgaccgctgcaatcagcgctggctgaccggggagggcagtgtatga

SEQ ID NO: 390956 - DNA, 594 bp, Salmonella enterica
  misc_feature (555)..(564): n is a, c, g, or t
atggacaatgtcgcgcctgcttcgcagcagtttactagcccactaagctgcatattgttaaaaatcagtaaataccagccgaatttgcatcttacccctaatgagtttagttatctggcggcgatggcgatgtggggtatggaggagtcaggtgtcgaatcaaatagtgagcattactttgtacaatccggctacgatgagaccacatgtcacagcatcatccgttacgttgatgaaagaataaatgaagatcctaatacttccgatgttcgtgttaataactttctgaaacgagcgctggaacagggattgttgtcactggccggaatgtctgtcgctgatgtggggggaacatatcgtctgactcagttggcacatgatttgttaaaacctttccaacaatctgatgaattagaggataaagaaacattaagccaacgttatctgagaattgatcaggaactgtccagtttaaatgctgacagaaatggagaaaaaattactgatagtgaatggttggtgaaggtagaactttttttaccgagcctgaagctnnnnnnnnnncctgaaggatctgctgacaggtgtttttaa

SEQ ID NO: 390957 - DNA, 855 bp, Salmonella enterica
atgaataaaaccattaatctgctaaaattactgcccgtagtattattaagcgcatgtactacatcgtatcctccccaggatacaacatcggcacccgagttaccccatcgtaacgtactcgttcagcaacctgataactgtagcgttggctgtcctcaaggaggaagtcaacaaacaatctatcgccatgtctatacgctcaataataatagcgccacgaaatttgccaactgggttgcctatagcgtgacaaagaccagccaggcaagcggtcgcccgcggaactgggcgcaggaccccgatttaccgccctcggatacgttggccccttcggcctataaaaatgcccatacgctattaaaagtcgacaggggacaccaggcgccgttggcaggattgggcggcgtttcggactggccgtcgttaaattatttatcgaatattacgccgcagaaatccgccctgaaccagggagcatgggctgcactggaaaaccgggtgcgcgaacttgccaaacaggctgatgtatctgtagtgcacgtagtgaccggccccctttttgagcggcatatcgccacattgccagaagatgcgacggtagaaattcccagcgggtactggaaggttttattcaccggaacggcgccgtcaaaaagtgaaggaaattacgctgcgtttattatggatcagaatacaccccgttcggcgaatttttgcgactatcaggttaccgtggaggctatcgaacataaaacgaaaccagtgctgacgctgtggtctgccttgcctgaagcggtagccagcgaggtgaaaacgacaaaggggagtctggcgcagaagttaggttgtcgatga

SEQ ID NO: 390958 - DNA, 741 bp, Salmonella enterica
gtggccgtattcgcccttcagtatcccggcggtttccttcgcgatggttttgtagcgctcgccggtcaggacgttgagcaccgcctgggtgccgacaatctgcgaggtcggggtcaccagcgggataaagccgaggtcctcgcgcacgcgggggatttccgccagcacctggtccagcttgtccgccgcgttctgctgcttcagctggctttccaggttggtcagcatcccgcccggtacctgcgccaccagaatgcggctgtcgtagcccttcagctggccttcaaaggcgtggtattttttgcgcacctcgcggaagtaggcggcgatgttttccagcttcaggatatccagcccggtgtcatattttgtgccggcgagcgtggcaaccagcgcttcggtggccgggtggccgtaggtggcgctcatggaggaaatcgccgtgtcgacgccgtcgacgcccgcttcaatggccttcagcagggccatctccgccatcccggtggtggcatgacagtgcagatgcaggcgcacctcaaaacgttttttgatttcgctcaccagctcaaaagcggccatcggggtgagaatgccggacatatccttgatggcaatcgagtcgacgccggtttccagcagctgttcggtcaggtccagccaggtctgcagggtgtgcgccgggctggtggtgtacgagagcgtgccctgggcgtgcgcgccgtggctgcgtaccgcctgtaa

SEQ ID NO: 390959 - DNA, 222 bp, Salmonella enterica
atgcagtttataattgggtatgttacagctgtaagaggaacgtctgtccgtgcgatcgttcacccaaacctctatcagaccacgtatatatatgatggaagattatatcgtggcgttgctataaatgaatttattgttataaaaaaaggatatcatgatattattggaaaaattgagggtgaagaaataattgaaaagaaaaactttgacaactctttgtag

SEQ ID NO: 390960 - DNA, 270 bp, Salmonella enterica
gtggacacggagaaaacaaagtctcttgatacaggaacggcttttcactgccgggtactggaaccagaggaattcagtaaacgcttcatcatcgcaccggagtttaaccgccgtaccagtgcaggaaaagaagaagagaaaacctttctggaagagtacgcccggacaggaataaccgtgcttacggcagaagaaggccggaaaatcgaatttatgtaccagagtgcgatggcgttaaccgagtgcattgctggagaagttgatcagtga

SEQ ID NO: 390961 - DNA, 2232 bp, Salmonella enterica
atgccacatgatgagataaatccgactgaaggtgagtttgtaggaaaggaaaccgcacaagagccagcggtgaatgtcacacatatcacgaacaatgtagtaatccagcagatggacgtttacacggagaagcttgcccagccgagcggaactactgttgatgaggcttctatgctcagcattgacgatgagttatctcagcatgccagcatggatcttgatgcccgtctgaatcgttactttaagggtaaagttgtccgtaaggatttgaccaaacagctaaaagaaggggctaatgtccctgtctatgtactggaatatctgctcggtatgtactgtgcttcagacgatgatgaagtggtacgcgaaggtctggaaaacgtcaaaaaaatcctcgctgagaactatgttcgcccggatgaggctgagaaagtaaaatctctgattcgtgagcgtggtagctttaaagtgatcgataagatcggagtaaagctcaaccagaagaaagatgtatacgaggctcagctttcgaacctaggtatcaaagatgccgtgatccccgccaacattgttaaagctaacgagaagctgctcaccggggggatctggtgtatcgttactcttaactatttttatgaagaagggcaaagaatttcgcccttctcaattttcaaccttaagcctatccagatgccctccatggatatggaagagctttttgccgcccgggctaatttctcaacagaccaatggctggataccctgatccgctctataggcatggagccaaccaatctgaagcaacgggtgaaatggcacctgttgacgcggatgatcccctttgttgagaacaactataacgtctgcgaactcggcccacgtggtaccggtaaaagccacgtctataaagagtgctcgcctaattcattactagtctcaggtggccagacgacagtcgccaatctgttttacaacatgagttcccggcaggttgggctggtaggcatgtgggatgtggtagcttttgacgaagtggctggtattaccttcaaagataaagatggtgtccagatcatgaaggattacatggcatcgggctctttttcccgtggccgtgattctatcgaagccaaagcatccatggtatttgtcggcaacataaaccaaagcgtagaaacgttagtcaaaaccagtcacctgctggcacctttcccggaagcgatgatcgatacagccttctttgaccgtttccatgcctatatcccaggctgggatatccctaagatgcggcctgaattttttaccaataactacggtctgatcaccgactatctggccgaatatatgcgagaaatgcgcaagcgtagcttctctgatgctattgaccgcttctttaaactcgggaacaacctcaaccaacgtgatgtaatcgcagtacgccgcacggtctcaggtttgctcaaattactgtatcctcatggtgtgtttggtaaagaggaggtacgtccttgtctcacctacgcattagagttacgtcgtagaatcaaagagcagttgaaaaaactaggcggcatggagttttttgatgtgcatttcagctatctcgacaacgaaactcttgaagagtttttcgtcaatgtacctgagcaaggcgggagccagttgatccccgaaggtctgggtaaaccgggagttgtgcacatggttaccaagggtgtcacaggccaactgggcctgtatcgcttcgagactcagatgacccccggtaatggtaaacacacgacatctggcctaggctccaatacaccagcaaaagaagcaatccgtataggttttgattatttcaaaggcaacctaaatcgcatcagtgctaccgcaaaattttccgagcatgaataccatctacatgccgttgagttacataactcaggccctagtaccaaaaccagccttgccgccttggtagccttctgttccattttgatgggcaaaccagtgcaagaacagatggtcgtgctcggagatatgacacttggtggtgtggtgaatccggtcgaagatctggcgggtagtttgcaactggcaatggatagtgggggcaaacgtgtgctgctgccgatggcatcggcttctgatatcccgacagtgcctgctgaaattttttccaaattccaaatcagtttctatgcagatccggtggatgctgtgtataaagcactaggtgttcaataa

SEQ ID NO: 390962 - DNA, 2604 bp, Salmonella enterica
atggatatcactcagcttcaaaccgggctaaacaacaaattcaccgcagatcggattgttttctggcacgacccagaacagagctttactgcacagcttacagagctcgccatactgtggaacgggttgccagtaacagtgctcaatatggcagagcagtcacagcttcaaactcgcaaacgcattgaaatcgatgaacccatgcagggattccttctctactggcccagttcagaaccatcaccagctaaagactggttgctcgatatacgtcgttatagcaccacgttttatgctgatgcagcctcaattctgcttaatgacctcggcctcgccaatatggcgctgcgcgaccacatcgcgtcacgtaaaagctttttcgccaacaaggagcgtactgcagcctttaaacgtcgcctggacggccgtggcggcatagaagatccgctatcacttgatatgaaaatgataagtgtcgtgctgacctgtcatgctcagattgccgaaataatgaaaagcattggcgatcggttacttgaaaatgctgaaaccgctcttgttccgctagaacagcatggattactgcctgcattttggcatttaatgaaccgtgaatatggataccatatagctgaagggacagaaccatcactacgcgaactgattcgtaagttactggtgagcgaatgctacgaacagcttgattccaaagaacgtcctgtctggctacagtcacaactattagccacccctaccgggcgcgcgaatgccatggctctgctatctggctggcgtgattctaatcagtacagtagccattttgccgaaatctctgcacaggtagcagagcagctcgaacttgcttcacgcctgacaacgcaagatatctggctctggggagaggtcgaaggttttgaagcggtcgagcaaggtttgatccgtgagctgatatctggattaaacaacggcgatctgagcctgaatagagtagagtttacccaactgatatctcgccgtcgacatgggttctgggccagaactgtacctaaatatgcttatatttatcacgcgctgcaacaagccgaattgctgctggaactacgtcgttccaaaccggatggttttcattactcctcggcgcaagaaatgtatctggcctatgaagctgaattgttccagtttgatgcagcctatcgcctgtttaatgaagcactattgcacctacagggacaatcggtcgaagtgctggctgtactggccagtaaaatcgaagatctgtatgtaaactggtatctctatcagcttgggctaacatgggatggtttgttagctaaagagcagctacttgataactggcagttgggtctcccttcgcagcatcgcttctatgatactgtcatcaaacaacgctttacccagagcggggtcaagcgccagtttgtgattatcagtgatgccttacgctatgaagtggctcatgagctccagggacagataaatgaagccaaacgcttctctgcacagctcaagagccaacttggggtactacctagctatacgcaacttggcatggccgccctactcccacatcagcaactagactatgccgctaccagctcaacagtattagttgatggacagagcagctcgggtttagaaaatcgcagcactattctcagtaaggtgggtggtatagcgatttcggccaaaagtctgctgagctggacccgggcagaagctaacgaggcggttggtgacgcaaaggtaatctacgtctatcacgatgtcatcgatgctcagagtgaatctcagaaaagtgagctcaagacattcattcatgcccgccaggctatagacgaactgaatggactcatcaacaaaattatcaatgggtttggcgttactcgcgtagttatcacagccgatcatggattcttattccaacaggcctcagttgaaaacggggtaaaatcgcctctgaaacacgaaccatctggaactctggaagcttcaaaacgctatctccttgctcgcaatttaccaacaaacgaagatgtctggcatgggcaattacgtaatattgttggtggtaactctgatgtggaattctggcttccgaaaggagtgagccgtttccattttgttggtggagcccgcttcgtccatggtggtgcaatgttgcaagaggtctgtgttccaatacttgaagtacaagagctgcgtggcaagaaacaaactctacatgaaaaaaccaaagtcgacatagttccggcataccaacccattaagctggtaaatgtgatcgataaaatccgcttcctgcagaccgatgccgtcgatgaacgtcataaatcaagaatggttcgtttctcggtggtagatagttcagaacaaaccgtgtcagctattgagaagctactctttgacgcgacttcaagtaatctcgatcagcgccagcaagacgtgcgtttaaaactgaccggtgctcaatttgaccgcaaggcgcagtatcaattgctgctcgttgatgatgaggatggtattgaaatggcacgctatccagtcactattgatttggcaatccaggatgaattcggtttttaa

SEQ ID NO: 390963 - DNA, 3678 bp, Salmonella enterica
atgaacactgccaatttaaaaaaaatagcccctcgggctcgtacagcatttatcacagcgatcaaagcacgcgctgctgaatttggaatcactgccaagggccatattgagccggtaattagcggtgaagttttgcaagttgctggatttacccatccatccagttgtgcctctgcccttaagcgcctgcaacaacggctggcaaacgatagttatgagactttaatagagcatgtcgcatacacttggtttaaccgcttctgtgccatccgctttatggagctgaaaagcgaagagggatatttagaacacggtgtgcgtctgctatcacacccgtcccagccactgggttttgaggtgttggatcgtgcacctgaggtgatcgataacctgataacagaaggtgtggctttggataagtccgctctgttggacttgttactggcaggtaatgagcaggaggctctcttccgtgagctacttctaggtcaatgtcaccgactgcatcaagcaatgccatttttgttcgaagccattgatgatgaaacggagctcctgttacctgcaggccttactcgcaccgatgccttttggcgtgaactggtagataagatcccagaagctgactggcagcaagtagaggttatcggttggctttaccaattttacattcttgatgaaaaagagagggtggataaaaaagtaaaagccgggaaagtagttaaccctactgaaattccagctaaaactcagctttttaccccaaactggatcgtacagtatttagtgcaaaactcaattgggcgctactggctgcaaacctacccaaattctcgcttgcaacaaagcatgcactactatgtagtacatggaaatcaatccacagaattaaaggataaattatcttattttgctcctgatagtatcgatccggagtcaatcaaggtactagatccagcttgtggctctggtcatatcttggtggaatcttataacctcctttatcgcatctatgaggaacgcggctatcgtagtcgcgagattcccgagctaattctcaaacacaacttgtttggcctcgatatagatgaacgcgcagcacaacttgcaggttttgctctgttaatgcgtgctcgtcaggatgatcgtcgcctgtttactcgcggaattagaccgcacatacacgctctgcaggaaagtcgccacttgaatatatccaatctatggcagatgctgaaccttaatactgactggactgccggccaagtgcaagatatgtttaccgtgctcccccaatccctcgtagccagcaatccacactttagcctgctgaatgatttgtacctgcgtttccttgatgctaaaaccctaggctctctaatcgagttaccaactgagcaaaagcagatcatccacgagttctatgccatcttgcaagatttaagtatcagtggtgatgcaatgcaaaaaactgcagccaaagcactactacccttgctggcacaagctgatgtgctatgccgacattacgatgcagtcattgctaacccaccctacatgggaggcaatagtatgaattatggtttgaaaaaatttgccgaagaaaagtttccggatagcaaactggacatgtttacaatgtttattgagcgggggtttaaattagtaggcgaaggtggttttaacgctatggttacgatggaaacatggatgttcttatcgtcatataaaaaattcagattaaatatctcatcatgttcgtctatagttacattaactcatcttgaaaaaatgctgatgggcattgcttttaggactgttgctacagtatggaagaatataaaaggcgataaaactcctggtatattttcttttgtaggcaaagatgacgttaataaaaatggcattccatttttatttccgcctaagaataagcgattatcatatatttccagttatagttttgagaatatccctggagcaccaatagcctattggttgcctgtcgatttgcagaagtcatttaaagaaagagctttaaatatagaatgcaaaccgagaataggaatgcaaagtggggataatgaaaaattctatagactttggcatgaagttaataactcagaaatagtaagaaatatttctgcgcttaccaatacaaagggtaagaaggcatgggttccacttcaacgaggaggagatgcaaggaaatggtatggaaacaacctatacatagtaaatttaagcgatgaaggagctgatattaagaggacaaaaaatgcatcattgaggaatgccgatcactattttaacatttctgcaacctggaatagattaagccaaactcgcttctatgttaggcatgttgaacaaggttatgcttttgatgatttaagtccatttgcaaactcatatttagctgaaaaacattatgagcatctgggtttattggcatctagcgcggctagatatttaatatcatttatatctacaggtcgcaaaactgaagtgggacatgtatctcaaattcctttaccaactacctttaatagcggtgaagcagtatcaactatttgcaaaaaattaattgagttatcaaaaaatgactggaattcctatgaagaatcagcaggcttcataaagccatccctattggataacgtagacaaaattaactcattatgcaacttgtataaaaaacaatgtgcttcttggcagcgtagtatctttgaaatgcaacgtcttgaagaagaaaataatcgcctattcatagaagcgtatagtctgcagactgaactaacaccagaagtatcgatcaacgagattaccctgacatgcaatccgtattatcgttacggtggaaatagaaccgatgaagagctcaaagccatgttacaaagcgatactgtcgctgagcttatttcttacacaatcggctgcattatggggcgttattcattagatcgcgaaggattagtttatgctcatgccggtaacgaagactttaaagcgctagtagaagaaggtgcttatgcccgttttcctgcagacagtgacggtattctgccgctaactgtcgaagcttggtttgaagatgatattgctgctcgggttgtagaatttgtccgcacagtctggggagttgagcatctggaagaaaatctgcaatttattgccgatagcctgtgcttagctgcgatcaagccagtgaaaaaaggaggagaaacctcccgtgagactattcgccgctacctctcgactcagttctttaaagatcacttgaagacctacaaaaaacgcccaatttactggctattcagttctggtaaagagaaagcctttgaatgcttggtctacttgcatcgctacaatgagacaactctcccgcgcatgcgcaccgagtatgtcactcctctgctcggccaaatggacagccgtattgagcgcctgcgcctgcagcagaatgaagcagaaacagccgaagccaaacgcatcggtaaagagatcgatagcctgaccaaacagcttaccgagctgcgttcttttgacgaccagctcaaacactatgctgatatgaagatccagctcgatctcgacgatggtgttaaggtcaactacggcaagttcggtactttattagctgaagtgaaagctatcactggcgataaagccgagtaa

SEQ ID NO: 390964 - DNA, 1755 bp, Salmonella enterica
atgtaccaaaccggtggcaccatcgaaacgctgctgaacaaagttgaacagcatgaatatattttgcctgcaatccagagagaatttgtctggcggccagatcaaatctgccagctatttgactctctactacaaggctacccgtttggtaccttcctgttttggaaaattaaaactgagaatctacgtcagtatcaattctatgattttatgcgtgactaccaccagcgtgatcaagtccactgtaaaaaactagagattatcggtgaaaatgatcgtatcgcggtacttgatggccagcagcgaatgactgcactaaacatcgggttgcgtggttcctatagttggaaaactcagggcaaatggtggtccagttcagacgcctttatcgaacgtcgtctctatctcaacctttttgaatgcacagaccctgacagcggaactcgttatgagttcgagttcttaagtgaggatgaggcaagccacaacgatgaccaacaccattggtttttagtctcccgtattctcggtatgaatgcctatgacgtaatgatgtcagtcatggaaatgaaaatgcctgatgaacgcaaaccagcagcaggtaaagtgatttcccgttttcatgacatcattcacaataaacctttgatcagttactacttggaagaaggtcaggagctatccaaggttctcaatatctttatccgtatgaatagtggcggaacaacactctcctattcagatctactgctctccatcgccgtaacgcaatggagcacgctggatgcgcgtgatgagattcacaagctagtagatgaaatgaaccaaataggtaatggtttttcctttagcaaggacctggtgctcaaagcaggtctgatgctgagtgatatcggcagcgttgggtttaaagtcgagaactttagcaaagagaatatgtgcaagctggaagataattgggaacgcatccggaaagctttacttcttgcagtcaatctactcagcagtttcggcttcaacagttacaacctgggagcagacagttccctacttcccatagcctattacctctaccatcgagatctggataacagctacctatcccgtagcgagtatgctgctgataggcaggggctcagaggttggctcattcgctctatcctaaaacaatccggtatttggggaagtggtcttgatacgcttctgactagcttgcgaagcaagatcaaggaacatggtcagcaagagtttcctctgatagaaatgtctattgcgatgacagaacgcggcaagagcttacgctttgaagaagaagaactacagtctttggttgaactcgactatggcaaccgccgaacctttgccttgttatctctgctctttccgggacatgacttctcccaccacttccatgttgatcacatattccctagagcccgctttaccaaaagccaactgaaaaagataggcatgaccgatgaaacacagattgaagagtggattatcatggctaaccggctacctaacctacagttgttagaagggggccagaacaatgaaaaacgtgagaagttaccgcatgaatggtacgaagtgatgtggcctgagccagctgcccgtgccaatcatcttcacttacaggcaatcgactcacttccagagactttggctggatttgaggcgttctatcataagcgtcgtgaaatattattggcgcgtttacgtcacattcttagtgaacctcttacggcataa

SEQ ID NO: 390965 - DNA, 3723 bp, Salmonella enterica
atgatagagacggaatttttaatgcagataagagagctgtttaccaaacaactggatcgcccaatcaatggtgtggtgaaagccgagcagctggatgagcaaatcatctggactgagcttgacgagtatgtggtgacccgtgaacttgaccgccaccttcgtcacttttttgagacctacctgcctggtgtcagccatccagatgatcctagtgtggcgggtaaaattgggatttgggtatcgggttatttcggttccggtaaatctcactttataaagatcctctcttacctgctcggtaacaagaaagctgttaacaatggccaaacaaaagctgccatcgagtttttcaaagagaaaatcagcgatccccttctttacggtgatatccacgctgcagttaaccgcaatactgaagtaattctctttaatatcgacagccgcgcagatactgaaaacaaagaagatgccattctcaaagttttcttgcgcgtcttcaatgagcgcctgggatattgcgctgaccatcctcatatcgcacacctggagcgtgagttagattcccgtggccaatacgagccattcaaagcaaaatttgctgaactcacgggctcaagctgggaagaacagcgtgatgcctatggtttctgtcgtgatgaaatggcaaaagcctgggcctatgctaccggccagtcagatgcctcatcggtgcagagtatggaaaatctcgaatccatgtttactctcgacattgccaacttctgtaaatgggtgcgggagtatctcgatcgtagcgatccatctggcgacagtaaacgcatggtctttctggtagatgaggtcggacagtttatcggcaacaacacccagatgatgctcaaactgcagacgataacagaaaatatcggtaccgcttgtggaggcagagcttgggtaatcgtcacttcacaagaagatatcgatgccgtactaggagatcttagcgctaaaaaaggccaagacttctccaagatccaagggcgttttcacacaaggatttccctctcctcgtccaataccaatgaggtaatacagaaacgtctgctcgaaaaaagtgaagacgctaaaaactgcctggcagaattgttcagtcaaaaaggcgacattcttcgcaaccagttgacctttgataccagcactacagctgagcttgctaactacagtgataatgttgagtttgttgatcactacccttttattccctatcagtatctgctggtacaaaaggtcttcgaagcaatccgcaaagtgggggctaccggtaaacatctctcccgtggtgaacgttctctgctggatgcattccagaatgccgcacgccagcagatgaacaaagatatcggtgtattggtgcctttccatgccttttatccggcaatcgaatctttcctcgataccaacgttaaacgcatcttcgaacaagcggctgagaaagcaagcctcgatccttacgacattaatattcttaaatcgctgtttttgatccgctatgtcgatctggtcaaatccaccattgataatctggtcacactctctattgaagaaatagataccgataaagtggcactgaaaagccgaatcgaagccagtctacagcgtcttgaaaaccagctattgattgtcagaaatggcgatgaatacgtattcctgactaacgaagaaaaagaagtcgagcaggagatcaaacacactcaggttgaagcaactgaagagaaccggcaactggcccggttggtgtttgaagaggtaatgggcaatcgccgtcagtatcgctatccggtaaacaagcaggattaccctctgactcgcttttgtaacggccactctatagacggcagccaacaaacagatctggtgctcaaagtcatttccccactggatgccaattttgatagttataacgaacaatcctacaaggcactgagccaagaagggaatggttgtattctggtacgcctgtcgagtgagaagcggatctgggctgaatttgatacgtggttgaaaaccgagaaattcctagcagggatacgaggtaaacgacctgagcaagagaaattgctggcagaaaaagcactcgaaaacacccagcgtcgcagccgtctgaaattactattcgatgatctggtgaaacaagcacagatattcgcactcggtaatgagctgcaaagtaaatcggctagtgtcagcaatatgcttgatgaagcttgtgcctacgtaatcgaaaactcattccaaaagctctctttactacaaagctgtggtaacaacccggtgcaagagctgaagtcggtgatcatggccgatgacatggcacagctaaatgtaaatctcggtgaacaagaccccaatgctgctgcaaaaaaggagattgaactctttttaaatgtcgcagatgaaaaaaatcagccggtctaccttaaagaattgttagagcgattcagtgctcgtcccttcggctggaaccgtgacgaagtaatgctacaggtgactcatctggtcttgcttggtaaggctgcgttatctacaccgaatggtgatttgcccctcaaacgcagttacgaacattttacctcggtacgtagccacagcacactgcgtattcgtcgagtacgtcagcatacagaacagcaagtagctaaagcggctaaactggcgaaagatatttttaataaacccttcgaaagcagcgaaaaagagctggcgaataagcttcttgacgtactaggcgagtggcaacggttaattaaagaatttgattttaaagctaaagatgggaattgccctggcaaaagcaccctgcttaccggcagtcgattgatcgccagcctgcttgagctgggcaacaacagttatgccctaatcgatggattctgccagcagagcaacgaatggcaggattttgccgaagattttgaagaagtcgaggagtttttcactcgtcagtttgatatctggcaacagttgcgtcgagccctcaacgatcaattcaaatccaatcgccatgcgctggagcaaaacccagaagcggctaaagcattagctgcactgcaggctatctacgatgataaatccccgtatagcaaactgcgccaggtgggatcgttaattgatcaactcatcgccattaacctgcaactggtagaacagaaacgtgccgcagctttggaagcgatcaatgcgacccagcaaggggttgcaccgctggttgctgacttaccagctgagttacaaaaccaggcaatgcgtccctttaacctgttaaaagaacgggtcagtaacagcttatccttgcatgaaatcgttagcctgcaacaagaggctgatgatgaagaagataaggtcttagaactgatcaaccgctacagcgccgaacttcaagctcgtctggaagcggagcaagccgcagcacggaaaaaaacggctgaaccgcctaatagcgatgctggtactttgcgagaaccggatccatcagactcgccaactactactgcgaataactctgctgcgacagtggttagccacaaaccaataccaaaacctattgaactggtttcaccagctgaattgctcggtgccagccacatctttatagagacggagcaagatatcgacacctatctcgcgacccttcgcagccgtttgcaacaagcaataggtcaaggtaaacgagtgcgaatcaaataa

SEQ ID NO: 390966 - DNA, 615 bp, Salmonella enterica
atgagagcgaaactggacagtaagccgcaattgtcagctcgtctggaacaaatcgaagaccggcttaaaagtgaaggcttcctgaagaaccaagagctcggtggtgagatcggtttttatatctttgattacccacctcaatttgaacttaccgtacgggaatatctgagattgactctgcctcgcctagctcggcaggggctgaatttcgctcatctcaatctgttcgaagaggtactggcaattttgcaagagcgtaaattgttagataaagcttttgatctggaacgcaaaaaaggtaccgatgagctagccaaagcacttaaaggacctcttgaacaaggtcgaattgctaagcatctgatagataaagtgcttccggcctcgcctcaatttgtattgttatcaggtcttggccaatgctggccattgctacgtggtcatagtttgcttaatgcactacatgcccatatgggggcaataccattggtattgttttatccgggcagttacaacggcctcgaactttatccttttgatctggacagcgcagaagtggcaacagccaactactaccgagctttccaactggtgcctcacgcatctaagtactga

SEQ ID NO: 390967 - DNA, 600 bp, Salmonella enterica
atgaccgccaaagaatatctgggtgacatcattggtggcagcctgatgttgcgtgagagcagagtcatcgcggagctgctgatatcctcaccaaatgatgatcaatggcataatgctattgtaaatgacaatgtgctgcagaagacctcagtgcacagtgttaaacgcatggcttcaaccttgcgtaaaagaattcaaccgatgggtgaggcattctggagtgagctactaaaggcccctgatgatgcagccagacaaatgttgctaatggcgacaatgcgccaatccccagtgctgaccgatttcatggcaacgacactgtctgatgcccgacagatgtttcgtgaatcattgcgcagcgaagactggcaggaatttattctatcccgccagcgtgccattgtcggcttggatcaatattccgaaagctcaatccagaaaatgggcaacaatgtatttaaaatcctcgcagatagcgggtatctggaatcaggccgcagtaaaaagctgaaaaatgtcttcctactaccccagataagagagtgggcaaacagtctcgactgccaaaaagtctacgatgtgatggagtcagtcagatga

SEQ ID NO: 390968 - DNA, 393 bp, Salmonella enterica
atgttttcttacattatgcttggaaccaacgacctgccacacgccattacattctacgatccgctgatggagatgctggggtatccccgtggcggcaggaatgagaacgtcgcatggtggggcgtattcaacggtaataacacgacggcactgggtatcggcagaccttttgataaacaggatgccacgaccggaaatggtgtgatggtcgccctgattgcgcgttctgccgaacacattcagcagcttcacgcgctcgctttagaccacggcggcacggacgagggaggacctggcctgcgcccgcattacggcgaaggtttctacagcgcttatgttagagaccccgatggcaacaagctggctttcgtctattacaccgcacaatcctga

SEQ ID NO: 390969 - DNA, 252 bp, Salmonella enterica
atgtcacaacatgaacagttctgccaggcttgcggaatgcctatgtcggcacccgatgcacacagtgccagtgatcaatattgtgcgtactgcagcgacagcaacggcaatctcaaaccatgggaagaagcggtatcaggtttagccagcttccttgattcctggcaaaaagtcggcccggaggaagcacataagcgtgcaaaacattatctgacggcaatgccagcttgggctcataaagcggacgagtga

SEQ ID NO: 390970 - DNA, 747 bp, Salmonella enterica
atggatatcccacgtatttttaccatcagcgaaagtgaacaccgcatccataacccgttcaccgaagagaagtacgccacgctgggtcgcgtgctgcgcatgaagccgggcacccgcattcttgacatcggcagcggctcgggcgagatgctctgtacctgggcccgggatcatggcattacggggactggcatcgacatgagttcgctcttcaccgcgcaggcaaagcgtcgcgcggaagaactcggcgtcagcgaacgcgtacattttattcataatgatgcggcgggttacgtcgccaatgaaaaatgtgacgtggcagcctgcgtcggcgcgacctggattgccggaggctttgccgggacagtcgaactgctggcgcagagccttaaaccgggcgggatcatgctcatcggtgaaccttactggcgtcagcttccggcaacggacgagatagcccaggcctgcggcgtcagctcgacaagcgatttcctgacgcttccagggcttgtcagcgcgtttgacgacctcggctacgacgtggtggaaatggtactggcggaccaggaaggctgggaccggtatgaggccgcgaaatggctgaccatgcgccgctggctggaagccaatcctggcgacgacttcgccgccgaagtcagggccgagctaaacatctcgctgaaacgccacgtaacgtacgcgcgggaatactttggctggggcgtgttcgcgctcatcgccaggtaa

SEQ ID NO: 390971 - DNA, 552 bp, Salmonella enterica
atgacagcacaccacttcacttttcatatcacagatgaaagtgatgccagtgatatccgggaagtcgaaacccgcgcatttggcttcagcaaagaagccgatttagtggcctctttacttgaggatgaaagcgcgcgccccgcgttatcgctgctggcccggcatgaaggcaaagccgtcgggcatattttatttacccgggcgaccttcaaaggagaaatggattcaccgctgatgcacatcctcgctcccctggcggtcataccggaataccaggggatgggcgtgggaggacggttgatacgcactggcatcgagcacctgaggttgatgggctgccagacggtttttgttctcggccacgccacctattacccccgacatgggttcgaaccctgtgccggagacaaaggctatccggcaccttatcccatcccggaggagcacaaagcctgctggatgatgcaatcactcaccgctcagcccatgaacctgaccggccacatccggtgcgcgcaggccctgatgaaaccggagcactggcgtgaataa

SEQ ID NO: 390972 - DNA, 258 bp, Salmonella enterica
atgaatttatcccgtcaggaacaacataccttacacgttctcgctaaaggtggacgtattgcgcacgtccgcgattcttcaggccgcgtcacttccgttgaatgctacagccgcgaagggctgttgctgaccgactgcacgctcgccgtcttcaaaaaactcaaaaccaaaaaacttatcaagtccgtcaatggccagccctatcgaatcaacaccaccgagctgaataacgttcgcgctcagctcgataatcgctaa

SEQ ID NO: 390973 - DNA, 477 bp, Salmonella enterica
atgcaaataatatcgtcaagatgcatcattcgaccatttcagtcacacgaaattgatagttttatggtgtatcgcaatgatgctgagtggatgaaatatcagggatttaagggactaacaaaagaggactatgaagcagagttgctgggaattcttacacttgctcgcggtattcaattggccattgtcaacaagatgacgcaggttttgattggtgatatctatttacgtcagcaatgcgatgtgttttggatcggctataccatcagtcccgcttatgctcgccagggatatgcaattgaagcaattaccgccacgattgactggataaaagagaacggtttttcacttatcaaagccggtgtgaatccggaaaataccctttcaaaaaaattacttatcaggattggcttcaatttttcaggcatcgaagagggtgagcatatttatgttctggatttaacaaaaggagaataa

SEQ ID NO: 390974 - DNA, 393 bp, Salmonella enterica
atgttttcttacgtgatgctgggtactaacgatctacagcgcgccataaggttctacgatccactgatggaattgcttggacatccaaaggcaggccgtaatgaagaaggtgcatcctgggggacgttcagcaataaccataccatcggattgtgcgtcggcaggccctttaaccagcaaccagcgagcgttggtaatggcacgatggtcgcactgaatacccattcgtttgaacacatccagcagttgtacgaacttgctatcagtctgggcgccagggatgaaggtacaccggggcacaggccacaatacggacagggattccatagtgcctatgtacgcgatccggacgggaataagctggcgtttgtgttctatgccgatgagggttga

SEQ ID NO: 390975 - DNA, 528 bp, Salmonella enterica
atgaatgagcatgcggttctgaaattgcttaatgagctggatatatcttttcagtacatatcacatccggaagtgaagacggtcgctgaccatgcgagttttgctgcagattttccggcacagctgctgaagaacctgttgctaaaaaatagctctggtaagcatttctacctgtatattcttgatggcaataaaaaggcagatcttcgcgagttagcgctccagcttaatgaatcgcgtctgtctttcgctaaaccagacgagttaatagaaatactcggtgtggaacctggcggggttacgcctttcgctattgcacataacaaggagagggatattcgaattattatcgattcttctgtatcagcgagtcgttcactgggctttcatcctctgattaacaccgcttcggtttgtatttctaaaaaagacttattgcggctactggcatttttcggttattcccctttagatattcagaccgatagcgtgctcttgctactcgcgcgaacaacggatgcgttctaa

SEQ ID NO: 390976 - DNA, 918 bp, Salmonella enterica
atgttgcattacgatatgatccgctacgagataatgtacctaaaaacgttaaataggattttcaacacagatcactcgttactgtgcagtacttatgatacgccggatgattttcgacgcttgatctctcagatacttgaacggcattttcatggcgatcaggacagaatcaaaattgcgcggaaaacacttaaagaatgggctgacctgcaactgattgataaagattattttgattgtttcaaaggtacacctagagcatcgtggtttgctcaccattacatttttgaatacccagtaaaatctgcagggttgacacttggtggattggggaatgacgtcggttgttcaggtggttttaattctcttttaatgaacgataatatcctcacagagcttgatttctctaaatttaacttcgacctggacgatattgattgggacctgataacaaatccacaggctactgcttcgaaaaaaccgaaacgtgttttctcccgattttatctgaacgcgggagcaagtaccgatctgtacaaccccactccggtaactgagcgtgaactcatcaatggtgtgatgaggtacattgatgaagctccatgctcacttggagataagatctcttatttcagaaaactgcatgagcgttggcttgagcaatatgatttttttctgacagattttgactggatgtcacgagatgatgaaactcagttagtatatctctgggactatctcaaaggaaaaggacgaatagcgggctatcttcgcccttataatacgtctatgcgttatgacatgattattgcggctatagatgtgtggaacgtccaacctgaagagaagttggagtttattgagaagatgaaacatgcctggcaagcatcaaaatcttatcgacgatctgctaaatag

SEQ ID NO: 390977 - DNA, 426 bp, Salmonella enterica
atggctatggaagttcacgggtttattatttcgtctccgttcgtgttcgtctgcgatggtaaggtttatcgcagccaatcggggaaaaactggacggtcatatttagccgttacggtacgcaagcctgggggaatgatacctatgcttcccagcgcgttgaccgtgcttgcccgccaaatcgtaacgaagaagttcgtttggctttccgtggcgcagttatgcgccacttcaagctgaactacacccaaattgaggcattcttccagcgtcagatcgacgaggacaagcaaatcctggtcgaaggaaattcggttaaacgccatgtgggtggccgcagcagctacagcacaggcagtagcagcacgacgttatctgctcccgcgcccgctccagtcaaaaaggaatcccccccatccagcgcttaa

SEQ ID NO: 390978 - DNA, 507 bp, Salmonella enterica
atgttcctgggaacctgggaagaaccgaatgcggtcaaacctgaacccgtggtggccgaagaaccccaggctgaagaacctcgagctgaacggtcgctggctgaagaacgcgaacataaagaagatgtacccttctatggccgtcgccgtcgtgatcaggggaaattccgtgaagatgtgatgcttaactgcggtggccgttgcgtctacacgaatgccattgcggtacgctgcgaagccgcacaccttaaagcccacgctcgcaaaggtggcgcgagctttaaaaacggtctgctgctgcgcgctgatatccacaagctctttgacgcgggactatgtgccatcgatccgcacacgcttaaactctggttcgcgccagacctggtaaaaaaagacgcagatctcgcggccattgatgggataacgatgcgcaaaacgctgctccctatcaacaaagacaacatcgaagaccgctgggatgccttcgttaaaatcttgctggcatga

SEQ ID NO: 390979 - DNA, 1380 bp, Salmonella enterica
ttgcagcaatcagtcttaaaggcgcaggagacagacggcaccctggagcttgcaaggactaaatggagcaatactgagtcccagttacagcaactcgaccaggaaatttccagcaaatatcaggctgtttcgaaattgaaggcgaccgaggaacaggcacgaaaccgcatgggagacagggtcgttgatgagaggttcttcgagcgcgagcacgaggctatccacctgactgcgccatggcttcccgatggggttcatcgcctgcgggaggatcttttcgctgctgccctaactgtgcataaaacgttcatcgatgcttcggccagccgcttgcaacacaatcttgggctattgatgtcgggcatggtggctggtaccttccagtcttccgctcaccgtgaacttctccccgacctttggtcaagccttttcatggtggtgccgaccgtgtccacgacattcgcctctgttcggacgatgttcggggatctgccaccagagagcattggctggcttctggtagatgaagcgggccaggccgttcctcaggcagcagttggagctatcatgcgggcaaagcgctccatcgtggtaggtgacccgttgcaaatcccacctgtagtttcacttcctgaaaagctgaacgtcgaaatctgcaaattcttcgacattgatcagagcgaatggtctgcgcccgcagcatctacgcagacccttgctgatcaggcatcgcgcttcaaatccaccttcgtcatggatgtaggtgatcgagaagtcgggctgccactcctcgttcacaggcgttgccagaacccaatgttcgatgtttctaactccatcgcctatgccgggcagatggtccatgctgtcgggactaaaagactaggatctatcggctcggctttggggcgatctcgctggttcgacgtcaatggcaatgctgagacgaagtggtgccccgaggagggtgatgcggttgtacgaatgcttaaagagctggccgcatcgggcattacaaatccggacgtctttatcatcacaccattcaagatcgtagagcagaacatgcgtcggcgtctcgacagtgagaccgatctgctgcaagcgctgggagtaaagtggaatgagtggagccgtgatcgtgtaggcacgatccacacgttccagggccgagaggcggacacggtcatcctgctgctgggtgctccgaaagcgagtcagcaaagagcccgtcagtgggcggcaagcccgccaaacattatcaatgtagccgtctcacgcgccaagcaaaacctgtatgtggtcggctcggctgctgcatgggcaggggcgggaacgagcctacaggtcctgcagcgacaattggcgcaatcagcctga

SEQ ID NO: 390980 - DNA, 2211 bp, Salmonella enterica
atgactacaaggcagtatgcgcaaaaatcaatcttcgatctggaggaaattttcgagcggtcacggaacaatgctagtgaacttgaacggctgttgaacgaactgaccttccgcaatactgccaaggcccgaacgttgaggactaaaatcgagcaagcccgaactgtacttagtggtcactgcgtgatctcaatgtcggattccagtccatcagcgcgtcatcctggctcgtcgtccacacaatcctcccaagttccgccccgtgatgtgcctgcagcggtagtgcaacagcaacccaaggctaatccagctcctgtcatgcaacagcaattcggcgaagaccagatcgacctaggtccactcccatctttctctccgacaggtaagtcgaatgatgcgcgagcaatactggcagcatggacagccctcgaagcactatcgcctcaaggttataaacgcccagaggatatggcaaccggcgaccgctccagggttgcgctattggagcgaggtgttccatggggaccaaatgcccgcagcaagcccagccataagctttatttcgaggtcgtcctcggctccatcgctctcgacaaggcgacggacgagctggtcaaggtttttggcgaggatgaggagcgttcacgcccggacggtaagaaagcggccatcggctcgatcttgatcgacaaagaaggctatgtgcttgaggacaaaggcgttgccgtttccagttttgcctgggcactcaagccggctctcgacctgaaccttgggagcttagggaattggccgaatgttgagccgcgcattatcgagcatctggatcgaatggttcgccgccacaacgaggatggagaacccataccgatcgatttggatgtcgttcttaacgcttataaatggcttgtgtctcagttcggggtacccgagcatttggttgagccacccacattcgcgattaaggtgtttcatcatttcaaggccaaggcgccgcctgaaccttcgctactgaattccttctatcttgaagatctcggtgaagcaaccaaattgctcgagacgggcaaagccggaaccggtttgctccgctatatgggaattggcaggcctgaccaaaaaatcgacgtgctatcgcccatttccgcagttgagcctttcgtcgcaccgtcgctcatgccgcaggctcgttggccttcgaaaggcggccatccattggtactgcttcaacaggctgccgtgaatgctgcgcgtgctgagctgaatgatgctcctggtatcatcggtgtcaatgggccaccgggtactggaaagaccactcttctgcgagatattgtcgttgggtgcattcttgatcgggccacggcgatgtgcggctttaataaaccgcaggatgccttttccacaacaggcgagaagctggcattcggctccaatgcattcctgcacttctacaagttacatgcatccttaaagggccatgagatcgttgtagcgtcctccaataacaaagcggtcgagaacgtcagtaaagagcttcctctcaaggaagccaatggtcgtcatgaacaaatcgcctatttccggtccatcagcgacctgattgcgaatcccaaacgagccggctatttcgaagccgaggccgagggggacatcccctccgaccctgtcgaaacctggggattgatcgccgcggctctcggcaagagcagcaaccgaggcgcattccagcaaagtttttggtggaatgaagacggtggtttccttacctacctgaaagcagctcgcggcttaaacgtcttgcgtgagatcaaggacgaacaaactggcgaaatcatcgatcgcgtgatgcccagcgtggtcgtcaatgagcggcccagcaccaacgaagcggacgctttagcggcctggcggaaagcgcgaaccgttttccttaaactcaaggagacggtagacgccgaaatcgccagcatcgaagagatgcaacgggatatccaggcgctcaagggagcgaccaccgaacttcaaagggtggaacagcgtcgtccgagtttgaatgaagccgtcgaagaggcacaccagattgctgaatcctgccaacgagagcatgggaaggcaaaatcgcagattgagcaggacaagataatgctcgacagccaccttgcttgccgcccaggtttcttctcccgcttgttcgcgactgcggcctag

SEQ ID NO: 390981 - DNA, 606 bp, Salmonella enterica
atgtctggtagccacaatgatagtaacattagtgcacactctggaaatgcgcagaacaaagctgaagttgttaaagcatctttagacataggtagtgcgctattggtcgcaataatcgcagctttagggggaatggccggctcatatctcacgggttcaaagttagttgaaagcacaagagtcccagcactcatcaatgccagaacggtttgtactactgctgttaacgaagatgaatacaaatttcgtgaaaaagcctctgattttttggctgcggtagctgcatttgatgctgataaatctcttttatataaagctaatcataatcaactttaccaaccagcgaaatcagccataactaaagcaatgtcgataagttcttattcttctgaacgtctatcagtactggcagtaaatattgcatcatctataaaacaacttgcaatttctgatatggattatgttatttcagatagtggcgcttataaaaaactatcttcctcaatggaggaatggccagaggcatataatgaatatatgaaaaccttcgatgtcaaacgtgcttcttgcaactccgatgctataagctataaatcagaaaaataa

SEQ ID NO: 390982 - DNA, 465 bp, Salmonella enterica
atgaaaatgaggtttgcagtttttgcgctggtcttcagcgtcagtctcagcaccgcggcccgggaacgggccgatattccggcgaacactatctggtcgtttaaggaccctggtggtcgggttttatgggatgtctgtggcggaaaacaaagctcctgcaccattgtgttggcggcaacgaacagggtggacatcgttaatcgtaaatctactaacggctgcgccctgggggatttttacgtggtgggcaaacccgaaaaagtctggaaccagtacgacacggggacctgcagcagcaatgcttacttcagtcaggggaccatgaacaacgggcagtaccggactatcgatatccgtctcaacggggaactggtaaaacgattcccggtggaatattggtcgctggtgaaatccttttcgggtagcaaccggccaaaatggaaggacaaaacgacagacagataa

SEQ ID NO: 390983 - DNA, 474 bp, Salmonella enterica
atgcgtttatctcatgcctccctggcggtcgttatgctggcctcagcctccgttgcacaggccatccccaatatgtggagcagcggcttcgctcagggtgtgaccgaatacatcatcaccagtccggagaaagtggtctttaatcttaactgcactaccagccccgacgagcagaatgtgctgcaacacagcgtatacctgactctgcccgatggtaccttgctgaattctcacgatgacggaaccgacatcaccgtggtgatggatgacagccagtatccgttaccgtcattcctcggctggcgaaacggtgacaatgcctgggtgtcgtttattgacgccctgaaccaggctgcgaattttgatgtttacgtcaacgataaaaaagtcggcaccttcagtccggggctgaagaatacgcaaaaagagctgtctgacctcagtgagtgccggaccacacactacagcgattag

SEQ ID NO: 390984 - DNA, 342 bp, Salmonella enterica
atgaaatctactgactcagagaacgattcatttctccagtgggggctgaatcgtaatgtgacgccttgctttggcgctcgtctggtacaggagggaaaccggctgcactatctggttgatcgggccagcattaccggtgaattcagtaacgcagaatctttgaagttggatgaagtattcccacattttatcagccagatggagtcgatgttgactactggtgaaatgaattctcgccaggcccactgtgtcaccctgttccacaatggcttcacctgcgaagccgatacccttggcagttacggctacgtatacatcgccgtttaccccactcatcgttaa

SEQ ID NO: 390985 - DNA, 228 bp, Salmonella enterica
atgaaatttctacctgcaacaactccgcaggcggcgacgctatgtctgtcgcccgtggcagtctggcaaatgctgcttaaacgtctgctggaacagcactacagtctgatgctaaacgacacatctttcagtgatgagccgttatataggaacatgttgatgctagtactcgtctctgatgcttttcagttagttcacatttctaaagtttgtcggccatcagcatag

SEQ ID NO: 390986 - DNA, 2769 bp, Salmonella enterica
atggacatgacagacagcgtgcacactgaaacgaccgagggaaaaatcatcatcaacttgtttgcgcccaatcttccgggcagcaccaaagaagatgatctcattcagaaatctctgcgtgatcagttggttgagagtatccgaaactcggttacccctcctgatgccgataagtctgctgggctaacacggtttattgatgagtccggtcgtaatgtattttttgtggatggtactcgcggtgcgggtaaaaccacttttatcaatagcgtggtcaaatctctgaacagtgacaaaggtgatgtcaaagtcagcatcaagtgtttgccgaccatcgaccctaccaagttgccacgtcatgaacccattttggtcactgtgactgcccgtctgaataaaatggtgtccgacaagttaaaaggatgctggtcgtcgaatgaccataaaaaacaaaaagaacaatggcagaatcaccttgcgcagctccagcgtggtttacatctactcacagacaaggaatataagccggaatatttcagtgatgctttgaagctggatgcccagcttgattactccattggtggccaggatttgtcagaaatctttgagaagctggttgaacgtgcgtgtgacattctcggctgcaaggccattttgatcacctttgatgatattgatactcagtttgacgcgggttgggatgtacttgaatctattcgtaaattctttaacagcaagaaattggtggtggtggcgacaggtgacttgcgcctatattcccaattgattcgcggtaagcaatacgaaaattacagcaaaactttgctcgatcaggaaaaagagagcgcccgcctagccgaacggggttatatggtggaacaccttgaacagcaatatttgttaaaactgttcccggttcagaagcgtgtgcagttgaaaaccatgctgcaactggtgggagagaaagggcgagaacaacactctgaaaagattaatgttttatacagtaaaggctcagatggcataaaggtcaatacagttaggagtgctttggagaatattgtttcgaatggtttgaacatacgggttggctccgatcttgatatgtatgttgatgagcttttgaagcagccggttagattgttaatgcaggtgatgcaggattattactcccgtttgcaagcatctggtatatctgaaagtgtgctgctgagggattcgttatatggggcaatgcttagcagtatttatagggtgggcttgaattatgagcagcatcggattggtatggattctttgtgtgatgatatatttagatattcgcgccaagatcaggaggttaatacagggttttatcttcgccctcaatcgagtaatgaagctcttagaaattgctctgtatacctagcatcccaggtgagcgctctatgtgatgggggactttcccagcttcttcagttaatgttagttggttgtggtagtgtcagcctttttgatagtgttcaaaaattagttggaaattatggtgatcgttatcaacaacctacggatattgaattcaaatcatatatgtccattgggcggcgtgaaagcgtaacaaattgggctaatagaagctgcgctgttatttctgatgatggaagtcttaatacgtctcctggtgtgtatcttggtatgattcacatgagtaagaaaaaaagagcagcctataaagcgctagatattaatgcagaaagtgggctggcaaaggttgcacttgcagcatctttgagttccgctttaacgccttctccgactgattttctgtccgtttttaatctcattggagcaattgctgatcttgcagatgtagatactggtgtttccgaaataaaggaaattgaagcaacttctgaagatattcctagtattcataaaaaaatagttcttgaaaatgaaagctttagaaaggccgttataaagattattgcaaaacagacttgtgttgctccgttgtggtctaggtatgctgaaaaaggtgctggcgaggaagttgaggagttggatgttgtggatgagaaggatataaacgaatccatagttcttctaatcgaatggaatcgccttgttagacaaatatcttccaagataaaaccgtcatctatgcttataggtaagatctggacgcgactattttttaatctatcaaatattgcggcaaaacataaatctttgctgggtagtgatcccttggcgaatgaaggtaagtatgcacatcagactaatgcggcaaaaattatgcgtttcaatgtgttggcttttctccatgcagttttagtggaggaagatgcatatcatagggttagcgagagttcagtttcatgtatttctgtgaattttaagcagaacccggttacatctgttggtcagttagtgactaaattgcaatcgatggagaatctctcggatataagcaacacgcatccgatcttctactctattttgaagtgtccattagtgcatccatttattttccctttgggtagtattaattcggcagataatttgctctcccaacaggaaaaaagtcttcttactctgttggatggaattattggtgatggatttaaggataaggttcagtttagtgctgtagaatctatagattcttcaaagtctgtattgggatttaagtttctgaatgtttctggtattgctgctgcaccatatgaatcaaagaaaaagagtgacagtgttaattcttcggctaatccagcggcagatgaataa

SEQ ID NO: 390987 - DNA, 2400 bp, Salmonella enterica
gtggaaagatttcttcttaactcgacagtactgttggatcggttgagcaccgtctcgttgaatgagatatcacttgatgacagggtggagtcatccgtattccttactcaatacgaacaaacgcgtagtttgcctgatcatgtagccaaatcggcttggtcatccctggagcagcgactcaaacagcgaaatatgaaacttggtccggtagcggccttgcgcctgatcgctgaaaaatttgttaaaaacgagaaagatggccccagaaccgatcttgctttgttctcggaatggcaaacactgatgagccgagtgtcgtgcctgccaattatggcgtctcatcaggtatttaactctgggcctgccagtcagaaatatagctttcgctggcctttatacccatatcatccgacggttgaggactacattaaccgtgaacgcctacacgaaactcaccaacatctgaatggcagtaccagtgcggaagagtgttggctggatgcgctcaagcacccagaagtgagcgtcagagatttcgagaagggctgggcatctcaagagatgagacaactcagcgaccagattgacccctctctgacgcctgaaatcttcaaggatcgtttgcaaatcgccagtaatattcgcgaaatcctttgtcgggtagctcagggcatggaatttccagagtggatggcgtcattgcagcacccgcagcagttggcgtacggcacaattctacatcagggcaaggagtatgggtttgcgacggtttggccaacggaccacaaatatagtcaggagtctgagttttgctggctaaccggggtattggaaaaatggcggtatggtgcgcccgaaggattggaacgactgctttggatttacttgctgattcagaaccagtatttgacgctgctagtacagcgagacgattttttcggttttgatcagtttcagaaatacaccatgacggagctgagagaagaaaccgagaaatcttatttgtctcgtttcaaacacgcgcatggcgccggtgtgttttctcaggtgcgttatctggaaggacgttttgctccgaagagcgacgccagcaaaatgcaaaaactgctcttcagtgtgttaagaggatattgggaatacctgagtgctcatatgcctcttgagtgggtgcatgataagccgctgactatgtcgcaagtactcgataatctcgaacaggttgaatctcatggcaagtgtgcagagctggcattagtgccgcactttatcaaaagaaagtcaaaacagggtgaggtttatccttacgcatttctattcaaggatctgaagaatcaggcagcaatcttgatggacatgctgaaatatgagccgcgcttaacacgctggattcgaggagtggatgcggctgctaatgagatgcacgcaccaccagagttgtttggacctttgttcagggtgctagccaaatcaggtattgctcattttacctatcatgttggcgaagactttccgcatctgataagtggtattcgatcaattgacgatgccttgaggtttttgccgttgcggaatggcgaccgtcttggtcactgcacggcgattggtattacacctggcatctggaaacgctctttgccattgtctttgtccatgaccaaagaaacgcgattgctcgatttggtgtttatctggcgagaacttcgaagtcatccggaactgctgcgttacgccagtgatgcagctattgaagcggttcatttggcccatgagatattttcgctggaagaagaaatctcgattacgacccttgatcaggtgcttgagttgcggagtgtgttggctgaatcggaaggtctactgggggaactgtatgggccattaaaacccaaatccctatggttggaagagtacgagcgcgccagagagttggctaaaaaggcgggtatgaaaaggccgctaaagttgtataagcaatggcttacatctgacaatgtgcaaaagcaacgtgctgaatatgttgaagttgccctggaatatttgccggatgaagcggttgttgcattacaacaagctgtaatggcaaaaatggcagaccgaaacattgcgatagaatgccctccgaccagcaatacccgtatcagtcagtatcgagatgtcagcgagcatcatatctttcgctggatgggcttacggggtgaggcgattgaaggtgatgttcctatgtctatttgtcttggatctgatgatccagggatcttcgccgcggatttgaaatccgaattctatcatctgttcgttgtgttgacccgaaagttcaatttgtcgccagcggaggctttaagaaaggtggctgaggtgaacgagaatgggcggatttatcgctttcatgatgtcagctag

SEQ ID NO: 390988 - DNA, 147 bp, Salmonella enterica
atggagaaatcatttgcgccaatagcaatcgcttttatcggtataactacattatttagcacccttgcttatccaacccacgcattaaaaacgacgcaaaaaaatcatagcatttattacattaccggtcagccgatattaccctaa

SEQ ID NO: 390989 - DNA, 270 bp, Salmonella enterica
atgatcagtgcaggaatcaggaaaaatagcccgaccgggaatattcatccggatggattgacaaagacatttgtaaaagcaagaaaagcctccggtgttaacttcagcaataatccaccgacatttcacgagatccgaagtctggccgggcggctgtacaaaaacgagcacggcgaggtgttcgcccaaaaactcctgggccacacatcagcgaacaccacgaaactctatctcgatgagcgtgatgataaagcttatatgatgctctaa

SEQ ID NO: 390990 - DNA, 327 bp, Salmonella enterica
atggaatggtatttagaaaatgcccgttttcggatgatggtcagggacatcggcgcggagctgacgctgctttgggacaaacatcgccagcgcaactggatatggcaaccccagcctggggtgtggaataactcggcgacgcagctctttccggtggtagggcaattgattcacggcggattatggcaggatgagcgctttttccctctttccgcgcacggttttctacgccagcaaacgtttcgttgcctggcacatgatgctacacacctgcggcttgaggttagcgataacaatgacacgcgagaggtatggcctttcaaatag

SEQ ID NO: 390991 - DNA, 1674 bp, Salmonella enterica
atgtctggtaatacaacacgaacgattctccgcaatctgaagttagaacatgattctgcttggcagcaaattcatatgaaatataataaatttgctcctaccattgatactcctttaattattaccgacccctatcggtgcaatatgctttcagctttactttgttttagaacagagagtccagcgcaaattagtattacgataggtattggtgatacacaaacagatatcgcttttgatttttctaagcaaggtcaatggcatctggatcattttatacctattgcaggtctttatcctgatagcgctaataaggttgatgttacagtaagttatgaagatggcaccgttgaaactaaaaattacactattcaaacacaagctttacctgacgtccctgtattaatgccagtgttaggcaaaatagaaaatttcgaatatacagaaaaatttgatcttatggcagaaggacttacgtttatggccccgcagtccgcctatatttttggtgtagacagtaaacgtaacgtacgctggattttacagggggactatgttaattctgaatggtcggatattgagcgtctagcaaacggtaattttcttatcagtttcggtttttatgaacttcgtgaagtagatatactgggacgatgcctgaagcaaactattttaacttcccgtatgcatcatgattggttcgaactcgataacggtcaattactgattactaccgaggatgattctcatcctgataactttgtcatggatgtgtcggaagttatcaattatcccgaatcttcagatactgtttatcagttaagaatgcgtgaagtgctggatactacacgcgtggctattcctaatgtgaatgcacaaagtgataatgacgataaagattggtttcataataaccgttctgtttatgacgtaagaaaccagagctttattgtttcagggcgtcatcaggatgctataatttcttttatgcagacagccgcagaactcgatcatacattagagttagatgatattaactggattatgggtcctcatgataattgggtcgaggcttaccagagtaaattgctaacacctattgatgagaatggaaacattattgatgatactactgctaatctggagttttggaactgggggcagcattctgtttcaatccccgccgatcagccggaagatgataaccttgcagattatatcatttttaataatggtaactatcgcagttatgatcagacactggctgttccggcttcctcaaattattcacagtgctcacgttatcgcattaatcgtagcactatgacgattcagaaagtttggacgtttggacaagaactcggaagcggacactatggttcattcgttggtagcgtgcgcgatcatgatactacctatatcgtcaatgcggggggaatttgcctgaatggtgaaggcatcaacgtgggtacacattatggcgatcctgataatgagcttatccttaatgatatttatcctcacgcttgtgtttatgaagttctgaaagaaacaaaagagattatttggggaatggaattttcttgggagttaactccttattttgtttacttcaattttaaagcaacccgtgccccaatgtatcctgaaaacataaatatttattctgcttaa

SEQ ID NO: 390992 - DNA, 228 bp, Salmonella enterica
atggccgtcagcgcggaaacgcacggtgatttctgggaagatgatatggattactcggaagccgtgagttatgaaggcattaataccaaagctggggtacaggcaaaaacagatgaaaagacgtgtgagaactgcccgccggaagggaaagtgatgccgatggtgagacgctgttcgcgctggagcatggtcacaatcagtagcaacatggccatccgctcagcataa

SEQ ID NO: 390993 - DNA, 324 bp, Salmonella enterica
atgaaaaaaagaaatttcagcgcggaattcaaacgtgaatccgctcaactggttgttgaccagaactacacggtggcagatgccgccaaagctatggatgccggcctttccacaatgacaagatgggtcaaacaactgcgtgatgagcggcagggaaaaacgcctgaagcctctcccattactccggaacaaatcgaaattcgtgagctgaggaaaaagctacaacgcattgaaatggagaatgaaatattaaaaaactgtccatgggggaaaccccgtcctgagtctcagaaactccccggaaaagctggcaggctaatttag

SEQ ID NO: 390994 - DNA, 183 bp, Salmonella enterica
atggtttttatgtgttttatggttttaagttttttaattaatttaatcaccattcagaaggtgggttttagttgtttaattgatttaatgtggggaatctgtaacgatcggtttttatatacctcaagttacttaaaacatttttattacatttgcggtaagtatgcagcgaaatgcccgtaa

SEQ ID NO: 390995 - DNA, 153 bp, Salmonella enterica
atgttgctcaccgcaacgctgctcggcctgattgccgcactgggcattcttgacgggcgcttactcggcgtgtcgatgattgaccgtccgctggtgatgtgcgccctcaccggtctggtctggtctgcggcaatttacatgaaggcattctga

SEQ ID NO: 390996 - DNA, 2730 bp, Salmonella enterica
atgaataaagagtccatatttcgtcagttggagctacggctggccggatgttcactaacagccgacgcgttaagcgggtttagcgcaatggcgattgccgacagtctcaggcaaaaacgcagcattattagtcaccatcttaataacttgcatcgtgagcagcgggtggtcaaagtgaatagccgcccggtgctgttcctgcccgtcgaggcgctacgtcgttaccaccgactggcggttcgacagggggattacgcgtccattcaggcgctgtgcgcggagcggcaggacagtctggagctgctcattggcgcgcagggcagcttgcaggagtccctgcgtcagtgtaaggcggcgatcagttatcccggcgcgggcttgcctttgctgctgcgcggcccgacggggacaggaaaaagttttttggcgcgtcagctttggcagtacgccatcgagcagggcattttgcccccggaggcgccctttaccgtgtttaactgcgccgaatacgctaataacccggaattgctgacgtcaaaattgtttggtcatgccaaaggtgcgtttaccggcgcagacagagcggtatccgggttaattgagaccagtaatggcggcgtattgtttatcgatgaagtgcaccgtttaccgccggaagggcaggaaaaactgttccattttatggataacggcacctggcgtcgcttaggcgaaagcagcgatgaacgcagcgccacggtacgcctgatattcgcctctaccgaagatctggaaaaacactttctggcgacatttattcgccggataccggtcattgtcaaaattctgcctatcgccgaacgcggacagtatgagcggctggcgtttattcaccattttttccgtcgcgaggcgcagcgtcttcatcacgatttgtcgctggatagtgaaattatcagccaactgatgcaggagaccctggaagggaatgtcggcggcctggaaaatctcattcgtaatatttgcgccagcgcctggactttcggccagcgtgacgatggggtactggaggtaaaagccgggcaactgccggatcgtctgctgatggaggtgccctttaccgttccgcagacggcggaacgcgtcatgatttatcgcgaaggtggcggttttccgcgagtttccggtcagcatcaggaatatttacggttgacggaaaacatttgcggcctgtgcgaagagctggcgcaggagaatatttccgcacggacgtttgacaagctggtctatcaaaatctcacgttatatctcgatgccttaatgaataaagagagccctcgcgctcgtcaggacaagcggctgcgttttatcgaagatgtcgggaaagcgatcgctgcacattacgatctcgaactgaatgcggaattcgcttatctcaccggacgttaccttaccagcctgccgttaacgccggtggaggcgtcgccatcggttcgccatgtgatgctgcgctggctggaggaggcgccgggactggcgcagcgtgtggcgcaaaaactgctggacgtggtaaataataaatatgatttgttaatcgacacgctcgacagactggtcgtggcggccatcgtcagtaatgccattgacgccaccagcggcggtaaggtaaaagcgctgatcatcgcgcatggttattcgaccgccagcagcattgcaggcgtggcgaaccgtctgattggcgaaaagatttatcatgcgatggatatgccgatggaggtcgcgtttagcgatgtcagccgggccattgtcgattatctccagcatacggatacccgcgcaggcgtcatggtgctgatcgatatgggatacaccaaagagatcgccgatgcgcttttgagcgtaattcatggcccgctggtggtggtcgataacgttacgacgcgtctggcgttgaacgtggccagcgagatcgcgctgcaaaaaaacatcgaacagatcgccgaagagatcgtcccgttaaatcagtcgcgctgggatgtcttctggcccgcgcagaaaaaagcgcgcgcgctgctggtgacctgtattaccggcatcgggacggcgtttaaatttaaaaatttgatggaaaaaagtcagttgaccgactttgatattaatattatcgcctgtgaatatacccgcctgaaaaacagccgaatggcgacctcgttgctgaatcagtatgaagtgattgcggttgtcggcaccattgacccgcagctggcgggcgttccctgggtggggattgaagagctgcttggcgagcaggggtatgcgcatttaagtcagttattaagcggttatcttaacgataaacaaattgcgttaattaataaaaatatggttcgcgaattttcgttgcataatgtggttaattcgctgactattcttaatgccaataagacgatagggcatatcgaaacgattattgccgaatggcaaaatacgctgggcttcagctttaataataatttgattattagtttatatgttcatttgagctgtatgattgagcgactggtcatgcgcaatgaaattacccactataaaaacatgacggaatttaacgagcgacatggtgaatttatcgcgatggtaaatcattcgtttcagcggttgaaaattctttataacgtggcgctgccggtagcggaaattggctatatccacgatattttcgaattacggatagaggatttccgctggtag

SEQ ID NO: 390997 - DNA, 771 bp, Salmonella enterica
atgcagatacaaaaggcagaacgtcgtttaatttttaaaactatcaaaaaaattaatgacttcactgctgatgatatgcgacatggagatatgaccaaaaagcagatactcgctcaggggaaaatgaataaaattgatatttggggacgggagttaaagattaattttttcaattttgacaatacggttgatgagcattttggtaatatggctagcatggcaaagtggactgcctggaagggggaatatcccccacttattcaaattatgatcgagagattcaaaaataatgagggtggggttttaagacacgatttactgaataaagcatttctagagctttcaacgacaattgagtgtgtaaggagaatcaaagaatttttatctaatttgttatataataatgggtttcgttcattatcaatagatgatttacaacagttggctttgaagataagagacccaaaggatggagttaaactgccaaaattcgatgactatgactggtttaacgggttggggattactatccacgatacttacgccacgaaaatctatcttgattatattgatataaaagataatagctttgaagctagtttaagttttagaattcaagaccattttggtctggatattgcagatttaaatggtaaatggtttgaatattcgcaatggttttgttcttggtttattttgcagaggtataaggtttatgattacaaaccatttataaatgaagctaatttcagttgcgtaataacgggatga

SEQ ID NO: 390998 - DNA, 222 bp, Salmonella enterica
atggctaagggtgaaaaattttcagctcattctaattatggtacgggttatgaaggaaattatatagaggctcacattcctggtgacgtatatttatttagagacataaaatacgctcatttatatatgaaagaaagctcttattcgaaaaatcaactggatgattatgcaaaacaaataaaccaaacgcttaatgaaaattgcataatactatatcaataa

SEQ ID NO: 390999 - DNA, 210 bp, Salmonella enterica
atggacagcgcgaatcaactggcgggcgcgaaaagaaaatataccaaacgtctgaacaaaattgccaagacgctgggcaacaacattgacggtacgccggataattataaagtctatatgaccagcaatatcaatgtatgggcgatagcgaaggcctcagccgaccgcgcgcagcatatgcgcaacagaattgccggagataaaaagtaa

SEQ ID NO: 391000 - DNA, 258 bp, Salmonella enterica
gtggatcgcgctttcgtgaatgaactcagcgaggcaggcgacggcgcgaccattgttgcggctattgtcgcacaagcaaaagcgttaaatctgcaaattgtggcgaaaggcgtagaaaatgaaacgcagcaacaatttctgactcaattggggtgccataagcttcagaggttttttgtatggcaaaccgcgcactgcagcgaaaatttctcgcgatattcacgatcccaccaatacatttgccaaatcaatatatga

SEQ ID NO: 391001 - DNA, 1080 bp, Salmonella enterica
  misc_feature (1013)..(1022): n is a, c, g, or t
atgacactaagacgtttacctttatacccgaaccatgcagggttttactggagcaaaccagaatacataaacggcaaaggatggaatgtttctgttgcagttaccgatcagcatggcgtattttttggagtgactgttgacctacatgatctcattaccaataaccatccacaattagatgatagtattcatgtgtggctagatcagaacaatcacttattaccgttttcatacgcatctcaaaaaatacgtacacggttagaaaatgtaacgttgcatgatggatggcaacaaattccaggttttctgatattacgcacgaccctgcatggccccggttggagtcaggttattttgtacccatacggtaatctatctagtcgcatcttaaaaactatcattcaacaaatcccctttacgttaacagcgttggtgttgataacgtcaactttttgttggttactccatagcttactggccaaaccgttatggcattttgtcgatgccattaataaaaccgcaactgaaccgctgagcacacgtttgccagaagaacgacaagatgaattaggtagtattgcctacgcttttaaccaactgcttaacaccctacaagtacaatacgacaatctggaaagtaaagttgcagaacgtacccacgcgctaaatgaggcaaaaaagcgagccgagcaagctaacaaacgtaaaagcattcatcttacggtaataagtcatgagttacgtaccccgatgaatggcgtactcggtgcgattgaattattacaaactactcctttaaatataaaacagcaaggattagcagatacagccaggtattgtacattgtctttactaactcttattaataatctgctggatttttcacgcatcgaatctggtcatttcacattgcatatggaagaaacggcgttacttccgttactggaccagaccatgcaaaccatccagggaccagcgcaaagcaaaaagttgtcattacgtacttttgtcgnnnnnnnnnnaacatgttcccctttatttccacaccgacgctatccgtttacgtcaaattttggttaa

SEQ ID NO: 391002 - DNA, 954 bp, Salmonella enterica; identical to SEQ ID NO: 380074

SEQ ID NO: 391003 - DNA, 1089 bp, Salmonella enterica
atgtcgcatctgatgctttcccgtcacgggatctggtactaccgtagggtctacctgacacctcggaaacgccgtgaaattcgtatttctcttcgcacacgttccaagcgtgaagatttgctccgtgtggagaaatatctcacctcacaacctttccactgcgttccgcagtccatcccggcacacactgcaaccccgtctgcttccttccaacaaccacaacagaaaaagcctttcaagagcctgaagagcgagcttgataagtacactagggctaaaacaggagaggttggtgaacgggaaatactgacgatcaataggtgcgtaaatgcatatctgaattctacaaaagagcctttcagcaaacgaagcgcggcggcgtttgttgatggccttgaaggttcagcatccaccagaaaccgttacatcaaaaagaactcggcgtttttcaaatggcttgcaactcgcacggatgatgagattcgaaacccatttgaggggatgggtgttaaggaaataaccgcaccaatggatcgccgtccagcatacacgctcaacgatctgaaacgattgcacattgctttacatggcgtgaaggattggaaacggtggatcattctgattggtcgctattcggggatgaggcagaatgagatctgccagctttaccacaatgacgtgatgaaagttgacggagtttggtgcttccgtgttgataacttgaatccgaatcagacgcttaaaacggacagttcgcgccgattcgttccgatcaattcgcaactgctgacacttggtctacttgattttatcaaagaaagaaaaggacatctgttccctgagctaacattgcatcttgggagctatggtcactatttcagccgttggtttacgaggttcagaggcaagcatagcctgcctgaatatcattcactgcgccactatgccgccacaacatttaaacagaatggcttccctgaacagttcgcttcgcaggtgctcggacactcgaacgcaacgatcacgtacaaccgatacgggaaggggattgctgttaggacgctcgtcgagttaattgaggtactctaa

SEQ ID NO: 391004 - DNA, 1287 bp, Salmonella enterica
atgaagatagcgatgataaaaaccacactggcttcactggcgctgctgcctgggctaacgatagccgcgccggcggttgccgataaagctgataatgcttttatgatgatttgcgccgcgctggtgttgtttatgacgataccgggtatcgcgctgttttatggcggattaatccgcgctaaaaacgtgctgtcgattttaacgcaagtgaccgtcacctttgcgctggtctgtattttatgggtggtatacggctattcgctggcttttggcgaagggaatcatttcttcggcaatatcgacggggcgatgttgaagaacattgcgctgacggcggtaatgggcacgatttatcagtatattcatgtcgcgtttcagggaactttcgcctgtattactgtcgggctgattgtcggcgcgctggcggagcgtattcgtttttcggcagtactgatttttgtcgtggtgtggttcacgctctcttatattccaatttcgcacatggtgtggggtggcggcctgctggctgctcacggcgcgctggattttgccggtggtacggtggtgcatattaacgccgctatcgccgggctggtgggggcttatttaattggcaaacgcgtcggctttgggaaagaagcatttaaaccccataacctgccgatggtctttaccggtactgcgattctgtatatcggctggtttggatttaacgcaggttctgcgggtagcgcaaacgagatagccgcgctggcctttgtgaacaccgtggtggcgaccgccgccgcgattctggggtggattatcggcgagtggacgctacgcggtaagccttccctgctgggggcgtgttccggcgcgattgccggtctggtcggcgtgacgccagcctgtggctatgttggcgttggcggcgcgctggttatcggcgttattgcgggtctggcgggattgtggggagtcaccatgcttaaacgtctgttacgggtagatgatccgtgcgacgtatttggcgttcacggcgtttgcgggatagtcggctgtatcctgactggcatttttgccgccagttcgctgggcggtgttggctttgccgacggcgtcacgatggggcatcaggttatgatacaactggaaagtattgctattacggtagtctggtctggcgttgtcgcgtttgttggctacaaactggcggatatccttgttggactacgtgtgccggaagagcaggagcgggaggggctggatgtgaacagccacggtgagaacgcgtataacgcgtga

SEQ ID NO: 391005 - DNA, 207 bp, Salmonella enterica
atggaacacttcttcagaagcctgaaaaatgcgtgggtaccggtgacgggttacataagcttcagcgatgcggcccatgcaataacggactatatcgtcgggtattacagtgtactcaggccgcatgaatataacggtgggttacccccaaacgaatcggaaaaccgatactggaaaaactctaaagtggtggccagtttaagttga

SEQ ID NO: 391006 - DNA, 471 bp, Salmonella enterica
atgggacgctggcttgctggcaggcccatgaaagagccggggctggtcagctgtcagcagccgactcaccggtataaacgtggtggtcgtgaacatgtcgctatccctgactaccctgagcggcagttcgcagtgacagagccaaatcaggtatggtgcggcaacgtgacgtatatctggacaggtaaacgctgggcatacctcgctgttgttctcgacctgttcgccaggaaaccggtgggccgggccatgtcgttctcgccggacagcaggctccccatgaaagcgctggaaatggcatgggaaccccgtggtaagcccggcggtgtgatgttccacagcgtccagggtagccactatacgagcaggcagttccggcagttactgtggcgataccggatcagacaaagtatgagtcggcgcgaaactgccgggataatagcccaatggaacacttcttcagaagcctga

SEQ ID NO: 391007 - DNA, 1026 bp, Salmonella enterica
atgcttatttataatgcagttttctttttattgctgctatgcgctttattggatttaaatgacaaaagaaccttttttttatttttattgccgttagtagttttgcttatattaacgggatttcgtggaaatggtggtgatgatttttttgtttatgaacagtactttagttcaataccaatagcactatataattacggtagcggttatttctatcttaacgtgcttgttaagcattttggcgattatgagttttttatttttatatcttcactgttatgtctttctctgcagtcattttttatttattttgaaacaaaaagtccatgtattgtcttgctattattttattcaaccagttttttatggctagattttattcttattagacaatcaattgccgtgggattttttgtaattgcactcagtttgtatgcgaataatagaattaaaacagcttttttattttgtgttgctgccgggttgttccatgagacagcattttttgctgcaactttaatttatgttttaagcaaattagggaggaaaaatatttttatttttatttttatcttatttatactatcaccttttctttcaaaaggtttagttgctataaacgacattaccataaaaaataaaaacatagagttgtatattggagaacatgctttaccaagtatggctaatattattgagcttctcatagctatgttgtcttttataataatgaaaagagttaaaggatttaggaatgataaagaatccaaactttatgaagttataattatatcatcctgttgtatattattattatcttatacagtacctactttggctcgttttcttgagtattatcgattgttctatgttctattactaactcgcatgttaatgcattttgatttaagaggtcgatatttgatatttattgttgttgcagtatattgcttcgtccgcataaatagttttatatatcagttcgattctggatttgactatatttttaatggggatttcctatga

SEQ ID NO: 391008 - DNA, 198 bp, Salmonella enterica
atggcgaactgggcgcagaaattgaaattacatcacctgcaaacgctggttgcgctgggcgaacagggcaacctgacgcacgtcgcccggatgattaatatctcccagccggcgttatcaaagtggttatctcaactcgaagatgatataggcatcacactttttgagcgccacagcaaagggttgcgcccctcgtaa

SEQ ID NO: 391009 - DNA, 210 bp, Salmonella enterica
atgttctcttttcccgttacgattggcagccaggtcgtgattaatcccggcgtaacgattggtgataattcggtaattggtgccggtagcgtcgtaacaaaagatattccgccagatgtggtcgccgctggggttccctgtcgtgtactacgtaaaattacgcagcgggataaggaatattattatcgtgatttaaaaatcggaccctga

SEQ ID NO: 391010 - DNA, 192 bp, Salmonella enterica
atggtctgttcgttaaccggttcccacttagaacaaggtgtcgccgttaatctggcggccagtcgccgctttgttacctggctatggcaacaacctgaattccagcaaagcgcccactattccgccaaacgcgtcacgcaaattctgtattttctgacggaaaaatataactcacaatggaatcacatttaa

SEQ ID NO: 391011 - DNA, 183 bp, Salmonella enterica
atgagtcatttctcgcaaacacttataaatattatctattacaactattgtaaagtatattgtaaattttaccctaaattaggcttcaaagtttacattaccactataactaaatctcacagttttaatttcgtgaattcccaattttttctaagatccagttttcaatttcactttcaataa

SEQ ID NO: 391012 - DNA, 198 bp, Salmonella enterica
atgaatcagcagaatactcgccttattcgtttaccagaagttatcgacagaactggatatggtaaggcttggatttatcatcttatcaatcaaaacctatttccagccccgattaaaattggtgctcgtgcagttgcttttattgaaagtgaaattgaaaactggatcttagaaaaaattgggaattcacgaaattaa

SEQ ID NO: 391013 - DNA, 858 bp, Salmonella enterica
gtgaaaaactggacaactgaacataccaaagaaatcaagaaatggttagatatcgacacatatcgtaagttcgaagatctcacccttctacagttataccacgagctgtgggccagaacactgttcttcaaaagctacagggaggattttgaggcaaaagccctaatgggatacttcgaaaaaattttcagcggaaatccattcttgattgaggaaaagcaacttggctatatggcaccggacaaccgattgtttcaaccgcctcatttctttctaactacacttgaacgacttgctgaactgagcatcatctcaatgcaacggggcacttttgtgtggcatggcgatgataagtattcaatcaacggtgagctacaggaagaaactctctacgaaagtttacccgaccaattccaaagaacagtcatgttagaagttgatctctcaagtggtacagacgacgaaattgcggaatcactcaaagcggctttacctcagtggcgtaaatatatggaaataaaggaaaatccgctggattccgttcgctttggatatggaaccattaagaagcttatcaactatcgaatcatacctatgctcgacattttagtgtggacaaagattaaacagattcgtatatcggatgatcgcctgtccaggctgctttataccgatgatgatgatgaaagtcagatcagacttcactatcatgtcaaagataccgacagaccacttgccctcaaagcaacctcactagacttcatcaggcagttttattacttcataaacaagaatagtcatttaaaaaacatgagagtttcagacaccatgaaactctctgattctgaaaagagttaa

SEQ ID NO: 391014 - DNA, 1053 bp, Salmonella enterica
atgcaggacggcaacccattgctctccgttgatgtggacgtgcgcaccgtcgccactgtcattgccgactggacgggcgtgccactgtcttccctgatgaaagatgaacagaccgaactgctgaccctggaaaatgaaatcggtaaacgtgtggtcgggcaggatgcctcccttaacgctatcgctcagcgtctgcgtgcggcgaaaaccgggcttacgtccgagaacggtccgcagggcgtgttcctgctggttggtccgagtggcgtcggtaagactgaaactgcgcttgcactggcagacgtgatgtacggcggtgaaaaatcactgattaccatcaacctgtccgagtatcaggagccgcacaccgtttctcagctcaagggctcaccgccgggttacgtcggttacggccagggcggtattctcaccgaagcggtgcgcaagcgcccgtacagtgtggtgctgctcgatgaggtggaaaaagcgcaccgtgacgtcatgaacctgttctatcaggtgttcgaccgcggctttatgcgcgacggcgaaggacgtgaaatcgacttccgtaacaccgttattctgatgacctcgaacctcggcagcgaccacctgatgcagttgctcgctgagcagccggaagccactgaagccgacctgcacgaactgctgcgcccgattttacgcgaccacttccagccggcgctgctggcccgtttccagaccgtgatttatcgtccgttagcagagaccgccatgcgcaccatcgtggaaatgaagctcgctcaggtgagtaagcgtctgcaccgtcactacggcctgaccaccaaaattgacgaaagcctgtatgacgcgctgactgccgcctgcctgctgccggataccggtgcgcgtaacgttgacagcctgctcaatcagcagattctaccggtgctgagtcagcagcttttaacgtacatggtggcgaaacagaaaccgactttactgacgctggggtggagtgatgaagaagggattgggcttgaattttcaggtgcggctgaacgttaa

SEQ ID NO: 391015 - DNA, 354 bp, Salmonella enterica
atgcccttttggcgattacgcgcggatgaagtcgatgtgagtcagcttcggcttgaaagcgtgacgctgcacagcctgagctttaacttttacttccttaccgtcaacaacgagggtcagaacttcgctatagaattcagctttagcttgcatgttcataaccttgtcgtggtccagttcgatagcaatcggggcttcagatccgccgtagatgattgccgggaacttgttagcggcgcgcaggcggcggctcgcacccttaccctgctctttacgtacttctgcgttgatagtaaacatttaaatctctctttaataattcctgctacaggcgacccagcaacaggtaagtga

SEQ ID NO: 391016 - DNA, 597 bp, Salmonella enterica
atgtctgcaggaaacatcttttggggaacaccaaaccccactaaggttaaaaataatttcggagtcagcaattttgattctgatacagagagtcaggatggtttatatcagcaaaacccttttgccaaaggttatgatgtattgcttactctccttatggtcattcaggctatcgcaaacgctaaatttttggacgttcagaagaacgctgaaagtgccagagatacccaggaaaagtcaaatgaaatggataaggttattgctgaagccgccaaaggggatcctaaaaccaaagagacggtgcctaaggatgtaattgactacatgcgcatgaatggtattactgtcgaaggtatgaccattgatcagtatatggctaaatacggcgatcatgggaaactggataaaggtggtctacaggaggtaaaagcggccctggataatgacgccaaccggaaaaccgatttgatgagtcagggacagttattaattcaaaaagcggctcagacgcttaacgctgtccttagccaactgacggggcttatcagtaagtggggagaaatttccaccatgattgcgcagaaaacgtattcatga

SEQ ID NO: 391017 - DNA, 267 bp, Salmonella enterica
atgaacgattctgagctgacgcaatttgtaacgcaacttttatggatcgttctttttacttctatgccggtggtgttagttgcatcggtagttggtgtcatcgtaagccttgttcaggccctgacccaaatacaggatcaaactctacaattcatgattaaattattggcaattgcaacaactttaatggttagctacccatggcttagcggcattcttttgaattatactcgtcaaataatgcttcgaattggagaacatggttga

SEQ ID NO: 391018 - DNA, 1227 bp, Salmonella enterica
atgacctcactcacggtcaggacggttcaggctctcatcaaagcaagtcagccaggaaagtatggtgatgggcgtggtttgtatctgaaagtcccacaaaaaggtgaggcgtattggatgcttcgatacacaatcggctctaagagacgagaactcacacttggcaaggtatcccatctatctctgtctgaggtacgtagcctcgctgaggatactcgaaggaaagttgccaccggagatgatcctattgctgaacggaaacttaaccgacctaagcaaatcacaacggtagatggattgtttgaagactggcacaaagacctggttaggcggttgaagcatccacaaatcccagaaagggtatacaagaaggatattgcccctactattggtcaactttctttgacgaagataacccccattgatatccggtcaattctgcaaaaaattacagatagcggaaggccaaccatttcaaacgatgccctactctacatgaagcaactctttgaccacggcattaagcttgggctgcttcagagcaacccagcaatggcgttcaaggtcaatgatgcaggtggaatcgaaaaaagcagagaaagagcattaagtctggaagaaattggtcaggtgtttaaagttttcagagaacactctgacagcttctctcgtgataactaccttgcctgtgccctgctactactccttgcagttcgcaaaagtgaactaaccgaggctccttgggcagaattcgatttggatgagaaaaaatggtctttacccaaggaaagaagtaagtctggtgtaggaatcgtcatcccgctttccccgctcgctattaagattcttgaagagctaaaggtcagagcttttggttctgattatgtattccctaaccgcagggtgagtacgtcgaggcatatgggaaaagataccctcaacagggcgatagccaagctattcggggtagaacctggtaagaagaagcaaccacctaatgtaatgggaaatattgaatatttcacagtccatgacttacgaaggacttgtagaagtttacttgcatcactgtctgttccccctcatgttgcagaaagatgtctgaaccataaattaaaaggcgttgaaggaatctatgaccgatatgattattttgaagagcgaaaagaatctcaactaaagctggctgaattacttaacaataataacacatttaaaataatttaa

SEQ ID NO: 391019 - DNA, 459 bp, Salmonella enterica
atggaatcggcaagtaatactagcgtaatcctcgacgcatcagccccggcgcgtcgggcagggatgacagaaagcgaatggcgcgaagccatcaaatttgacagtaccgacaccggttgggtcattatgagtatcgggatggcgatcggcgcaggaattgttttccttcctgtccaggtcggtctgatgggactttgggtctttttactctcttctattattggttatccggccatgtatctgttccagcggttgtttattaatacgctggcggaatccccggaatgtaaagactaccccagcgtaattagcggctatctgggcaaaaactggggtattttattaggcgcgctctacttcgtgatgctggttatctggatgttcgtttattccacggcgattactaacgacagcttatctgcacactttcggcgtaacagaaggattactctccgatag

SEQ ID NO: 391020 - DNA, 9489 bp, Salmonella enterica
atggtggaggataaagccgggaacgtcagccattccgccccgctgacggtgacggtggacacgcagacagccattaacagtattgagctggttaacgacaccggcattccggacgacaacctgaccaatgcggtgcgtccgcacttccgggtgacggtgccggatgatgtgaacgcggtacgcctgagcatcgacggcggcaagacgtgggtggatgcgaagagaacttccgccggcgtctgggactacagctggctgacggatgtgaccgaaggggcgcacacgctgacggtggaggccaccgatgtggcgggcaacacggtaaaagaggcgatgagtttcaccatcgacaccacgctgtcggtaccgctcattgcgctggacagcgcggatgacagcggcgtcaggggggatgaactgacccgggtgaacaggccgacgttcttactggacaacattgataacgatgcgcgttatgtcacggtggaagttcagcatggcagcaccagggaggtgctgaaggcgacgcagggtgcgaacggacgctggagtttcaccccggcgggcgactgggcggacggtcagtacacgctgacggtaaaagtggaagacgaggcggggaacattcgccagtctgcgccgctgacggtgactgttgatactcagacagccattgatggtatcgagctggtgaacgaccacggtatttccggcgataacctgaccagcgccctgcgtccggagttccgggtgacgacaccgggggatgtgaatgcggttcgtctgagtctggacggtgatacgaactgggtgaacgcgacgaagaatgccgccggggtctgggaatacagctggccgggcgacgtgggcgagggtaaacacacgctgacggtggaggcgacggatgcggcgggcaacacggcgacgcggacgctggagtttaccgttgacaccaccctgtcggtgccggtcatcacgctggacagcgcggatgacagcggcaacaggggtgataacgtcaccagcgtcaggtcgccgggctttaccatcgaaaatatcgatcctgatgcgaaccgggtgacggtacagatcgcgcatgacggcagcagccgggaggtggagctgacccagaccggtggccggtggcactttacgccggacagtgagtggacggacgggagctacacgctgacggtgaaagtggaggacaatgcgggaaatatccgttattccacgccgctggacgtgaaggtggacacgcatacggcgattgctcgtattgagctggtaaatgacaacggtgtaccggatgacaacctgaccaacgagatgcgcccgcagttccgggtgacggtgccggaggatgtgaccgtggtacgcctgagtctggacggcagtggcagctgggtgaatgcgacggcgggagcaacgaaaggggaatggaactacagctggccgtcagatgtgggcgagggtaagcacacgctgacggtggaagtgaccgatgcggcgggcaacacggcgacgaagaccctggacttcagcattgacacgaagctgtcggagccggtcatcacgctgaacagcgcggatgacacgggcgtgccgggagacggtctgaccagccgcgcgcagccgtcgttcacgctgcaggatatcgatgccgatgtggtgagagtgacagtgagcgtggagcacggaggaaggaccgagacgtttgacgtgttacagggtgcgggcggatggagcttcacaccgacggcggcatgggcggatggcagttacacgctgaaggtgacggtggaggacgaggcgggcaatatccgccattcagcgccgctggacgtgaaggtggacacacagacggtgattgaccgtattgagctggtgaatgacagcggcgagccggcagataacctgaccaacgatgtgcgaccggagttccgggtgacggtgccggaggatgtgaacagggtgcgggtgagcctggacgggggtaagacgtggatggatgcgacgaaggcatcggcaggcgtctggagttatacctggtcgtccgatgtgaccgaaggcgcgcacgtgctgacggtggaggcgaccgatattgcgggcaatacggcgacgcggacgctggatttcaccattgacaccacgctgtcaacgccaaccattgaattagcgccagatcaggataccgggcaaagtaagaatgataatctgaccagtttaactcagccggtttttgttttgggccatatcgataatgatgtccaaagagttgaattacagattgagcataacggtacatttaaaaacattattttaaccgaatcggctgatggatggcgttatcgacctgacgcggcattaaacgatggtagttataaattgaccgtgacggtaactgatacggcgggtaacaaaacgacatccgctcctttaacggtaacgatagatagtacgttgagtaccccggtaattgcgttggctaatggcgaagacagcggcgtggttggcgatcagcttactaaccacgatcatccggtatttgacttgagtcatattgattctgatgccttgcacgttatggtcagggttactcataacggtagctctcatgaggaagcggcggtatttaacaatggtaaatggcgtttcagtccttctgtgagttgggcggatggcttatatcaattagctgttgttgtagaagatcgggcggggaatgtaaaagaatctgcgccattagatgtccgtattgatactacgaccactatcaacaatatcgtgttgcttaatgacactggcgttctcggtgatcaattaacgaataacgctaaaccatcattcagagttgaggttcctgcggatgttgcccagatgcgcgctactcttgatggcggcacaacctggattccgatacggcgaaatgcggatggacagtggatttttgcaagcacaaataatctgactgatgggcaacatacgcttcgtatcgaggctacagatacagcaggtaacgttgcgagcaaagatttagtctttaatatcgatactcacttacagattccgacaattgctttgggggccggacaggatactggagcgaatacttccgaccatattacgaatatttcacggcccacttttgttattggcaatgttgatgccgatgttattaaggtaatggtaactattggtaccaatacttataacgctactaaagtggggggggcatgggagttcagaccggataatgcgattcctgatggttcttataatgtgagcgttactattgaggataaagcagggaatatagcgacatctcaaccgttatctataatggtagatacgagagccgaaattaatagcgtaacgctattaacagatagcggtgatagctcttcagataatataaccaacgtaaacaagccgcagtttgaaattgtggctgctaatgatactgtacaggtacgcgttaaaatcgataatacgggtaattggattgatttaacgcagagtgttgaaggacactgggaatttaatgtaggaactgcattacctgacggtcaacattcactattagtggaagttgtcgatgttgccggtaacgttgcacaacaaacgcttaattttacggttgataccacgctgcgtgagccaaatattgtgcttgaccctacgcaggatactggcgatgacagtaatgacaatattactaatattaataagccgacatttattattggcaatgtggataatgatgtgtcacatatcgttattcatcttgatggtcgggattatatcatcgaaaataatggtgctaaattaacatttacaccagataagccgctgacagatggtcatcatacgcttactgttacagtgacagatattgcgggtaatacaaaaacatcatctgaactgcaggttgaaatagatacccaggtacaaattgacagggtttcattaacaaccgatagtggtgttaatgatagcgatagaatcactaatgttgctcgtccatcgtttaatattgtaacacctgatgatgtgaccaaagtattggtttctttcgacggtgttatctggagcccggcaagtaagaatgcagccggacagtgggactttacggcgggtagcgctctattagaaggtcattatgtactccatgtgcaggcaacggatcgggcaggaaatacggctaattccagtcttgcatttacggtggatacacatgttgatggccttaacattaccatgctggatgatacagggaatgacgcggcagaccgtataaccaatattacatcgccgcgttttgaaatctcagccagagaatcgctacaggttgtaacggtgacgttaaatgggaacgtcaccactctcaacaaagggatgggtaataagtggatatacactcccgaaataccattacttgatggacattataaactagaggtcactgctgaagatattgctggcaatactattaaccaggagatatcgttcactatagatacgactgtacctgtgcctgatgttgatttgttggatgccgatgactccggtgaaagcgctgtagataatattaccaatgtcactaaaccacgtttcattattagtgatattcctaccgatattgacactgttacgataaaaattaacggtgtctcttatcctattactctggatggcagtaacaccgggacattccaggttcctgtggcgctaaaagatggtgtctacgaagcggttgtcgtcttcagagatcttgcaggtaatatatccgagacgaaactaccatttaccattgatacggcaacaagtgttagtgttcgaatggatcccacatcagatacgggaagttctaatagtgataatctcactaacagaaaaagtcctaaattcggcggtactgcggaaccggatgcaaaacttgttattaccattatcgatgatacatcaggtcatgaggtgttgaaaaaactggtcacggttggtgttgatggtaactggagtatgacgccagatgccctggcagatggtatctacacaattaaagttgtctcaacagacgttgcaggaaatacagcggaggcgcaagatagatttactatcgatacggtaacgcccgatccaacaattcagcttacggattcatcaattgatgatatgcatgaagctaccagcctgcgacctgagttcaaggggatcgctgaagcattctcaacgattatgatccagtgggatggcaaagttatcggctcagccaatgcgaattcgaatggcgaatggagttggactcccccatcaatattaacaccaggttcttatgtcattagtatcgttgccaaagataaagcgggtaatgaatcgtcacaagttgactttccagtcgtaatacctgttattgatgtaacccctcctacgattaagctaagtgatgatagtgatagcggggcattgggggactttattactaacgataaaacgccgactcttattgggagcacattacccaatactattgtcagcatttatatcgacggtaagaaagttggcgaggcaacatcggataccgcaggtcgatatgccttccagatgcaggaacagcctgacgggacgtacgttgtggaagttggtatattaaatccacgcgtcaatgaagaaattcgctcagcagccgttagcctcgttattgatactcaggtcgctgaccttgaatggcatatatctgggatacatgaagacaaatatattaatactgtaacgccggagattagtggcataagcgaaccaaacagtaaaattacggtttttgttaatggggttgaaaaggctgctgcttatactactgcaggcgggcattggggcgttatattacctactttagggaatgatggtaattacgtattaacgttcaaagttgaagacattgcaggaaatgttaaagaatttggtcctcaggaaataacattggatacggtaattgaaccgttaacagtgacactgcgagaagttgatgattcgggtaaactgggagactggatcaccaataaatcacatgtaaatatagatggtactgcggaggcaggaagtaccttaactattaaaactcagggaggagtcgttgttactacttttgaagtaggaagtgatggacattggagtgcagagttagatctgagtaacggtaataatatctttgttgttgagtcagtagataaagcgggcaatagtcaacaaaaagaacttttagtagaatatgacacgcagatcgaaatcagtgctatttctttaagccgagatagtaatagtggtgataaatatgatctcattaccaacgataaatcgccagagctagtcgcaatgaccgaacctggagcaacagtacaggtttatattaatgatgtattgcaagctacggtagaagctaattctgcaggtaatgttagttataccatgccagcgaatagcgccgatggtaactatcatgtgcaatttgttgctaccgatatagccggcaaccgaactgaatctgctgttgcgacagtgacgatcgattctgaaattgctgtgtttactattgatgaaggttcattaccgactatatcaaatagtcgggcattatcagtcgctgggcaaggtgaggcaggcgctcaggtaagcatctttgtcgataataagctggtcaatgtggtcatggttgaggctgatggttcctggcgtgctccgatattgctgcaagatgatggtacgtttaagattcatttcagcattactgacattgctggaaacacccaggcgagcaaaaatttcagtgtcgatgtcgattcatcaaccgaatttccaacaataacccttgaagattcgagtaactcaggtctggttgacgatctgattactaatcataatacgccatcctttgttggtactgcggaagcgggtgctacaatccatttttatgttgatgaaaaaattgtggcaaatatcctcgttcaagatgatggaagatggtcatatcaatttgataattctctgaaagatggtgaatactccattcgtgttgttgcggaagataccgctggtaacagggcggaatcacctcgcttaatcgttacgatagataccagtacatacattgaacctcctacgctgacagcgggatctgataatggtatgtatattaacgacggcgtaacaagtcaaaccagacctcagtttagtatcaacggtgagtttaaccagagtgtccaaatttacattgatggcaagctagtcgatacggtcactgtgacagacaaaaaccaggtttatcaacctgtggctccattgggtgacggttctcataatatttattatgtcattaccgataaggcaggtaacactgcaacatctaaaacactagatttttcaatagatacatcgaataaaacccctgtggtgatagagtccattgatggtcatacactagcggagatgaccggcagcgatggtaaaatatatataacagatactactcataatataatttttcgcggaagtgcggagcctgatagtttaatggatttaactatcaatgggctaaacgtaggccaagttttggttagtaagacaggagaatggcagatgccagtcaaccctgtttatctctctcaaggtcttctggagataaaaataaaatctacggaccgtggaggtaatgtaaacgagaaaagtttctctatctgggtggacacgatgattgaggactttaccagtgaacttgatgacaataaatcatcgtcgcaaaatgactggtggagtaataatacccttatcactatgagaggtctgggagaggctggcgcgacggtatcactagtgctggcaggtgtcacattggcaacgacagtcgttgcggctaatggtaagtgggaactgtcgaccgatcggcttccggaagggaaatacgatatcactttgagtattgaggacaacgccggaaacaggagagaagagatccgtgaaatattcatcgatcgcgttgcaccggcagtccctgctataacatattcggacattgtcgatgatctcgtcattatgaaagggacgggcgaagcaaaatcaaaattaacgataactgacagcgagggaaatatatatatattaaccgttcctgataacgggaactggagtatggctattccttatccatcagaagggatatttactatatcaagtacagatcgaattggtaacaccagtgatgttgtctctgtcgatttaataagagagataccgactatttcgttagcggtagattcgaatagtggttctaaaaatgacaatattacgcaagataaacaacctacctttattatcggaaatttagaaagcgatatcgttaacgttcaaatagatattaacgggatagcatataatgctgaaaaaagagcggatggcgtctggttctttacgccagatatagctttagctgatggtacctatacgatatcggtaactgcgaatgacgcggcgggtaatcagaaaaactcgttaccgattactatcacgatcgacagtacgctgaaggtgccggagattgcgctggcggcaggtgaggataccggcgcgccagacagcgataacgtgacgaatcacacccagccgaagtttaccctgcagcatattgacgcggatgtgaccggagtgaccgtcagcgtggcgcataacggaaccaccgacacctatccggtcacgaagggggatgatggctggagcttcagtccgtcagcagcctggagtgatggtaactacacgctgagtgtgacggtggtggacggtgcggggaacacgcagcagtcatcatcgctgacggtgacggttgattctactataacagcgacagcgcctgttgaggcaggcgatgttagtgagttcgccatggcaaccgatgtagctcaaccggaatctgaaatggtcagcattgaaagtgaaaaaaatcatagcccagctatgttttcaatgatgtctgcggttggagaagtggctgcgcaggaggatgcctataacatcgtattattaaataccgagtctggtgatgtaactgaacgttctattagtcagacaccatcttttgcaatatcagtacctgataatattgtgaatgttagtgttatgttcgaaggagaagagattgatttgccgattaataatcagaaggcaatatttgaggtgccagtacctttgaatgatggtgagtatactatagatgtgaaattcatcgataaagatgctgattatctgattaaggaaaaaacattctcagttgatcattcttcggcagatatagttaattccatgggtgaaagaagcaacaccgaggatgaagttaacgtctcagccccagaaagtgctgtaacacaccataataatggtgctgttgagatattcactattagtgaagtaagtctccctgtagataatcaagaagaacacgcataa

SEQ ID NO: 391021 - DNA, 2277 bp, Salmonella enterica
atgtggccagttggtgattactcggggcgtattgtccccacagcatcagaagcattccccgcagcaaatacaagctattataccttatggcaaatttgggctagtgaagcagttgttggagctggggaacaacgagatatagcggttgaaagattatgtgcctgcctttgcaataaggagagtatgcttgatttagcgggacttaacttgcgtaccttacctgtattgcctgagtgtgtttcaacgctgaatgtcagcaataatcatttatctgccttgccaaatctccccgaaggattaacagatcttaattgcgctggcaatacattgacttcactttccgcgctccccccgtcgttgcaactacttgattgttcacaaaacagtttacccgaactacaaaacttacctccttcactaacggcgcttaattgttcaataaataaattgaaggatcttccttatttaccttatacgcttaaatcattagattgttctggtaatgctattattgcacttccagaattaccagacagtttagaaatgctcgattgttcaggaaacttactcgaaatcctaccagatcttcccacttcattacaatcacttaattgttctgtaaataaattaataggctttccatttatgcctttttcactgagaacactcaattgctcatacaatgaattaaccggtctccccccatttcctgattcactcataaatctcgatatctcctataatgaatttaagtctctaccacaactccctccttcattggctacatttatatgtacaggcaatccactttatgaacttccggcattaccttcttcattgcaaatacttacctgcgccagcacgtcactaacagcactcccgccgctgccatctacactgcaagaactttattgccagaataatgatattatcttactgcctgagttgcctgcttcattaaccgatttgaattgctcaaataattatgtggtgagaatgcctgcgctacctgactcgctcatttctcttgattgctcatacaatcgtttagaaacgcttgctgtcttaccccattcacttcaattgatgattgtcattcacaatcgattaatagttcttcctcaattacctgaatcgctgagatttctcaactgttcgagcaataggcttaccgcactcccagctttgcctgatgcgttagatagtctttattgccacaccaacgaactggaaatacttcctactttgccaaacggcctgcaagagcttggctacaatggtaatcctctggcaacgttacccgtattgccagcctcactcataaacctgaataacgatccatttgccggaggcgctactgcgcctcttcagctcattcaaagtattgaatattggtttccgttatcgcagcgcgctgaaatgctcactcgttttgagagtatagccagcgaagagaatgccgacatattcagcggttttcttaacaggcttcgacatcgttacagagaaccacagtatgaaggtttcagatcccaggttaaggagtgccttatccgactggttgacaatcctgaattgagagaaagattatttatgtgtgcctatgaatcaacccaaacctgtgacgatcgcatttctctcacatggaatatgatgcgggtcgctgaaatggtttttaccgtagaacaagagggtcatgagggcaatctcccggaaatggtcgatatagctcgtcaagtatttcgaatagagatgttgacggatattgccactagaaaaatccagcagctccagagagtacacaatacattcgatgaagatttagaggtaatgttaggcctacaaacccaactgcgcgacacgctttgcttaacgcatgtcgccccagacatgtatttcttccgtttttctcaacttactgaaatagatgtaaaaaccgcagagcgtcaggtgcgaatagcggaaaacaggcagtttgaatcatggctcaacaattgggaaccgtggcaaatgttgctaaaacgtatcgatccactgtggtatgaaaaggctatggatgaaaaatacgcttttgttaatggcccggatttccaaaaccgactggacgaaaaattccagttacatcaggttcctcctgagatccgtgatgataccagccatattttagggaagatcgttatcgcagaaaagacacaagaaatttttgcaaatcagacacgtaaaattttggaagcgaaggagcaatcatcattgttggaaccaacatggaccgaataa

SEQ ID NO: 391022 - DNA, 1164 bp, Salmonella enterica; identical to SEQ ID NO: 374548

SEQ ID NO: 391023 - DNA, 249 bp, Salmonella enterica
atgttgatgactatccttataagccatataacgatctccctgcacaattccaatcaccaagaatacaaaccgaaacttggattaaccgggctaaagaatcctttactcaacggactgggtttgaatacgacacctttggaaatttatgtcgacaaatttcgctttgtgatgaacgtggtgaagtcactaacgaaagtactgttatttcatccagttattatccggcccaaggggaagaagatagtatag

SEQ ID NO: 391024 - DNA, 1125 bp, Salmonella enterica
gtggcaagagtcaaaatttcgagcattcattaccttcgtggaattgctgctttaatggtcgttttctatcatttgagaacaacattaaataatgtctatgcccaatctgatttgggcgacataatgtttggttatggtgcctttggtgttgatttattttttgttattagtggctatattatctgctattctacagaaaaaaaagaatatcgcatgcaagtgaaatatgtcatacgtcgtatatttagaatttaccctctattaatagtatctttattagtattttttttatttgttgatgatgcatcaaaaatcaatgttttaataaggtctgctgttccattgaatgctaattattctgctggatctcctttttttggttataatcttcttagtccagcatggacgttaacttatgaaattgctttttatattatttttcttgcatcatttactctatctcacagatatagatggttaatgtcaagtgttataataattttactggtttgcggaattcaaaaatggcaagttggtagcgtaacattcaatgcttataataataattcatttaaggatgggagtttttggcacgcaccattaacatttttagcatctccactttttatagattttgtctatggaatatgtatttataaaatacatagtataattaagaatataaatgtgacggaaaggttaatatcatggattaaagcattttcactattcatctttgcgctagcaatcctcgagattttttctacacaagtgtacggacatggaccactattatgggggttatggtgtgcaatattacttttatcagggcttctttatgaaacttttgcaacaatccctaaaagtaaaattcttcattttttaggtgatatttcatactcattatacttaacgcatgcgatcataattgatatgttttacaagtataatgctgaattttctatttttggtaaaccgcacggcatttcacatgtagcatatatattaatattgtcactgtttttagcttatattgtttataggttaattgaactaccgtttataaaaataggcaaattgattaatagttttttactcgataaaaaccatagtattaatcgctaa

SEQ ID NO: 391025 - DNA, 921 bp, Salmonella enterica
atgattgtgatgtttatttcatcctattttgctgtcgtcaatggtagtttgacgacagcctctattattgccattatgattatcaactctcggctctcaggggctttagttgggggcgttaataagttatatttatcacgattacattcgtttcacatcatgaatagtttaagcgagctattaaaagataaagatacatttgtatcgcatagcggtatatatatatcacggattcaacaactatcagttgaaaaattatctatttcgtttgccgaacgaaaactgatcgaaccgctctcatttacggctgttcctggagattttattggcattgttggtgcatcaggagcgggtaaatcatctttaattaaagcactgtcaaactctattaattgctatacagggtcagttaagctaaataatgttgatataacacacatttctgaagagtatatacagagctgtatcgcttatcactctacaaacagctcttttataaagggctcgcttcgtgaaaatttcatgatatatggtgttgttgatgatagtgatatcatagagatattaactttatgctgtagaaatcttattctttcgaaagaaaacgtagacgaaaaatttgttgatgagctaaacctttccaatggggaaaaacaaaaaattttattatgtctggcattatttaaaaaaccggagatggtgttcttggatgaatcgacatcttatctttcaaccgctgacgctttagattttctggaaagaataaaacatctttactcagatagtattgtcatttttgcgacccatgatatatcactacaaaggttatttactcgaaagattgaactctcacatgaacatttaagaactgtaagttgtaatacaacgataagtattccgaaaatgaaactgaatggatga

SEQ ID NO: 391026 - DNA, 921 bp, Salmonella enterica
atgtgtataagagacagtattatctcagggctaaaggacagcaaaaaagccacactggatgctctggaaaaacagaaaatacagtatatccaggcgcttcaaagttcgtccgatatcattcgtcatgccgaagaaggtatccgaatcatgaagaaaaatatggataattatcgccagtaccagtcccgaggcttgattacgaaagatcagttgacgaatcaggaaacaatttattatcagcaacagagcaacctcctgggactgaatagccagaatgaacagaatgcattacagttaaccagccttgaaagtcagatacgaattcaggctgcagaattcgataaccggatttatcagatgatattgcagcgttatgaattacagaaagaactgatcaatacagatattgagagtgctgtcattattcgtgcgttatctgatggaaaaatagattcactgagtgtgagtacagggcagatggtcagcgctggcgacagtctggctcagattttacctgataccgtcagacactactatctggtgctctgggtgccaaatactgctgtaccttatataaccactggcgatagggttaatattcgttatgaagcattccctgcagaaaaattcggacagtttccgggagttattcagtctatatcacgtgcacccgcaaccccacaggaaatgcgcacataccagggcgccccccagaatacatcttctctctccgtaccctattacaaagtcatcactcgactggacaggcaaagtatcacttatggcggtaaatcgcgcccactggaaaacggaatgaaggcgcaggtaacgttgtttctcgaaaaacgaaaaatttggcaatggatgttgtccccattttacgacatgaagaacagtaccacagggccagttaatgaatag

SEQ ID NO: 391027 - DNA, 888 bp, Salmonella enterica
atgtgtataagagacagggttatcactgaaggaaatgcaaccagagcggccaggaagctggatgtcacgcctgcggctatctctcaggctcttcttcgcttacaaaatctttatggcgaagagttatttatcagaacccgcaaaggattagttccctccagcaaaggtaaatctctccaccaggtatttcgccaggcaattgaatctatagaaagcacgctttacgataaaacatatgttcaggagagtaatgaactcattgttctgggtagtgatataacagagaattattatttcccggcattgctggataccatgctggttaatcgacatgtcattaaacactatgcgattaaaaaaacaggcgaatattcgccagcgtcgatgctgacgcatggatatacggacgtgatcatggggattgtggaaattaataatgagatgatcgaaagttatcccattgataatttatctgattttgtttgcatttgtggtgaaaagagcccactggttgggcttgaacaaatttcgttatataatttttatgctgccagacatgctgtctatcattcagatatgttctcttctttcgccgctgatgccattgatttgttcaagaatagtgcgccttatacgggccgcagagaaataggttatcatagtgattcactgtttggaattatgggggttgttgaaaaaagtgatatggttgcgattctgccaagaaagattgccgcttactttagagacgtgcgacgttataatataaaaataatacgtatgcctgatgagataatttttcgcacgttgcccgtttatgcttatctggcgacgaacggcacacgttataaaaatgcaaaaaaactgatatcaacccttcagtcctga

SEQ ID NO: 391028 - DNA, 195 bp, Salmonella enterica
atgtcagacagatttatccgctttgctgaagttgaacaccggacgggattctgccgtgcctggatttaccacctgatagcccagggagagtttccccgtcctgtcaaaatgggcaaacgtgcagtttccttcattgaacgggaggttgatgcctggattgagaataaaattaacaataaatcttcatacaaataa

SEQ ID NO: 391029 - DNA, 372 bp, Salmonella enterica
atgtctataaggaataatgacggtgcatcattccaatcattccgttctgagctagagaaagggttgcgtgcagccagacatgagtcagatcccgcccgtgttcgctctattattgaagacacccaacatgagctttttgaagttcaaatgagtcagattgccccccaggttagtcacatgaaaaaaatacacttgactgaagttgctatcgcaactgctggtttagggcttagcgtgttgactggcggcactagtttactcgcgacagcgatcgcagtggcacatggctataagtcacacagtgactacaaatcaaaagtaacagcgaacccatgccattttttatggaacgtaaaaatgaaggcagaataa

SEQ ID NO: 391030 - DNA, 987 bp, Salmonella enterica
atgggaagttatgcatatgattatcttaatgattcactgcttttagatggagcattggcatcacagttataccagagtatatctgatttgaccttagagagagagctaaccagatatcgtgagtattgtcttaaaattcttccggaagtacgaaaagatgttaaagccagtaatgatgtgcttagctgtatggctactgatacgatgtctcatatctcacgacttaaacaagcagcattatacttagaggaagccatagtctcagatcctattttcaaactaactgactttagaagcgcttcgactgaagccataacttcattcatgggtatgacatcaacaccaatgattgatcgcagagaattagctaatgctgcaatcagacttattgaattacgcccattagtagcgggtggttacgttaagttgtatcccgtaagcttcgagttagaatgtagcgaagagattcctctgctctattctgataaagggttcgaagattgtttaccatcaaatatcctgaaacaatacaaaacaaatgctgttgtacgaagtgtccaaaacgacaatggacgcatgttggttatgagagatctttatctatgcagaaatattagtattcactttaaaggtatggaaggtgggtatgcaatgggatatatgctaaaccctagtgaatttaagccaacagatagaaaagaagtatacacacttatacagaggtatacatctgagccaccactagaaaaagattttattgcatgggtaaatcaatcagttaaccaaacagcccgaaatcattacattgaactaaataagcgcatagttttatgcaattatcttgattgtatgtttggtactgagcattctttcgaaagcaatttactaaacatgaacattaacacacctgatatcagagaaaatactttaaactgcactcttaaaatggaaattccatttttggaaaaatctcttcaactgatttaa

SEQ ID NO: 391031 - DNA, 2067 bp, Salmonella enterica
gtggcaatctttgacattgagaaagatgaattactccgattatccgattctcagttagaggagttaattgctcgcctctctgaggctgaagtagcagcacatggtcatagccctgcatgggtaagctggtcaggttcaatcaatgcgcctgacggtggaattgatatccacgtccaggttccggccgacaaactaaataccggttttcttgaaagacctgacacaatcctccaggccaagaaacattcgatgccgaagaacgctatcacgaaggaaatgatcactaatggtgtgttatcactaacaatcaccgagcaggctataaaagctggcagttacatcatcgttagtctggatgatgactgctctcctctcatgctaaatgagcgtctcaaagcgatgcaggatgccatgggaaatgatcctaatagtagcaatattcacctgggtttctatgatcgttcaaagttagcacaatggttgcgccagcacccgtctgtcatgctatgggtaaaaggcaaactaggtcagggatactcaggctggcaaccctatggggcgtggagtaatccgccacaaggtgttaccgacacattgatttctgcacctggagttattgtttctttacccccaggaccagagcaaaaactcaacattcatgatgccattgatccgatacgcaaacttattcgatctacgcaaaaggctgttcgcatcacagggttatctggtgtcggaaaaacgaggatcgttcaggcactcttcgatgaaacagttggaacagatgctctagatcggactatcgccgtctatgttgatactggcgctacaccggaaccatctgcgtcagccatgttggacagacttatcgccgaaggccggcgggccattatggtcctggataattgcccagcagaactacattcttcgttggccagcaaagtatctgccgtgggtactaaggtcaaactcattactgttgagtacgatatcagggatgataagcctcaaacaaccgaagtcattcacatagaggctatcggaccagaagtggctgaagagctccttattcgacgcttccctagtatcgaccaggcaaatgcccgtaggatagcagaatttgccaatgggaatgcaagggtagcattagcaatcgccgagagagtgggggaaggtgagagtctggcccaactttctgacgcacaattgtttaaccgcctgtttgaccagcgtaatcatccagacgaaaatttgcgagaacaggctgaaataatgtctctggtatattcattctcaatctcgccatctgaagttggccaaagtgaattggatgtattgggttcattctctggctatactcaaaaccaattatttcgtgcaatcaaaaaattatcagaccgtcatgttttacagaaaagagctaactggagagccatcctaccccatgctattgcaaaccgactggcagcttcggcactcgagagtattcccgtagatcaactgagaacaacctttgaagccaccagacatcgacgcttattgatgtcatttgctcacaggctcgggttattgcataaccaccccgttgcgaaagagatagctgaagcctggcttcagccagaaggactattgggacagatattagacctagatgatatttcgatgcgaatactagagtatatcgccccagtatcacctgataccttgctcgaccgattcgagacagtgcttacagagtctaacttcattggaatgaaaggccgctacaatccacagagatcgactattcaaaatcttttgcacttattagcatatgagccgaaatatttcgaacgatgtatctggcttttaatccaaatagctgaccacgaagctgagaataataatttcaactcagttcgagatacaataacgaggttctttcagccgtatctgtctggcacacatgcttctttagatcagcgtattttaattttaaataaatgtctttcatcagatgtatctgaacgtaaatcattaggtcttagcatactgttgatcttctccctgaaaacagtaccagtctaa

SEQ ID NO: 391032 - DNA, 225 bp, Salmonella enterica
atgggttatttcaatggcgctataatacgttactccttacagataccttttcttttagacgccagcataattgtcctggcgtatttttatggcataacaggcaaaaaaaaagccctgattaacagggctacgctatctatgttttacttaatgagagagaagagaccgtttaatgactcgctcatggtagggtgggtaaatatttggtcgcgtaacaccgtataa

SEQ ID NO: 391033 - DNA, 249 bp, Salmonella enterica
gtgaaacgttttttcttcatagcgtacctccattggttgtattttaaccagaggactctattaagcggtaagactaaatttgggggagactacagtccacgtaatctttcggcgctgaaaattttcctctctagccagaagagcgaaggtgaaatgatacttattcgtgcgctaaattgtagtcagaggcaacgctatctggaactggctgaacagcgtcaggctaatgaattatttacgtatggatga

SEQ ID NO: 391034 - DNA, 147 bp, Salmonella enterica
atgttaatggggaccgccaaaggctgcgggttccggttgggcaagcgttacatgtcgaccgccttcaacttctttcaggactctcaggatctgggattcggtgaaacgttttttcttcatagcgtacctccattggttgtattttaa

SEQ ID NO: 391035 - DNA, 1158 bp, Salmonella enterica
atgctcacggttaaacagattgaagcagcaaagccaaaagacaagccatatcgtctgcttgatagcagcgggttatacctctacataccaacttctgggaaaaaggtatggcagttacgcttcaaactggacggtaaagaaaaaattttaaccgtgggtaaatatcctctcgtgtctttacaagaggcccgcgacaaagcctaccaagcgagaaaggacatagccgatggtatagatccagtaaggaccaaaaaaagaagcgagaaggataactcgttctcagtgatatataaggaatggtacgcccacaaacgtcaggtatggtctgaagggtacgcgactgaattacagcggatgtttgaaactgatattctcccgctcataggcgagatgaagatggacgaaatcgagccgatagcccttttgtctgttgtgcggaggatcgaagagcgcggggctatggagagagcaaacaaggcacggcgtcgttgtggtgaggtatttcgttacgccatagtaacggggagagcaaaatacaatccagcgccggatctcgctgatgcaatgaaaggataccggaagaaaaactttcctttccttcctgctgaccagatctctgcattcaaccaagcgttagcaggatattcaggtagtatagtatctaagattgccaccatggttttgcaatacacggcactgagaacaaaagaactcagatctatgcaatggactgacgtcgatttcacttctggactaattacgatcgatgagtcagtcatgaaaaaccgtaaaccgcatatcgtaccaatgtcgcgccaggtcgccgagctgcttaagacgttaaagccagtaactgaacctgtatcacagtttgtatttgcaggaagaaacgataaaaggaagtcgatcagcgaaaacgccgttctcctagtcattcgccaaatcggctatgaaggactggcgagcggtcatggcttccgccatcaatttagtacaatcctacacgaacatgaatggccttctgaggtgatagagcgccagctcgcccacacagacaaacactcagttcgcggcatatataaccatgctcaatacctggataaaagacgagaaatgatgcagtggtgggcggactggcttgatgagaaggtatcatag

SEQ ID NO: 391036 - DNA, 786 bp, Salmonella enterica
ttgcgtttatggttatcgcaagatctatctggacttgcgggacagcgggcaacagtgcggagtgaacagaatctggcgactgatgaagcgtgtcgggataaaggctcaggtcgggtaccggagcccgcgggcacgcaaaggcgaggcctgtatcgtatcgcccaacaggccccagcgacagttcaatccggatgcgcgaatgagcgttgggtaacggacataacctacatcaggactcacgagggctggctgtatctggccgtggttgttgacctgttctcacgcaaaattatcggctggtcaatgcaatcccggatgacaaaggacattgtcctgaacgcactgctgatggctgtatggaggggtaatccgcaaagaaaggtgctggttcactcggaccagggcagtcagtacacaaaccatgagtggcagtcattcctgaaatcacacggtctggacgggagtatgagccgtcgcggtaactgtcacgataacgcggttgcagaaagctttttccagttactgaaacgcgagcggataaagaaaaagatctacggaacgcgggaagaagcctgcagcgatatttttgattacatcgaaatgttttataacagtaagcgtcggcatggttcgagtaatcagatgtcaccaacagaatatgaaaaccagtattatcaacggctcggaagtgtctggattatccgtagcgattcagaccgccccccaacccgcgccctacattctagggaattcgttaaacatggcggctacagcctcatactctaa

SEQ ID NO: 391037 - DNA, 198 bp, Salmonella enterica
atgaccgcccttacaacgaactgcatcgatctcagtattcagggcaacagcgcttactccattcttaaacagttggcagaaatggcgttccagaacggctatatcaccgatcgtcatcagttcctgcaaacgctgctactgcgggaaaagttgcattccacgaggtacgggctcaggcatcgccgtaccgcacggtaa

SEQ ID NO: 391038 - DNA, 327 bp, Salmonella enterica
gtgtacgtgacaaagtcaagcagtagaggtgagaaattgaaagcgattagaaaagctgaaggtatgacacaaaaagagttcgcagaacttacaggggtgccctttggaacgataagaaactacgaggccggacaattcgaggttgggttaaaagttatcgatgctgtgttagaacttgaacgttttgaaaaatacatgatgtggctcatgaagggaaaaactgcgccggagctaggacagatagcaccgcctctctcccctgatggatccggcaattcggaagctgctcaggtttcaatcaaaaccactgcaaaatctccccgttaa

SEQ ID NO: 391039 - DNA, 276 bp, Salmonella enterica
atgagcattcgtatcgagattggcgggcgctatgtcgtcaccagtgaccagtttcagtttattttgcaggaaaagaaaacagctaaaactggtaagagtgcaggtaaagaatggctggctgttgtcggttattaccctaagttacaccagctcgtatccggcctgattcatcacgatattctgaccggcaatgccacctcctttaaggcgttgagtgctcaggttgagcagctcggtcagcagtgtttaatggcttttgacacaaatggtcgttga

SEQ ID NO: 391040 - DNA, 1236 bp, Salmonella enterica
gtgcttaggaaaaatattttttacctttttattgttcagggcggaaattatcttataccgctattaacttttccatatttgcttagggttttggggccgacttcttttggtttgctcggtttttttcaagcaactattcaatattgtatattactcattgaatatggttttaattggaccgcaacagaagctatagctaagaataaaaactcgaaagaaaaggtcactataatattttggggggtgttttgggctaaggtatttttagcgtcaacttcaatattattattgcttatattaattatggtttttgatatttatgcgcagcattttttagttatcttagcttttattccactaatagttagcaatataatttatccagtatggttttttcaaggtatagaagaaatgaaatggataactatttgtacgttactggcgaaactaattattgttcctacaacatttatatttgtcaataatcctaatgatatatgggttgccgcttttatccaaagctgttctatgatgctatctggtttaatctcagtatatattataatgagaaagaaatgggtttcaaaaattatttttgattatgtttatataagaaaatgtttaagtgatggttggcatctttttatatctacttctgcaataagtttatatacaacgagtaccacaattattctgggggctattgctggccctattgctgtaggttattataacacggctaatactattagaggagctatgcaagggctgctaaatccaatagctcaagcaatttatcctaggattagttatttgataactgaagattacgagagtgctttattcttaattaaaagaatgctcaaatatttttgctgcattgctttattatcttcactaagtcttttcatatatgcagcacccattattaaaatagtagctgggacaggttatgatggtgctgtaactgttttacgttggatgtcatttattcctttctttgtggcaatgagtaatatatttggtgttcaaacaatgttaacacatgggtataaaaaagagtttagttttgtacttattattagcggagtactaaatattttattgatattacctcttgtttatttcgaaagccaggcaggtgcggctatggcattattattgacggaggtttttgtaacggcaatgatgtatatctttctcagaaagaaaaaaatatttttatttaaaaggtga

SEQ ID NO: 391041 - DNA, 357 bp, Salmonella enterica
gtggtaacgcgctgttggcgtcaattcccgcataccgggtttgaatgcttgattggagaaaatgatgatgtcatcgacctgctgcaaaaggggcgtgcccaggtaggcttgattgaagcgcgtgaagactatcccacagacatcgacgcgacgcgtctgcttattcaaaactggatgggcgtttatgtagcggccacgtatccgctggcgttacagacgaacctacagtgggagcaactgcatacctggcgtgagctgtgtctgaatacctaccttgaatctaacgccaacgtgacacgcggcccggcctggtcggtgccgaattatctattgctgttgagcatggcggttcagtga

SEQ ID NO: 391042 - DNA, 567 bp, Salmonella enterica
atgattgaaaaagtattaggtgacatcgcaactgttgaaccaaaatttagagtaacaacgttacgatattttaatcctgttggagcccattgttcaggattaattggcgaggatcctaatggggtgcctaataatttaatgccatatatttgccaggttgcaattggaaaacaaaaacaattacttatttatgggaatgattatccaacaaaagacggcaccggcatacgagatttcgttcatgttatggatcttgctgaggggcatcttgcagccttaagacacagtgatgaaggacctaattataaagtttataatttaggtactggtatagggtatagtgtgcttgagattttagaaacttttcaaaggattacttctaaatatgtgcctcgcgtttttgttgatagacgccatggtgatatagctgaatgttggtcagatccctctagagcaaataaagaactttgctggaaagcaaaacgaggtcttgaagagatggttcgtgatgcttggaattggcaacaacgtaatcccaatggctatacaaaatctaataataattaa

SEQ ID NO: 391043 - DNA, 456 bp, Salmonella enterica
atggatattaaaattaatgaaataaaaataatgcctcctacagagtttaccccggatcagcttatagaggaaaaagagattaattctccttcaatgttggctctccaggaattacaggagaccacggggacagcgctctatgagacgatggaagagataggaatggcgctgagtggtaaactccgggagaaatataaactcattgatgctgagaaactggagcgcagacagcaggctttgctgcgtttgctaaaacaaatacaggaggataatggggcaacattgcgcccgcttgccgaagaaaatagtgatcctaatttgcagaatgcatatcaaattatctctcttgcaatggcgcttactgacagtggattgtctaatggaacttggcgaagtggataccgctacgctggcatctctgaagcgttttatgcaacaggcgatagacaacgatga

SEQ ID NO: 391044 - DNA, 183 bp, Salmonella enterica
atgaagtggcatgagcagttcatttcccacttcgcggagatcttctttccgctactaccggcattgatcagcggcggtttgatcttaggctttggtaacgtgattggcgatgtgccgatgagcaacggccaaacgctggcgcagatgtatccgacgctaaaaacgctttacgattttttatag

SEQ ID NO: 391045 - DNA, 228 bp, Salmonella enterica; identical to SEQ ID NO: 380108

SEQ ID NO: 391046 - DNA, 1614 bp, Salmonella enterica
atgcggatatggctgacgcgcaaacaaccagagaccacatcatccgacggtaagccaaacgccacggagggatggctgcaacctgaatcttcgcaaacactactggctgcctcatcgcgccagcagcttatccagtttattcgccagagcaccgcgcttcctgcctcgctatttgaacgcttctggttaacgccgctccaccgctttgcggaactggcgcagtcatttcccgcctcggaaaaccaccatcatgcccatgcaggcggtctgctcgatcacagcctcgaagccgcctgttatgccgcacggctgcggcagagttatctttttccgcctgatgcagcaccggaagatcaggccgctcagtccgaacgctggacaacggtcatcatctacgctgcgctgctgcacgatgtgggcaaacttgtcaccgatattgaggtggaagatgccagcgggcaacgctggtttccatggcatggtccgctggtccaggcttatcggttccgctatttgccgcaacgtgattatctgcgccatccggcagcggcagcccttctgcttacccaacttctcccgccggaaaacctcgactggctcgccgccgacgccgctgcgttatccactctgctgcactgcctgaacgggcagtatcaatatgccgggctggcgggtgaactggtgcagaaagccgaccgggcatcggtggcgtttaatctcggtggcgatccggtcaaggccattcttcgcccacaaacctcgctgccgcagcaaatcatcgccgccctgcgcgacctgctggcgcatgagttccggctcaataacccgaacggcggctctgacggctggctgacggaagaggctctgtggctggtcagcaagaacgctgccgatgccgtgcgtggctggctgctgcgccagggtattgatgccataccgcagcataacgtgcggctgttcgatgagatgcagacgcatcagttactgatcccgtgcgtagacaaggctatctggcattgccggattgcagccaacggcggctggagcagtgaactcacactattgcgcttcaccccctcgctgatttgggaggatccacagcaacgtcctgcaatatttagtggaacagttacgccgttaacggaagcgctaaaagagacagaagccgtagtttcaggagacgcacctgtggaacaatcatccaccgaaccagatgacacgccactttcgggcaaaacattctggcagtggctggttgataactgccgggcgcagcatctggaaataaacgaacccaacgcccggatccacaccgtcgccgggacggcgtttctggtcactcccggtattttcaaactctggctggacgcctgcggccagaatgtacctgcggagcgctggcgggaagtacagaaaggatttcagaatctgcaccttcaccgaaaaagaaaaaacggcctcaacatctggcactgcgccgttgtcggtccgcgccgtagctcacgcctgaagggatatcttcttgacgatcccacgccgctttttggagatgacattcccttcaataaccctcatctcttgctcagtgaaggagaagacactcatgacctttga

SEQ ID NO: 391047 - DNA, 780 bp, Salmonella enterica
atgaggcataacaagatcagtggtggttattacgtcgaaccctacgctgggggcgcaggtgcagctctatacttgcttttaaatggctatgtaaatcacataattataaatgatgcagaccctattatttatgctttttggtggtcagttcttaataaaaacaaagaatttattgaactaatcaataatacagaagttacaatggatgtttgggttagacagaaagaaattattaataactctgttggtgtggatttattaacacttgggtttgcgacattttttttgaatagaacgaatcgttcaggtatattatcaggcggggtcattggtgggaagaatcagactggtaattataaaatagatgcaagatataataaggtgaaactcgcccagagaataaagaaaataggtgagatgagaaattatattgatatttataatttagatgctctagctttaataaaaaaaatagacaaggaactccccaaagaatgtctagtttattttgatcctccttattttcacaaaggtagtcagctgtatcgcaatcactacaaatcaggcgatcatcttgaaatagctaatgctatacaaaaattagaccgcccatgtgtcgtgacatatgataactgtgaggaaattaaatcattatatctgaatgagagtagtattgagttttctttacattattctacccatatgactcgacctaaggttactgaaataatgttttataaaaatgtagagctgcacaagccacctcaaatgacaaagtaa

SEQ ID NO: 391048 - DNA, 1356 bp, Salmonella enterica
atgagcagaaaagactttgtttttaaaactgacgtaccaatacatgatattttacttgatactgagaatgcaaggattagaactggaagcgatcaaagaaattgcatatccagaatattaagaaaagaaaaacaaatgttggttttaatagaggatattgcaaagaatgggctaaccactatgccaatattaattatgccaacacagaataacaaatggatagtaaaggatgggaacagaagaataacagcattgaagctgttgaacgctccggaaatttgcccagagccccaacttatttcgaagataatgaacatagcggaaaaatataaagataacataagtccttatgttgattgcttatgtagtgaaaaccctaaagctatttttgacgaaattgttgctaggcattcaggagctagagaaggagcaggtcaatatgattggtttgcatatatgcgtactatatatctattaaataatgggcaccctactgattataaaagggccggacaatatatgagctgggcagaaaaagaaggagttgatgttgaggatgattttcctataagtacaactgctcgtttttttaataaagagaatttaaaacttcttggattcgatatagaaaatgatcaattaaagcctatcttatctaaagaaaaaatactcaaaatggcatcgatgatcaatgatgacttctcatccaaaaaagtagatgttaacgatgtgttcaaaccagaacatgctcttttgtacataaagaaactaagggaaaagtccggtctctacgatatagatcagattgaagatattcaaaataataatactgaccccaatcctagatcgactaaagagccagatcacagcgaaaattccagcaataacaaaactacccgtggttatacaccgaaaaaaataccagcagaacgtaaccgcctattcgggcgagcaaaaataggtatatcagttcctgatgacgcaactaaagttagaatgataattactgagttaaggcaattagatattaggaaaacgactttagcagcaaccgttttattaagagcattgcttgaactcagtgacagagaatatagaacgattcattcaataaaagataaagggggtctttcaaaaaacatagcacttgcagctgatcatatgttaaataatggaaaaatatcatcgtctgagcataatattattatggcatatactcgaggtgaacaaggagttttacacatagaaacattacaaaaatttcttcataaagaatcacatcatccagattatcaaactataaatatattttgggataatattggatgttttgtaagggcgtgctggaaggattag

SEQ ID NO: 391049 - DNA, 1662 bp, Salmonella enterica
atgataaaaacaataaaaatacacaagtacaggaaactagagaatatatcattcaattttgaaaatggcatcaatattatatctggaacaaatggaacgtgtaaaacatcattgttacatataattagtaattctttcaaagcgccaaaactcagaaatgaagactgtgatccaccagctagcttaagagtaataaaaaatagtaatgtaatatttaacccaaaaattgaagcattagtccgagatgcgaaagagtatgttgatccctctaatgggttgaaaggaaatctgtttgaagtagaatattctgacaatagtgttttacgttttaggaagcataattcagatatcgaaaataggtttgcaattaaaccatattacggtaacactgaggaaagaaaatatctacccgcttgtcccattatctatctaggtctgtcaagactatttcccacaggcgaaatagatgatgagtctttaaataacgtcaatattaatcttcctgatgattaccttgataaaataagagtattatataaaaaattaacacaaattgagattgataatattaagatcaccaatgtcaataattttaaatctggccccgagtttaaatcatccgtagatggtattgactcaaacactatttcttcaggggaagataatttatttattattttaaaggctttggtatcattatctttttatcacgattcaattaaagataaaagcaatgatatttctagtatattgctgatagatgagtttgatgcaaccttacacccatctttacaagaaaagttatttgatatattagaagaatacgctgccaagtacagcattcaaattataataactacacatagtttatctctacttgaatatgcaattgaaaagaataaaaatgtaatatatttacttaataactatacagatgttgataatatagaaaatccgacaattttagatataaaaatgtatctccgaaacgaagtcagagatgaactttacagtaaaataaaaattcctatcttcatggaggacgatgaagcaaggcttttctttacagaatttcttgactaccttgaagatagaaataaagaattctccatggtacgaagatttttccaccttgttccttgtaaaataggtgcagataatttatcgactatttttaatgatccatatttactcgagacaacgttaaaatcaatttgcattctcgatggcgataaacaaagcgatatttcaaaatgcacaattgcccttccagggaaagagtctccagaacaattattctttaaatatattgagcaactgaatagtgagaacaatgatttttggaagaatagaaatattataaggttaggatacactaagcataagtatcttcatgatatcaaacctgacatagatagtattcaaatcgctattagtgagaaaaaagattctggtagttcatcaaaaggaattgaacgacaactaaacaaaaaaatatttaataaacatattaatttcttcagactagtgatgagtcattggttccataacagtagtaacgatacagaaatccgtagattttataataatcttaaaactgtatttaaaaaggtatccattcctaatggcattgaaaaaaatgaatggcatatggactattaa

SEQ ID NO: 391050 - DNA, 258 bp, Salmonella enterica
atgaagcggctgatgctctccggcatgatgctgctggcctgcatggcagcgacatgttacctggcagctggtaacacaccgcagattaaccgcagcgctctgctgccctggcgcataatgctgtacgccgcgatctgcggagtaggctggcatctgtatgcccgcttcccaccctatcgcccggcgctccgccggatcgcgctgtggtttgttgtgctgattgcactcaatgagagtttaccggaggtattccggtga

SEQ ID NO: 391051 - DNA, 417 bp, Salmonella enterica
atgtttatccctcttcaacggcttttgattgtgctggcgctgggctcgcttccagctctggccattaccacacctgaaatcgccgcctctgccctgtcacctgcatgcgtgaaatatcaggttgtcggcgtctgctactggctgtactgcacaccgtttggctgcacggtccgcacttcggtaaaggtacgtcatttccgcccggacctggtgatatcggcctacagcgtcaccgggaaaaatccgtggacggagatgtcgccgctcagtccgccgctgcccagtatcgccgaagcgggcggtaatacctatccccgcgccgtcggccagcacagccaagtaagatttaaaaatgccgatgcgattggcttccctgccggtgatgcgctggcaaatttcttctcgcagttcggctag

SEQ ID NO: 391052 - DNA, 1017 bp, Salmonella enterica
atgaaaaaaatcaaaaccgccgtggtgggcgttggcatctacggcagacaccgcattaatgcttacttaaataaccccgatgtcgaactgattgccgtctgcgattctgatccagaacgctgcgatagtgtggcaaatgaactggatttgccgggttacgccagcctccgggcgctgctggataaggaggatgttaacgttatttccatcgctacctccgatccgtaccacaaagaacccgctttgcaggctatcgcgaagggcaaacatgtgctgattgagaagccactggcgacctcggttactgactgcagggatattattgatgctgccgaacggcacggtgtgaccattggcgttgattttcacaaacgctgggatccggcaacaacccgcttacgcatggccacgcaggaaaccagcgccgggaatattatccggggctatatcagcatggatgatgtgattgctgttcctgctacatggcttggctggtcggcacagagttcgccggtgtggtttcttggctctcactgcttcgatctggtgcgctatatcagcgggcaggaggtgaaatcggtctacgccgtcgggcagaagcgtctgctggccacgcggggcattgatacctgggacagtgtgcagagcaccctgctgatggaagatggcagttcatgggtggtggaaaacggctgggtactgccggacggcttcccgaaagataacgacgggcgcatcgcgatagtctgcgacaacgcttatatacggtccaactcgcaggatcgcgggctggagatcgtcaccccggaacggacgaaaacgccgaacagctattttattacctatcgggataacgtcgccagcggctttggtattgacccgattaacgactttatcaaagcagtaaaaaacggaacgccttatacggcaacagcaaatgacggattacaggccagtcggatttgcgaggcggtgcacaagagcctggagagcggcaagcccgtcgcgctgtgctga

SEQ ID NO: 391053 - DNA, 1002 bp, Salmonella enterica
atgaatatccttcatattcctcccggccccggcggctacggtaagggcctgtggctgcccattagcagcggcaaaaaggtgctgtcactcaccgggcgggaaatccacccgctcgccatcgaaatcggcgcgctcacccagtcggaagtggtgaacggtttctcctgtgtgccgtcagatgaagaactgctctgcgtggtgattaactgcggcggctccctgcgctgcgggctgtacccgaagaaacatatcccgaccatcaacgtgctgcccaccggcaaggccgggccgctggcggcgtatatcacggaggataactacgtttcaggcgttacgctggcgcagatgcagcagcctgaaatgcagcagaacgatgaccgttatggctcgccgtcagtcggggggactgcgacagagcgagggagtacatcaacagggcctgaacatcagccaccggaacagggtatggcccgactggtgcgcctggtggaaaaaaccggtactgcgacgggccaggtcattgccctgctgtttgccgccagccgcgaggcggtggatgtctctctgcgcaacgtcattccatttatggcctttgtctcggtgctgattgcggtggtacaggaaactgcactgggcagccttattgcgcacgccctgacgccgctcgccaattcgctgtgggggctggtgctgctgtcttttatctgcggcattccgtttctgtcaccgatactcggcccgggggccgctatctcacaggttatcggcgtgatgataggcacccagattggcgcaggcaatatttccccagccttcgcactgcccgctctgttcgccatcaacgtccaagtgggctgtgatttcgtgccggtagggctatcgatgcaggaggcgaaaccggagatgatcgccaaaggcgtgcctgcgttcctgctgtcccgccagctaaccgggccgctggcggtcattatcggctgggcattttccctcggacttttttaa

SEQ ID NO: 391054 - DNA, 375 bp, Salmonella enterica
atgattatctacaatgcgcgtatcgtgcgaacaggcccgttcgtggcggacgggctggcagataatatgctgattacctttgatgccgcagggcctgcggactgcctagactacgccttggtgttatcccccgtatttaagcatcccactctgcagatacttcccggcgatcggctgcaggtggccggggaggaatatctgattaccgctattggccgcgaggcacagcacaatctgtatgaactaggccatctgaccctgttgtttgacgccagtcttttcgcccgtcatgccggttgcctgcatctctccggcacctgcccggtcctgtctgacttaaaggataatctggttattgcggaggccgtatcatga

SEQ ID NO: 391055 - DNA, 534 bp, Salmonella enterica
atgttcattatctcccttgctgaaggctttattcatctgttccaggccgccggtaagatctttctcgatatgatgagcggcattatccctatgctcattaccctgctgctggcaattaactttctgatgaaacttaccggtgaggcccgtatgcagcgcgtggcggcactgtttggccgctcacgcattcttacgtatggcgtcctgccggtactcggctggttctttatgagcagcctaggggcactcacacttggtaagctgttaccggaaaagagtaagcccggctatgaggatgctctcggtacgaccgcccatccgctgaccagtttgtttccccacgtggtgccgtcagagctgtttgtctggctcggagtggccgcagggttaaaagcccttaatcttccggtcaccgaactggcactgcgctatatcgccgccgccatcgttatcggcctgctccggggcatcatcaccgagtatctgtttctgcgtcttagccgcaacgataacagcgggagggcgacgccatga

SEQ ID NO: 391056 - DNA, 285 bp, Salmonella enterica
atgattccgaagcgtcttagaattgcgagagagttggctgacatgtcccaagaagatctcgccgctgccgcgggtgtttctgaagaaacggggtcctcaagaatttcgcattatgagcatggaaggcatcgaccaaaatttgaattggtttgccagttggcaagggtgctcaatgttccggaaggttatttttacacgcttgatgatagctttgccgaagcgatgctaaagctctacgcaggtgaaatcgtgcagtggaaaaaaccagtaagtgaacctagttag

SEQ ID NO: 391057 - DNA, 348 bp, Salmonella enterica
atgaaaaaacttatcgctccaatcgtaaatatagctctttgtacctatattgtcgctatatgcttaatctgcctgattgagttcgataactggcaagacaaaataatcgccgttatcattacaatcggcagtgcttatatcatcgcccttgtattgaacagattcctgtccacgaagatccgtatactaggcggagtttttgatttactatcaggcccactattaattataggcgctattgcttgtatcgcttttcttaatccctggccgatcaagattataggaatgtttttatgggtcgttataatattttgtttaccaacatttataaacagagataaggagtag

SEQ ID NO: 391058 - DNA, 675 bp, Salmonella enterica
atggcagacatagaagggatagctcggaggatatacgatatcgctgtttctcctgatacagttacagggcttatcaatggtggattatctgttcccttagattatggttatctaatttacggtatctttgatacggatacaagatatgaacgtgaaaccgaaagaatccgtatgatgaccgctataagacacgatatccttaattatgaaaacatcgttagcgcagttaagttggtcttccagttatttaataaatacctatccgaatcagaacaagataacatatacagaagcgtagttacctctattgtgggcagaatctccacgaatgttatcgcatctaacatcgctaaagctgttatagaaaagacttcatttacctatgtagtatttaaggggaaaggtaatccaatagcctttttaagcacaattcttttgtttggtgggatggcagagcgttctatcagaacgtctgatagtctcagtaatgaagcacctgagatatacgagttattaagaccccgcgattacgacctcctttattttctatttgccgatgcggtacaaccttttgttgatgccatccatgcaggatacactgagggcaaacccgtgttcgacaggattatgaagagagtagaagaacgtttaaatacgaacgctaaggttgggtga

SEQ ID NO: 391059 - DNA, 219 bp, Salmonella enterica
atgaatgtccgtccgctgctgatcctgctggttgccctgcccctgcacgccgtcgaactggtgaagtgggaacgcatcccactcccagtggcgctgaacatcgggcaggagcggatcgtgtttgtcgatcgcaatgtcagggtgggctatcccgccgcgctggaaggcaagctgcgcattcagagcagcaacggcacgctgtacctgcttgccagctag

SEQ ID NO: 391060 - DNA, 312 bp, Salmonella enterica
atgcaagccatcgcaacatttatcgccagcctgtttataaccagttccgctttcgccgcctccctcaccgagcgcgaagagctaaccctgtccctcaaccagcttacccaaatcgaagcctcgctccaccgcgcccagcaaagcgccagaaccggcatcaacgagcgctactacttcgactacccacgtatccacagcgatatcaccaccctgcgcagcgggattgaacattacctcacccccacccgcgcccagccgcgagatacgccaacgctggtcgggcaataccgtgaggagaaaaccgcgccatga

SEQ ID NO: 391061 - DNA, 663 bp, Salmonella enterica
atggataaaatattggatatagtgaatggatggctcacttctgctgtgtctagcggtgtattgcagataaagcagattcttctctttatttttattgccgggcctttggctctggttatctggaaaatacgagggattgtcggattttttaatgaagtcaggaactccaaattaaatgagttgcagcgccttctggatagccacgagctatcggatgaagtgagcatctgtataaaagatgatattgagagaataaccagctatcgtatgactggaatttctgatgtcgccagacaaaaaatcattttgcggctattcgtagaaaatagagatttaatatctgtcggtttcttcaagagatttaggacgtttttgctgattaaatacggagctattgtattcaagaaaggattttctttctggtttgagaacgttatgtatgttttgttttcgcttcagttcctgtctcttgctattttatctttaatactatctacttacagacatgaacaaattcctgtttggggacatttgatattatatacagttgctgtggttatgttccttttctttattgcttttgggagaatgatacctcggcctgaggaatgtaaattactaagtaagatactacaaactcaatataataattcatctgaatga

SEQ ID NO: 391062 - DNA, 258 bp, Salmonella enterica
ttggcctcgcaagagatcgtgtttgtcaggacctgcggtgctttgacgcaagccatgagtccgggtttatttatcgtcatgccaggcagcaacggggttagcgtggctagtagtaagtttatttacgcacaagagtatatattggtgccgggaacggtagtgaattggactaacggtgtatacggcggggggggggttcaaaaagtatatgtgttcgccccatcatcaataaatcattcagatgaattattatattga

SEQ ID NO: 391063 - DNA, 684 bp, Salmonella enterica
atgtccgaacatgcgccaccgccgcctgcacgccgccccggactaattggctggctcgcattgttacctggagtgctggttggcttttgtctcggcgcatggatgctggcgatagcgctggagtggctggacgaagcgtttttctggcggaataactgcgccagccacagtgaacagctattgcagacaacatggcactggtggagaagttccgctggcgcaccgatgtggttagtagaagatctggcgcttgtcagtgataagctgcaacaagggatcgtagcgctgattgcttctctcaacgggcaaagcgggttgttctggacagagacggtcactacggtgatccgctgcgcgttattgtctgcgggtaacgtcaccctcacctttctgctgcggctggcgattttgttgcaggcactgccgctgtttgtgctgaccatcgtcatcgggctgattgacggactggtacgtcgcgacttacggcgattcggcgcaggccatgagtccgggtttgtttatcaccatgccaggcgtatgacttcatccagcctggttgcgacgggactggtgtggctggcggtgccgatttttcttgtaccagagtatgtgtttataccagcggcggcagggattgggctggcggtatccatgacgggcggatctttcaaaaaatacgtctga

SEQ ID NO: 391064 - DNA, 345 bp, Salmonella enterica
atggccagaattcagtacaaccgtgactggggcaattatctggaagtgtatgactgcgattcgctgactgatatgaacgaaacgctgtaccagcactgcgctgatacgatgggggctaattctccatatatcggcgtggagtatcctgtatatctccgtgatatttattccgtacaggaaccaggtaaattgacacgtatcggctacgtgagcctggtttatgaaaacgacgccgatggttatgtagctcaccattacacgctcgacaggaaggagctccctgacgaatggagcgccgtaagattttatggcggggagtacggttttaaaactgaggaaaaatga

SEQ ID NO: 391065 - DNA, 231 bp, Salmonella enterica
atgctgacattgagaggaacggaattgcaattccttctggggcagtgccgggagctgccccctctttcctttttaatcatcaccctaatgtgtcaggctgacgcgccctgcgggcttgtccaacccctcgcctgttcagaagcaagttctgagcagactcatggtttgcgcggtgggccaacaaaattaaatacgttcattaccaacgggaaggttcgagaatatttttaa

SEQ ID NO: 391066 - DNA, 303 bp, Salmonella enterica
gtgagaaatagagcaaacactccacctcgtgacgaggcagcatttattaacggtggcacggctggtcttggtactgccaaaaagtcatcagataaatcatcggttgtaagcaaagcaaaaccagtgagtatttccttttttgaagaaaatctaaaagacattgatgaccttataacggcagagatggtttcaggtaaaggcagagtgaatcgctctgatgttgtcagggctgcggtagaagcactgaaaaccttatcaaaaacagagatatcacgattgatagcagaagcaaaacaaagataa

SEQ ID NO: 391067 - DNA, 1194 bp, Salmonella enterica
atgtttgcgctcgctgatgtgaattcgttctatgcgagctgcaagaaagtttttcgtcccgacctgcgaaacaaaccggttgttgttctcagcaataacgacggctgtgtaatagcgcgaagtgccgaagcgaagcggctgggtataaaaatgggcatcccctggttccagctgaagacggcgcaattcccggaaccggtcatcacgttctcgagcaattacaagctctatgcatcgctgtcgaacaaagttatgtctcaccttgaggagctggcaccgcgcgtggagcaatacagcatcgacgagatgtttctggacattcgcggcatagactgctgcatcgatttcgaggatttcggctggcagctgcgtgagcacgttcgttccggtacggggctgaccatcggcgtcggaatggttcccacgaaaacgctggaaaagtccgcacaatgggcttccaaagagtggccacaatttggcggcgtactggcgttaactccgggcaatccccgccgtacagaaaaactgctgtcactgcagccagtggaggaaatctggggtgtgggccgcaggatctcaaagaagctgaacacactggggatcaccacagcactgcagctggcccgcacgaatccaacgttcatcaggaaaaatttcaatgtggttctggagagaacggcccgggaactcaatggagaaagctgtatttcactggaagatgcgcctccgccgaaacagcagattgtctgtagccggtccttcggagaaggtatcacgacgtatgaagccatgcggcaggcagtctgtcagcacgctgaaaagctgcgcggagagcggcagttctgcaggcatattgccgtgtttgtgaaaacaccgccgtttgccgtaaatgaaccctactacggtaatctggccagtgaaaaactgctcatccccacgcaggatacacgggacatcattgccgctgtcgtcagagctctggacaggatctgggtggatggtcaccgctacgcaaaggcaggctgtatgctgaacgatttcacaccaaccggagtatcgcagctgaatctgtttgatgaagtacagccgcgggaacggagcgatctgctaatgaagtcctggatggtattaaccattccggtctggggaaagtgtggtttgcggggcgaggcatcgcacctgagtggcaaatga

SEQ ID NO: 391068 - DNA, 405 bp, Salmonella enterica
atgaacacacagaacgtcaaggtcaaaaccgccaccaaagaatcttccgaaagatggggggcagacccaaaagcacgtctggcctgtgttatcgcagaacagcgttcgtacctggatgagctttgtcaggtctggaatcttcagttgagtcagaaaaatgaggcagaggaagtcctgcgcctgcttagcctgatgagtgacaacgttcataaggaaggcgtgctgtgctgggaacgttcatacccgctggtttcgtttcatgtcgtgcagccgtggttgcaggctaaagatcatgccatccgcttgtacggcgctatcgggcgtgaggcgtgggaaatcgcgcataaagacttacgcaacaacatcaattttgctcaggccatgctggacgttgaagcgcgttaa

SEQ ID NO: 391069 - DNA, 345 bp, Salmonella enterica
atgcatttacacctgaccgaatcttccgccctgttgggaatgcaggccaccgctgaggcagagcgggcgtactggctgagccgcgagaaggcggcagtgaaagcgcccgctgaaatcgacgtgcacgtctttcataacgcgctggggctgatgtacccgataaactggcgctgtagtgaggacggcgagtgtgaaaccttcatgctggcggaaatggtctgcggcaacgtgaccgaaatctatgcgaggatcggtatccgttattactggatgcgtgactacagcaaccttgaccacgcggagattctggcatgcgttaaggaggagatgcagcgccagaaatga

SEQ ID NO: 391070 - DNA, 321 bp, Salmonella enterica
atgtttatcatcttttttcacgatgaggctgaaaaagaattcgttgctctgcctgctgcaattcgagccaagatgtcacgcatactcgcaaagctgggggccaacccacgtcagcttcgtgagcctgataccaaacccctgggcaacgggttgtttgaaatccggacaatgggcaccgatatcgcacgaggattgtgggtatatcagagcggtgagcgcatttttttgttgagaattttcattaaaaaatcgcccaaaactccaccgacagagatagagctggcatttcgtagacttgaggagatgcagaatgaaatataa

SEQ ID NO: 391071 - DNA, 279 bp, Salmonella enterica
atgaaatataaaacacttagccaggtacatgctgaagcgatgtatgatcctgaataccgcgcagcgtatgaggctgaagaagcctcagagcagcttcgggagacattagcttcctggcgaaaggaagcgggcttgacgtctgcgcaggttgcagagcgcatgggtattaaagcgcctaccatttcacgcatggaaaagaacgcatcgcgtatgagcattgatacactggtacgctatgccagagcctgtggtgtgaactttaaaattcagcaagtttga

SEQ ID NO: 391072 - DNA, 258 bp, Salmonella enterica
atgtggctccgaccagcattatcttcattacaactcaatccgggtatattgcttctgctggagaacaacgttatgacatgtgtatccccggtaattattcttgagtcaaagatcggtgcagatgcagtcgggattacttcggcactaattataatgaaatggatgtccctgaatctggccaatatggagcctgaatattccagagttttcaaacatcttatcgctcgccagaatgctctgaagtattatgtcacctga

SEQ ID NO: 391073 - DNA, 387 bp, Salmonella enterica; identical to SEQ ID NO: 375037

SEQ ID NO: 391074 - DNA, 264 bp, Salmonella enterica
atggttatcatcgatcctatctttatggcagaattacgcaaggtttttcccagggttagtgataataagattgaaattgtcacctactttgtttacggaatgacctgcaaggatatcgcttttcacaaaggtgtcagccaccaggctgtgtcaaaagtgctacgtgaattctgtgaaatgtacaatatttcgaaactggacatggttaaggcagtatatgcagtacgccttgagctttataagcacctaagacctgcgctgtaa

SEQ ID NO: 391075 - DNA, 177 bp, Salmonella enterica
atggaggacaaaaacaagatttttttaccagtgggaaggtatgtaaatatgtttttggatatgacgacgtatgaacaactcaagctgcaggctggtaaagcgagtcggactattgctaaagaggccagacatattattgagcagcattttgagtctgacgagaaagacaaacaatag

SEQ ID NO: 391076 - DNA, 576 bp, Salmonella enterica
atgaaacgttcagaattagagaaggatgcaggctttattctgacatctatgaaaaacagggattatgaaattccaaccaataaaaaaatcatggctgtaatttttggtaggttaaagtacgtttacttgcagcagattatctttgttattctggcttttattatttataaggagtcaggtgatttagattatcaatttaaaaagctaatctatcttagcttgctttcttgcgtaacaatgcttttttttagtcttgtctttattggggctacatatagtaacgtatttatctttctgacattaggtgatgatgtaaaaagagagtcaatcttattgaagatcgttaagaataaaattgaattttatgcgcgacttttgtttattgtgaactttttagtcggctgtattttgttatgggcaggtgaaccttttgtcgctgggctgggattttcatggtttgtgacatttattgtaagtgctctttgcttacagggttccttatcccgatatatgacacctgcggtggtgagtagtttgtcaaaagtcaaagagctgctctccgcaacccccaaataa

SEQ ID NO: 391077 - DNA, 477 bp, Salmonella enterica
atgagggcaccagaacctttaacccctgcacacaacattgcagaattttgctgctcagagccggggttaaatgaatggctgagaaagaaagccttaaaaaatcatgcgactggtgtttccagggtatatgtaatttgtgcagaaaacacaaatcaggttattggatattattgcttatccacgggcagtatccagcggtatacagctcccggagcataccgacgtaatgcaccagactcactgcccgtcattgttctcggtcgattagctatagaccaggcgtattcaggaaaagggctgggtatagcattattaaaagatgcaatatatcgaacagaaaacatagccctacaggttggagttagagctttaattgttcatgcacttaatgacggcgtgcgaaatttctataccaaatttgcctttgaagcttcacccctacaaccgctcacactattctacccaattaaaatttag

SEQ ID NO: 391078 - DNA, 537 bp, Salmonella enterica
atggcgacaggtaaacaaaaaaatacaccggtcattgtgatgaagaaaaaacgccacattatttctccttcaccaacggaggaacatgcaatcactcctccgcctccggagcttccttccgggactgtggaaaacgaaatgccggcacatcaggcgaaaaaaaacaaaaaatggacgccggaattcatcaacaccagtctcgaaaaggttaaggcgctctttcccctgttgcgggctgaagaaggcggtttccggccactgaaaattggtatcaccagggatgttaccgactttattgcacagaaccccgacgccggtttaaccctcccggaatggcagtgtgctgcccggattatcacccgcaggtggaaataccttgagcgaatttctgttcccggtgccttacggtatggcatcgatggattacctgccggtgtcgtttctgagcatgaagctcagcatgcccgcgcttttctggcatcaaagctggccagcaaaaacaaaaataatggggcgaacgacaaatcatcaacataa

SEQ ID NO: 391079 - DNA, 426 bp, Salmonella enterica
atgccgatgaaactggtccgcaaaaaaaatcccaggggaggcctgttccgctggcttacgcgtgatgaagaattagcagtaaaaaatatttcaggactcagggactttaccgatcggacacaatatacgctgaacaataacgtcctccgggaaatgcgtcagcttggtgcctggttacagtgcgactgtattccgggggattcaccggcaatgaacagtgccaatctgtacagggataccggaactctttttctgtccggatttaaccatgagcatgctgctgactgtcctatgtatcgcccgttcagtggtgatgccggagccacctcttccgggacacgaaaacatgctggggtcagtttggagatcggaaatttttgtacgttaagcgcattatttaaccaatcgtggtgcgtaagggattga

SEQ ID NO: 391080 - DNA, 381 bp, Salmonella enterica
atgcagaaaaatgtgactcccggcaggcgaaaaggctgccctaattattctcctgagtttaagcagcaactcgttgctgcttcctgcgaaccaggaatatccatttcaaaacttgcgtttgaaaatggcattaacgccaatctgctgttcaaatggcgccaacaatggcgcgagggaaagctgctattaccttcttcagagagtcctcagctacttcctgtgactctcgatgccgctgccgtacagacagagccgcccacagagaacccggaagccctcagtatcagttgtgagataacgttccggcacgggacgctccgcctcaacggtactgtcagcgaaaagcttctgactctgctgatacaggaactgaagcgatga

SEQ ID NO: 391081 - DNA, 348 bp, Salmonella enterica
atgatcccgttaccttccgggaccaaaatctggctggttgccggtaccactgatatgagaaatggcttcaacggtcttgccgcaaaagtacagacggcgctgaaagacgatccgatgtccggccacgtcttcatcttccggggtcgcagcggtagccaggtcaaactgctgtggtccaccggcgacgggctgtgcctgctgaccaaacggctggagcgcggtcgcttcgcctggccctctgcccgtgatggcaaagtgttcctgaccccggcacagctggcgatgctgatggaaggcatcgactggcgacaacctaaacggttgctgacatctctggccatgttgtag

SEQ ID NO: 391082 - DNA, 324 bp, Salmonella enterica
gtgccggaaatagcgggggaattactgaaaggaataatgcgacgcgcctggccaagcaatgtgcgcgaactggccaatgcggcagaactttttgctgtcggcgtgctaccgctggcggaaacggtcaacccacagttgctccttcaggagccacccccgcttgaccggcgcgttgaagagtatgagcgacaaattattaccgaagcattaaatattcatcaggggcggatgaatgaagtagcggaatacctgcaaattccccgtataaaactttatctgcgcatgaaaaaatatggtttaagtagaggacattataaattctga

SEQ ID NO: 391083 - DNA, 309 bp, Salmonella enterica
atgctcaaacctattttctacagtacaagtacaaaggttccgcaatatccggaaacagataaggcagaaaatgccggatgtatctctctatcttcagtcattcagcatgttaaaaatgttgttgaagatgttccagcatttccagaaagcagaacggtgagtggttctgttagcgcagcgtacaggctttcttttgaagaggcattttgcggtctcagcaatgaaaacgtaaaaaggtgtatggtcgtctttttggaaaaaaagtacttgcacatattaattccatctatcagcgtgacgctgacttaa

SEQ ID NO: 391084 - DNA, 201 bp, Salmonella enterica
atgcaacacgaactacagcctgattcactggttgatttgaaattcatcatggctgatactggcttcggtaaaaccttcatctatgaccggatcaagtccggcgacctgccaaaagccaaagttatccacggccgcgcaagatggttatatcgtgaccattgtgaattcaaaaataagctcttaagccgcgccaatgggtaa

SEQ ID NO: 391085 - DNA, 285 bp, Salmonella enterica
atggctaacctgcaacttgccgtcaaaggtgaatacttcgatgccatgattcgtggagagaaaacggaagagtatcgcctgtgtaatgactactggaaaaagcgcatcgttaaccgtaagtatgaccgtctgatcatcacaaagggatatccaaagcgcgaagactccagccgcagaatagacaccacgtacaacggctatgaagtgaagacaattacacatcctcactttggcgataaaccggtaaaggtgttcgcgataaaggtgaatatcggcaatgaataa

SEQ ID NO: 391086 - DNA, 246 bp, Salmonella enterica
atgagtgtcgtatccagttacccggctgttcagcaaataaatttctacgttaatgaagcctctccagaatgcattgaaggtagaagagcatatctatgccaatgtcttttgcctcggctgaaagacgggctttcttcaatgcatatctggaaagagaaaaccgatgatgaccttgagctcatcagcatttatcaaaaaggcgttgattttttaactgaggcattgaatcaggggatggaccaatga

SEQ ID NO: 391087 - DNA, 456 bp, Salmonella enterica
atgcaagaggtaaaaatttacaccgcgtccccatctgatttatctccaccagtccagtctgaatcgttctgcgttgacatggttctggcgtctgattatgcggcactggaagccagatgcgctgcgctggcttcggagaatgcacttgctcgtaatgcagttcaggcattctgcgatgttattggcaacaacaccgaggttatctccgaggaggttgggcgagatggcgttctggttattttggaggccatgaaggcaacaggaaatatgccagccaccgacgctttcctggctgaagtgcgggcgcatggtgtggaacgttacgccgcacaactcaaatcagaggctgaactcgccgacgaagctggctgggacggagccgccaaatttttaatttctgaatctgaaaaagtgctggcattcgcagcccaacttcgtcaggaagccgcccaatga

SEQ ID NO: 391088 - DNA, 801 bp, Salmonella enterica
atggcaaaaaaacctacaccagaccaggtaaaaaagattcgttctggcattaccaagaaaatacggtttgaggttttcaagcgcgatggcttcaaatgccagtactgtgggaattctgctccagatgtcatccttcatgtcgaccatatcaatcccgtcagtaagggcggcgataacgacatgatgaaccttgtcacttcctgcgatggctgcaatggcgggaaaagcgacaagatgctcaacgaccactcaataatggaaaagcaaagacagcaactccaggagcttaataccaagcgagagcaactggaaatgatgatcaagtggcgagatggtcttaagagactgaaagatgatgttgttgatatcgtcgctaccaaaattgaagattgcattgcgccatttaccgtcaacgacaatggacgaaaatccatcaagagatggcttcgaatatataaggttgaagaaatcctcgatgctatcgagcttgccgcagacaaaaaacttacccaagaaataacccatgagcttactggcgaattctttgagtacatccctcgcatagtagcgactaaaagaaaacctcctgaagagcaaaggattctatatatcagaggaatccttaaaaaccgcatatacatcaatcaaaaccatgtgatgagttatctcaaggcatggctttcatacgacttagatctcgatgaacttaccgagtttgcgaaaacagtacctaactggacaacgttcaaggagtgggtgtctgaacgcattcgtgaagctcaagaagaactcccgtactaa

SEQ ID NO: 391089 - DNA, 888 bp, Salmonella enterica
atggcacgttcaagaaatatcaaaccaggctttttcacaaatgatgaactggccgaatgctctccatatgcccgcctcctttttgccgggctgtggactattgctgacaaagaagggcgattggatgatcgccccaaaaaggttaaagcgctcgttctgccgttcgacaacgttgactgtgatgaacttcttcaacagctacatcagcgtaaatttatcaatcgttaccaggtaaatggtgaaggtttcatccaaatttcaaactggaagaagcatcagaatcctcactgcaaagaagcggctagtgagataccagcaccagtagagaacaatgacagcaccggacaagaacagtgcaagggcgacaaagaggaagataagaatggtgctgcatcaactcaactcattgaaaatgatgaagtaccagaaaagcactatgcaagtacagtgcaagaaccagtagagaacagtttaaatcctgctgattcccttaacctgattcctgattcccttaacctgattcctgattccctttctaacacccaagccgctgacgcgacttgtgaagggactggggctgatgtccataaaatttcaagtcgctatgcattcgaaggaaatatcgttcggttaaaccacaaggactacgaagcatggaaacgcctgtatccgaacattgacctgaagtacgagctggaaaggctggatatcgaatttagccatgagaagccaaagaactggtttatcactgccagccagaaactcagctaccagaacaagcaagcgttatccagaccggtacgcaaggttgctaatggccttcaggctgatggttttgccaccaaggactacggacaaactgaaatgccttcatgggcgcaggagtga

SEQ ID NO: 391090 - DNA, 306 bp, Salmonella enterica
gtgaaagacaaaggtcaaatgcgaggtatagcagctttcgttgcaactaatcctggttgcttttgtcatgaggttatagcaggaaccggcattcagaaattctcagttacatctgccctaatcaagctggtaaaacgcgggaccctacggagggttggcaatccaaagcattaccggtacttcatagccaccaaggccgaagtaattgtgaatgatatggctattaagccaggagactacgaccacgataggccaaatcctttgagtgcaatgttcaaccaaaagctacgtgaggttagacgatga

SEQ ID NO: 391091 - DNA, 489 bp, Salmonella enterica
gtgaagttcgaagatatatttgaatacaaccctgataccggtgaattgaagtggaaggtaagtttttcaaaccgcatcaaggctggagataaagcagggtcagaaaaaaaagacagtggctacattcgattaaaacttaacggaaggtcttaccaggctcatagaatagcttggcaaatatgccatggagaaattccgtcaggaatggaaatagaccatatcaatagcgttagaaatgataatcgaatatctaatcttcgccttgttacgcatcttgagaatgttaaaaatcaaaagaaacactgcactaacgtatctggcgtgatgggtgttagttggaacaagaagcgacagaaatggtacgcgtatatccatgcagatggaaagagaaagtatcttgggtattacgactgcatggaaagcgctgtagctaagagaaggcaagctgaaaggcacctcgggtatcacgagttgcatggaaacaaatga

SEQ ID NO: 391092 - DNA, 522 bp, Salmonella enterica
atgctaagcgaaacagcgaaagatatcgcaggatatgaaggtaaatattccgtaactactgatggccgtgtttattctcattcgagagttgatgcgtgtggaaggttacagaagggcagatggcttaagcctgttaatcatagtgatggttacttgtatgtaaatctccgcgacaaaggaacacttaaaaaacattacattcacagggtagtggcggatgcattcattgataatccaaactcgcttccacaggtaaaccacataaatggaatcaagtctgacaacagagtagataatcttgagtgggttactggctgccagaatatggtccatgcaagcaaatcaggattgctaaaccccatcagtggtgagcgtcactattgtgcaaaactcactactgagcaagtgaaagaaatacgtgcgtgcaaatcaatgtcacagcgtgaaatggcgagaatgtacggcgtatcaaaagcaacaattgcaggaattcttaacaataagacatggattatttattaa

SEQ ID NO: 391093 - DNA, 147 bp, Salmonella enterica
atggcactcaccgacaaacaagagatgttctgtcgcgagtacctcatagatttaaaagtcacgcaagcggctattctggcgtggtacagcgcaaagacagctaccgtactgcgtcagaaaacctgtcatgcagtccagaattgctga

SEQ ID NO: 391094 - DNA, 1773 bp, Salmonella enterica
atgtcagacatcacagccaatatcgttgtgtccatgccctctcagttattcactatgccacgctcatttaaggcagtggcaaatggtaaaatttatatcggtaagattgacactgatccggtaaatcctgaaaaccagattcctgtatatctggaacgagaagatggtactcatgttcaggtgccacagccaatcgttatcaacgctggcggctatccggtatataacggacagattgccaagttcgtaaccgtgcagggccactctatggctgtatatgacgcgtatggaactcagcaattctactatcctaatgttattaaatatgaccctgaccaattacgacaagagctagcgggaccagacggatatcttttggttccttcagtattccctgaggctgacaagaaaagatggaaagatactggtgacataagggggtggggagcggtagagggagaagattgttcagaggcattgcaggcagcaataaaagacagggcagcaaaacgctggggtactagttctgatgtgatcattgatgggtcatacagaattgataaaaaagtactaatacctactaatctgaggttgaaaggtaattgggccacaatcacatctagcttgaatgatttcatttttgaatcagcttacgtagatgaaaatggtgagttagtttcaaactggtatttatctgatgatgaagcgatcgcaaaagctagactgaaaggcaccacaattactggaataacgtttgtagattgtgcaaaagttatgaagtttagaaatttcaatgaaaggtgcggcctacaagatttatattttgaaaggtgtggtgtggcatgggaaatggttatgccattttattcatttttcaataacatctttataagaacaacaaaaactggtttcgaggattactatgcttatagcatgggtaggcaaaccaatttggttgatatgtttaaagtaacaatatctgagagaaagtatggcacttatttcggtgataatgatccgcttccagggaaaaagaatgtcttctatgagatggtaacgcttaggcagtgttcatgggaacatgttgactttcctttgactcttgatattaaaggatactcactaagaattgaagacttttacgctgaagttgtcagtggacctctgtttagggtgttatctggtgatcagtatgatttaagtattggtgagccgtcatgggttgctggtgttgaaaatatgggagaatttaaaaatctaaaaggtagaagtataatccatcaagcaatacagaacgatcatacgccaccaaaaccatcctctttattgtttattgattcaatatgtaaagtttacactgcgaacagcaatggttatggaaatcgcattaactatgacagtgctagtattatttcttttgagtttcccatacaagaaaaaataaataatgtaataaataacgaagccattacaaattcattaggctctgttgccgaaaatatatcaaagcaaaatgtttcctcagttgtgtctggtgatgttttgcttagaactaagataaaaaacaacttacataatatattggccataacaataaatatcaataataatgagtgcggagctttattcataggggatcagttgattaaacagtatggttatacattttttattagtggtgattctgatggtaatacatctgtaagtattacagggactggtattgtttctcctgatgatgtcgttattacagggtgcattaggtatctttag

SEQ ID NO: 391095 - DNA, 276 bp, Salmonella enterica
atgcatacctttagaccatactcactaaggcatagcgacctgttatatgaagatattccgttagaaatacgagagcagattattttgttgattattaatacgttagggagttgttcctctttttatgacatgacattatactgttatcataacagtcattctgacgaagtttatcgaagaatatgtaagactctgcgcaacgcaaagagtacggcttattcaccctctatgagcattcaacgtcatatctggatgaaattagtaatttgttgttaa

SEQ ID NO: 391096 - DNA, 360 bp, Salmonella enterica
atgagccgtcgcggtaactgtcacgataacgcggttgcagaaagctttttccagttactgaaacgcgagcggataaagaaaaagatctacggaacgcgggaagaagcccgcagcgatatttttgattacatcgaaatgttttataacagtaagcgtcggcatggttcgagtaatcagatgtcaccaacagaatatgaaaaccagtattatcaacggctcggaagtgtctggattatccgtggcgattcaagccaattaaaacagaagagtgtagtagaggtctatatctattccagacatccggtgtccgcgttgggaatgggtaaatcgtcagatgaggttgaggtatacatagaataa

SEQ ID NO: 391097 - DNA, 648 bp, Salmonella enterica
atgtttttaggatcacttcgtaaagcaacaaaagcaggttgggctcatagtaaatttggctatttccttggtaaggttgaatccaaaaatgattacagcgcttataatgttcatgtcacctacaaatcacattacaaaacaaaactaacgagtatgacaatcaaagaagttatgacttctcaggatgatgaaacttctaatggtatgtttgctactggaagattccagatcgttcctaatactttaaaggaagctgtggataaacttaacttagatgttaatgctttatacgatgaagaaatgcaggataaaatatttaacgaatatcttataaaattaaaacgtccggcaattataggttttctcgagggaagtggaagcgttgaggatgctatttatgattgggcaaaagagtttgcatctgctggcgtgagaaaaggtaaagagatcagtccttcgaaaactgagttcgaaaaaaatccggattgttcttttgtaagggataaaaaaggtcgcaaaatacacaaaaaaagatatgcacagtcagagggggtgtcttactattcaggtgatggtataaataaagctcatgttaagcctggtgatatggttagaatacttgaggaatcaaaaaatgaaggttgttaa

SEQ ID NO: 391098 - DNA, 582 bp, Salmonella enterica
atgaaggttgttaaatttatttctactcttattattgctgtatgtttttctactattgctaacgaaggaaatatccctgaattcaaagattataatatatctttaagtgatgggccatttgcaacaaagataaatttaacaaatgagcaactcagaaaatccgaagagtggaaaagaataatgcaaaggcagcttaatgagaaaataaatttcgcagggcattatcgtctttacatcagtgagaaaggtcaacttcctgaagactgtggtgttaatggttgggtttgtggttggatagttgataaagaaacaggaattgtggtttcagagttgcccttattcaatggcaatactaaatattactcaatcattgataatggtactccatcacctgattcattttttgctgagttttaccctaattgtaatttaatttggattagcggggagaatatcccagaggaaaagattgggaatatatccttgggtgataaaagatgctcaaacagtgcttatctatttaaagataattcattttataatatttttaacggtgaatgtgaaatagacaatggaggttaa

SEQ ID NO: 391099 - DNA, 378 bp, Salmonella enterica
atgcaagaaaataaaaacattataacaaaactgatgatagccttcctttggtgcatcaccgtcctggtagtacaccattttggttacgaatggtatatggcatattttacaccaaggaataggggggtaggacttgggtttgtaatgttctatatgaaatatgttatcattcctattatatttctgtctgcatttataaaaccaaagcgctcttcagtaatctttggcttggttactatcttcatgctttattcatggtatgaaaccaatcctctcagggttatattaatgcttatctcctgttcggcaggatatgtattagtgtttttattgaagagtgtgcaggaaaaaagcagaataaaccgttccaaagcataa

SEQ ID NO: 391100 - DNA, 486 bp, Salmonella enterica
atgagagataccttccatcatgcagccgtcgcccataaagacgtaagtaaaatggtcaacgatgtcgtgacccggacggttaaactgcgccgccagcgttttctcggcaatcgccataccgacggcgttggcaatgccctgccccagcgggccggtggtggtttcaacgccagcggtgtaccctacttccgggtggcccggggttttggagtgcagttgacggaagttttgcagctcggacatcggcagatcatagcctgtgaggtgcagcaggctgtaaatcagcatggagccgtggccattagacaacacgaaacggtcgcggtcgacccaggacgggttggtcgggttgtggttcaggaaatcacgccacaggacttcggcaatgtcagccatacccatcggggcacccgggtgaccggatttggctttctgtactgcgtccatgctcagcgcacgaatagcattggcaagctctttacgtga

SEQ ID NO: 391101 - DNA, 2358 bp, Salmonella enterica
atgagtggatcactgatgaataaaggactcagtctgacagaaaaactgatcggccagtcacgttatcgggttgatgtgcatgaatgcagccatttcctggatgtgttgcgttacagtgcggtggagtccctcagccagccctggcggtatgacgtggcggtgacctgcacctctgcggatatcgcctgcgacacgttactgctgaagccggcgtcattcactttccagacccccgtgtttggcggaacaccggccctgcctgtaaggacggtattcggcgtggttgagtcgtttcgccgcgtgtctacctcgaatgatgagatccattacgcgctgacgatcgttccccgtattgcccttctgggctatacgaaagggagcgagatctacctcaatcagtcggttattgaggtggttgaacaggtattgcgtaaacacgggctggaagggcctgattttgagttccggctctcccgggaatatccctcccgggagctcattacccagtggcgggaaactgaccttgagtttatccagcgcctgctggcggaggtgggcatttactggcgctatgaaatggacagccgtcttgaacaggacgttgtgattttccaggacagccagcagcagtatgaatttggtgtcacgctgccattacgcaaccaggccgggatgagtgacagcgggcaggagagcatctgggatattcagaccgcatataacgtggtaagcggaagtgtggccacccgtgactacaactaccgtgatgcactgacgcctcaggacagcgccgaaagtattttcagcaaagaggggatcacgaccggggaaacgtatcattacgcggaacccttcctgacggcaggtgacgctgatagcccggagaccggggcatacttcgcccgcctgcgtcacgaacgcattctgaacgcgcagtatcgcgtcagcgggcattcctccagccctcatctggcgccggggcaggtactggaaacagatggcacgttgccggatgcggtgaaagacggaattgtcatcacgaccgtacgtaccagcggttcacgcaaaagtagctttacgatgacgtttgagggtatcccctatagcgaaactgtctgctggcgccctgcgttgcttaatcgcccggtgatatccggctcgctgcctgcccgggtggaaagcacacagaaaggcgacacctattcctggctcgatccgcagggccgctaccgtgtgaaactggactttgaccgcaacagtcctgaacagggttatgcctatttgtggctgcggctggcgaaaccctatgccggtgatacgtacggattccactcaccgcttatcgaaggaacggaagtggctgtcgtttttgacggcggagacccggatcgtccctacatcgcttatgccctgcatgattcagagcatccggaccacgtcaccagtgacaaccatacgcgtaacgtgtggcgcacgccggcgaacaataagctgcggatggaggataagcgccaggaagagcatatcaagctcgcgacggaatacggcaaaacgcagctgaacatggggcacctggtcaacagccagcgtgaaaaacgcggcgccggttttgaactgcgtacggatgagcatggcgcagttcgtgcagcaaaaggtcttttcctgacagcagatgcgcaggccaaagcgcaggggccggtgcttgaaatggcaccagccgttaaccagattaatcaggccaacagccagatgcaggcgctgaacagcgccgccgaagcggccggagcgctggtatccgatatcagcacccaagtcaacctggtcagggacaggctgaaggatcttcagtcggcggtactgctggcgagcgccccgcagggcgtggcatttacctcaggtgaacaccttcagctcagcagcgcccgcaacacgatgattaatgcaggccagcaccttgatatcggagcgatgaagaatctgtccgtgagcgtggaaaaagccctgggaatgtttgtgcataaaggcggggcgaaggttgtcgccaaccagggagacatcgagatcctggctcagcacaataccatggcattgttttcagaaaagcagctgacggtgaccagtagcgaagacgaaattattatcagcaccccggaaacgctgacacttaacggtggtgggtcatatctgcgcctgagtaagaacgggattgaacacggttcctccggtgatttcattatgaaaacatcaaactatctggtgccgggtaccggcgcaaaccttcccaatgaaacaccgaacttcagcctgacggatattactcaggaaagcaaaatcagcagcaaatcatttaatgattga

SEQ ID NO: 391102 - DNA, 234 bp, Salmonella enterica
atgatatatctgagcaggataaaaacctttttcctgaacgaaatcagatacccaatgagtaccattaaacatcgccatatgaccatgcacatgatgtggtgccgcctgaatgacaactacatcacccgcttgctgaccagaaattgtgaatacaccgccactactaactgttgtggcgttatctgcaactttaaagttattttcaatcagccatggaccatagtttttagctga

SEQ ID NO: 391103 - DNA, 144 bp, Salmonella enterica; identical to SEQ ID NO: 380269

SEQ ID NO: 391104 - DNA, 288 bp, Salmonella enterica; identical to SEQ ID NO: 375310

SEQ ID NO: 391105 - DNA, 768 bp, Salmonella enterica; identical to SEQ ID NO: 375314

SEQ ID NO: 391106 - DNA, 249 bp, Salmonella enterica
atgccgggtgcggtggattttgctaactacgttaacagccacggcggcaccatgttctatgtgtcaaaccgcgacagcaaaggcaacaaccgtagcaagtttggtacccagtttatcgtactgccaaacccaatgtacggcaactgggaaggcgctctggcaccagactacttcaggctgaaccccaaacagcaggtgcaggttcgtgaaaacgctcttcgggcttggtccgggaactgcggacagtga

SEQ ID NO: 391107 - DNA, 669 bp, Salmonella enterica
atggttccaggcgaggcactattaatcccatcccggctgaaggagcatttcttaaagcataatagatataaacagaaaacagttgatatcacagaggatgtagtttctcgctatttatatataacccagcaaataccttcaaaggtatgtcgggaacgcctaattttaataaaaccatcaccaaaaactcatgatttactgagcactcttatgtctgctttagtcaaagataaagggatgaacaccagcccttgcttaagggatatgatttatttcctctgtctctctgtcttttcgcatgatgaaaattttccaggttttctaatggggtgtataattaatttatcaggtaagattgggcttttaattagcaaagacatttcaaaaaactggcgattatatgatgtggcagataagtttaatatgagcgaaagtttgattaagaaaaaactgaaagaagaagatacatgttttagtaagatactacttgataccagaatggctacagctaagcgccttctggagttaactaattgtaatataaatagcatttcataccaatgtggatatcaaaaggtctcttattttatacgtatatttaaacagtatttcggaactaccccaggtcaatttaatatgcaagagcaccctgccgaaaggaacaaataa

SEQ ID NO: 391108 - DNA, 192 bp, Salmonella enterica
atggattttgagtcacatatagataaagtggacttatccttttttaacaaaggagagaatggacataactttattaagtttgttaatggtttcagtggtcaggcaggcgaagccacattaacatataatactaataataatcttagtgagctggcgttgaatattcatggtggttcgagaaaaaactcttaa

SEQ ID NO: 391109 - DNA, 975 bp, Salmonella enterica
atggtggttcgagaaaaaactcttaacttagccattcgtgtggtcagtgcttatattgatattagttacgccagagataaaattgaacttgctaaagcaaaaaaaacttcatataaagaacagttaaaaattaatgagcgcttgttggctgctggtgaagggacggttactgatgtgttggaaacacaggctcgttataatttgtctgaagcacaacttattgaagcttacgatgatttggatgctgcccagcgtcagcttgagtggattgttggagtaccgcttgatcagttaagtgcttttgaagttctgcgtcaaggtcctttccaggcattaaccatgacatatttaaaatttgaagagtgggaaaaaaaagcactggagaaaaatccactattggcagctttacgacatggagtggaagcagcaaaatatgaaattgagcgaaacagagctggttttatgcctaatattcaactttatgcctctcattcaataagtaactccagtaatgataatactgtgaatcagcggtataatactagcagcattggtttacgcgtaagtattcctctttatgatgggggggggactgctgcctcattacgtcaggcaacagcgcgttatgggcaaacacaggctgaaatggatgttcagataacttctgtgattaataatttgcgaaaacaatttaacttatgcctcaggagtcgtgctatgatcaaagcatatgagttgacagtacagtcggccagggaacaggtcattgcaacgcgccaaagtgttattgcagggcaacgcgttaatatagatgtattaaatgctcaacaacaattgttcagtgcgcagcaagatttggcttctgctaaatatacctatatcaagtcatggataacgttgttgggggaatctggtttacttgaggagaatgatgttaaacaaatcacaaattattttgctcctccatcctcataa

SEQ ID NO: 391110 - DNA, 1041 bp, Salmonella enterica
atgcttcatactaccaatcccgtcatcaaacacaaagccggtttgctcaatctggctgaagaactcagtaacgtgtcgaaagcctgcaaaatcatgggcgtctcgcgagatacattttaccgttaccgcgaactggccgatgaaggcggcgtggatgcgctgataaatcgcagccgtcgcgctcctaacctaaagaaccgtactgatgaggccactgagcgagctgttgttgattatgctgtcgcattcccggctcatggccagcaccggaccagcaacgagctgcgcaaacggggcgtttttatctccggcagtggtgtccgttccgtctggttacggcataatcttgagaacttcaaaaagcgtctgaaagcactggaagaaaaagtggcccgagatggcattgaactgaccaacagccagattgcagcactggaacgtaaagccagtgatgacgaagcctgtggtgagattgaaaccgctcatccgggttatctgggttcacaggacacgttctatgtgggcaatctgaaaggcgtcgggcgtatctatcagcagacgttcgttgatacatactcgaaggtggctcactgtaagctatacgtcacaaaaacaccgattacagcggcggatttactgaacgatcgtgtactgccgttttatgcgtctcagggtctgccgatgctaaggatactgacagacagaggcacggaatattgcggtaaagtggagcagcatgattatcagctttatctggcgataaatgatatagaacacacgaaaacgaaggcgatgtccccgcagaccaacggcatctgcgagtggtttcataaaacgatactgaacgaattttatcaggtaacgttccgcaaaaagctgtatagcgatatcgacacattacaatcggatcttgatgaatggctggctcactataataatgagcgaacccatcagggaaaaatgtgctgtggccgtacaccgatggaaacattgcttgatggaaaacgcatctgggctgagaagaatttaagccagatgtaa

SEQ ID NO: 391111 - DNA, 555 bp, Salmonella enterica
ttgtcacggcactcccaacgggaacttgaacgtttctatggtgagattgaaaaagcagcttattattttagtaacaatcagaccattaaagcttggattctaaaacttgctgagaatacaattcgtattgctggtttattgcaatattttaccgatagcaataaaaatgaaatatctgatgatatgtttgaatgcgcgctcaagattgccaagtattatgctaataacacaattcatttatttcttaccacttttgcttcatctgaacaggatgctgaaaatgtatatacttggctaaaaaatatattacctccccctgacttgtttgaaggtatgtttgatgatgtaaaacaaaaactatctgatgaagagtcgaaaatacaatatataaaaagagtcgatattcaaagacggataaataaaatttatttgaggaaagatggggctcgcttaaatgcagctttaaaacgccttgaagaagaggatagaatatggatagacaagcaacgaaacgctaacggtagtgtgactgagaaaatatatttaaagcagtaa

SEQ ID NO: 391112 - DNA, 561 bp, Salmonella enterica
atggctgacgttcccggctttatcctccaccatcaccgtcagcgtataggcgccgtcattccacggcactgtcggcgtaaagctccactgtccctcgcttttggtcagcgctacctctttactcttgccatcatgcgttacttgcaccaccacccggatcgcatcggcatcaatattatcgagggtaaagcctggctttttcgcgttggtgatattatcgtcagtaatcccgctatcatccttatggtccagtgcaatggtcggctttgtcagcgtggtatcaatggtaaatgccagcatctgtgtggtggtgttgcccgccttgtcagtcgcctccacctgcagggtgtatttcccatccttcacctcatctggccaggtataatcccagatccctgccgcgcccttcgttgcgttaacccatgtagtgccgccatcaatgctcaggcgtaccgcgttcacatcttccggcaccgtcacccggaactgtggatgactgtcattagtcatattatcgccaacgacgctgctgtcattaaccagctcaaccttatcaattga

SEQ ID NO: 391113 - DNA, 936 bp, Salmonella enterica
atggtcaatcaggccgcttttctggcaccgcaaattacgtatgcatgtggagtattatttatattaccgctgctcctttttttaacgcattgggtattcagactaaaggcaaggaaatattacaccctactagcaacgcaaaccaaactggcagcttcggtggccgtctccttaggcctgattggtacctttatggggttaaccgacatggtttcagccatttcaggttcgctagggggagaaggcgatcttgcggcaaaaatgggggcaatgatttcatccatttcatcggcacttacagcaatgtcatttgcgttcctgacatctatattaggtgttacggtatcagtattacttttggtaagcctaaacttttgggagttttactacgagacggagaataatgctgaaaaaatgtcagggaatataccttcagaaaatgagcttaatgcgttactcaatagaataacgttgctggaagaaattaataccaatatcgcaaacaaactgatttatattccagaaaatacagaactggcagagttattagtggtaaacaacaatgccatggccgagaatttgatacaaataaacaccactattaaaaatattgaaaaaataacaaaagcatttactgagataagtgacagtgcgcttgttagtattaatacatcactaatggatgttaatcaaagcaatatggtagctaatgaaaaaattgtcgctggtaatgagcatttaatggatttaaatgttggtgttaacgcattgctggcattaatgaagaaaaactctgaatttaacgaggaaatggaaaataagaaatctgagcagcttaaagtcattattgacaggcaggaaagctatttccatgaacagtataagtttaagaataaaatgagacaggttgtagaggtactgactaatgaaaactaa

SEQ ID NO: 391114 - DNA, 294 bp, Salmonella enterica
atgaccacgtcctggtccggcagcggattaccgctgccgtccgtgacggtgaagcccacctgcacaggcgtggtaccgtcggccggggccgggctgccggtgaccaccggagtgccgtcaaagcgggcgctgcctgtatccggcacaaactgcaccaccgcctcctgcttctggccattcacctccgccgtgacggtggtgttcccggcccgggtgccggtcacgctcacctgggccactccgctggcactggttctgaccgtgacggtacgatccgccgtgccgtcattgtag

SEQ ID NO: 391115 - DNA, 816 bp, Salmonella enterica
atgaatacattttatcaattatggggagctaaaacgccgcaggatgctttagagataatcaatgctcaacgtgcaggctatttacatcaaccccctatgaatttagaagagaaagcaatatctcttgtagggaaagatatatatgaaattctaattaaaggctatacagaaaaacaatgggggcggaatgctacggagctaccgtctttcattattaatcgcctacctgttagattttcattcgacaataactacttttcagaccgctatcaaggaattcctatcggtggatatacaaaaatatttgaaaaattattaagcggaattgatattgaatttggtgtggattatctgcgcaataaagtaaaatataatagtcttgctaagaaagtgatatatacaggcgcaattgatgagtattatgattacatatatggtgaattggagtacagatctttaaagtttgagcatataattttggacttggagaactatcagggaaatgcagttgtaaattatacggatatagctataccttatacacggattattgagcataagcattttgattttatagagtcttctcatacagtaataacaagagaatatccatctgcttggaaaaaaggagatgatgcttattatccgattaatgacaaaaaaaacatggatttatttaaacgttatcgtgcattagctacggaggaaaaaaacattcattttggaggacgtttggctgaatataaatattatgacatgcaccaggtaattaaagcggcattaaatttcgttgaaaactcttttcgtgaaagttaa

SEQ ID NO: 391116 - DNA, 438 bp, Salmonella enterica
atggataatgttgcagaacatttatcgaaaggtaatgccttaatttctgaaaataacgtgatgttagctcaattaaaccatacacaagactctatagataaaaagaacgatacagtaattgcatcacttgatagatgtcatcaggaatctgtttcccaaagaaaaaccatagatagtattgctatcgaaaacgtaaaggttactcaccttgtcacagagatgaaagctgccatagatgaggatagtaataatattcattcagcgttatccaacttatctgctgcagatgaaaaaattattgatagaacaaaaatgataggtgctgaaatagttagttatcgtgaaacatatatcccattaatggaaaaaataacgttgatgcatcagaaattattaaagcagagcttattacattatgaggtaaaaaatgaagattaa

SEQ ID NO: 391117 - DNA, 567 bp, Salmonella enterica
atggcgatggcctgctggatcggggtgctggcggtggtggaggccgtacagcgcgtctcccgcagcacaaaaatgccccccggctactggggcatggtggcggcgcacctcggcctggcggtgacgattaccggcatcgccttcagccagaattacagcgtggagcgtgacgtgcggatgcgggcgggcgacagcgtgaccattcacgactaccgcttcaccttccgggaggtgcgggacatcaccggccccaactaccgcggcggggtggccctcatcggggtgacgcgccacggcgagccggaggcggtgctgcatgcggagaaacggctctacaacaccagccggatggtgatgaccgaggcggcgattgacggcgggctgacccgcgacctgtacgccgcgctcggggaggagctggacaacggcgcgtgggccgtgcgcctgtactacaaaccgtttgtccgctggatatgggccgggggactgctgatggcgctgggcgggctgctgtgcctggcggacccgcgctaccgccgccgtaaaccattgccggaggccggatga

SEQ ID NO: 391118 - DNA, 294 bp, Salmonella enterica
atgaccacgtcctggtccggcagcggattaccgctgccgtccgtgacggtgaagcccacctgcacaggcgtggtaccgtcggccggggccgggctgccggtgaccaccggagtgccgtcaaagcgggcgctgcctgtatccggcacaaactgcaccaccgtctcctgcttctggccattcacctccgccgtgacggtggtgttcccggcccgggtgccggtcacgctcacctgggccactccgctggcactggttctgaccgtgacggtacgatccgccgtgccgtcattgtag

SEQ ID NO: 391119 - DNA, 240 bp, Salmonella enterica
atgtttgtcagcaagaagtgcctggatctctttagtgtattcgtcgaccggtttgcacaccatcttgataccaagatgatctattcccttgctgttattccggccatcaagttcgtgatggccttcaagtccttcgaggtatatttctatgaaaagctcagggagatcgacgattcttctctcactgtgcagaaattccttgatgcattctgtgttgaagagggtttcaagcccaagtga

SEQ ID NO: 391120 - DNA, 309 bp, Salmonella enterica; identical to SEQ ID NO: 380256

SEQ ID NO: 391121 - DNA, 216 bp, Salmonella enterica
atggccgtattaagagaaacgcagataacgaatagtaaaaaaaacgactggctcgcctggccggagagagtgccaggtttaccagtcgaatttatacgacagcgtatgtcgttatgccagtaccgtcgaaggcgctttgaaagccaacggcagttctgcgtcgtcctggaaggtcacaaattcccaggcttcctgttttgccaggactgcctgtaa

SEQ ID NO: 391122 - DNA, 1527 bp, Salmonella enterica
ttggattttaagattggtaactccgctaatttaaacacacctctattattgattgaaggcaagaccgtatttaatacaggaagtaaggcattattctcttatgtagggagtaacatcaacgatatcgtcaataaggatatcatcctcattcaatcaaatgggggaatgagtggtactgttgaggtcggacaaggtggcgtaaacgcggttagcgatctttcgccattgctaaaacaaatcgactcctggataaccaccaccgatccggttgtcaatggtggcattcaaggcaatcaactggtggtacgctacggggtgaactacgaaggcggtgataattttgtcaacatcgctaaacaaggtggcataagtgagcaaaggctccaggcagcaagttatatcgttaactatgcactgtccgaatacaacaaaactcagtccgtacgaagcggtgaactcctggcactgttaacctctgcgggtaacagtaatacaggcgacgacggtgcgaattcatctgttgttgacagcggcagcaatggtattgcccggttagttgaacaattaaccccgaatgctgaaggcagtgaggtccgcgccgccctgcgtgtggtcgataagatgcgtgatcaggcaaataaccgtagcttctatttacgcaatcaggagaccgcaacgccgtggaatttctgggcgcaaactctgtatacgcatggacgccagggcaatgaggctgatattttcggttatcaaactaatgcttatggcataaatattggtatggatcgccgcttcagagatgaagctttattcggtgtcgctttcggttatcaaaacagccatataaatataaatggttatggtaatacaaaagatgtaaatagctatgaagctatggcctatactggttggttcaacgaccgctattttattaacggtaacattaatatgggctataataaaaatagcagcacccgtaatattggttccttaaatggttatcagggaaataccagggctgaagccgactataacagcttgcagatgggttatcaggccagcgccggtataacatttgaccttgatatcgttaaattacagccgcgagtagaatataactatcagtggttccgggtggaagattatgccgaaagcggttcaccagccagtctggaagtagatcggcagtcttattcagtgaaacacctgggtgccggttttaccgccttcaatacctacgatttggcgtttggtaaatttaccccatcactctccttaatgggataccgtgatttaaatgattcagaagtcataaccgaaactgcgggtttagtgatggatcagggtaaaggcaaaggccgtttcactatcaccggcgatagcatcggtaatgatatttttgaagccacactgaaatcttctttaacgctaaaaaataatattatcctggacggtaatttgaattactacaaacgtgatggttataacgaaggatatataggtctgagcgtttctaaatacttttaa

SEQ ID NO: 391123 - DNA, 198 bp, Salmonella enterica
atgggtgaaagtgatgaacctggaccgtttcgatttgttgtaaatctcatgccggatgatgccaacgcttatccggcctaccgctccagatgccctccgggcaaaaaaatccccgcgattacggggatttttcattacaagccgaccttattcccattcctgcaagaagcgttgaccgtactggtcggcgaccagtag

SEQ ID NO: 391124 - DNA, 573 bp, Salmonella enterica
atgaaaaaagaaccttcaggttcttttccgggtcaggaaaaagaacctatcattgagagaatattcaagttagtggagagatacccttcacgtagtgaggcagcaagaaaatgggggatcaacgaaagcactctaaagaactactacaaaaggcgagacatagccccaacacctcgaattaaccagttacgaaaaatagctgagagtgaggatgtgtctttagagtggcttcagttcggggtaggagaagaaccaaaagaaacttttcagaaaagacagcagtcaaacccattatcagcatctgatattgataacaagatactgacttttctttcatttcttgatgatcgtgaaaagcagcggttaatagacgtactgggccgcaaaggcgctgagcactgccttattcttttagatggtgacatcactgaattacatgcgcttgaaggtgtacgtcgctcattagcattgagcttaaaaaacataccagatgagagggttagagagatttacgaagcatgtgaaactacagacggtcacttcactataaccgacaagcaggctagagcgtaa

SEQ ID NO: 391125 - DNA, 249 bp, Salmonella enterica
atgaacagaaaagaagttcctggtcacgactggcctcctgaaatcatcaaggcgcgactgcacatggcgggtttgtcatttcgctctttgtctgtcgaagcgggttacagcaaggattctttgaaaagtgtattgcgtaccccttgccgtccgtaccagcaaattattgctgacgcactgggtgttacgccggaagagatatggccgagtcgttaccaggtgaaaagctacataagaaaggcgttttga

SEQ ID NO: 391126 - DNA, 1989 bp, Salmonella enterica
atgtacgttgtcgcaaaagaactcattggtgttaaagggatgccggcgacaattaaaggggttcgccaggcgttacagagattttcagatggggtgccgaatgcgactcatcgcaggcaaggttccaaagctgtcgaatatcatatttcagttttgccaccagaaactcgcgcggcatacctgaaacaacacaatcagcttgaaacctctcatggcctgattgctttaccagagaaaacgcaagtcagctccgaacgcgctttcttgtggcagtgttgggatcgagccagtgatgagcagcgtaatcgcgctattgagagggttaatcctgtcaaactaatggatgaacttatcgacagtggcatgaaggttcgggaggcggcaaaagtggcagcagatacgatgaatgaatccccaaatagcctgcgtcgctggtatgggaaagcaaaaaagttttcatcggtagactgggctccagcactgcttgatgaccgtttgcttaaacatcgctcatttatagccagggctgagtttgacgaagaggcctgggagttcattaaagcggactatctgcgcaacgaatgccctgtattgttcaaatgctacgaaaggctggagaaagcggcagaagcgcatggctgggtgattccctcttatgacacggttcgtcgtcgcatggaagctatacctcttgaggttagggtgctggctcgcgaaggtgagatcgcactgacacaactgataccggcgcaacagcgcaccgttgccagtcttgcaaccctgcaatggattaatggtgatggttatcaacataacgtgtttgtgaagtggtttaacggcgagatcgtgcgacctaaaacatggttctggcaggatgtgaaaacccgccgtattgtcggctggcgttgtgatatgacggaaaatatggactccatccggctttccttcatggatgtaattaaaaaatacggcataccgaaagatttccatatcacgatcgataacacccgcgcagcagccaataaatggctgactggtgggaccaaaaaccgctatcgctttaaagtgcgcgaggatgaccctaaaggattatttgtggtaatcggcggcaatattcactggacttcggttgttgccggtaaaggctggggtcaggcgaaacctgtggaacgcgcttttggtgttggtggtatggaagagtatatcgacaaacatccggcgctggccggtgcgtataccggacctaacccactggcgaagccggagaactatggctcaagagccattgatgctgagttattcctgcagacgattgccgaaggtgtggcgatgtttaatgcccgcgtgggtcgtaataccgaaatgtgtgaggggcgttattcatttgatcaggtgttcgaacgtgatttcccgaatactatcgtgcgtaagcctacggaagagcagttacgtatgttcctgctgcctgcagaggcggtgacggtcaaatttaacggtgaatttaccctgcacgctggcggctcactgctgaaccagaaaaaccgttatcacaacgccgcgttaatggggatttcaccccgaaaagtggtggtacggttcgatcctcagaatcttcatggtgatgtgtactgctatacgctcgacggtcgttttatttgcgctgcaacctgcattgaaaaagtgggatttggcgatactcaggctgcgcgagagcatagccaggccaggaaacagctacgtaaagcaacgaaagccctgaccaaagccacgatcaagaaagatgcgctggaggtgtccgaattgatgccccgtctcagtgagccagagccgccagagtcgcgagttgtcgggatataccgccctgtcggcaatacagtgaccgttcagcaggtggaaactgaagaggagtacgacgaacagtatcaggcgagcttccggcgcggtgtgcagttacttgcggccagccagaaaaaagatccactggaataa

SEQ ID NO: 391127 - DNA, 924 bp, Salmonella enterica
atgactgatattaacgaagtaatcaataccattaatgcattaatcagcagcggtcagttaactcagatggttgttgctaaagaaactggtctttctgatgcaacgatttccgccttccgcaaggggaaatacaaaggggataatgcttctgtatcggaatcgctgattgcctggtatggaaactggcagcgccgtaacaccctgccggagcgccctcagtttgtggaaacgcagacggttaaagaactgcgtgacctgttccagtcggttcgagtgatgggttgtattaacgtgattgtgggtgcgcctggtgttggcaagactgttactgcgcgggattactgttctaaccccaatacatggatgatcaccctgtcgcctgcgcactccagcgtgaccgagtgcctgctggaactggctgatgcgcttggactgaaagatgtcagcaaaaataaaggtgatctgtcccgtgccattcgtcgcaagctgaccggtgttcaggggttgttgattgtcgatgaagccgatcacttaggtgttgaaggtctggagcaactacgagccattcaggacgcgagcggtgttggtatggtgttgattggcaacccgcaggggctttcccgcgcctcccgatatggcgatctggctcgtctgtttagtcgtattgcccgtgccaagcaacttaaaaaagccaaaatagcagacgttaaagctattgctaatgcctggggaattacgggcgaaaacgaacttgcggtgatgcaggctatcgccgaaaagcccggcgcattgcgtgttctgacgcatacattaaaccaggcatggatagcggccaatggtgaaggttctctactgactgaaaagcacattaaaaccgctttcaaagaggtttactccaaccctgaactgcttgcacaggtgtga

SEQ ID NO: 391128 - DNA, 243 bp, Salmonella enterica
atggcggcatttaatcttcccgatatttacggcagaaattaccttattaatttcgataccgttaaatatattcaggtatcagataacgaagagcgcggtgatttaattattgcctttacggataagactattcagaccatacctgttggtctggacagagagggcgctctcgatacgctcgaacacatcggccgggttattggctcggtcagtcttactggtaaaaataaattgtggaggtaa

SEQ ID NO: 391129 - DNA, 273 bp, Salmonella enterica
atgaaacccactatcacggcgtactgctgggcatcggggctgattgagtttggcaataccctgccggaaggcgcacttccgatcgtaaccggcaatgaaaagaatgtacgtgatgtggtcggggtgttggcccgtcacgcgtataacggcgatctgctggttccgggcattcccgaaacggccaaccagaatgaggcacgcgaggcgctggaaaggttttctcgcgtaattcaagagcgattaaaacatcccaacaaaaggaaatttaaatga

SEQ ID NO: 391130 - DNA, 294 bp, Salmonella enterica
atgagcaacaaagtacaggttattttcacgttcgaactggtaaaccgtgaaagaaaagaggttcaggggggggtagaagttctggatatggtgacggccagagtggaaagtaaggggctgaataaggagtgtcaacccggccctcagcacgcttacgcgcttattcttaaacgtaacgcgcctaatattatccgttttctgacggatgaggtgaaagtcagtgctggaaagttcggttttgaaatgaatacgagtagcgaaaaaatcacagacgtatcagacaatattcactga

SEQ ID NO: 391131 - DNA, 579 bp, Salmonella enterica
atggcaatgcaaaggcgttattttaaattaaatgaagcggactcagttaaatatcataaggagtacctggcaaaaatcggtaaaacccgcagagaggccattcgtgattttctgagtacgtgtaatgcagtcgggtatttgtcacgtaaacattttggtactgagtacatcagtgcactcctggtgcgcgggggtatggattgcggcagaaacaaacgtgtttccagtaaagaatttgataacgatggtcaggcgctttttgaggtcaggccagaccgccgctacagcgaaggaaagcagcttgcaacccgtctggaagagataaacaagaaattacaggagttaccgctgtttgacgcctgggttgtggaaatactgggctgctatgcggacgcaagctacgttaatcacggacagaattttgtcgcctggtctgctgccggttttttccctgagaagaaagcgctggtagtcagtattccggtcggtgagaacggaaaagagcccctgcctgctgatatgagcccgacacttattgaaattaaacactccgaatttattgctattacggaggaataa

SEQ ID NO: 391132 - DNA, 492 bp, Salmonella enterica
atgtgtgatgaacgaattattgccggggttaagacgctgattaaaaaacaggggcgacagacctgtactcagcttgcaacgtccctgcgaatgccacctgaatccatgttgcattttcttcgtagtgcggtcgaggccggaatactgagcgactgtaacggcttttatgacgtggtaaagaatagccagttatcagcactgtcctttcgttgtcattttcgaaattcctggccctgggtggaaggtaacagtgttccgccgtgggtacaggggctggctcatggcattaagacctgtgaatccgtgtatgccgtagcagaggtcactaagccgctacagaaacaggggtggaagccgtttgtgctggtttatatcgacattcgactgtcaaacttcatctgtgtgcataccgctgaaaatatcactgaatttgtcgtgcgttatctgccttttgatgaatcagaaaacccatccagggaggtgtccgaatga

SEQ ID NO: 391133 - DNA, 555 bp, Salmonella enterica
atgatactgccaccaatgggaattccaggggtatgtccggcacatcgccgcccctggacgttagaagaagatgagttgctgataaaactgcatggaaagaagaccgcagcagaaatagcaaaacttcttccggcgccaggcagatctgttgctgccgttaaaaccagacaacaggacttacgcgagcgttttcctgagcttatcagttacatccaccatccgtggacgcaagaacatgacaacttccttcgcaaaaatcgccacacgatgactgcagaagaaatcggcaatcgactgacaccacgccggacagaagtctcagtatcgtgtagggcggctcgtcttgggatcagtctctataaatgcggggataacctgccccgtacacgccacaaagacaaagatgtgatattcatcagagagttgcgtgacagttccgaactgacattcaaggagattggcgggaagtttggcctcagtaaagacatggccgtatggctgtatcaccaccgcctgaccgctgattacgccatcgtaagggagttattaccatga

SEQ ID NO: 391134 - DNA, 327 bp, Salmonella enterica
atgataacgacattatttgttgaatccgaggagccgcttatctgtgcggcgggtatgcctgtctgtggtgggaagctggttagcgtctattttggtgatttgcgtggtcatccctggcattctctgaatgattgttttccgccggatatggaggctgtagtgctggttgtgcagtacggctatcgccaggaactgcgaatcggtcacatgggctatgaggggtttttcgtggatgaagaaaccggggcctgcattgaggatgaggacggtcaggtaacgcactgggtatggattgctgccttgccggaattattggaggaagactaa

SEQ ID NO: 391135 - DNA, 291 bp, Salmonella enterica
atgaaattgattgatatcgatgaagaactaaaggaaataagaatgctcgatcgtatccaggtcattcttgataaagtcaggagaaataacggtagtgtgaaggattttatctgggccgttcagtatgaagtcgatctcattgaggccaaagtggaacttaataataaacaagctcgcgacgctcttgtgcgtcacaagcttgggttggctgatgatgatgttatccctcgtcgggcctatgttcctttgctaatgagtatggcctggggtgagcatcccaaagaagggtga

SEQ ID NO: 391136 - DNA, 276 bp, Salmonella enterica
atgtctgataatgatcaggataaagatttcgatctcgcagccttccttttgacgggtaacattatggttacactggttgaaaagggcgtgattgatatgagagaagcctattccatcatacgtgaaacgcaatcagcactgaaaaattccgagctatacaagaaagaaatcgacgaaaccgccagtgattatattgatcgcctcttcacccttctttgggatgctcaccccaggccatactcattagcaaaggaacataggcccgacgagggataa

SEQ ID NO: 391137 - DNA, 519 bp, Salmonella enterica
atggatcgcgcatcccttatcacgctaatacacgtagccaaaaaagatctacacctggacgcggatacttaccgcgacgccctgcgggctgccgtcggtaaaaccagttgccgagatatgacgcaaacggagttgtcgaaagtgctggcgacgttcaaaaaacgcggtttcaaagtgcgttcaagaccgcaaaacagagccttaaaacccgctactgtgaccgctaaaatccgcgctatctggcgtcttatgtatgctcagggttttctttccagtgacagcgaagtggcgcttaatggctgggtgaggcatcagacggccccgcagaacggcggcgaaggtgtggcaaactatcaatggctggaaagagaaccggcgctggcgtcggatatgctggaacgcctcaaacgctggcaccggcgcgaaatgctccgcgttcttggtctgtcggagcgcgaaaaaatcagctacgaccagacctgccagcgtttcaaattacaaattgccgtcagtcgctaa

SEQ ID NO: 391138 - DNA, 501 bp, Salmonella enterica
gtgccgaaactcccccctgcgttacgtaaaaaactgattgcccttgtgctggccggcgccggcacggttggtattgccacctcgtacaccgcgtactgggagggtaaatcgaatgcgacctatatcgatccaaccggcacgccaaccatctgttacgggcataccggcccggacgtcaagcccggcatggtgaaaaccgatgccgaatgccttgcgttgctgaaacaggatatgagctgggcgttcgccgctattcagcgttacgtcaaggtgccgctcacgcaggggcagacggtggcactggcctcctgggtgttctgggcgggcgaaaccaacttccgtaactccacgctgctacgcctgattaatgcgggaaagatgccagcgtcctgtgggcaatacatccgctggatctactccaaaggtcagaagctgccgggactggaggcgcggcgttctgcggacgagtggctatgtcgttacgacttaccgcagtcttag

SEQ ID NO: 391139 - DNA, 381 bp, Salmonella enterica
atggctggcctgaaagatgcatttccggttctggtaacaactgtcggggtgatttgtctggttgccgcggtctggggtgagcgccagtacgtgaaacgcctgcaggctgatatcaccacccttacgcaacagcgcgacgaggcccggcgcattctgaacaaccagcagaacaccatgcagttttttaacacgctcagtaaggcggctacagatgaaaagcaacgcaatacacagcacagcgaaacggtcagagcggagattcgtccggtgcttgccgcagagcctgcggcccgtgttgctgtgcctgccgctgctgctgaccgcgtgcgcgccgccgtcagtgaaatacgtacaggtgccgccggttccgcttcccgctga

SEQ ID NO: 391140 - DNA, 1233 bp, Salmonella enterica
atggatcatcggttcgatccattttccctgtcctgttttttactgatttaccgcaaacccactccctcatctgatcgtcataagctgccagccatgacgacgaacactctcccccgcaaaacagcctacgcggtactgaatgccgcgacgctgtcgccttttgataacgatggctggtgccaggcaatgccggccggtcgtgtgaaggcgcgtgacggtcgcccggagaaaccaccggaaggctggcttattaaccaggctgcggtcaaccgcatggtggcgcgcgtggtggcactcaatcagccgataaaaatcgactacaaccaccagagcctgttcagaggtgaggtagccccggctgccgggtttatccacccctcgcccgataactttcgtttcagcgaggaacggggttttgaagttcgccctgactggaatcctccggccgttccacgcctggtgaacaaggagttcccgtggttctcgcccgtgatgggttacgacgaggacagcggtgagccggtggaactgcggatgctggcagttaccggcgaccccggtctgacgggaatgaatccggtcgccgccctcagtgccgatgacctttttaatgcccttaatcccactcctgtagcaaaggaaaaatccatgaatgagcaattacgccagttactggcggcgctcggcctgaccgtgcccgatgacggcgaactgacgcctgaactcggtacggcggccctgtcggcgctgacggatattcaggcgaaagccggcaaacacgacgagctgaaaacgcaggtcgccacgctgtccgctgaactggacaccgcgaaacaggctaataccaccgctgcaggtggcgttgatctgacgaagttcgtcccggttgagacctacgacaccctgcgtactgagtatgtcgccctgtctgcgcagcttggcaccaccacgcttgaacaggtgctggacaaggcggaggacgaaggtcgcgtgttcaaatctgagcgcagctatctggagggactgggtaaacagattggtgttgcggcgttgtccgcccaactggacgcccgccagccgattactgccctgaccgcgaaacagacggacacggtgaacgtgccgaagaaaaaaaccgcgtctgccgccctgtcagcggaagaccttcaggtgatgaaaatgctcggcaagaccgaggaagagttccttaaagctaaaggggttaaccaatga

SEQ ID NO: 391141 - DNA, 972 bp, Salmonella enterica
atgagtacacctaccacccccaagatgattgaatccctgtttacagggtataaatctgacttccagaacggtctgggcatggcggcctcgcagtacaagaaaattgcgatggttgttaactcgaacacccggtcgaacacctttggctggctgggacagttcccgcatttccgtgaatggatcgggaagcgcgtcatgcagcagatggccgcgcacggctattccatcatgaacaagacctgggaagatacggttgcgatttcccgcgacgatttcgatgacgatattctcgggatttattcccccatcttccaggaaatgggccgcgcggcgggctgcttcccggatgagctggtcttccaggcgctggcgaacgccgacaaaaccgcctgctacgacgggcagaacttctttgacgccgagcacccggtttacccgaatgtggacggcaccgggactgtgaaacctgtttccaacctgtttattgaccaggtgggcgcggctggcgcaacaaaaccttattccggtcccggctggtatctgatggactgtacccgcgtcattaagcccatcatctaccagaaccgccgcaacccggagctggtgatgcaggctgacccgaaaacgggcgtgaccttcaccgataaccagattgtgttcggcgcgtccctgcgctccaacgtcggctatggcttctggcagatggcgcagatgatgaaggccccgctcaacagcgacatgttctggcaggcctggaagtccatcaccgaccgcaaagccgacggcggtcgtccgctggggctgcgtccgtccgttctggtggtaccgccggcgctggaggatgtggcgacaaaaatcctgcagcgtgagttgtccgtggacaacggggctaccgtcaccaacgaactcaagggcaaggtggaactggtagtcgcggactggatgccggacgccaccgccgccacagcataa

SEQ ID NO: 391142 - DNA, 486 bp, Salmonella enterica
atgtcagaacaggaaaacaacgctgctttaccgggcggcgcaacggataacccggggactgacggagatagccaggttactccgtcaggcttttttatcgttgagattcgttgtccgcgtgagcgctacattcgcgccggcatccgctttatgcgcggaaaacagacgctggagaacgtgccacaggccacgctcgatatcttacaggctgacccatgcctcattgtggtgtcggttcagccggcagccgcgccatctggtgaggctggcgtgcaaaacctggtggatgttgtcaatgcaggcagtgatgtgacgccggaagaaatcaacgccgccattgatgcgctgattgcccgcgctgacccgcagagcttcaccaaatccggcgtaccgggcgtaaaggctgtcagtgatgagctgggccagcccgtcaccaaagcgcaggtggatgcggcatgggtagcgcgccaggagcgccagaaatga

SEQ ID NO: 391143 - DNA, 414 bp, Salmonella enterica
atgatgtacgccagcgcgcaggatatgcgggacagatacgaaaatcttgatgatctcttgaggctgccgggaacggacgacctcaacgagaagaagctgacgcaggcgctgaacgatgccggcgcgctggctgacagctatctgtcggcgaaatataccctgccgctggccgtggtgccgcaggtgctggtacagcactgttgcgccattgccttttattacctgtgcgaccagcaggcttccgagcaggcgcgcgatcgttaccgcgaggcgctcacctggctgcgggaggtgaagaacggtggtattccgatcggcgtggacgaatccggcagcgcgccggagtctgacgacctgccgcagatgcaggccgaagcgccggtattcgggcgcaaccagaaggggttcatatga

SEQ ID NO: 391144 - DNA, 1503 bp, Salmonella enterica
atgattggttttaacgagatccagaacgacaaccgtattccactggcgcagattgagtttgataactcaatggcggtggtgggaacgcccgcacagcatcagacggtactgatgttcggtcaggcaaacctgaaaggtgacaaggttgacggggccggtcagctcgatacgccggtacgcatcacccgagattcgcaggccagcagcctgtttggtcgtggctcaatgctggcctggatggtcaaagagtttatcgccattaacccggatactgagctgtatgtgattgctcagggggccgggaccggtaaagctgacgccggcagtctgacactgagcggcacggccaccggtgacggtgtgctcagggtctatgttggcgggcgtcgttaccaggtggcagtcaccagcggccagcagggtaaggcactggctgacaaactggccgcgctgattaatgccgatcgcgatgcgccctttacggcggtgtctgcggctcccgccggcgctgatgtggacgccacaagcagcgtggtatcgatgaccgcccgcttcgttggcgagtgctccgctcacgatatccgcctgaactattacgacggtgaaaccacgccggacggtctgacggtggtgattgcgccgccggcggcaaaagccgctaacccggatatcacccgcagcgtcgcgaatatgggcgaacgtcagtacaactatgtggtgatgccgtataaggaccaggctaacctcaacatcctcagtgccgaactgcttaaacgctgggggccggtcaaaatgtccgacggcgcagtgtggatggcgcacaccggcacgcagggcgaaatcaccgcgttcggcgagtcccgcaacgattttctgtttacctgcagcgccgttcccaaagcgcccgaaccggattacatctgggcggcgtcggtctgcgcgacctgcgcgccgtcactgtccattgacccggcccgggcgctccagacgctggcagtgtcgtcacgcatggctcctcagcttgccgaccgcctgactcaggaggaacgtaacctgctgctgcatggcggcattgctaccgtcaccgtagcggccggcgacgtggtacagattgagcgccaggtgacaatgtaccgtgtcaataaatacggcgacgttgatccgagctatctcgatatcgaaaccatctacacgctgtcgtacctgcgttactccctgcgcaccttcgtcacacagcgattcccgcgccataagctggccgatgacgacacgccggtagcgccgggccagcctattgtgacacccaaaatcatgtcgctgcagcttattgcgctcggtgaggactgggtggataagggactggttgagaacctggatacgttcaaaaagaacctgctggtagagcgtaataccagcgatcgtaaccgtctggatgtgctgtgtacgcctgacctggttaaccagttccggttcttcgccgcacagcttcgtttcattctgtga

SEQ ID NO: 391145 - DNA, 1377 bp, Salmonella enterica
atgtcccctacgggtaaaggcagtttccgcaatgttcccttccttatttataaggagcaacgggagcgcggcggtcgccatattgtcaagcgcgagtatccgctgcgcgaatctggcggtgcagatgacctcggccctaagttgccagcattcacctttacggtgattgtccagggggatgacgcacaggtgcagcgtaaggcgctgcgtgatgcgctttatgcgccaggcgtgggcgagctggttcatccggattacggcacgttaaacgtccttatagacaactttgaaagccgttataacgtgtctgaacagcgcgtggtcgagttcacgatcacggccgttccacaggcgaatgatactgccccggacgcgcagcaggatacggcggcggcactgacacaaaaaaccggcagcggccttaacagcgtgttcaacaccctggcggatggctggtcggtggtgtctgacaaccttcacgatctgcaggcgatgatggataccgtcagcgagaaaattgacgcgctggaaaacacggtcagcagcgtcggtatcctgcaggatatcagcacctttgccgcctcttttaccgccatgaaggggaatatcacttcgctgattaccagcccgttacgcatggcgcagcagttcgccggggtgttcagcggtctgattgcgttaccatccgtgccggcgatgtcgctgttacgtaaccataccggcaccacgccttccgggagcctcgccgtaccggatgaggcggtcagaagccagggcggtacgcaactgtaccagtcgctgtcggcgttttacgacacgctgaccacacaggacgcccgccggagcctgaccggtctgacgcctgccacccaaaacaatatccggctgctgcagtcggtgatgcaaagcgcggttgtgctggctcaggcacagacggcgggcaacctgttgacgattgcggttgcacaggcgggcgtgccggcaccggtccccctctccgggtctggcactggtgccggcgttgacgcttctgcgccggtgtcgttactccagagtgccggcgacgtccgggcggtcagtcacgcgctcggccagtcccttgacgctcaggtgctggcgttttccggccaggggttcacccgtaccgcgctggcgttacgtgaggcccgtctggcgctggttgaggatttaaccacgcgcggcgtacatctgccgggaacgtcttctgttatggtccgcaccacggagccggccctggtgacgctttaccgggcaaccggaaacagcgtgcagtggcaacggtttgtccgccgtaacaacgtcattcatcccctgtttgtgccgggaggtcaggtgctggaggtgattgatgaatag

SEQ ID NO: 391146 - DNA, 1143 bp, Salmonella enterica
atgaatagtcgcactccggacacccgcgttgagctgtttatcagcgggaagattttttccggctgggcaggcgtcagcgtgcgccgctccctggaacatctggcagggtcgttttcgctggaattaatgctgcccggtcagcctgtaccggacggcatcgaccccggccagccgctgaaattacagattaacggcgtgacggtcattaccggttatctcgataccgtgaaacacaaactgaccgccaccagtaacaaaatcaccattaccgggcgtgacaaaaccggcgatctggtggactgttccgccgtctttaagggtagtcagtggcatggctgcaccctggagcagatagcccgcgacctgtgccagccgttcggtatcgctgtttactggcaggtcagtgacgccacggctgcaaaaccctttgccaccttcaccctgcaactgtctgagacggtcagtgatgcactgacccgcgccgcccgtcaccgtggcgttcttgtcaccagtaacgccgacggcgacctggtgtttacccaggcgggcaaccagcagaccgatacgctggaactgggtaaaaacctgctggatgcagattttaccgacgactggcgcaaccgctacagcgaatacctggtaaaaggccacggcggcggcggtggtcataagggagatgcaaaaatggcggtgctgctggccgcccccaaaggcacgacggacgacaaaaccatcacccgctaccgcccgaaggtgattcttgccgaccacaaaatcaccgcagacggtgcgaagcaacgggccatccgggaagaacgccgggctgttgccaaatcggagcgctttgttgccggtgtcaaaggctggttccgggagagcggcgcgctgtgggatgtaaacctgctgacccgcgtcatcgccccgcgcgtgaacgtggacaggcgcgacctgctgatttgccaggtggaatttacactcaacgcgaaggaaggcgaagtgacccgactgacgcttgccccgcgcgacggctttattgtgccggcagagccggacagcagcggcaccagcggcgcaggcggtggcgttgacgcctggatactgcagcggatgaaagaacaggggattaaattcgatgataagtga

SEQ ID NO: 391147 - DNA, 1083 bp, Salmonella enterica
atgccgtatcaacccacacccttagcgcaactgattaaccagacacagcaggatatcagccagcgtctggaaggcaccctgccgggactggatgaaaccacgttgcacgccatcggttatgcccaggcggggctgtccgcccaggagcaggagcatctcgcctggattgcccgccagattatcccgtctgacgctgacgaggcggaactgctgaaacactgcgcctggtggggcattgttcgcaagcccgcctcccgtgccggcggtccggttcagcttaccctgaccgatacggccaccgccgatgccggcacgcagctccagcgcggtgacggcgtgatttatcagataaccacatcagaaaaagcgccagcgggaacgctggaggttgaagtggtggcaatggatgcgggcgcggccggtaacgcgccggcgggaacgctgctgacgtttatcactccgcaggcagggattgtgcagacggccaccgtcaccggttcaggcataacgggcggtgcggacgtggagtccgtttctgaactgctttcccgcctggtgtttcgcgtacagtacccgccgtcaggcggcacaaagtacgattttgagcgctgggcgcgcgaagtgccgggcgtcacccgttcctggtgtctgccggagtggccgcaggcgggcagtctgggcgtgacgtttgtcctggacaataaccccgacatcttccccggcgagggggatgtagcccgcgtggcggagtacatcaaatcccaccctgacccggcgacgggccagccggtcggccaggcgctggggccggtggtgaaggtgtttaaactcaccaatcaccctgtcgcgtttcagataaagattgcgccgaacacaccagagaaccagcaggccgtgaggcaagcgctcaccgacctgctttataacgaagccagaccgggcggtattatcctgccgtcggcgttctggcgggcggttgccggcgtgaaggtgctggatgattttgaactgcgttccccgctggagtctgtcagcgccggcgcgatggaactgctcaccgtgggggaaatcgcatggctgtag

SEQ ID NO: 391148 - DNA, 522 bp, Salmonella enterica
gtgatatttgacgttctgaaatactattttttcatactacgtaaaaaaaagaatccaagaactgcttgtatacttttcaataacctattaatttcaaaaagaaaaagatacaacatccttcgcaacactggagtatctgtaaattctaattccacgattatagatccattctattttgaacaagggaaggtaactttacttggtaaggtttttataaatgcaaattgtgtctttttggacgcagggcatatcagcattggtaataatacagcaattggcccaaatgttgtattaacaacagttacacaccctgcctctcctgatagacgccctaaagaaactatttgtgcccctataaatattggaaataatgtatggataggagccaattctacaatattgccaggtgtgtctattggcgataatagcgtcatagcctgtaacagcatggttaatgccaatgtacctccaaacactctttatgctggcactccagccgtatttaaaaaaaatctaatataa

SEQ ID NO: 391149 - DNA, 396 bp, Salmonella enterica
atggttgtagactacacttctgattttctcccttcggtttctgacaatgtatttatcagtaatcgtgcagaaccgaaaaagacgggttttcagggggtaaaaataaaccataaacttctgatttccgaaagcactaaccagataggaggcgatatgcgagaaagacttacccgactggaggttaccgctgaacatatacaaaaagacattggtgatatcaaaaatacgttaaattcctttaatgctagaattaaaggtatggaaatcaaaatgtggatcggtaccgggatacttgctacgagtactttcttcttgggctggatcggttacatcattaacaattatcttccccagatacttcatgcagtgcaaattttgagtggcaccggaaactga

SEQ ID NO: 391150 - DNA, 306 bp, Salmonella enterica
atggaaacaaaagccatcaatgacagtattcccacgcagattgaaaatgctaataatttcggtgactacttctctgatttttcagggatatgtagatacacatctggtgccggggagtttgtttgcttcaattttttaaagacttatgtgcatcctcctcttgaaaaagatggcgatatgcttgctcctgagattggcctgcaaagagtagcctctgtttcaatgacggaacaacaagcacacaatctctataaactgcttggagacatcctgaattatcggaaaacgcagaaggaagagcagtaa

SEQ ID NO: 391151 - DNA, 1053 bp, Salmonella enterica
gtggggaacaaacaacaacacattccacccgataatcctgttacctatggttctgtatgcagtggcatagaagccgctaccgtcgcctggcatccgctcggctggaagccctcctggttcagtgagatagagcctttcccctgcgccgttctggcgcatcactggccgtcagtccctaatctgggtgatatgacccaaatcgcagcacgcatccagtcaggcagtattccggcacctgatattcttgtgggcggcacgccgtgccaggcattcagtttatcgggcaaacgccaggggctaaaagaccctcgcggccagcttacactcgcctttgttcaactggcagaccagattgacaagacccgtcaggagcaaggcgagcaacccgctatcgtcgtatgggaaaatgttacaggggtattaaacagtcatgataatgcattcggttattttctcggtgcgctggccggcgaacgtcgcccactacagccagcagggaaacggtgggcaaacgctggtgctgtgtctggaccatcgcgtaccgtcgtctggcgaacgctcaacgccgaatttttcggagtcccccagtcacgtaaaagagtgtttgttatggcaagtgctcgaccagaatttgaccccggagcgatattatttgagttcccgactgtgccgtcgcgcactgagaactattacggaacacagaaaaaatccgcatccagtgctcattcaggcattgaaagagagttccatcgatactgctttgacgccatccctgacaccgccggaacgctgattgctggctatgacggctcaaccaatcaggacatgcgaatgcgtggtggtctgatagtagagcaacaccctcgcctgagagttcgacgactcacgccaacggaatgtgaaaggctacagggatttccaacaggttatacagatattccgtggcgcagctcgtcgccaggacatcgatataaagccatcggaaactcaatgccagttcctgttatgcaatggattggagagaggattcaaaaggctttaaaaaggagttga

SEQ ID NO: 391152 - DNA, 588 bp, Salmonella enterica
atgccattagttaaatgtaaggagtgcggaaagccaatatcaaccgaggcgaaacaatgtcctcattgtggttgtccgaccggaaaacgtgatacatacccgacgtgggcgtgggttgttgctatatttttttcagtagctataggaacctggagaatgtggccatcttcaagcgaagcaaaaaaaaacaatacagatacaacggcggaaacttcagcaactcaccaacaaccacaaccagcaattcagaaaaaaaatgaacaaccgaagagtgcaaaagagactgaatgtaaaaaaaatgactttgattgcctcggttcaaaatattacagtgaagcagtacagcaatgcaaaccattgataatagaagcagcgggttcaaatccttatgagtttcatggcggttggtttggcgaaatctttgatacctacagctataggaaaaacgaccctgtaatcagatatataggcgataaagtaacattcacaaacgacttcggcgtgaaaataaaaatgaggtatgagtgtgcatttgatactcaaaagaaaaaaatagttgatttcaatatctatcgtcccgcagcataa

SEQ ID NO: 391153 - DNA, 1422 bp, Salmonella enterica
atgtctaatcatgatccactaacgctaaagttgagcctgcgggaaaaatgcgcctatggcgtgggcgatttcggttcgaatctgatgctgtgtatcggtacactgtatctactgaagttttataccgatgcactcgggatgcctgcatattacggcggaattatctttctggtagcgaaattcttcaccgcttttaccgatatgctcaccggcgtattgctggattcacgccgtaatattggcgcaaagggaaagtttcgcccttttattctgtatgcgtcatttccggtggctctggttgctactgcgcaattctttgccactcactttactttacccgttaaaacagcattcgcgacgttgctgtttatgttgttcggtctgttctacagcctgatgaactgctcatacggcgcgatggtccccgctattaccaaaaatccgcatgagcgcgcccagctcgccgcatggcgacaaggcggcgctaccattggccttcttctttgtaccgtaggttttatgcccattcaggcgctgtttacccgttccccttcgctgggttatctggttgcagcagtcatcttttcggtctgcgggctgttcagcatgtggtggtgctttagcggggtgaaagaacggtatatcgaaaccgtgcctgacacgcataaacccagcatattgaaatccttctgtgcgatttttcgtaatccgccgctgctggtgctctgcatcgccaatttgtgcacgctggccgcctttaatatcaaactggctattcaggtttattacactcagtacgtgctgaacgatattcatttgttgtcatggatggggtttttcagcatgggctgtatcctgattggcgtcttattagtccctgctgcggtaaaacgcttcgggaaaaaacaggtttatcttggtggtctgatactgtgggccgttggcgatatcctgaattttatctggggtggtacgtcattcctgtttgttattttctcttgtgtcgcgtttttcggtactgctttcgtcaacagcctgaactgggcgctggttccggatacggttgactacggcgaatggaaaacgggtattcgcgctgaaggctcggtttatacgggttatacctttttccgcaaaatttccgctgcgcttgctggctttttgccaggtattatgctgacgcaaatcggttatatccccaacatagctcaaggtgacaccacgttgcttggtttgcgtcagctcatttttttatggccttgcggtcttgccattatcgcagcactaacgatgggttttttttataagctcaatgaacaacgtttcgcttttattatcgaggaaattgcccaacgaaagaaaacaggtaatcaaattgtcgcgactaataataaacaaagtatttctactgtaaataattaa

SEQ ID NO: 391154 - DNA, 153 bp, Salmonella enterica
atgcagggtgaaaatagtgaaattgatttagtcgatgtttctttttttcttataagaaaatggttaagtattgtaatgactacccttaatttttgttgccattggttatgtttttgtgaacttgcaacacgataccagggttgtgagtattaa

SEQ ID NO: 391155 - DNA, 555 bp, Salmonella enterica
atgattaaaaacttattatttgtgacaatcgcatgctcggcattctcaggtgtggcaatggcggatgatgttgctaatggcggcacaattaacttcaccggtacggtggtcgatgcgccgtgtattgttgcacaggatagtattgatatgtcagtagatttaggtcaaacaacggtcgattacataaccaagtacggtagttcgaaaccggctgatgtgaatattaatcttactaactgcacccttcaggggggaggtactgataacgccgatatcactaaagcggatgttacttttgattcatcagcggtggatacctctgatgcaggcttgctggcaaatactaattcagccggggcaactggcgttggtgttcgtttgctgaccagtgaagacgctccgttgacgctgggaaccagcagtgaggtgcctctgcaggtttcctctacagagcaaacgctggtttttcatgcccgaatggaaacaattcctggcgaaacattagcccctggctcagtcgcggcaaatgctacctataccattgcttacaagtaa

SEQ ID NO: 391156 - DNA, 591 bp, Salmonella enterica
atgggggggcgtatgcgaattaaaaccaggatggggcagatactgattggtgtgttaatggttactcccgcgtttgcggatgagccggtgaacggtggcacggtaaactttaccggaaccgttattaatgcgccctgcattctcgcagaggacagtgtggatatgaatgttccgctggggcaaaccactgttgattatctgaataaaaacagcaactcaacacctgttgatatcaatatccatctgaccaactgtgctctttctggagccggaaccgatggtgctgatatcaccaaagcgcattttagattcgatagctcagcagttcaggataatgacaactcggtactggcgaatacggtagccgacggtgcgcagggggttggtgtagaaattctaacaagtagcggtgaaattattaccatggggagtaatagcacaccagatgtccctttacaggtaacctccactgagcaaaccctgacttttcagggacgaatggtaaatattgcgactattaattccggggctcctgatatcactccggggcaagttgtgaccaatgccacgtatgttatcacctatctgtaa

SEQ ID NO: 391157 - DNA, 696 bp, Salmonella enterica
  misc_feature (13)..(22): n is a, c, g, or t
atgggcttaatgnnnnnnnnnnggcttaatgatcttatttatacattaattcaggcaccactaaaacatatgggaacaaacatatttgcagtgattattcttggcgcggtcggcaattttttgtgggtacttgggatacatggtcctaacactacatctgcaattcgtgaaacggtattctccgaagctaatcttgaaaatctctcatgggctgcacaacacggatcaacatggggggctccttatccaataacctggacgtcaattaatgatgcgtttgcaaattgcggcggttcaggtatgacattaggactactaatagccattctgatagcttctcgtcgtgctgagtatagggatttggcaaagatgtcatttatccctggtatttttaatatcaatgagcctgtcatgtttggattacctattgttctgaacccgattatgatggttccatttattcttgtgccaatcgttaactgtacaattggttatttctttgtctcaatgaagatcattcctccagttgcttatgctgttccctggacaacacccggaccattgattgcatttctcggaacgggggggaactggttagctttgcttgtcggattcctgtgtctgggagttgctacgttaatttatttaccgtttgtcattgcgtcaaataaagtcaataccgcgatgactgattaa

SEQ ID NO: 391158 - DNA, 672 bp, Salmonella enterica
  misc_feature (656)..(665): n is a, c, g, or t
atgggattaatgaattcctttgaacgtgggatggagcgctttcttgttccaatagcaataaaactgaattcacagaagcatgtagcagctgtcagggatggatttgtttatacattccctattattatggcgagttcattaattatcttaatcaactttgcaatattgtcgcctgacggatttatagcaggactattacatcttggtagtgttttccctcatctggaaaaagcacaggccatatttacacctgtaatgaatggttctgtaaacataatgtctataatgattgcgtttcttgtagcccgcaacatggctatcagttacgaacaagacgatctcttgtgcggactgaccgctataggtgcattttttattgtctacacgccatatcaactgattgataatcaggcatttttgacaacaaaatatttaggcgcacaggggctttttgtcgcagtaattgtggcattattaacaagtgaaattttttgtcgaatggcaagaaatcccaaaattgcgataactatgccagcggctgttccacccgctgttgctcgctcattcaaggtgttattgcctatcttttttgtgatggtgttcttctctgcactgaattatttattatcattaatttcacctaatgggcttaatgnnnnnnnnnnggcttaa

SEQ ID NO: 391159 - DNA, 450 bp, Salmonella enterica
ttgaatgttgcaggtattttggccgagggagataaagatgctatccctctggaactcattcatcactggcataatgaggggctgattaactggctgggacgttcttcgaatgtatatgagcttatccagaaatcgaatatcgttgcattaccatctgtttatcctgaagggattccacggcttttattagaggcatcatctgtaggacgcgcatgtattgcttatgataccggcggatgtgatagcttaattattcataactataacggattgattgtgaaaagtaattcagctcaggagttagcggtagagttagagtatttgttaaaaaatccacagattcgcttagagatggggatgaatggaagaaaacgtgtaaaggaattattttccagcatattagttataaataagacattgcaaatttataaagacactattggttgctaa

SEQ ID NO: 391160 - DNA, 171 bp, Salmonella enterica
atgcccgactggatcgttaccctctcccatccggactttaaccgtcggccccggaattacaccggatctgctgaccttttcgctattgcaaaaagcgctcgcgggctttcaacccgttcttcgcatttcgtcacggcgcaccgtaatgagaaacgcgttaaacatcgttga

SEQ ID NO: 391161 - DNA, 513 bp, Salmonella enterica
gtgcccgcgggagaaatacccgatacagggcaatggctgacgcaggatgtggcattacagccgtttttctctgacggtcgggtaataaacgctgctggtggtcaggaggggcttaaagcatgggtaagcagaatggcggaatgtcagtgcgcaggcggcgccggcgatcatgttatgaacctgacgaccgcacagacgcaggatggcggtgccgtgaggctgtgtcacgcgtgcgataacgttcactacatgaagggataccgcgatctgagtgaaattatcgccagaaaccgcgcggagtggatagtggactacgccagaatgagcctcaggatgaatgccgatcatcaactgacgttgccggagttattttgctgggcggtattacgcggcgtgactgatgccatgcccgtgaacgtgatccgtcgctttgccagcctgccggaagatgaagtgctcaccggcactataaaggaagcggatattaacccctggcaactcagcgcccgctag

SEQ ID NO: 391162 - DNA, 696 bp, Salmonella enterica
atgaccactattaccagtaaattcactaaagagcgcctgattgattgggctgtggtagctgtagctgaaagggggcgagatttaaaggatgccccggaatcagtagaagctgcggcgaatttaaaattagctgaaatcgcgctggcatcgcttaccgctgaacctgtggcgtggacagacgaacaagagttgcgtgacgtagaaaaggacggtttcggttatctgttcacggttaagcctatcacgccgcacgctgacccctgccgcatcgttaagctgttcactgtcccgcctgcgcaggtagtgagcattctggatgattggcagacatgcgaaaagttatccgatgattcttacgttgataacgcgctacgtgaactggttgaggacacaacaggtgataacggtgtgcgtgttgttcaggcggtaatcagagcattgcgagatagcggattgatacgcacttaccccgatctgtcacaaccagtagatccacaaatttccgaatacgagaaaataatgcttcaggctggcaactctccagtaattccggatggttacgtatttgcacccatagaaccaacatcagaaatgataaatgccgcgctgaagtctcatcttattgtttttaaccctgtggaaacttattccgtgatgctggcagcagcaccaaaaccggagttaaccagtgaatag

SEQ ID NO: 391163 - DNA, 1269 bp, Salmonella enterica
atgtcgataaacacatacacctttctttgccccgggctgtttctgatgctggccggatgtacgcaatcaccggcggcatcttctgcccatgatgcggcattcagcgacagccttaaaccggctgtgccggcagatatctggcagcgctcaccggaggtgacccgcgaaggacgctacacgctggtcagcgtgaaaagtgccgatgcccagcgggagcccctgaatcagttaattgatatcaccatgcctgtgtcgctggtaaacagtgtgggggacggctttcgttacctgctgttccagtccggctattccctgtgcggtcgttacggggcggaatttgcggaggtgcttaaccggccactaccggccgtccagcggcgtctgggacctgtccgtctgagcgaagcgctgcaggtggtggcgggtccggcctggcgcatgaccgtggatgaagtgaaccgtgaggtctgctttgtgctgcgggatgcctatctggctcaggcgcgtccggcatcttcaccggttacagttgcgccggccgtatctgcttccgctgcggcagtctcttctgccggtgttcagacgcggcagagtgagacgcatcctcttccggcggtgccggtactcacggcttccggttcaggaggcaatggcacagtgaataccccgccggtttcgccttcgtcttccactgcaacagtgaaccagatggccaccactggcgtgcacgccgttgtttccccgtcgctgacaccagcaacagcaaacaataaatccccggctgctgcggtcgcgtccgcagcaacatctccggacgccacgtccacgccttccacggcaactaccgcaatcgggcgtaatccgttcagcggaaaggacctgagcggcaaaatcaccgcccccacgtctgtcgtatcaacggtgtcaccatcccccgtacctgtattgtccaccccgaccccgcaactgaccggtaccccggttaaggcgctgtcgtccggtcctgaatggaaagcgggtatcaccctgcaggagtccctgaccgcctgggcggagaaggccgactgcccgaacggtggtcattggattgttatctggcagacccctgtggattacctcgttgaagcgccgctgacattccgcggcagttttgaatcggcgctggatcaggtgtttgacctgtaccgcccggctgaaaaacgcctctatgccgaagcttcccgggctcagtgcctggtgtcggtgacaggccggccggtggaccgctga

SEQ ID NO: 391164 - DNA, 432 bp, Salmonella enterica
atgaagttctccgacatccgggacgacatgttgcacgtcgagcatgaaaaaactggcgccaaagtggcgttgccactatcactacgttgtgaagcgctaaatatctctctgcgtgaggttgtggcgaagtgccgggatgctgtcgtcagtaaatacctggtacatttccggcacagtacatcgcaggcaacaaggggggatcgagtgtcagccaactccatcaccacgacattcaaaaaagccagaaaccgtaccggtatttcatggcccgatcgaaaggcaccaaccttccacgaacaacggtcgttgccagaaaggctgtatgaagcacagggtatcgatacgcaaaaattactcgggcacaagtcgcctaagcagacggcaaaatatcacgatcatcggggcaaagactggactgtcgtcgccgtttga

SEQ ID NO: 391165 - DNA, 207 bp, Salmonella enterica
atgaaaatacctagaaatatatcggtcacatcatttccggtggattcatttacacctgaatctcccgttaattcagaaaatactactttgtctgctccgggaagactgaaagttatcagaaatatgacaagcccgacaaaagaacggcttaatttatatacccgccttgttaaccagaaaaacaccacggaagatttcgttggttaa

SEQ ID NO: 391166 - DNA, 2181 bp, Salmonella enterica
atgccctttcatgttggaagcggatgtcttcccggcacaatcagtaaccgccgcattcatcgtatcgccctgtctgacactccgcctgaaatgagctcatgggaaaaaagtaaggaatttttttgctcaacgcaccagactgaagcactggagtgcatccggaagatttgtcaccctccggccggaacgacgcgggaggatgtggtcagcagatttgaacagctcaggacgctcgcgtatgccggatgcgaggaaaacattcagtccggccagcacggggaaagccacttctgtatcctggatacagacagccaggagatattgtcagccacccttgatgacgccggcaactataccgtgaattgtcaggggcatagtgaaacacatcacttcatcatggatacagaacagggagaggaatgcacagaatttgcggaaggggcatccctcctccctgtcacaacgacaccaccgatggcagaagaatatgattctgtctggtcagaatgggaaagggatgcaccagcaggagagtcacccggccgcgcagcagtggtacagaaaatgcgtgactgcctgagtagtggcaatccagttcttaacgtggaagaatcaggtcttaccaccttaccagaccgtttaccactgcatattacaacactgattattcctgataataatctgaccagcctgccagtgttgccgccaggactacgggtgctggaggtcactcataaccagatgaccagcctgccgtcgctgccgccaggactacagagtctgtttgccactaataacccacagctggtcagcctgccgtcgctgccgccaggactggagacgctgtgggtttctaataacccacagctggccagcctgccgtcgctgccgtcaggactacaggatctgcaggtctgtgataacccacagatgaccagcctgccggtgctgccgtcaggactacagatactgtgggccgataataatcggctggccagcctgccggcgttgccgccaggactacgggagctggagatcgctggtaaccgacagctgatccgcctgccggcactgccgccaggactacgggtgctggatgcctctcttaatcagctgacccgcctgccggaaagtctcacaggtctgtcctcacaggcaaccgtacatctggaacggaatccactgtctgaacgcactctgcagattctgcgggacatcaccagcgcgcctggctattcaggccctacgatatacttcgatatggcgggtccttccgtcctccgggaagcccgggcactgcacctgtcggttgctgactggctgatgtctgcacaggaggaggaacaagcccctgcagacagatggcatacgttcggacaggaagataacgccgtcgccttcagcctcgtcctggacagactaagtgagacggaaaacttcgaaaaagacacgggctttaaggcacagatatcgtcctggctgacacaactggctgaagatgatgtgctgagagcaaaaacctttgccatggcagtagaggcaacatcaagctgcgaggaccgggtcacacttgccttgcaccagatgaagaacgtacaacagatacataatgcagaaaaaggggtatacgataacaatctcccggggctggtttccacggggcgtgagatgttccgtctggcaaaactggaacagatttcccgggaaaaggtcagaacgctggctttagtcgatgaaattgaggtctatctggcgtatcagaataagctgaaggaatcacttgagctgaccagcgtaacggcagaaatgcgtttctttggcgtatccggcgtgacggtttcagaccttcaggccgcggagcttcaggtgaaagccgctgaaaacagcgagttcagtgagtggatactgcagtggggaccgttacacagcgtgctggaacgcaaagagccggaacgctttaacgcgcttcgtgaaaagcaaatatcggattatcaggacacgtaccagatgctgtctgacacagagctgaaaccgtccgggctggtcggcaataccgatgcagagcgcactatcggagtaagagcgatggagagagcgaaaaaggcatttctggatggcctgcgctctcttgtggatgaggtgctggatagctatctgaaatcccggtggcgtcttagctga

SEQ ID NO: 391167 - DNA, 552 bp, Salmonella enterica
atgaccgccccggaagggatggcgctgaccagcggtgaagatatgcaactggccgccacgaaaaatgtcgccgtcaacgccgggggggatatcagcgccggagtgacgggcaatctgaccgcactggccggggagaagctggggctctttgcccacaccggacaactgagcctgaaatccggagaaggggcaatagatgtccaggcgcaaaacgccagcctgcggttgtttgcagagaagaagctgacgctgagctcggcgagtgacatctcttttgccgggaagaagcgcatcacgctgattggcggcgggagttacctgcgactggaggcggggaaaatagagtacgggacaacgacgatgtacctgcgccggacgaaaaggacgatggctgcgacacgaagcgctttacctctggataccccccgcgcccttctccggcaactatgcgggaacttaaccccgccccccctgggtaacgccggtgtatgcacaatcctgcctgaaggcgaaaggctgcacggatgccggtactgccgaagagcccgttga

SEQ ID NO: 391168 - DNA, 312 bp, Salmonella enterica
ttgcttagttcacatctcgctaaatttaataatctggaggacagaatcaatggactggggatctgcgttcacgatattgctgtgcaaaagataaccctcacgaatcttcagaagtacgtcatgggctggagcgctacgctacatttcgctgcgcaggatcattttgggctgggtgttgccgatatcaagaataacttttatcgcgaatttcgttttttccgcatatggttctttttacagcggcacaaagattttgcctttaaaccttttctcacaaattttaatacagtcaccagaatcggcgcttactga

SEQ ID NO: 391169 - DNA, 138 bp, Salmonella enterica
atgaataacgagaagttattccgtttaagcaggatgtttattgctgttatctgcgcatctggtctttttattcataccgctttcgcggctgaatctgcgaaagatgctaccgcctatacccaacaggttaatcaataa

SEQ ID NO: 391170 - DNA, 276 bp, Salmonella enterica
atgaaaattgcgctgttccagaaaagccaagacgttcaagggctagatagcgttggctatattgagttttactatcaatatatttcccttcaagaagtttatatattgcacgggcttgccctgccgttaacttgcggtctggagtgcttttgcctcggtttattcttgggaggattccttttttccatgtttctgctgctgcgagtaaagcattatgtagttgggccagcgttcctcctccctcaattattgggcagatactctgacgtaacatga

SEQ ID NO: 391171 - DNA, 960 bp, Salmonella enterica
  misc_feature (850)..(859): n is a, c, g, or t
atgactattgagcttcatgatctcatgtctaatagccatccacaattagatgatagtattcaagtatggatagatcagaataaccacttattaccgttttcatacacatctcaaaaaatacgtacactgttagaacatgtaacgctgcatgacggatggcaacagattcccggttttctaatattacgcacgcccctgcatggccccagatggagccaggttattctatacccatacgataatttatttagccgcatcttaaaaactatccttcaacaaatcccctttacgttaacagagttggtgttgatgacgtcggctttttgttggttacttcatcgctcactggccaaaccgttatggcattttgtcgatgtcatcaataaaactgcaactgagccgctaagcacacgtttgccagaagaaagacaggatgaattaggcagtattgcctgcgcttttaaccaactacttgataccctacaagtacaatacgacaatctggaaagcaaaatcgtagaacgcacccaggctctaaataaggcaaaaaaacaagccgaacaagcaagcaaacgtaaaagtattcatcttacggtaataagtcatgagttacgtaccccaatgaatggcgtactcggtgcgattgaattattacaaaccacccctttaaacataaaacagcaaggattagcagatacagccaggtactgtacattgtctttgctaactattattaataatctgctggatttttcacgcatcgagtctggtcatttcacattgcatatggaagaaacggcgttactaccgttactggaccagacaatgcaaaccatccagggaccagcgnnnnnnnnnnatcattacgtacctttgtcggccaacacgtcccgctttatttccataccgatggtatccgtttacgtcaaattctggttaatttactcggaaacgcagtga

SEQ ID NO: 391172 - DNA, 222 bp, Salmonella enterica
atgattgtgggtatcggaggcggtaagacactggatacggccaaagccgttggcgccaaattgaatattccgattatcgttattcctactcttgcctccaccgatgcgccatgcagttccctcgttgtgatttataccgctgaaggtcagttcaagcgctatatgatgttatccgttatgttgttgcggaagattgtcgcattaaaggtgcaggaaacatga

SEQ ID NO: 391173 - DNA, 774 bp, Salmonella enterica
atggcaacaacgatggttaagatactggtagcatcacagtcacatgagcccactatttctcaggatgaaatccataacatcctgcttggtagcagttggttcagggcgttaccggattatcttatcagtcaaatgttgtccctcgccagcctgtatcggtatgaggacggagagatcattcactatcgcggtgatgaatcgcttggactttatgcagtcatcaccggctcagtaaaggtaagttcagtttcagccgaaggcagggagtgcattttccgttatctctctcccggaaactggtttggcgaaataggcatgatagacaaatctatgcgtacccacgatgccagatctattggtaagacgacacttctgacactcagtccccgtgacgttgggttcctcctgcaaagcaaccccatcctttaccgctttctggcgctgctgttgtgtaaagtggttcgtaatgcattcaccatgctacatgacagtacgctactttcggtttcagctcgtctggcaaagcgtctggtcagcctgtcagaaggctacggtgagactcacgaacgaggtatattgattaatctctatttaacacaagacgatctggcgaccatcattaataccacccgtcagacaatcaataagcgtctcgttgcatgggaaaaacttggctggatagatgcccggtacggcaagattataattgtcaatataaatgcgttaaggcagttatatgcagatgaggaggatgaacaaagcatatctggataa

SEQ ID NO: 391174 - DNA, 1338 bp, Salmonella enterica
atgtacgcacctaccgttccttatttatcacaggcaatacataaatcaatacgccggatcattccgatggtcacactgatgtttattctggcctatcttgatcgttccaatattggttttgccaaacaagaatttcaactggataccggtctcagtgatgccgcctacgctttcggtgccgggatattttttattggttacgccctgtttgaggtccccagtaatatactgctttaccgcattggcgctcgtatctggctcgcccgtataatggtgacatggggagtggtatctgcggcaatgatgttcgcccacaccgaatcaatgtttatcttcctgcgtttcctgctcggcgtgagcgaagctggtttttttccgggagtcattctctatctgactttctggtttccgcaacatatccgcgctcgcgtcaccggctactttttatttggtgcgccactggcctttattatcggcggtccgctctccggttcagtactctctctcgaagggactgtgctggcattcggattacacggctggcagatgatgttccttgttgaggggctgctggcatctgccgtcggaatctgggtattcttctacctcgatgatcgcccggataatgcgaaatggttaactcaacaggaaaaagcggcacttaaccgtacactccaggaggaagatcaggttaagctggcgcatggccccagaggcgtctggcaggcattactggacgtacgcgttctctacctctgcctgatctggtttacggtacaggtatgcggctatgggatctatttcttcttaccgacacagatctccacactgattggcgccaaagtaggcctgttggtcgggttcgttaccgctatccctcctctttgtgcggccattgcggtgtactatgttccacgtatctctgagaagctacaggaacgtcggtatattgcctccatcacttttatgtcctgttcggcaggaattgctgtttccggcctggcggacagtataccgctgatagctatcatcgccctgtgcgtggcagcagcgggacatctggctatgcaaccactgtactggacttttccgtcttcttaccttggcggtacagccgcagcatcagggattgcactgattaattcaatgggcaatctgggcggttttgtagcaccaaatctgcgcgtctgggcggaacagaacttccattcggctcaggcagggctctactttctggcactggtgacagcaatcggtagtttgatgattctgactcttcgtcgtttcgggattgaaaaatctgtcgacaccgcatcatcggcctgtgaaacgaaatga

SEQ ID NO: 391175 - DNA, 1113 bp, Salmonella enterica
atgaaaattaccagactcagtacctttattatgcacgtgccagtcaccgaaaatatcatcggtgactccacccacagcataacccattggggaatgcccggagtgatgatagaaaccgacacaggcctggtaggctacggttataccggtacacacgctgacatcaccactgaccgccttataaccaccatcatcagcgacgttttcggtccgatgctgactggtgaagatgccagcgaagttcgttatttacatcgtaagatgtcacgcagctcaaccaatatctggatcggacgcggtggcctgatgcaaatggcactttctgcgattgatatcgcgttgtgggatctgaaagcaaaaatggtcgagcagcccttgtggaaagtttttggcggttcgaaaaatacgcgtgttcaggcgtataacaccgattgcggctggctggtacgagatacccctaagctggttgatgactgtaagaaaatgattttcgaagaaggctttaatgccatcaagatgaaaataggtaaaccagacccacatgaggatctaaaacgtattgaagccgtcagaaaagcgattggtgataacgtgaatctgatggtcgacgctaatgctaaatgggatatcagcactgcaaaacagtatggttcccgcctggcagactttgatattacctggtttgaagaaccaatgtggcacgatgacattaccagtcaccgtacactggcagaacatatcaacacgccaatcgcacttggtgaattactctatcaatttgattcatttaaagagttcgtactcgctggcgcagtggattacctgcagcccgatgctacacgttgtggcgggcttacagcagtatgggagatagcagatctcggcctggcctttaacctgcctgtagcaccacaccacggagacatgatgcaggcacaactccacctggtgatggcgcatccatcctgttcactgctggaatttatcccctggacactgggctgctttgtagatccggtagaggtaaaagagggctattacacgctgcctaccactccaggagcgggtacgacactgcgtcgcgaagcactggaacgctttagcgtaagataa

SEQ ID NO: 391176 - DNA, 309 bp, Salmonella enterica
atgcctgttaataccgaacgcaaggatacccgtgttgttgcccgcgtatcagcggatatccaggaaatgatccaaagagcagcggactacacaggggctacggtatcgcagttcctgattgattcagcgatgtgcagggcccgggatatcatcgagcagaccgagacgttacatttatcaatgtccggggccagaacgatgatggcagtgctggataacccgccgaaagcgaatacgaaactgcttaaagccgcgaaaggatataaggattctgttcatgcccatgagaatacatttccattgtcctga

SEQ ID NO: 391177 - DNA, 642 bp, Salmonella enterica
atggaaatggtaaaagcaaacaaagtttcatcttcgcattgggtattataccttatcattcgttggctttattttttactaggtattcctgcattattattttacagtgttgtctgtttttctatatcagattatcatccagaagcttacttttggggctggggatgcttactacttttgattgctccatgtctgtggctatatagtaaagcgataagtaagaagcaacgaatcaaagatgttgtacaaaaaattaaagacacaggttattattccccagataaagattatgaaaacatgtcgttaacccacagcacttatttcggtattgatataagaaagggtaccatgctgtatgtcaggattcgaccaaacaacatcatggatattattggcattgatactcataatttcacccgaactgtcagcgataataaagaactgaagatatatacgaagtatgtaaatatgccagttattcctgtaacaacactttgtacttcatccaaagtttctgcagacaccatgcacgcaatggccgataggaactatgattacccgctcaacttcccccgaatggttcaggaaaaacgcaaagagtgggagaaaattgcaggcgtacccgtcgcagaagttttttaa

SEQ ID NO: 391178 - DNA, 2181 bp, Salmonella enterica
gtgaaaataacattccgtgcgcctgcgctgtgtgcaggccttttcatgcccgtatttccggcgctggcctccgtgagtttccaggatatcgtcactgccgccaccaaccctgacgacctctctcgtcaggcactggtgactatttttggcgatgtcgtcaccaacccactgtccggcagcggcagtacgctgattggcaacctgtatggtttattcaacggcatcatcgccattctggcggttgtctggtttatgtttatcggcctgcgccatatcgtcagtgccgggcaccaggggcaggttttcggttccggcggacgtgatatcgtcggcacgctcggcatcgtgagcggctttctgatgattgtgccaaccggaaacggctggagtcttgcgcagctcatcatgttgtggggatgttccatcatgggcgttggctctgcaaacctgatggtacagacagccgccgatgatattgccagtggctactccatgacggtgcaacccattcaggcctccacccgcacagcggcgcgtggcatattcgaaatggaactgtgcaaatacgccatcaatgcagacctgaatgactacaaccgcagcgcgaagtcctcgacgtcgctgatgaaggagtcagataaaacggccgggggtaactacatcgtcacggtatcaaacggcagcggcgtgtgtggtacagccagcctgccagtcaacgggaacggaaagaccagccagtcaaccatcagtaaattcttcaacccgttcagcggcaatgaatacaacggtgttatccaggcgcagaaaaccgcgatggatgagatgatcaaagatatggacggtaccgccagggaatttgtggccacattcagggagaagcgcgacaccggcaacggaacgttaccggatatagaaacccgcatccagaaggctgcggacaactatgaacaggctgttcagaaagccctgccggaagacaatgaggaaagggcaaaaaaagaagcgctgaaagcgtacctgaaaacttatggctgggtggcgctgggagcctggtaccagacatttgcgacggctaaccagcgtctggcagacctggccgacagggcaccggcggtaacatccatgtcgtcgctgggagaagctggcgatactgatttcctcgctgctgttatgggcgcgtacagaacacagttacagaattcgaattacactccagtattgggtaccgtaacatcagccagtgagcgcagggcatctaatacacaagatcctcaatcagcaataggtgaattgatggggtatgatctgaccagtctaacgaataagattgccactatatattcaggaacagggacatcaagtaaacaagttaacccccttcttaaaatgaaagacatcggtgactatactatggtcgcaactgaaagcatttgggccggatatacaacagtcagagttctcgcaacagtgggagatagctctattttcggtaaagccgctaattttttcacaggattaccgaaaggtgttgtggctctattagatgctgcggcacctccagtatattttttattgttcctgttgttctgcgctggcttttcattatctatctaccttccgttcattccctttatcttctggatgacagggttcggtaattggattgttagtatactgattggttgtaccgcagggccattatggggagcaactcatctggggacatctcaggacaggggaagccgtgcggcatatggatatatctacctgattgatacaatgatcagaccgcccctgatggtcttcggcttcttttttgcgtccgtggcgattgtcgccgcaggtacagtgcttaattttttgtttggagcagcactaataaatgttcagataaattcattcacaggggtatttagccttgctggttttttacttatttatgctagggtttctacaacaatagttgcttcagtctttgctttacaggcgtacctgcctgatcatgtaattaatttcttgggtggtcgtgatggagttaatactcttggcagcatgatgtcatcagttaaggaaatttttgcaggtggtagcagaaacatcagacatactccaggaataagggaagacaggcttaaaaacaaaaatgctggagaagataacaaagatggaataaaaggttga

SEQ ID NO: 391179 - DNA, 351 bp, Salmonella enterica
atgaggaaaaaactggcgtttatcgactccagtttagacgatctccgggaatttcctgagtcgccacgacaggaaatggggtatcaactggatcgggttcaacaaggcttagaccctgatgactggaagccatttaccacagttggcgctggagttcgtgaaattcgagtacaggacactgacggtatttacagggcgatgtatgttgcaaagtttgaagaagctgtttacgtgttgcactgttttcagaaaaaaagccaggcaacgagtaaagctgacgttgatttagcaaagcggcgttttaaaaaacttgtacaggagcggaaaaatgaaaacgcagaccttcgataa

SEQ ID NO: 391180 - DNA, 297 bp, Salmonella enterica
atgaaaacgcagaccttcgataatgtttttgatgctatttgtgatacacctgagcaggccgaaaatatgaagatccgggccaggcttatgactgtattaaacacatggattgaaaatcagggctatagtcaggctgaagccgctactgttcttggtgttacccagccccgcatttctgaactggcacgggggaaaatccaggtttttagtgtcgataagctaatctcaatgatggctcacgctggtattcagatccagaatatggatatccgctatcccgatatggtcgctgcataa

SEQ ID NO: 391181 - DNA, 375 bp, Salmonella enterica
atgaccattccccaacctggtgataaaaaaacaggtaactgcccacaaatagaaagtttgcctgaactgaatgatgtccttataccgctttacgaacaatcgcaaattgaaggaaatgaggtaatattccttcaggcatgtagccaattgaacgaagggttcaacgaaattgattcaccctatacgccttacacagttgcctggcgtttgtggatgaaaggatatgtacaagggtttatactgggttttatatcaggttatcttggatctgtacgagaagttgcacagcgcctacagaagatggagttgcctgttgaaaaaatttgtaaagtcactggcctcagcgaagatgaacttaaaaaaatcataatctga

SEQ ID NO: 391182 - DNA, 156 bp, Salmonella enterica
atgaccatcgccgaacgtcttgagcagaaaggtgctattaaaagagcccgggaaattgcgcgccggcttcagaaaatggggatgacgccggagcagattaaacaggcaactgggctttccgaagacgaactgaaaaaaatgattagtgcgggatga

SEQ ID NO: 391183 - DNA, 270 bp, Salmonella enterica
atgaacaggtgcgtgttcaaattcaacatggtgaatgccggagactctgtttccccggaatttatgcgggaactggctgagcgcctgccacaacatgaggataaactgatgaccatcgctgaacgtcttgagcagaaaggtcgcctggaaggttctattgaaagagcccaggaaattgcgcgtcaacttcagaaaatggggatgacgccggagcagattaaacaggcgaccgggctttccgatgctgaactgaaaaaagttattcactga

SEQ ID NO: 391184 - DNA, 642 bp, Salmonella enterica
atgacagataaagaggttaccggggaaaatacagacccgtccgcccgttccccacgccagcgccggcgctggcgctggcgggtcacccgtggcgtactgaacattattctgcccgtcacggaaaccggctggataatccgctcctgccgccacatgtttgccagccacgcgcagcgtatcagacgctgtctgcctgaaaaaaaggagggcacggcacaggcggagctcagctgggcagaagcggtggaagtcagcgggctgcagccggcgcagctggagcaacgcttctgtcgcctgcgcacccgctggcgcgtgtttttctggctgctgctgacgccggcggtgttcctgtgcggcatggcgctgcacgccgccaccctgccgccggtcacgttctggcggctgctcaccacccttctgtgtctgctggcctgcgcgggattaagcgcatcgcgcgcgctgattgtgacctaccggctctggcagctccgtgaacgtcgcgtcagcgtggaagaaaaaggcacgttccgcgattttctggcacagacacacggatggggaccggcggtgtggcaggccgtcacggtaaccggtcgcgtgaaaaaattaaacgctaaaactaacaggctgtacccggattga

SEQ ID NO: 391185 - DNA, 1218 bp, Salmonella enterica
atgttcagaaaaaaaaccgtcaccatgacggctgcgctcctgggcactgccgctgccgtctggcagacgccgccggcgcacgcttatcccgtcaccgtcgtggccagcacccccgtcaccacgcagatcctgccggaaatgggcgccatccagggcgtgctgggagaaattctctcgatgcagacggccaccggcacggccattaaccagaatgccgaaaagctggcctccgtcatcgccgagaacggccaggccacgcgccagcagatgatttttggtcacgagacgcagcgtcttgaggaagccaggcagagttttaccgtaccggactccatctgcagcgaatcggcctccggggtggccgcggcgagtaaggcctcgtcggccaccaccgcgtcccggctcagcggcggcagcggtatcagtaaccgtaccatccgcgaatgggtgacgaaagccgcggactcgccgtcccgggaggcctatgacggcgcggttgtccatgcggagtactgtaccgcagcggaatacgcccggtttggcggcaccgccgtctgtccgaaagaaggcgacccgcccggaggcgacagccgggtacgttcggtgtatgacggtgccgggggggaagacacgccgcccgccctgacctgggatcagaaacaaatcgatgccgccatggcctacatgaaaaacacggccagaccgtcagccggccggacgccggggaaaggtgaggtcagtacccagagcggccgcacttacgtcggcctccagaatgaatataacggtattattgacgccgcctcacatccccagctggcactgattgccgacagcatgccggacaaagccacaaaagacgcgctggccgaagccctgcagtcggattccgccgccgcgtattttgatcaggtcgcgtccccggaggcaaaagccaggggttacatgagcgcccgtgagttcgaatcctttgaagccggacgtcgttacgcgaacacggcgtaccagaccgacctgcaggagatgcagggcgataacctgctgcgtgaactggtccgcaccaccgcccagctcaactggcaactgaacgacctgaaagagcagatccgcgagggtaacgtgattgccggccagcagctggcgttgtccgcccgccagtattacgagcagcgcctgcacggtctggagtcaaccatcagccaggggatgtcaaaatga

SEQ ID NO: 391186 - DNA, 582 bp, Salmonella enterica
atgcagacgcataccatacacatcactccccgctgccgtcgccctgtccgggggcaggtgttcctgaaacgtctccgtgtggagggcgaccgtttttcgttctcgctgccctcctcctgtttcaggctggtaccggcctgtaacccccgggtgctgtatgccaccgatacgcgggccgcagaaacagcccgtggcgtccgcctgttgctgccggaaaaaacggacaggttgttcaccaccgccatctggcaggtcaccctccccggcgaaccggcgtttgacgtccttcatgtcattcagtggctgctgcctctccccctggcggcactgatgagcgatgacacctggctgtggggggcggttcctgatgcgccggcactcagccccggagactggccggttatggagccggatccgtcgtcgcagtttccgcgccggatcagacgccgttcgttcagcgttatcgatacccggaaccgcaggggatatatcatccgccggttccagaccttcccgctcgcgcccctcccgccggagggcgaatatgacagcctcccggatgtggtcattcatcccggctaa

SEQ ID NO: 391187 - DNA, 3045 bp, Salmonella enterica
atgaatattaaccgcattgtctttgccgcagaagacctgctgaacaccctttcccgtttttccgttgccgccagctttgtcgactacagtgacctgcgtaccgttatcggtcttgaccgccaggatcgcgaaaaacgtccgtggctcagcgccccctacattgccgtcacctgccggggagaatacctctccgtttttgaagtcagcggcgcgtttcgtgaaatggatgaaaatccggaacagaccgggcacggctcgctggaatccctgattagccatctcagcgacaacctgagtaccaccttcaaaaacaagggccataagctctctttcgtgtttgaacgggatcaggagcgcggacgcgatgaaattgctgacatgatcgccccgcagatgcggtcactggaaaataccggtattcagttgcaggatgtgctgaacgagaaaataaccacccttgcgccctggctggtcagggaacgctgctggctcgccgtctggagttcggcgctcctcgtcagtcgcgctgacagggaggcacatgatgaacgcgtccgcaggctcaccgacagggctccggtcgcccggttcgcacagcagccctggctgtgggtcatgtctgccctgaaaattcgtcatgactcgctgctcgatatgcttgagcagacgctcaaccgttcatcagacggcctgttgctcagattactggacattcacgagctggggaatgaaatccgccgggaagtggacagggaacacacgccccgtcactggcagccgtttctcccggatgactgccgcccggcagggtcccggcggggggatgacacgtcccccctgctcacgccgccactgaacatgcagttgttcagccgccaggcagaaacacacggcagcctggtccggtcctgcggcctctggcacgggatggtcaccgtcacgctgggcccccagaatccccagccctttaaccgtctggtcagcgcggttccccggcccgttccctggcgggtcagaatggatctcatgcccggcgggatgaacgcgctgggctggaaaaaaacgctgctgacctacagcagtttcatcggtgccgtacgtccgatgtatgacgccgtcatgcagctggccgccacggacgaccgtgacccggtctgtgtgatgaccatcgtcgccaccacctggggaaaaaaccgggaaatctgctcccggaaccaggcgttactgcagtccgccattgagggctggggcgtctgtgacaccaccaccaccttcggcgatccgcgccgggcgtgggtgaacaccatgacgggcgcgtcagtcggctccgggccggttcctctgtatcctccgctgtcacacgccctgtcgctgttaccccttaaccgcgccggctccgtctggcggggaaaaggtaatctgatgctgcatacggaggacggcgcggcatgggaaaccgggctggcatcctcacagcagaacaagcacaccgaactggcaccgggcgatccgggactgggtaagtcggtgctgatcaacaccctgtcagaaatccagatttcttcggcgcagaaaaacattccctttatcgcctatatcgacaagggtttcagcgcacagggactggttcagctcatacgcgacagtctgccgccggaaagaaaagatgaggccgtgggtatcgtcctgactaacgatccggaatacacgcgtaacctgttcgatgtgatgtacggcgcgcgttaccccatttcgccggaaaaaaacttcatgaaccaggtgctgtcttccctctgtatcgataccggtaccggtcagccctgtaaccccggcgacacacggcagattatcagccagctgatcgacctggcctttaaggaatacagtgaaaccagcccgaaactttaccgggaagggaccgaacctctggtggatgaggccctgcgtgatacgggtctggctgaacagcatgatgcgcggtggtggtcctttgcgtcctggtttgacgtgcgggatatgctgcatgacgccggctgtattgccgccgcgcagcgggcgcattaccgcgccatgccggtactgtcggagatgccgtcactgctggggcatgaaagtatccgcgatgtgtttggcagggtgcagcgtgaccattcctcggagccattactggactatatcagcagggcgctgagccagggacacagcgactatccgatgatgtcgggatgcacgcggttcatgctcaatccgcagacccgcgtggtcgccgtcgacctcaacaacgtggccggcgacaaaacccctgccggacggctgaaaaccggcattatgtatctgctggccgggcagattgccggcggggattttattcttccgcaatatcaggatgagatacggaaaaatctgcctcctgccttccatcaggtcgcgttcagccgcataaaccagctggaccaggaggtgaagaccaaagtttatgacgaactgcacaatgcccggggcattgactttatctgggatgcgctggatacccaggatcgtgagcagcgtaaattcggtatacgcacggtactcagcacgcagtacctgagggactacccggacagcattctgaagtcggcgaacacgctgtggctgctgcgctaccgccacgacgacattccgttactgcgtgaccacttcaatgttccggaagtcacgctcagacgctttctcaaaatgccggagggaccggcccctgacggcagcggcgtcccggtactgtgtatcttcagggtgaaaagcggcaccctcgcgcggatcctgaaattcactgtgggtccgctggagttgtgggcgctgaactcgtcaccgaaggacagcgcgctgcgccggatactgaccgggacactcggttcactgaaggcccgccaggtactggcggaaaatttcccccggggttcggccaccgcgttaatcgaacaccgggccgggcagcaccacagcgaggacgttatcggggagctggcggccgaacttatcagaaagcagggatacaacctctga

SEQ ID NO: 391188 - DNA, 426 bp, Salmonella enterica
gtgtataacatcaaagaaacatattcagttatatggaaatggtttatcgaccacgttttaccggcgaaaaccgtaaatatcacagtaaaaagttcagtcattaccgtcatgctgatatttttgtttgcactgcctttgttactattttcttatctgctgtttccatattccacagtaaaaaatgaaacagatgaacatattttattttacttccagggtatgctgattatcacaagtctggtcggtgttgttttcagtgtaatattaataaaagtgtcgtctgaaaaaatcaggttcataccctgtaacatacacagagacaacccggcaggcgcaacacttgttttttaccttctggccatgctttttattactgttatgctgaaatacgtcccggatttactgtacagtctgctgccggcataa

SEQ ID NO: 391189 - DNA, 804 bp, Salmonella enterica
atgaaaaaaaccattaaagagggctggctttttccgttaccggttcccgacgtcgtccacacccgggcccccctgctgcctgcaccggagcaggccacacccggtcgctgtgtctgctgccgggctgacgttcagcaccgtttcctgctgaacgaatcgtatcccctgcgtcagctggctgaggcgctcagcgacacacacatccgtctggaaagagccgccacaacgctgcaacgcctgcagtcaaaaccggttccggctgagcaggacgaacagaaaaaatatctcaccgcgcttcaggccgcagagcgtacgctggcgcaggtcacactcgctgcccggcgtctggcgctgcgtcacgtgcagaaagccgaaatcgtcagtacggcccccctgaagccggaagaactcagcctctttaatgaagagaccgccgcccccttttcgctgtgtgcattctgtcatgcctggcacgcgctgaacggttttgcggcggcacagggtgtgatggtctggctgccggaccttcacccttctgtcgtcgtcgccctgaaccggggggcgctgcaggccattttcagcggcgataaggcccgtgcccgtcagggccgcgaggtgcttaccgccctggcacagaaccggctggccgttgaggaaaaattccacagttttcgcccggccgattttgccgacgccctgcgccactctcccccttcccggcgcgacgcgctgcgggagaaaatggacggactggctctcatcctgatgccggactcatttccggagtcccggatgactgactga

SEQ ID NO: 391190 - DNA, 186 bp, Salmonella enterica
atgactcccgatgacttcacggctttacgtacggagcatggcaacgttattgcccttgaccggcgcgacaaccaggaatttgtgctcgctgaatgccacagcccggacgtggcggccttcattctggacgccgtccgcttccacactgcccgtacacggagccttccccatgaaaaaaaccattaa

SEQ ID NO: 391191 - DNA, 426 bp, Salmonella enterica
atgtcacgttttcaacgtcagcgtcagcgtgttcgtgtcatggcggcgcgcgctgccaccgctttcttttacgcacaactgttcctgatgaacatccgcgacaggatgataaacctgttgctcctgctgcccatgatgctgctgccccgcgccgttctggccgacggtgaccttgccgatatggtcagaagcgtgggcgatggcgcaaaatcggctcagacgtcatcactctccatcgcgcagtttatcggcgtgattatgttcatcggcggtgtggttggcttcaagaaggtcggcaaacagggcgggatcggactcggtgcctgtatcgcttcggtcattatcggtgccgttctggccgtggcaccggaagtgatgaaccgcagccagcgccagttgggcacctccgccaccaccatcagctaa

SEQ ID NO: 391192 - DNA, 528 bp, Salmonella enterica
atgaccatggacgccctgaccgccattaaacattttgccgacagtatcttcagcgccggcatgagcttcctcttcacgtgggggcagtttctgggggtcatcagcttcatcctgctgctggcccgggcgcggtcgtccggaccggtgcagatgtctcccggaaaatttatcgccgggctgttcacctgcgccatgatggtctccctgccggcgataattaatgccggcggtgcccagttggggttccgggccgacacgttcagccccatcgcctacgttcagccacagtcctttggctccgctgccggtgccgccaacgccgtcctgtccctggcaaaactggccggcgtcgggtttgccctgtcaggtatcagccagtggcgtaaggccggtcttgacggtcataccgcgctgagcgccagtgaatccgtcagccggggtaacgtcaaattcatcgccggcgtgatgctggtttttattgaccgggtcattgatgccgctctggcaagcctgggcttcgttttctga

SEQ ID NO: 391193 - DNA, 756 bp, Salmonella enterica
atggagaataaagtaaacgatactgacaatactgatgatgatgccggcagctttggagaagagacgaccatcccgctgccgctctggaaacgcccggtctggggactgagtccggcctttctggccggctgtgttgtgatgattgcggctgcagcctggtatctgttcctgagagcgccggcaggacaaccggcttcagcatctgacgacgccttcagtaccatgccggcctggcagacgtcgtcgacgacaccggtgcccacgtcctccccgcctccacctgtcaccgccacgccgcaggtcgtaccggcgggcaccggcgctggcgccggcgttgacgacatgaaccgcctcgcggaagacctgaaatccgagctggacaaccgcgatgcaaaactgcggggcacgctgaacatgctgcaggacagcatcagcacactgagcgacgccatccgtaaggatgaggcttacgcgcaggaaacccgccgcatggtcagcgacctgcagacgcagttcagcggtctgagcgcccgggaggcggcggaaaacgtggccccggccaccgcgccaaagaaaaaaaccgtcagcccggtctccggaatgaagattatgtcgatggagaacggcatggcatgggttcgctggaagggcagtacctgggccgtacgggaaggcgacacgctgggcagggtcaccgtcacccggattgatccggcgtccagaaccgtcaccaccacgggcgggacactgcgatga

SEQ ID NO: 391194 - DNA, 1359 bp, Salmonella enterica
atggatgccgaacaggacgccggaaaatccggcaaaaaactgacgtccctcatcggactgctgctggtgacgcttctggggggcggttatctggcactgtcctggtttaaccaggacagtgacggtacccgttccgcagtaaacctcaacagcaccctgaccggtaccggcagcggcgtcaccgagacaccccgctaccgggaactgctgaaggaggataatgaccggggggccgcggcagcgatccggaacaaccggacctttatcgccagcctgccgcagggactcgacaccccggtcacgaccgcgaacgccacaacgccctccggcgacaccgggcacaggcaggaagacaaacgtgccgggactgaccctctccccggcgcttccgcacaggaagacaaagccgccggcgagaaacgccaggagcgtctgcagaaactgctggtcaggatcaacgcacagcatacatcaggcacgccccccgtcgtggcggcgaccatgtggaaacgtcctggcagcaccggcagcgtcgccggcgtttccggcccgccggtggccgtacagacagccagtctctccacgccgcgtgtaaaccaggggatacaactgataccggcgctgaccagtgtaccggcctttatcgacaccgctgtggattctgacaaccccgactcgaaggtcaccgcctccattccttccggccagtgggccggagcggtactgttcagtcccggggtgaaactggccggggatggcgtggaaatccacttcaaccgcatgcagtggcgcggcatggatctgaaggtcaatgcctacgcccggcgtgaggacaacctgatgtcgtccgtcgccagtaacgtcagtcatcgctggttcagtcatatcgttctgccctccgttctcggcggtatcggcggcgtgggcacgctctataaggatgcgaacacgcaggttattcagggtaattacggcagcgtcaccggtcgggtgggaatgcctgacggtaaagcggttgccggcgtcattgccggcgggacggcagaaaaaggcgcacaggttctctcacagcagctggcagatgaaccgtataagcaggtgacagtgtcacaaaaagaggtggtttccatcctctttgtcgatcccgtgatgagcagtgacaccataacaggtccggaagtgtcggcgaccgccggtggcccggcgtcttccctttcgcaacagaacagtcgtccggccacgctcgcggacgccgaagcgcagacacaggcccgcctgcagtcggcaattgaacgccggcaggcagaaatccgccgccgttatcccaccccacaacaggaggtcccgtatggagaataa

SEQ ID NO: 391195 - DNA, 1014 bp, Salmonella enterica
atgcgaacccgttatattctgagcgccctgtttctggcgtgtggctccgccatggcggcagacgccccgtcagcgccagcgtcaacgcccgcctccggcggctggcgtcaggcccgctccccgcaggctgcggaaaccgctgccggcagcaccaccccggcagccccccggcccggaggcgtaccggccgtacaggtacagggaccactgccgtcacccgccgtgaacagcccgctggttcaggaagcgggcagactggactctgaactgtcggcagacgagatacgtgccctgcgcggaattatgtctgaaaacgaacgcgccatcagcgcgccggtgaccagcgtggtcccgcgtatcagcaccctgaccgtcagcctcgccccgggggccagcctgccgctggtacgcaccgccatgaacaacctgagcgtggtcaccttcactgatatcaacggcaccccctggccgcagtcagacgccccgtacaacgccgcgccgggtctgttcgacgtgcagtacaacaacaatatggtcaccatcaccccgctgcgtccctgggcggccggaaacgtgtcggtctacctgaaggggctgccggtccccgtgatactgaatgtcaccagcggggagaccgacacgcacaccacaagccaggaaacggacagccgtctggatctgcgtattccccgcgaggggccgggcagcagcgtgaccgcaacgccggaggaaaaaatcgccctgcatgaccgtacgctgcaggcatttctcgacggcgtgcccccggactccccgacggtacaccggctgaaattcaccggcaacgtcccggacaccaccatctggcagtccggcgacgagctgctggtccgttcccgcgcgatgctgcgcgacgaatttgaacagaccctctcctccgcagacggtacccatctgtggaagctgccggtcaccccgctgctgaccttttccgtggatggtcgttccgttcatgtcacccccgatctggagtaa

SEQ ID NO: 391196 - DNA, 708 bp, Salmonella enterica
atgaataaagaaaaaaatatcccggcaccggaaaccgtgccggcagttctccctgcgccggaccctgctgtactggctgaagccgttaaaaccatgcaacagtcggaacagcgtgccgccctgctgcccaggatgatcaaactgtcgtttaacaccagtttcgccctcatcctcagcctgctgggtaacggcgtgcagtactggcgctccaccaccgttgaacgacagtatttcgcgacagacaacggtcgtctggtacgtctggcaccaaccagccagccgggatggagtcagaatgaggttatggcgtttgccagtgaaacgctgaccagcggctttaacctggactttgtgcactaccgctcacagatatccgccctctccccccgtttttctgaaagcggatttaacggttacgtgaacgggctgcagacgtccaacattctcgacaccatcaaaaaagagcgtatgaacctgacgtccaccaccggggccggcgtactggtccgccaggggcaactgaataacggcacctggttctggacgttccagtacccggtacgtatgcgccttgtgggacagacgaccagtaagcctgaacaggcattcacgtttgagatcaccctgcagcgcgtcgacccgaacctgaaaccggccgggatcgaaatcacgcagatgatttcccgtaacgcgccatcaaccccctga

SEQ ID NO: 391197 - DNA, 351 bp, Salmonella enterica
atgaacatgcgtaatatccctgccgtcctgctgtgcggcctcatactgataccggcatatgccggggccgccacctgccgggcaggcagtgccgcgcaggccggcagtgacgccgggtatgagcgggcgcgcgccgccgccgacgcgtggtcgcagcgtgaaaacgatgtttcctcctccctgcagtcctgtctgtcccgaatcaaaaaaatcagcctgaacattccacagttccccagcctcgacagcatcctgtcgcagctggagaaccaggtctgcgacgccgtcgtggacaaggtgaacgacaggctgcccggtaacatcgacccctggaaaaactacggttcctga

SEQ ID NO: 391198 - DNA, 4104 bp, Salmonella enterica
atgaaagcccgttacagaacctggcttgccgtgcctcctgatgagcgcgagctcgcccgcaatgcccacccgccggtcaatggacagaaagcgattgtctgggacggcgaacataagctgtggtatgcacagcccggcgtggaactctccctgctggataaatggctcccgcgtccacagaatttttccacaaacgacagtgatcctgtcaccgagtttgcccaggaactggagcaggccggtctgattatcaaagggcttcccgtcatggatggtgccctgcaccgggtaccgacaaaagccgataaaaagggcgtgaaaagcggcgtctataaagcatttcttgatggccggcccgccggctggtaccgggattaccgcagcggcgatacggacgtgaagcgctgggtgttttccggcggtgacaatatagatccgctggcccgcctccatctgaaggcgcaggcgcaacagaaccgggaggacagcgcgagagcacaggcacagcagtataaccgccaggccggatatgcttcccgctacgtctcccgtctgccgcaggccaccaccagtccctatctgacacgcaagggcgtcacggcagcgccgggcgtacgtatcaatcccgggggtgaactggtgatcccgttcagtaatgcacaggggaaaatccgcacctaccagcgcattccggaaacgggcgggaaagatgcccggttgctgaaagacgccgaaaaaaccggtaactggttcaccctgggctcccccgtgaacggtcagccactgctgtttgccgaaggctatgcgactgcggcgtcactgcatgaatccaccggcctgccggtactgatgtgcattgacgccggcaacctgattgccgttggccagaatgcccgggccgtctggcctgacagtccgtttattttctgcgccgataacgaccatcacctgcaaaacccgcagaccggtgagccggagaacaaaggcgttctcagcgccataaaggctgctgaactgagcgggggagaggtcatcatcccggcatttactgaggatgagaaggcacagaaactcactgatttcaacgatctcgacacagcccggggacgtgacacattccgtcagataatcaacgtgcagttgcgcgaactgggcgtcagaacagatttccaggacacgcacgacgtacgtgaggcactcactgtcggcccactgacgttcacccccgtccagtctgaggagcaaaccatggataacccgacgataacagaaccagaaacgccggctccggcattaacggaaacgacggcagcaccaccgccacctgaacctcaaccggaaatacagcctgctcccgtggctgacagtacaaaaccggacaatgccgccggggagacaccggctgaccctgccgtggctgccgcccctgtcgataacggcccggcgtctgaaaacgctcagaaaccaccggaaccgggcgttcctgagtctgaaacacccggtgacggtgagttcgatgattacagcgcatatgaggaaatgatgcagtccggtgaaaccacgggacaacaacaggaagccagggtatccactgcgcaatccggatctcccgaccacgatcaggcacagacagaagggcagaacattccggcatcatcaggtacagaggagccccctgaaaccgccggcgcaaccatcacgcctgcggcggaggcccccggcagcgtgaccggagaaacacaggtactgcctccggagccgtctgctgctgccgctgccgtgacagatgtgtttccggcatcaccggaggaccggaatgcctttgcggaagacctcagccgcccgtcatcaacgtcaacgtcgacatcacagggaaccacaggggacatacctgcgccggcgtctgtggcagcgccggagccggaacagccggcccccgtacagggttctgcgatacaaccgcgtcctgttaccggcgcaggggaggaagcctcccggccggcgactgagacggagaccacagaaaaagcggctgagaccgtaaacgccggggaagcctcagcgtccgctgacaacacctcatccgccgacgccgacgccagcgccggcactgacagtaccgcaggcgaaaccccggcggagagtaacgtttctgcgcatgaccaggaggccgcaacgacggcggcgacggcgacgtctgccaccccagccggtacagataatgcggccggagccggtactgctgcggggacagagccccccggaaccggacctgccgccacaccgggcaccggagctaaagcagacgttcccccggacacgccagccctgctggacaggttcaggggattcttttcccgcagagcaaagccacagcctgtcgtcacgcctgctgtatcgcccactgagacgacagcgacggcagaggaagcgaagccgcagacagccacgtcgtctgtgcaggatgccgacggcattgtttatggcccgcgccgcccggattcgaccgcaccgcagaatctggacgaaatcataaaagcgctgaaatgggatacgcagccggataacaccgttctttaccgtcttgacgaccagccggcgttccgtgacctgggcagccgtctggaaatggtggacggcgccagtcaggacgaccgtaaggttctggcggcactggcggtggccacaaagttttatggcggcgtcattgagctcaccggcagcgatgagtttaagcagaaggcgatgcatctgattgtggcgaacaacctggacgtccggatgaaactgcccgaccagcgcgcgatgctggagaaactccgccaggaaaggggccgttcacaggatacggtggtgtctcatattcccacaccggatctgaaccggcagacgccacccgcagcagcgccggcgtcagcgtcagcgcaggctcaggccgtaccacagccgcagacaacgccggcaccggtaacggcaacagcggcgcagacagcggccacaacaaccgcgccaccggccccaccgccgtcaggagaggcggcatccgcgcccgcccggcagcaggctccgcaacctgaagcgccggtatccggcagtgcggataatgcggccacagccacagccggtcatgaggcagatgaagccgcgccgggcaaacttggaccgggcgaaagcgtgacggctgttctgaccaattatggtcgcgccgaatacgcgaagggaaagggcgagagctttttcgtggagctgagtaaccgcagcggcagccagctgtactgggggcagggactggaagaactggtaaaacggtgtcacaggggcgaagcggtgaccctgacgctgaacggccgggaagagttcaccctgcccggagacgacagaccccgcatcagaaacaggtggtccatgacccctgccggctgcggtattaccgtcccgcatgaccgccctgagcaggggcagcgtatacaggcctatcctgccgccacgttcagccaggtgatggcgcaaatccgccagggctggccggaattaacgcaggacgtgcatctgccggacaccctgccgcaggcgctgtatctgggggaagaccgccagccggtctccgggccggacgccgcatcacagttgataaacgtgaccgccacgccgccggagaagctggttccggtgatgggttccctggaccgggatacccgggagcttaacctgctgctggttcgcggcgcggacgatcacctgcagggtgtggtccgtctcaacggtaccctgtatccggcgctggccaccccttctgccgacaacagccagttggtcattaatgccatgaccgcacacggtctgcgtttcgccggctacggccgggccgtgaaccgcgacgcggacagcaacagccgtccggcaccacagctgatgcagtttcacctgaagcagagggaggagccgctttttgcctccctttacacccccgacaggcaaccggatgaactgttccggagtctcggatttgaacagacctggcaacagtggtccgacagccaaaagccggagggcagacaggaaaaaaatctgcatcaggatctctcccacagccccggtcgatga

SEQ ID NO: 391199 - DNA, 435 bp, Salmonella enterica
atgattagtgtattaagaaaaacatactcatggttagacagactggcccaaaaaaaagattttcaatttattctcatactctttttcggcgcattcgtcggttttcaggcaggagaacaatttaatttttataatctgtctaaaaaaccggaagcagccctgacagagttaatatataaaaaatgtctgagtaacgaaaatgtaacgaaagacattttcgacgagtgggcaacaaaagcctacatatgcgggagtgaagaacttgctcatgttcgtgataaagcattcaaaatggaaatgggcttaaaaagcggacaatatttccatgaatgtgaagtcaaaaaagaagaccaaaataaatgtctggccgacattacatctgcatatcaaaaacgactggagaaatatcacgaacttaaagacctgatgaattag

SEQ ID NO: 391200 - DNA, 534 bp, Salmonella enterica
atgctgtatatcagacagggcgatatcacccgtttcaccggagatgcgatcgtcaatgccgccagtacccgtctgcatcgtggcgggggcgtatgtggtgccatacacagggccgccggaccgcaacttctggtggcctgcaaaagccatatccggcgtcatggccgcctgcctgtgggaacggcagtgctcaccccgccaggaaaactaccctgccgcagtgttattcacgccgttggcccccactggctgttcgggttatatgcagaacgcctggatgctttgcttgcgcaggcgtatctccgatcgctgacgctcgcccgtgagaatggctttcgcagcatcgcctttccctgtatcagcaccggtcattacttttacccgcataaacgggctgcgggcacagcactgcggaccatcgtctcgtttctgacagatacagcaccggatatggacgttcactgtttctgtttcagcaggcgggacttcctgatttatcgccgtattcaggataataaaattcatggggaatag

SEQ ID NO: 391201 - DNA, 582 bp, Salmonella enterica
atgctgaaaaaaacgccccttctcaccctgctgcgggtaaccttccttgcccttcccctggttatcacgcatcccggttctgccctggccgacattcagtcaacgccggctacggcgtcaccatccgttcaggtgggcttttcaccggaaggcagcgccacccgcctcgttctggacacaatcaacggtgcgcagcactccatccgcatgatggcctacagcttcaccgatccggatgtcatgaaagcgctgggacaggccaaaaagcgtggtgtcgatgtccggattgtcgtcgactataagggaaacacccacagggccagccaggaggcgatgaaatacatcaccatgctcggtattccgttgcggaccgtggacgtatttgccatcgcccatgataaagttattatttcggataaaaacactgtagaaacaggtagttataactattccagggctgcagcacgaaaaaattcggagaacgttattgtcctgcgaaacatgcccgacattgccgcgcagtatctggcgcactggcaggatcgctgggacaggggaaccgactggcaacccgggaactga

SEQ ID NO: 391202 - DNA, 288 bp, Salmonella enterica
atgaaacgtgacggattctggcgttatgccaccccgccggtgaatctgtggggcatccccctgccgttcaccatgatttatctgtttattttcccgttcccgtcaaaaaccacgttctggatctgtacgggaattctgctcttttttatcgtactggatcggtccggctggtcactgcgcgcactctgcagccgcctgttctccgcactgcggggggctgtggcttccggacgcccgtggtggtaccgccactttattgagtcgccccgcgaccggaccggcctgtaa

SEQ ID NO: 391203 - DNA, 1146 bp, Salmonella enterica
atgaacatgcctgatgaattcgggattttcccgttctcgcggttctccgccgacgagttccgccacttctttgcctggtgcgcccgccacagggtcagcgacatcgagataatcggtggctctccggtttccgtcaaacgtttcgggcgcattgcccgtacctcagcctgtgtgctgccgtcagccatcatgacctcgctgactgacgaacttttcgggcgtgaggtgctgcccagggtactttcagggaaccccgtggatcgcaccatccagattaacggtgacgccgcaggccgctacggtctgcaacgcggagagcgggtccggttacgcgcgcatctgattcagggcaccgccgcgtcagaggaaaaaacgctttccgtcaccatgcgcgtgatcccctccggtatcccggacattctctcgatgaatattgagcctgacctgctggccgccatgaccagcaagaacgggctggggttcatctgcggggaaaccgggtcgggcaagtccaccctgggagccgcgttataccgctacatacaggatcactttcccgacagaaaaatcatcacctatgaagatcccgtggagtatgttcttggacgcgatgacgatctgctgcctccgcaccaggcgcagattggccgggacgtcgccagctttgccgacgggctgcgctccgccgttcgccgtaaccccgatgttatcgggattggtgaaatcagggacaccgaaaccgccgacgcgtccgtacaggccggtaacacggggcacatgtgtattggcaccctgcacaccaaatcgccgggagacaccttcacccggctgctggggctgttccccgtacagattcgtgacgccatggcccgggcattgctttcccttctgcagttcattctggttcaggttctggtcagaaccaccgatggcggtcgtcgtgctgtcagggaatacatcgtcttcacggatgaactgcgcggaaaacttgccggcatgcctcacccggaatgggaacgctgtctggatgagatcctgcgccaggaaaaacgtcgtatccgggatcaggttactgaaatgtacatcaacggcgacgtctcccgcagcgaagcggaactgtatgtcccccgcggagagttgcgatga

SEQ ID NO: 391204 - DNA, 843 bp, Salmonella enterica
atgaaaaaagtcctccttctgccgttcctcctgctgaccgggtgtgctgccggaaccgttgcacctcagggtggcaacacggctccgcctccggatctcagcgcctggttaaaaccgcaggccgttcgtcccgacggcatgtccgaaacgcgctggaaaatgctgaccgatgccggtaaaacgctgggattccgggggggcaaggcacagcgctcgtgggagctcattcaggcgctgaatgcccgcgaaagcaccctcaacgccctgtacgatttcagaccacttatcagtccggaaggctggctgcctcccgtcattgatgaagcgaaggatgttgcccacatcacccccgatcagatacgaacctcatcacatgtctggaccattatccgccccgagcgtttcgtcagtaacccgccgcaatggcgcgactggctgctcagggggctttccaccacagcgacgcccggaacggaaggcagtgtggttcccggcgacagaaaccagcggcaggtctgggagacagcattacggcagggctggcaggagggacgcgccagcgccgatctgacgctggaaaccagtatgaaacgcctgacacgcgactaccggggcatgatgctgtatgccctgctgtggcgacagggcatgatcacccggccatcggtatcagaccagatgcagactgtcaccggcactggacagaagctggtcaccggcgatcgcgtccgtcgtctgaaaaaccacgccgaatttaaccttcagaagtcacactggcgtcccctcatcaccactgaaaaggagaatgacaatgccaggacgtttccgcagacatcacactga

SEQ ID NO: 391205 - DNA, 465 bp, Salmonella enterica
atgaaccgactcgttcctgcgggcgcgctggcgctggccgcattactgctggccgcctgccagtccccgcctccggcaccgacaccatcctcacaacgctatggcgctgcatctcaggttgcggtcagccgccatacgcaataccggttgtgggaacagggtaccttctccggccacacgccggagaccacgtccccgccacttctgaccgcaaacagtgagcttgtctcatttgactgggagggggacgctgttgaactgctgaatgcgctggcccgcgcccgtggactgcagttcagttacagtggcgtgcgcctcccgctccccgtcaccctgcacgtcagggacatgacctttgcgaacgccctgcggctggttgaggcacagaccgcctggcgcgccaccctgcatcagtatccgggactgttaaatatcagcttcatgcagccggagaggaaaaaatga

SEQ ID NO: 391206 - DNA, 492 bp, Salmonella enterica
atgattacgacatatcctccggaagaatatattaccgctatttttaccaacagcgcgccctattctgttgaaacgttatatcgtggtatatgcggcatcataccatcatcacccttctgcgaaggctatatcgccagtgatgccagacggcacagaatgatccagttaatgacggcggtgattggcgagtcctgcctgcgacgacagtacttttcccccgcagaagttacccgactgacggctgtacagtcgctgatggattattattctggcggtcacacgtgttctccctggaatgcgatactcggcgagtacctgttgaatattcccggcgtgtcactgccacacaggaagatcacgcatccacagacggcgcgccgctaccatgaacgacatctgggacgctggcttcctgtgctggcatccgtgctttattttcgccagacgcagacgggctgtatccctgttgccgccacgaaagtccacgcctga

SEQ ID NO: 391207 - DNA, 402 bp, Salmonella enterica
atgaatccgttcgtatcagaacattccataacacttttacaacaactgctcccggccattcaggcatccccttttgacaaaacagacgcataccggatttgtgttatttcggccatcatctgtgaaaccggatatcgccagctgtcatggtctcctgaactggctgaatcactggcagacatccgcaatctgcttaaatttcacgatggcagtgatacctgctccccctggaaccggctaatcgaagagtatctcaaaaacatacccggtatcagtctgaagaaagccggaaacaacgcccggtctgtttcatggtttaccagacgttatcacaggaaactggccggactgtggctggaaaagatagccacacagatgcgttttcgtgacattaacgcctga

SEQ ID NO: 391208 - DNA, 555 bp, Salmonella enterica
atgaacatcgaatatcaggataacgtgactcaaccacccacgttaactcatggcgaactttgccggattgccggcgattttttgcaacgggaaggttttaaggtggcattcgacgaccgcttcagggcaaaaacacggtacggcgaacttcctgatgccatcggatttcgtaacggaacatcatgccttattgaggttaaatgctcccgcgccgatctgctggccgacagaaaaaagcagtttcgtattacaccggagaagggcatgggcaactggcggtttttcctgtccgaaccggggattgtcgaaatatccgatctgccggagggatggggattacttcatgttattgacggtcaggtaaaaaatattcatggctggaagggaaatgctatgtggctacagcgtgagaaaaaaccttttaaggcaaataaagaagctgagaatgctttcctgtattcagcgctgcgccgggtggttgttcgcggtcacttcaacgacgtctatgaccgtttcagcaaccgaagtatcaatgatgagttttaccacatatga

SEQ ID NO: 391209 - DNA, 804 bp, Salmonella enterica
atgccgaataaaactgtaactgtacctgatgtactgaaagaggcagggaaagccaccacacaggaaattacggcgaagctggatatcgaccagattgatacactgaagatactccgggatgaaatggaagcgggcgtggttgcatttgaagatggccgctggtcactcgttaacgccaacaacgtcaacatcagtgcctgtgtcgatgctgacgttaacattgacgcaataccagcgccaacgccaacgccaacgccaacgccaacgccaacgccagtggaccagaacattattttccgggcattgcaacagaacggtgccatgactgccgctgcactggcaaaactcgtaaaccgtaaaccgcagggtatggcggcagtcatgatcggaatggcgggtcgtggacttgttgtaaaaaacggtcagggcgaaggatgtacgtggtctttgccctccacaaacgttaacgctggcggaacatctgcggatacaggatccaaagtaccagcctcccctgcacttattgatgtggccagtatcccctcccaaaagtccccggtacagaacgcttacgatgacactggcgacgttgccggcaccggcgctggcggatccattccggcatttccgggcgctgatactgacactgatgattttgtattcagattactgaccagaggaactcaggaaagacagcgtgccagagagtacgcagcaaggcttgatgaggtatgcgatgcactgagtgtgttgcataagtacccggacctgatacagcaactcagcaaaggcgaacaaaaatga

SEQ ID NO: 391210 - DNA, 243 bp, Salmonella enterica
atgacgacattatccagagagaagttactcgaaagggctaaattaaatacagagaaacatcgggctgcaaccaggaaattaagggtaagttctgacgcacaaatggatttacgactggctcaaattgcgctggcaacgctggagtctgaccctgaatatttaaataaacaggatttaattagcgcagaaacatccccgctcaaaaacaatcatgaagtattaaccagaataaaaaactcatga

SEQ ID NO: 391211 - DNA, 306 bp, Salmonella enterica
atgccgaaattaacggtaaagcagcgcattaaagagcttcgaaaaataccacctgaagtactggtcgtttttaaagaccacgaccatggcaatccggcaccactgcaggatacagaacaacagaagctgaagcagcgtatcgctgcgctggatgacgctgtgacttcattattcttcaggaattacccgcgtcgcagtcgcgcggtcgaagcgatattcttcctgctgtttgtgattgtgatgttgccattgtggccactggccgctgtctgcctgctggacagactgtccggaaaaaattactga

SEQ ID NO: 391212 - DNA, 585 bp, Salmonella enterica
atgagcttaataaaaaccatgggggccagcccgctaaccggaaccatctactacggaacgctgaataccgaaaaaggaatctgggttggtcataaaacagacgtcacggatatggcgtgccgggcagttgctgagcacttaatgcacgagaaaatcagcagggtttacgggctgcatgacggcaaagagctgatgctgagtgttgcgttccggcacacagcagaaccggagacgcaacaacttactgccgctgcacgcgatgtactggcggaacgtaatcgccagcagtcagttgagggatggacgccggagcatgatgacgcgtataacgacggcgaactggccagggctgcggcctgctatgcccgtcatgccagtgcccggggcgggatttacgccgaaaatccggcggtgtatcaggctgaaggcgtaccggatgactggccgtgggctgaagaatggtggaaaccggccagtccgtacagggacctggaaaaagcaggtgcccttatcctggcggagatggaacgtatcaaccgcgctaactgcgctaatcgcgctgccggcaccagtgagggggcgtga

SEQ ID NO: 391213 - DNA, 510 bp, Salmonella enterica
atgacagaccatacgatgcctcctgttatcagacaccctgccgtccgttaccacggcggtaaatttcgcctcgcttcctggattatcagccactttcccgcgcaccgctgttacgtcgaaccgtttggcggcggtgcttcggtattgctgaaaaaagagccatcagaagcggaagtttataacgacctggacggtgacgtggtgaacctgttccgcgtgttacgccatccggaaaccagccgggagcttagtgaagcctgcgccctcacgccatactcacgggatgaatttatgcaggcttacgcgccggcggataaccctgtggagcaggcccgccgtctgattgtccgcgccaccatgggattcggctcagccggggccacgaagggaaaaacaggatttcgcctagacacaaaacgtaactgcgcgacagcgcaacgcatatggacccgttatcctgacaatctcgccgccgtgggcagccggttcaggttcagtacagcgtactga

SEQ ID NO: 391214 - DNA, 1215 bp, Salmonella enterica
atgaagaaaaattatattgcccgttcacttatcgcgtcctctgtattatttgcttttcatgcgtctcatgcgtctgccgccacttcatattttgaggcccgtaacgacgccatgggcggaaccggagtggcgtcctcgcattacggtgcggcaccgctggcaaacccggccctgctgacgaaacacaacggcagcgatgatttcagccttatcctgccgtccgtcggcgctcagttgtctgacccggacgacatttccggtaaagcggacaacgcccgggatgactggaaccgttttgacagtgcggtagacaacggaaccggcgtggagcaggctgccgctgacctgaaaaaccgcctgcagaacttccgcaacattcacgctgacgcgcaggtgggcgtctctgcggtggccgccgttccccttgacaccctgccgttcgccctctcagtcaaatcatggggaaccgtcagcgtggacggcaaggtcagcgaccacgatatggcttatctcgaccaggtggtgaacggcaccataaaaccggaagacgtcgaccagaatgccctgacgtcacgggctttcgggcgggcagcggtcatcacggacgtcggcgtttcatttgcccgtgagtttgagactgccggccggaaatggtcgctcggcgtgacgccaaaataccagcgcgtcgatttattcaactacaacgtgtcggttcaggattatgacaaaagtgatttcagcaaggaccgttaccacaacacgaaaaacggtttcaacgccgacatcggtgcttataccgacctgactgataactggacgctcggcctggtcgcgcagaacattatcccgcgcagcatcgacagccgtgaggtcaacggcacgacggaaacgtttaaagtccgtccgcagtccacggccggtatcgcctggcataacgacttcatcaccaccgccctcgatgtcgacctgacgccggccagcgggttcgtctccgatgataaacgccagtttgccgccatcggggcagaagtgaacgcctggaaatgggcgcagctgcgcgcggggtaccgccagaatatggcgtcagggaacggcagcgcctttactgccgggattggcatttcaccattcgacgtcgtgcacatcgatatttccggcctggtcggtacagaccggacttatggcgcgattgcgcagttgcagttcaccttctga

SEQ ID NO: 391215 - DNA, 819 bp, Salmonella enterica
atgacaataaacaccacgggtatcgccggaacaattatcccggcactggacagcgccgtcgtggccggactgctggacagcggacacataaaggcatccagccccctgcaggtcaggtaccggcagggcgtgaaagaggtgctggaaatgataagcgaacgtatcggcatttccatgtcagagctgacctgtatcctggtggaggatgcgctgcgggagatgtttcttccgctcagtaccgctgccggcaacgttactgcccgtgtggagcacctgataaaggtacactcgctgacgccaccggagctggcaagtctgctgtcaccgtggaatctccgcctgagcgtactgcaggacccggtgaaaatgaccgactatctgagtccggcgctgctggataatctggcgcaatggtttcacgtcaacccggactggctcagtggtcgcgtgaatgttcctgtggccctgtcaggatgctggccggaaacacaggaggcgtttcatgccctgctgcaggacagcgataacactgacactattatctggcacagcattcttccgtccggaaatgacgggcaggaatataccggcatactgttacgcaggaaaaccgttattcacgatacaacaatatatccggtgctttctttgcctcccgtaaatataaaagacaacaggacggcatggataagtgaattgatggataactgttattcatcatccgtcagacgtgtgtcactgccgccgtaccaggctgaattactgatgaccgggagagtattccctgccgtcttcatgcagacatcactgccggggtaa

SEQ ID NO: 391216 - DNA, 486 bp, Salmonella enterica
atgttccttatcgtcatactcgccgcttcagctttgctgatgggcccggtgatgtacctgctgtcctgtctcgcgccccgcaaagggtttatcatttcacaggtcactcaccgtaaaaaacactggctgacgttacatctggccccgctcgacagagtgggacacctggacagacggcaggcataccgctttcaccggcgttttctccagcgcctcgcggaggcattacacaccgacacgctgccggtattctttaaatcgcacctgatgcgtcctgtacatatgcgcaccatgcataatctgctgaacacgcgcttcaggaacgccagatgcttctgtatccgggttccgcttcaccctgccgcccgggccggtatccgtttccaggtactggttcaggaatggcgatggataaccgtaccggaaaccggaatactggtggttatttatcctgaatcacgaaggcgagttaaagtaactcgttaa

SEQ ID NO: 391217 - DNA, 1152 bp, Salmonella enterica
atgtcgcagccttcccgtatcaggaaaatgaccctgtccgccgcactcacgaaatattacgacacggtatccgttcataaacgcgggcatcagcaggagttctggcgcgtcagcgtgattaaacgccatccgcttgcacaaaagatgatggatgaagtgacgactgtggatattgcgacttaccgcgatgatcggctgtctcaggtcagcccccgcaccgggaaacctatatcgggtaacaccgtccgcctggatctggcgcttctctcctcgatgttcagtatcgcacgtgtcgaatggggaacctgccggacaaatcccgttgaaaaggtacgcaaaccacgggtgtcccccggacgtgaccggcggctcacctcatccgaagaacgccggttgtcgcggtattttcaggcgcgtaatgcggaactgtacaccatcttccatctggcgctggaaacggggatgcggcagggggaaatgttatccctgcaatgggaacatatcgacctgcagcacggcgtggcacacctgcccgtcaccaaaaataacagccccagaaacgtcccgatgtcccggcaggcccggcaactgttgcagcaactgccggttcagctttccggtccggtgtttcactacaaatcctccggattcaaatccgcctggcgggtggcgctgcagacactgaagattgagaacctgcacttccatgacctgcgccatgaagccatcagccgcctgtttgagctggggacactcaatgtcatggaagtggcggcaatatcgggacataaatccctgaacatgctgaaacgctacacgcacctgcgggcttatcagcttgtcagcaagctggacgtccgccgccggcagtcacagaaaatcgcgacgtactttgtgccgtacccggcggagctggaagatacggacgacggcgttaacatctgtctgcccgattttgaggggctgagcgtcagcggccggacgcgtgaagccgcaatcgatgccgcttccgtcatgctgctgcgccggctggcaatggccgcacaacagggggagcgggttccccggccgggagacctgccggttcataccggagtgatgattgacccgctccccggcatgcgccagtcagccgccacggcattatcataa

SEQ ID NO: 391218 - DNA, 225 bp, Salmonella enterica
atgacctggaaggtgggaggttctttcactgtctggcccggacagactcaggatctggggcgttttaaattatgcatcaatacatatcgtgtagacggtcgcgaaatggcgctgacacaactcattcccaccgatacccctgatgccgacgggaacatgaactggcgtgcttataatggtactcaatactatgcctactatatggggattcactgtttcatctag

SEQ ID NO: 391219 - DNA, 1386 bp, Salmonella enterica
atgagaaaaattgatcggggctgggcctcactcgaattcggtgcagtcatgctgctggtgatgattatcgtcgcctggggtgcctccgcactgaaagaccatatagagagaaaaaactggcagacggaagcccggcttgccagtacctgggcgacagcggcccgatcgtacaccggcaaaaattattccaccctgctggcagccagtaccgccacccgccctgcggtgatcacgacggcgatgctgaagaataccggatttttgtccgggggattcagcgacaccaacaccaacggccagaaaatgcaggcttatgtggtccgcaatgcacagaacccggcgttactgcaggcgatggtagtttcgtcgggcggagcgcccttcccgctgaaagcgctgatccagatggcgtcagagataaccaccggttttggcggctatgtggatgacggcaaaacagccacgggagccctgcgggcctggaaaatcccgctcagcgactatggcgcggccagcggtaaggggcatatagccattctgctctccacggatgagctcagcggcgcagcggaagacaccgaccgtctgtaccgctttcaggttaatggtcgtccggatctgaacaaaatgcacacgtcgatagacatgggcggcaacaatctggacagcgcgggaacagtgagtgggcagcagggtaatttttcactcagtgtcaccgccggcggcgatatccgcagtaacaacggctggctgataacccggaacggtaagggctggttaaacgaaagtcacggcggcggattttacatgtcggataacgactatatccgcagcgtcaacaacaagggcatttacaccggcgggcagttaaaaggcggctcagtccggtctgacggtgacctgtctgccgggggtattttaaagctcgaccaggtgaacgttgccggcacctggtgtccgcaggacggggcgataagccacgacagctcaggcgggatactttcatgccaatccggtcgctggggcggaattgataattatcccgtcggaagccccatcccgtggccttcaacaacgcctccccccggctattttttaatggccggacagcgtttttcctgtggtacctatcctcaactggcccgtgcttatcccggttgcgttttacccgatcttagaggggtatttatccgtggtctggataatggacgcgggtttgacccgggccgaaccatactgagctaccaggccgatcaaagcgatatggtctacaatccgggcgggggactcaaaggccatcacagtggtatggcgcactattattcaaacggtcgggaggtccggcccaaaaatatcgcttttaactatattgtcaaagcaggataa

SEQ ID NO: 391220 - DNA, 657 bp, Salmonella enterica
gtgcataccctcgtaagtatcagcttctcccccgtttatgccctgccgctgatggtactgatggccctggcagggcgctgcctggcggggagggtccgtcgttttctggcaaagaccactgccccggggcagccatcgcatccggcgataacgggcggtatctggctgtacggcatcaccaccaccttttttctgctgtcttcagcgccctttttctgccgtctcagcgccgtactgatggcgtcattcatgctgcagatggcgctcaccgacgcaataagcggctacctgcccgccacgtttacccggcgtttcctggccgccggcctgctgatgtctctcgcgacaggcaccctgccggtccgggtggccgaaacgctggctgccggaatactgctgttaatccttcacgtcctggtcaaccggaaacgggagcgtgtgggagcgggagacttatggctgatggccggcctgacggcgtggacggggcttaacagtacgttctggagtctgctggccggctacggcggatttgtgctctggcatgccacctggcaccttcgcggccagagggagggaccgctgggtccgtggctgtgcctcggcagcctcctgatgctgctgaataatctttatcaaccattgtgggtcatctga

SEQ ID NO: 391221 - DNA, 555 bp, Salmonella enterica
atgagggggtatccccgacggctcctccccttcatcctgctggtttttcttctctctcctgcccgcgcatccgtcgcggtatcccataaaacatggaccagcgagtggaacagctgctttgcggcggccggcgcgcgctatcagatagagcccgttcttctgaaatccatcgccgccgccgagtcatcgctggttcccgacgcggtcaatgtgaacaggagcaaaaagacaggaaaacccgtgagccgggattacgggctgatgcagattaattcagcccatatcccgcgtctgcagaagatgggggtcatcaaagagcccggagaactgttaagaaaaccctgcctgaacattcagattggcgcatggatcctcgccgctcactttcaggtctgcggcgtgagctggaactgtctggggtcgtataacgccggattccgcgacgagctgaatgaaacccgtgaacgttacgccagcagggtctggcggatttaccgggatatgaaaggcctgtgccttccggacaaaggaggctggcggtgcataccctcgtaa

SEQ ID NO: 391222 - DNA, 618 bp, Salmonella enterica
atgttactgaaaacagaaagtacggctcccgactgcggatcggctccaccggcaaaaccggaaaaaggctggggattcatggagcagattgcgatagcactcgctgtcattgtggttatcgcacttgtgctcggatcgtattacctgctcaagtcccggaccagtgtggcgagtgaatcgtccaatatccagaccatcatcaccagtacccaggggctgctgaaagggacggacggctacaccttcacctcagccgcgaagatgaccggcgcgctcatccagatgggcggcgtccccaaaagcatgaccgtccgtggcacgccgtcttccggtaccgcgacgctgtacaactcctggggcggaagcgtgacggtggccccgtccgccacggccggggggtttaacaacggttttacggtgacgtatgaaaaagtcccgcaggacgcgtgtatccagattgccacccagattagccatacgggtctggcgaccgccattaccctgaacgccacggcgcacagcgacggtaaggtcaccacggaacaggccagcgcgcagtgtaccgctgacagcggcggtaacggcaccaacaagctgattttcacggttaacggttaa

SEQ ID NO: 391223 - DNA, 1095 bp, Salmonella enterica
atgcgtgatttgagtcccggccagcgcctgcggcgttttctggtccgcaaaaccttctccggcccgtaccgcatacagttctatgaagccctgcgtttcctgctggaaaataatcagcccctgaaggtggcgctggagcagatgcgggatgcgtggacggacttcggccggcgctggcatccgtttgccgaactcatcgatgactgcacggaagcgcttcgtgaaaacacccgcgaaaactcgctggaacagacgctggcccgctgggtcccccaggcggaggccgccgttatcagcgccggtatccgcagcggtgccatcgtgacatcactgcagttcgccgtcaccctgacgatggcgaaaaagcagatacagggggcggtgtggcagatgtccatttatccgctgggactgctcatcatgatgggcgggacgatgtgggtgctgaacaataacctgatccccgtgctcagtaaaatcagcgaaccgcagacgtggcagggggcgctgggatttctgtacggcatgtcggtctttatgggcgactacggtattgccgttgccgtcctgtttattctgttcgtcatccttctgttctggtcggtaccgaactggacacgccctgacccgctcagaaagtttgccgataacctgatgccgtggagtatctatcaggacatgcagggagccgcctttctgctgaacatggccgccctgctgcgttccggcatgaccacgctggacgcgctgaccatcctgaaagagttttcttccccctggctgacggtacgcctcgacagcatcattgcccgcgtcaggcgtggtgaacatctcggactggcgcttcgccagtgtggttaccacttcccttcacgggaagccgccaacttcctgtccctgctgcagggcgacggcgccaccgatctgatcggcaacttcgggcatcgctggctggagcagaccctggaaagggtgaaaaaacgtgcggtgaccgtgcgtcttctcatgatgatagttcttgttatgtccctgttcttactggtgtttgccatcatggacattcagtccatggctgaccgtatgggcagtttctga

SEQ ID NO: 391224 - DNA, 1617 bp, Salmonella enterica
atgaatgaccccacactgaatgatgccattctgctcttcacggagggtgagcgtcatgaaattctggttgaaaccaaccagcggacacgggcggatgtacaggaccggctgcagacgctgctcagtgagtatccggacacaccgacccatctggtgtcactgtctgaaatgcaggacgccgcaaagagaatggctgacgccggcacagacgctggcgctggcgctggcagcggcgcaaaacccggcaccgtggagcggattatccgccggaaagacctggaagataccagcgaaagcgagcacaaaatcctgtcgtattttgaagtggcccgccagcagggtgccagcgacattcactttctcatcagcacaacgctctttatcgtccgtatgcgcattttcggcgaactgtacgtcgtcgatgaggataaacccgacgcgggctacgcgctctgtgccaccgccattctgtcaatgtcggacgtcacggagcccagctttttcccgcagcgggaacaggacgcgcgtatttctccccggctgatgagaaaggtggacatttttggcgcacgttacagtcaccgtccgaccggggacggcctgattgccgtgatgcgccttattccggatgacgggcacagggttcctgactttgttcagctgggctttctgccacaacagatcgccctgctggaaaaatcgctgctgcgtccggagggcaagattatcctgtccggccccaccggctccggtaaatccaccacgctgcgcagcgtctgccgtgtctacctggataacaatccggggcggcatctgctgacggtggaggatcccctcgaaggggagatccacggcgccacccagacccccattatctgtgacaagtccgacgagaccgccatcagccaggcgtggggccgtgccatccgctcagccatgcgtcttgatcccgactcgattatggagggagagatgcgggacctggtgtccatgatgaccaccatttatgccgcccagaccggtcacatggtactgaccaccctgcacaccaactccgccttcggtattcctgaacgcatgataacgatgggggtgaatccggagctgatttgcgacccacaattgctgattggcatgataagccagcgcctggttcccaccctctgcccccactgccgtatcccctggtctgaaaaggtcgcgtccctttcacctgagcaaacggcatttctgacgcgttatggcaacaggaaagggatttgcagcacggagaacatgtatttccgtaaccatgagggctgtccggcctgtaaccgcgacgtggtcattaacggcagaaaacgcgcgacggttggccggggggtgaccggacgcaccgttatcgcggaggtggttgaaaccgacgcccggctgttccggcttctcagaacggaaggcaaggaagccgcccgccagtactggctggaacacatgaacggcatcagccgtgtggagcacctgctgcaccgcatcagtgagggccgggtcgatcccctggaggccacccggattgtgccgctggatgaggacgaacgcctcgccgtcgatatgcccctgaaaggagaatgccatgcgtga

SEQ ID NO: 391225 - DNA, 456 bp, Salmonella enterica
atgcatcgaagtaacattctgcttatccccctggcggtgtttgccctgttcgcccgcccgtcattcgccgggccggacacaccggcagtgacggacggggagcttgaagacctgcagagccgtaacattctgctggaagcccgcgtccggggcgcacagctggaaaaacaactggaggaagccgccgccggcggaggcctcccggcagcggtttctccgggcgcgccggccggttcgtccatggcaccgcaggccgcatcccgacagccacaggggcttcccgtggtgcttgaaatcagcggacgggacaaaaaactgcaggcgatcctgcgtctggcagacggtcgtcagaccacggtcagggccggcagcccgctgcccggtaccacgctgacggtcaaatccgtcacccccgctggcgtcacgctcagcgacggcgctcacctcactttctga

SEQ ID NO: 391226 - DNA, 1299 bp, Salmonella enterica
atggcggatgaaacgctgaatcagggggtattacaccccgaccccggtaatgccggcaggcagtgggtgaccgcgatgcgctggacggtcgtggaacgcaaaaagcgccgtttaccgtcgggggcgcgccggaaaaaaatccccggcaggctcatcctgcacgtcaccgtggggcaacggacggcccggggcgcgacaacccggctgagcggggtcgcggcggtggaaaaaccccgccgcccctgcacgttcttctcgctggcgctggccttttgtacgcaggtccgtaacggttacgggatttaccggcttggtgaccggcagcatctgtttctcgccgccgtgaacggacagccggccgtgatggccgacagcgtggacaccccggaggggatacagaaaaagctggcgctctttctgaccatgaatgaggagccgccggaaaaatggcaggtggtcgctccccctgacgccccgctttccccggacacgctcattcagcagctttccgccgccgatctgcgccactgccgcgtgcaccataaccgggcgcgcagccggcagctggcgctggcggtgatgctggccggactggcgggagccggcgctttcgtttacttcacgcagcccgcgccggcccccgtcccgacgccggaggagattgccgcccgctccaggctgatgttccacgacaaagccccggcaccggaactgccccatccgtgggcctccctgcccggcgtacacgacatgctgtccgcctgccgtcagctcatccggtacccgggaccggtcgcgctggaaggctggaggctggccggtggtgaatgcaccccggacggactgtcactgctctgggaacgacagccggggggcacggcagagggatttctccgccgcagccgggaggttttcggggtcatcccggatttcaacctgaaggaaggggccagccaggccgttatcagacggcctctgcccacgctggcctttcatgatgaacccgtccccgctccctcttcccagttgatgagggtgctgtcctggttccagcgaaagcaggtcaccccggcgattgacgaggtggtgatgcccgatccgctgccgggcgatgacggcaaacccgccccggtacagacctggcgggattaccatttcaccctctccggtccgcagagcccggagaggctgttccacggtctcgcggataccggtattcgtctcagcagcgtccgctttgagctgaacggcagcgcgtacacctacacaacagaaggtcatatttatgcatcgaagtaa

SEQ ID NO: 391227 - DNA, 1689 bp, Salmonella enterica
atgaaaaatttgtaccccagtgtcctgaaaccggcggcgttatctgtcgcgatcgccctgtccctgctgctcgggggctgtactgtcggtgaaatcaataaaatgcagaaacaggcgcagaacgacgccgccacggcccgccggacaatgcagacggcaggggcaaaacagccgtcgctgacctggctcgatcgccagtggatcaacccggttccgatccccgtctccgccggggagaaaaagcagcgcccgccggcctgtaacatcacccaggtcaccccgggcagcatcacgctgcaggagctgggacagcggatcactgccgtctgcggtctgcccgttatcatcaccccggatgcggtcagtcagtccccggcgcagggaggcggggaaacccgccggatatccggccccctgcccgtaccggatgaaaacggtcgtcttcccctgaacgccacaggcctttctccggtcgccaccaccacccgccccctcaccctgaccagcatcatgtggcagggcgacgtgaacggcctgctggatctgatggccacccgcagcggtctgtactggcggatggataagggacgcgccgttttctatctgacagaaacccgtacctacaccctgaccatgctgaattcccggaccagcagcagcgccagcgtgagctccggtacaacgaacacgatgggaacctccggcggccaggacaactccgcctccggcgacgccacctcctcgcagagcaccaccgtcggccaggaatacgatctgtatgccgatatccgcaaggccatagaagcgatgctgacgccggaaaaagggcgctactggctgtccgcctccagctccacgctggttgtgaccgacacgccggccgttcaggaagcggttgcccgttatgtggatgaacagaacagcatcatgaaccgccaggtcttcctcaacgtccgggtactcagcgtcagcaacacccgcaatgaacagttcggcattgactggaacctgatctacaaatcgctgtaccaggccggcgcgaccctgaacaatgccggcggggatattgccggcgcgacgtcagccggcgtgtccattctcgacacggcaaccggtcacgctgcccggttcagcggctcttccctgcttatcaaagcgctcagcgagcagggagatgtgagtgtggtgacgtcccaggaaagtaccgtcaccaacctgacgccggttcccatccagatggcggaccagacggtatacgtggcgcagtcttccaccaccaccaccaccgatgtgggagccaccacctcactgacgccggggatgataaccaccggatttaacatgaccctgctgccgttgatccagaagagcggtaacgtccagctccaggtcagttttaatctgtcggatccgccaaccatccgcagcttcacctccaaagacggcaacagctacattgaaatgccctacacgaagctgcggtcgctgagccagaaggtcaacctgcgggcaggccagtcgcttgtgatgaccgggtttgaccagaacaacaccacgaccagcaaggcggggacattcacgccgtccaatccggtgtttggcggcgcacagggcgggaagaacgagcgcagcacgctggtcatcattatcaccccgaacttccccgccggaggtcagcatggcggatga

SEQ ID NO: 391228 - DNA, 438 bp, Salmonella enterica
atgggctggctggttatggccaccggcctgatatttctgttcatcaccggcgacattctcaaccagcagaccgctgacaccaccgccaccgtgcagcagcaaagcggcgaactgtgggccagccagatgttgctgctggcaaaccgcgtcaacgatgtccggtatgtctccggccagcagaacggcacgatcccgccggatcaactggcccttcctttcacgcctgaccgtcgtcttcactggcagctcattcagggacgtctctgggtgtggatgccggatttgcccgggctggctgaggcgttacgccgcagaagccgggggtcagcgctcaccggcaccctgaaaaacggccggttcttctggttttccggtacggcaaccggcctgacgccaccccccggcctgcccgacggcgccgtggtttacgttaattaa

SEQ ID NO: 391229 - DNA, 1074 bp, Salmonella enterica
atgcaaaaaaaatatctcactcttgtcctgccgtcatttctcaccggctgcgccgcgctgcactccgcgacgccggcgaacgacggcagtgccggtacggttcccgcgctggtttttgtcgacgggcaaatcagcgaaggcgcggacgttatcgcccacacgcagcaacgtctgcgaccgccgcctgtcagcacgcccgcgcctccccgcccggttgccacgaccaccccggctccgcaggccggcacgataccgcgcgcggaaaacctcccgctgccgtccccctcactctcactcacgggcggactgccacatctggtgaccaccggtacgccctcaccggtagcggtcacctggctggcgccggcgcataaccgtacggtcagccagtggatacgcctgctgctgcccgacggctggcagttccgcctggaaaatgccgccacgccgaagctgaacacccgcctggcatcctggtccgccaacgaccagtggacgcgctccctcagccgcctgctggaagaacagcatctgtgggggcatatcgactggcagaagaaaaccctgacggtcaccacatcggcaacgccgccggcagatgatgccgcccggtctgtaacggtaacgcctgcgccgacgccggtcacggcggtaacaaagacgacaaagccagcaccagcggtaccggtcaccgtcccccataatccgttccggggcccggacctgacgaccgtcggcaaaccggtcaccccgccgccggtcaccggtacgccggtgacgccggtaccttccgggaaggagtggcgcgccccggccgggaccaccctgcgggaaaatctcacaaaatgggcggaagaaaccccctgcgacaccccggagatcgctcactggatggttatctggccggattcggtgaaggattaccgtctcgatgcgccgctgattttccacgggtccttcgaggccatcacgggagaggtgtttgacctctaccgtaccgccagcacgccgctgtacgcgcaggggtcgcgcatgcagtgtgtcatcaccgtcacggaaggagccggacgctga

SEQ ID NO: 391230 - DNA, 672 bp, Salmonella enterica
atgactgaacatcccgtcagaaatctgctccggtgcatgcttgcggccctgcgcgaggcagcggaggacagaaaattccactcagaaaaggagcgccgccgctggcttcgtgaatggctgcgcgacgcgaggaaagaagagacgtttcgccgcctgcccgatgagattaccacgctgcgccggctgctcgacagtaaccatgtggtgtccattgaaagcgtgcttaatcagttgctcatcaactcggcagaagctgataactgtgacctgttccgcttcagggcggcactgaacaccgccaggaaaacaggctggcgtaccggcatctgtcggtgtaacgacgaaattttttataaaaccctgggcctggcagaaaccagtcgcagccatatcctgcagttggaccgcacggaggagagttttgccccgaccggcgaaatgaccgcgcccgtcacgttcctgctgatacaaccgcagaaccgcgtccgggagaccgtcgaacagattttccacgacgaaaaattccaggtggttacaggcagggaaaaaatgttcaaccgcagtctggtcagaaccatctggattggtcggctcaccctgcctgatgccgtctggggtgccgtttccaggaaaatatggacgccggctgagaccgggtacgtactgcattaa

SEQ ID NO: 391231 - DNA, 1020 bp, Salmonella enterica
gtggctgaacagcacaatccccagcactggagtcagctcagtccggatgaccagatacgtttctggcaggacgtcgatgagggcagcgtcggttcttttctggttcccccggagaagaagcgcacgaagcgccgtcgtggtgagcattccacaaaacccaaatgcgaaaatccgtcctggttccgtcctgcgcactataaaaagctcgggggccagctgggccacgcctacaaccgtctggtgaaaaaagacccggtcacgggagaatgcagcctgcgcatgcatatgtccctgcaccccctgtacgtgaaggagcgtaaacgggcgggacggcagtatgccttccggccggagaagcgtcagctgctcgatgccatctggccggtgctggtctccttctgtgatgccggcatgcacacggtcggcatgtccgtgtcgcgcctggcaaaagaaatcagccccaaagacagtaaagggaacgtcattccggaactggcagtgacggtctcccgtctgtcgcgcctgctggccgaacaggtgcgtttcggtacgctgggcctgtcagaagaaaccctgtgggaccgggaaacccgccagcgcctgccgcgctacgtctggataaccacggccggctggcagatgctgggcgtcgacatgatgaaactgaaggagcagcaggaagagcggctgcgtgaaagtgaggttcgccggcagctcatcagcgagggcgttctgggcgaggacgaagatatttcagtgcattctgcgagaaaacgctggtacctgcagcgcagccaggaggcactgaaataccgtcgtaagaaagcggccgcccgtaaacgggccaaccggctggcagaactgccgcgcgacagacaaatacatgaaatgtcacagcatatcctgaagtgcctgcctccggatgaggcgtactggtgcacgcctgagcgtctcgagcagctggccatccgggaactgtaccagcttgaactggtgctggccacgccgcccccgcattag

SEQ ID NO: 391232 - DNA, 633 bp, Salmonella enterica
atgacggcaggtacggttaaaaaatcaccggtcattgtggtgaagaaaaaacggcagttcactctctctcctgtcacggaaaacagacccgttcccgctgcaccggacagggaagacactccctcatccgtcagtgagtcccctgctgttgtcagcacgcagccacagactcatccctccggactgacaaaaaaacagcgtaagttactccgtcacaaacaaaggcagcgtgagctccgccgtgacaatatacgcaacggacggcagaagctcgcgcttttccgccaggtctttcctctcctctggcctgaagacgacgtcctccgcctcatgaaagtcggtatcttccgcgacgctgaaaaatttgttaacgctaatcctgactgcggtctttccgttcatgactgccgctgcgtttttacatgggtttctcagcgactgtcttacctcagactcttcgctcccggcgcccttcgttacgacctctgcgggcagcctgccggcaccgtctctgacgctgatatcctcagtgccgcgctttccgtcgaacgcattctccgttttcagcaacaaaaggcggctgaagcacaacagaacgccgcttccggggatggcgatgagaaaaatgactga

SEQ ID NO: 391233 - DNA, 282 bp, Salmonella enterica
atgaatgaactggccggtcttcacccacaaatcagtgaactcagtgagtacgaacagtatttactctctgctctccttaagaaagcggccgcagatgccggcagaactctgaatatcactgagctccggagcgtcgcggcagaattttttgcctcccgcctggctgaccgtaaaacgcacgccggctaccgccgccgcgccaccatgtcccgcagaatgcgcgacagccccgctcaggaaaaaagcgactttcactggaaacctgcacgaccacgacgctga

SEQ ID NO: 391234 - DNA, 348 bp, Salmonella enterica
ttgaaacgttatttatttattaatgctttttttttgtactttttagtatcttttggtttttctgtccaggcagtagaaacttcggtttatacacaggaagcattaaaaaatgcctttattggtgcagtaaatgatatgcataataatgatccatctgaattttctgatgccagttcttctgatattgataatatctctgatatctttagtcgacgaacatccatgtttgatacaccattaaagcaaaattatgagttacatccatggaatatggctatcagttctattattggggatctcagtgaaaaaatattcccgttagatatatttgagcgcgaattcagataa

SEQ ID NO: 391235 - DNA, 177 bp, Salmonella enterica
atgatatacatacaaacatataaaaaccatatttgtaactactgtaatcacctgattttcaaaaattctcatatacagcattcatactgttaccagcaaatgaagcaatcactcaatatcaaaaaagaaattatttttgttaagaactcgattattaaagttacaaatctattataa

SEQ ID NO: 391236 - DNA, 288 bp, Salmonella enterica
atgcgagcccggataatgctagttctggcggcgcttttgcttagcgtaacggcaacggcaacggcaacggcagccatcaaaataaaccatcaccaggccaggaatatggatgatgtacgcagcctgggcgtcatttatatcaaccataacgtcgccacggaaagtgaagccaatttggcgctgaatgaagaagcggaggctcagggcgcggcgtattattacatcatacttatccgggaaccgggtagcaacggcaatatacacgccagcgcggatatttatcgctag

SEQ ID NO: 391237 - DNA, 213 bp, Salmonella enterica
atgatttactggcatgtggaaaagaaatccacctgtatttactccctactcaagcgttgttcctcttctgaagtcgctgccatgatcgagggtgtcctgcgccactgtacagatatggatattgagaagcagtacgttgacagccacggtcagagtgaagttgcctttgccttctcttatctgctggggtttgacctgctaccacagccttaa

SEQ ID NO: 391238 - DNA, 351 bp, Salmonella enterica
atgaaaattgatgtttcactgtctttggggtttactgatagtcaaggcgttgtagaaagtggaataaatgtcaacctcagcatccctgctggtgaaatgacaccagaaaatccggtgaaattccttgcagtacagacagataaagacggtaagataaccccggacggcggaaagatacttgaggttgcggtcggtgatatctcacatatctatgtcgcagttgcgccaccgcaatatttgttgaaaaaagccaaaattgataaaacagtccgtgcgcttgatgtgaaggttcaagaaggtaaatataattctataactggagaatttgaggtgagtcagactccagcttaa

SEQ ID NO: 391239 - DNA, 3711 bp, Salmonella enterica
atggacacattgagtctgagtattcatgcggagttacaaatcggctcactgctgggcggagaaataaactggccgctgggatgtgatctgataatgtgtcgtgactattatctgattcaggccgatttggttcgtggtgggcaaggtggactggatattctgcaactgctgaatagcgcgttcggttgctcgctacccgaaggatatatcaaggtagacaaagcggggttctttacgtacggcgagcgacaagaactcagcgaacgtaaaaagctaaaagagatatttccggtgtctacgctacctgaaagcattgcttcgagcgttgcgcctatggagaacaccacggctttctggctggttgcgaatttacatgccatcaagatactggatcatttggtcgaaatcggcgtggccagacaggaaaatcagctggcgctgtatgcgctgttaaataatactaaaaacgcggcaaataatttcagcgaggtgatgctcagcgcctcgctgcccgatattacgttattacgtcttttctcattcaagaaactgtaccttttcctgcaactatcttccggtaagcatcgcgctttccaactggaagggaatctgtgtgtttctttattcggcgaaccgtatctgtttcatggacgattaacatcagacggtcatatgctccgggcggaaatcacgtcttctcatcagatcaacgaaccttttggcggaaagatgaggggcatgcaatttggcaagctggctttttgtctggcctatatatatcaggaagcgatcgaaactggtaatcgtgatacgacgcttaaaccaggcgaatcgttaatctggctaaatgcgagcgtgagttatgcgaacctgacgctaagcggaaagctgtatttatatgacaaggagcccgttcttgccgtggtggctcttgaaaaggattttgccatcagcacgttttttaagcggtcgctggatgttgaatggcccgcaatgctgtttgatctgcaattccgtgccggtagtcaaatctattatcgtgcagctaagtcgatattgccttccgggatcagcgacgaacagtatcgacccggctttaatattctggcgaacgtcagcctgacgctatggaaaacgctgagtttttccctgacattacaggctatcgaagacgccgtggtgggcgacgtagcgctgcaaacacctgtcgacctgtttatcatccaggtcaccgggaaaggggggacgaaagggccgacgtttgcgctggcaaaaaacgtacaggcgctttcgatgtccttttctggcggcgtctgtttttttggtcactactgcggtggcattgacgtcgactgttcgcgaagcgagaaagaaaagctgaacgtgagcggaaccattaccgtcagcgataagttgtttcgcaatctgctccccaacgtaacgacgctgcgtttttcctataacagcgatgacggtatctccattaccggctggccgacttttgatttcgcgcattcgagcatagatttcgccaaagagataaagaactgggtgaattcagctaggggtggcatttgcagcaatatctccgggtttatgaatgaaaaattgctgcggactacttttttcctgagtccttcattttcgccggaaagcaatggtaacaccctctatctgtgtctgaacgggcactacaccctgcatatgttggatgcggaaatcctgaaacttgatctgccgtcagtgattaacgtgccgctgccggaaaatgtcagttggcaggcgttgcccgatatcattgggcatacgctggcaggggcggcggcctctctgttagatggaattgtgaataacagtgagaatctgagcaaaattttagtggcgctggccggtaaggaagcgctggaggttgcggcaacgctcgcctgccgtaatttgattgatgaggtgatatacggcgctattcgcgcggcggtgacggcgcttatcgaagaatatggcggggaatttgtggcgggtgcattgagcgcgttgttcgcgttaatagcatcacacacgaaagatcatccgaaaccagaacccaaaccagatccgttggtcccgccggatgcaccacagtatttgctggcgggaacgcgagtcaatgccgatgaccagccggagatcctgttttcctggagcccggcggcgctggccagtaaataccaggccgctctgtacgacgctcaaaatcacctgctggcagaacgtgaaacgtcggacaggttttgtcaggtggcgtttcgcaggaataagagcggagatagcacggacaaatatgttcttaaggtgcgggccgcaggcaacgggaaatacagcccctacgccctttgcgaactgaacacgttgccggttcctgcgttggccgcaacctggcaggaagcgaagggcttgctgctaacatggtcaatacctgcgggcaaggctgaggcattcgagttaaaaatctgtgctgagaaccgcgagagcaagttacgtattaccggatctgacgctattttcgatcccgacttgcctgaaaacggtgagtctcactacagattctccgtccgggcactttcctcactgccgaatctcagcagcacatttggcgcggaaattcatcgaacccgtatcccccggtgcacactcacagacctctcattgcagggagaaagcgccagagttagctggcaggcacccccgaaggccagccacagcgacatacagttgcgttcccgcaacggtggaaaacagtggtcggtaaacgttgcggcaccagaacaaacgcatgtctttccactggcgatggaagagggttccggatttttctttgcgcgggtttccggcagggtggcggatgccttcggtgatttgccggcactctggagtgaggaaagacgtgtattccgccccctgattagccttgcgcggatagcacgtaaccggggctgttcagccgtcgaatgcggccagttcttatgccatgaccgaccggccgcaaaacttccggcaatagtccgctgcctggcggacgcagaatatccagtgaaggaaatcacgcctgcgctacgcagaatctttgctgccgcaacgttgatggaaacagcacgtggtctgttccatgccagttatccacgcgaggaggccgacagcgggttgtccgtcgcttggactgaaaccagccgtaccgatatgttggcagtactcgacaccgtgtacggcccggcgctgtcccttgagcaggctgcggctatgttttacgcccaaggactgaatggcgcggattgcggtaagcagttgattatccactacccgaatacccgcagtattgcactggcgaaagccatggcgaaggccggatatgttgcgccagagacttcggctggcgtggtctgtgcctgtccggatattcccctgaaagcgctaagtgtggtgctacaggcggcttacggtgcgccggatactcttgaagtactggcacgcaagacctttcaggaaggtatgaatggcgcggattgcggcaaacggctgatcgcctgctatccgcatgctggtagtgttgagctggctaaagccatggctagcgccggatacgaagtgcaggaaactttagcgggactggtcggcgctcgtccgaatctctccctgaaagatttagcccaagccgcacgagcggcatatgcaaaataa

SEQ ID NO: 391240 - DNA, 789 bp, Salmonella enterica
atgaacattgaccccgatatgctttcgcagttgttggcgcagcagaaacagctcggtctgccatcggctgtcgcagccagaagtgtgctggacctcatttctcaggagcggggcagcccctgtggattagaggtcggggatcttaagagctttgttcaggccgtattacttcattttaaggatttatccctgctggaactggcaagatcattacggccttacagcaaatctgtcagcgaactggcggaggctctttgttcaccggggccggacatgccggacccggtagaacttgtcggtgtgttactggatgcagaagtttacccacaaacgagtgacagcgatatgcgggaagcactggacgtttgcggctatacgaaaaatgatattgaccaggcgttacgcctcaatttcccgaaaacatttgtcgttgaagccaatcgaccctggcaggatacaggcgttttggtcggggtaaatgagaaagcgattattcaatacgtcggaggatggtggtttatcagcccgcaattacctcgttgtgatggcaatggtggctcgcgccgaatcaattatccagactacgcgttgcccggttacccggaagggggattggcgggacgaatcaataaacaggcattttgggtcggaaaccaaggtgaaacaccgtccggtctagcgggacaattgcaactgtgcccgaatgacgatttacccggctcatacggcgtcggtctggctgacaactttggcagactaacggtcaaaattaccgtaattcgtcgttag

SEQ ID NO: 391241 - DNA, 276 bp, Salmonella enterica
atgacggcatacggaacggagtttttctcaatgaatgatgtaaaccgactcaggatccttcaggacgttatcgaccgacgtcttacaacacgtcttgctgccagccggctggagatctcagacagacactgtcgtcgtttgctcgaacgctaccgcgaacacggtccgctctcactggttaaccgtcgtcgtggccagccaggtaaccgatgccaggcctcgctgaacgcgcattgcacatcatccgtgaacgttacgctgaggttcagtggttga

SEQ ID NO: 391242 - DNA, 270 bp, Salmonella enterica
atgtcacaggttaacatgaacttaagaattgatgccgaactgaaagacgcctttatggctgcagcaaaaagtatggatcgtaacgggtcccagttaatccgggatttcatgcggcagactgttgaacgccagcataatacctggttccgtgaacaagttaatgccgggcgccagcaactggagcgcggtgaagtgcttccacacgacatggtggaagcctccgctgccgcatggcgggatgagatgatgaaaaaggctgccggtaaatga

SEQ ID NO: 391243 - DNA, 741 bp, Salmonella enterica
atgacgatggataacgccacacgtaacgattcgcgggcagtccgggtggagacctggttgctgcaacggctggtctggtcaccagggcagcgggatgtcattaaaaccgtggcgctgctgctgatggtggctgaccatgttaaccgtatcctgcacctgaaccagacgtggctgtttctggccgggcgcggggcgtttccgctgtttgccctggtgtgggggctgaacctgtcccggcatacgtatatccgccagtctgcgattaaccggctgtggggatgggcggttatcgcgcagtccggatattttctggcgggatttccgtggtatgaagggaatattctgtttgcctttgcggtggccgcgcaggcgctgaagtggtgtgagcagcgctgcctgtttcactctgtggccgtgctgttactgctgacggcgtggatacccctgtccggaaccagctacggcgttgccggcgtgctggtgctggtcatctgttaccggctgtaccgggccgcagatactgaagagcatctggcgcttgcggcctgcctggtggtggccgtctccgcgctgaatctgctcaccagcgatgttgcggccgcagcagggcttctggtaaccggcctggcggtatggctggtgtcgctgacaggcaaatcacagccccggttctggccggctgattttttcccgatcttctacacctgtcatctggctgtgctgggcgttctggtgatgtga

SEQ ID NO: 391244 - DNA, 345 bp, Salmonella enterica
atgagtacatattatgtgaatgtgtttacagatatcagtctgttaatgtccgttgttactggctacttcttttctgaacgtaatagcagaaaaatgtttcttctgagttcactggtttttcttattattaatatcatgtgtgtatatgtgctgacagtcaatttctggtttctttgtggtgcagtcgtgaatcagtgcgcagcaccggttgtttcaatggctgttggtacattaccggacgttacgaaatttgacaggttcagaagaatatttatctgtattatgttgtcatcagtatggtccggagtgatgtggttttttataaagacacttgtgaaaacgtag

SEQ ID NO: 391245 - DNA, 216 bp, Salmonella enterica
atgaaaatgatgacttttctgctccggctggcggtgacggttatcgtggcattcccggtggtgtactggtcgtgggatgcggtaagagcgacaacggcggacgatatcatgctggcagtgctcattattgacgcttacggtctgatgttaacgctgctgttctgtttcgtgaatgcactgacgaaactactgcagcatgataatgaatccagctga

SEQ ID NO: 391246 - DNA, 537 bp, Salmonella enterica
atgggaaataaccggctgaacagcctgaagggacgtgccgttttatatcgtcttgccggtcttctgcgctggctgatatggggcgtgaaatatgccgttatctggccgctggccacaacagccatcgttgtcattctgctcttccggacgggggataccacgccgggacaacagatggcgcaggaaatcggacgggtgagggcaatggccccgtccgggaggtttccggtccgggactgccctgacccggttttcactgtgtcgtcacctgtaccgctgaatctgacggaaaactgtccgctaaaaataaccggcgcggaagaatacgcggcagatatcgaccagtccctgtcgcaaacgggatggctgttatgggggatgctggcgctgttgtataccgcggtggcagtaatgatcggagaccggccataccctccgggtgaatttatctacagaacccgtatggccaacgggcagataatttattccggaaataaagaggctgaaaaagaaggtgataaaaatgaaaatacgtaa

SEQ ID NO: 391247 - DNA, 603 bp, Salmonella enterica
atgtcagttaccaattctaatgcaaaatccgcagtaaaaaccagccgtaaggcgaaaaacgccgccagtgccagtaacaccgtattgtcggcggtgctggcgcagaccgaagaacaacacgtaccgctgtccgcactggtcaaatccccgcagaacgtgcgtatcgtgccgtattccgcagagagcgtccgcgaactggcggactctattaaagggattggactgctccagaatctggttgttcacgccctccctgacggcctgtacggtgttgccgctggcggtcgccgtctggcggcgatgaatctgttggccactgagaacacgatccacccggactggcctgtccgcgtgaaggttgtgccggataatctggcgaccgccgcttcactgaccgagaacgggcagcatctagaaatgcacgctgccgaacaaattgcgggattccgcgcgatggcagcggaaggcaaaactcctgcacagactggcgatctgctgggctattcgccccgtcacgtacagcggatgctgaaactcgcggggctggctccggttatcctggaagcgctggctgcggacaaaatcaccacggagcactgttag

SEQ ID NO: 391248 - DNA, 384 bp, Salmonella enterica
atgatgtatggcacacgtaaagaactgaactcaaagctgaaacgcatgtttggcaacgacgagcgttttgccctgctggtctggacgaaacaggacgtgatggcactggctcaggggatgaccgaagtggaggccgatgcgattttgcgtgagattggccggaaaggtacaggcgaacataccggaaacggtatttcagacagcacggtacaggcgctgtacgccggattacgggctgaaatcccgaccgtcagtgttcccgccgacctgctggcaagggtgacggacgctcaggcatggcctcttgtatgtcaggagtaccccggcgttgccgccgctcaggccgatattgtgcggctcagacaactggcgctggcggcgtaa

SEQ ID NO: 391249 - DNA, 204 bp, Salmonella enterica
atgataaaatttaaagatttccgtgacgatagaaaaacttttgatcgaggtgtagaacaagctacgatcgatatgaataagtggattttaaatagacaaattgaggtaatatcaattgagactattttaaatgttaaaggtaatatgatcagtacactcgatgcatttgaagcaataagactttggtataaagaattaagttaa

SEQ ID NO: 391250 - DNA, 249 bp, Salmonella enterica
atgagtgatgttaataaattaagtatcagctactttgaattcaaagaaattactgaaaagcatttgcttaaccgactaaaaatgaaagaacaggcagaacagccctatgactacgcaaagtttcacgcacagggacaggctatcctggatatgtggcacgaaattgtgctagcagggagcgcaccatctgaacagatagccgctgacctcgtttactttaaaaatattctcgaaccttcccgttggtaa

SEQ ID NO: 391251 - DNA, 267 bp, Salmonella enterica
gtgttcaaccaggacatgaatatagccgtcgccggctgtggttttcaggctgtagaggacgtcgctgaaatactggcggagatcatcctcaacgaacgagccagactccagtttcagtgtactgagatcgcagatggcacgcagctctgccggcagatgcagctccataaaatcccgggcaatgtcaggttgtgtcagaaactgccggaatgtcgcgtcgtggggagtcggcgtagtgtttttctttttcatcagtccatgctctga

SEQ ID NO: 391252 - DNA, 222 bp, Salmonella enterica
atgaaagaaatgcttccaaagccaacattttacaggcaccgaaaagaattattgtctttcgggatagatattaatttttattgtgaatcccctgattcaaataatgttgttccattagtaagaacacttgaagctaaaccagcccaaatccctacatgggtttatgagaaaggttttatttttgattacaaccgtatttcacatgccagtaactggcattaa

SEQ ID NO: 391253 - DNA, 243 bp, Salmonella enterica
atgaaagtcatttctgttattaaatctaaaattgctgtggcttcaaccgcactttttgtttctgcaagttgttttgctgctgatggcgcaacgggtagcactgactatgcaggtcaggcaatggattcactgctgactcaggcaaacgatcttattgcaaaagtatggcctgttgttgtcgctgtcgttggtgcgggtcttgccattcgtttgtttaaaaagttctcttcgaaagcagtttaa

SEQ ID NO: 391254 - DNA, 357 bp, Salmonella enterica
atgaaaattaaatatattttgtttattttgtttacttcatattctgcggcaagtgttgccgcattttctgaggaagaaaatagccaactagagagtattaatcagaaaagttcaggggaagtaaaaacggcattagacaatttgaacaaatcggttgatacacaaatcagtaacaatccagaccgtaagcctttgattttggagcttaaaaaatcatggggagatatgattgataaaaaatgtcaactggaaacctttgattccaaaggaactgatgcagaaacaaccgaagtgagcaattgtctagtaagatactaccaagaggaaatgaagtatttcgacgcgatgctcccgtaa

SEQ ID NO: 391255 - DNA, 207 bp, Salmonella enterica
gtgacgcgccggacgctgccagtcaagggcaaacgccagcggctgccagccggtctgcggacgcagtttttcctggccgacgtagtgcgcccaaccgccaccgctctggccaacgcaaccacagaacaccaacatattgatcagcccgcgatagttcatatcgaggtgataccagtggttcagaccagcgccaacgataatcattga

SEQ ID NO: 391256 - DNA, 354 bp, Salmonella enterica
atgcatatccgaggtattcatatcgtctttttcataccaggtggcggtcggcagtacgatatcggaatacaggcaagtactggagagacggaagtccagagtcaccaccagatccagtttgccgtcaaggccgttatcaacccactccacttcttccggcttcacgccgccctgtttgcccagatcaagtccctgaataccatgctcagtacccagcaggtatttcagcatgtactcgtggcccttaccggaagacccaagcagattagaacgccagataaacaggttgcgcggatggtttttgccgttttccggctgctcggcggcaaagcgaatcgaaccgtctttcagtga

SEQ ID NO: 391257 - DNA, 291 bp, Salmonella enterica
atggctaacccgcattctaccccagacttacccgcagcaaaaaccgagcgcacgttaattgtgggatatcgcccgcagggtgccaacaaaaataccccaagcctcactctttccgggaagtggctgcgcgaggcagggttcgaaaccggacagcaggttagcgtaaaggtgatggacggctgcattgtcctgatggcctatgggcaacaggagcaaaagctgctggcggagttgaaggaaacgcagctgaagctgaaagggatcgaagcagcggtatcggcgaggcattaa

SEQ ID NO: 391258 - DNA, 2853 bp, Salmonella enterica
atgccaactccccaaaattactcattcatcgccatagcggtatcagcagcattagcctctatggtattttcctcccaggcggcctgggttgacgttgatagtctgccatccagtgggctggtcagtcagttgccgccggaattacaggctattattcccgctcaggccagtgtcggtttcaccaaagtcggtaccatgcccaactacgtttatcagtggaacaccggcaccatcccggtttatggcaatggcctcacgcttaatgggccgggcgcggaggcgtttgaacacactgtcacggttattcaaaacagcgggacgggaagtccgggcgtgatttttggcaacgacctgaccattcggacgcagtcggcgaatgccgcgaataatggtagagacgtcgatggcatccgtactcacggcgctaatactccggataacccggtatttattgttaccggtgaccgtacccgcatttacgtggatggtcaggatggtgacggtattaacgccggatataactcactgggtcagggttggaccggatcggccaatatttacgtcggcgacgatctgtatatcaaaacgaccggtagccagggacgtggaattacagctaacgccatgagggatgcgtcacgtgccaaaaatacgattgtcgtcggcaatcgcgcacatattgttactactggcgacagttcggaggggctgcgtaccggacaaagtggttcgttgattcgtctgggtgacgatgcaaccatcgaaacctcaggcgcatcctcaacggggatttacgcagcatcctcctccagaaccgagcttggcaacaacgctactattacggtgaacggtgccagtgcacacgcggtatatgcaactaacgctaccgttaatttgggagagaatgccactattagcgttaacagcgccagtaaggctgcatcctatagtaaggctcctgccggtttatacgccctctcccgaggcgccattaatctggcaggcggtgcagctattactatggcgggcgataacagtagcgaaagttacgccatcagcacggagactggcggtattgttgacggttcttcaggaggacgtttcgtcatcgacggtgatattcgtgctgctggcgccaccgctgctagcggtacgctaccgcagcagaacagtacgattaagctcaatatgacggacaactcgcggtgggacggggcgtcgtacatcaccagcgctacggcgggcacaggcgttatctctgtacaaatgagcgatgcgacctggaatatgaccagcagctcaacgctcactgacctgacgctgaatagtggcgcaaccattaacttcagccatgaagatggcgagccatggcaaacgctcaccatcaatgaagattatgtaggcaacggcggtaagctggtctttaatactgtgctcaacgatgatgattccgaaacggacaggttgcaggtcctgggcaatacttcaggcaacacatttgttgcagtaaataatattggaggagccggggctcaaaccattgaaggtattgaaattgttaacgttgctggcaattccaacggtactttcgaaaaagcaagccgtattgttgccggagcctatgactacaacgtggtgcagaaaggtaaaaactggtatctgaccagctacattgagccggacgaaccgattattcccgatccggtagaccctgttatccctgaccctgtcattcccgatccggtggaccctgatccagtagacccggtcgtccctgaccctgttattcccgatccggtggaccctgatccagtagacccagtcatccctgatccggaaattcctggcataggaaaatctgacacaccgccgataacagaacatcagttccgaccggaagtgggcagctatcttgccaacaactatgcggcaaatacactgttcatgacgcgtctccatgaccgtctgggtgaaacccagtacaccgacatgctgacgggtgaaaagaaggtcaccagcctgtggatgcgtaacgtcggcgcccatactcgcttcaacgatggcagcgggcagctaaaaacccgcatcaacagctatgtgttacaactgggaggcgatctggcacagtggagcactgacggtcttgaccgttggcatattggtgcaatggcaggttatgccaacagccagaaccgcacgcagtcgtccgtgagtgactatcattcccgtggtcaagtcaccggttacagcgtcggcctttacggcacctggtatgctaacaatatcgatcagtctggggcttatgtggatacctggatgctgtacaactggtttgataacaaggttatgggtcaggatcaggccgctgagaaatataaatccaaaggaattaccgcctcggttgaagccggttacagcttcaggttaggtgaaagcgcgcatcaaagctactggttgcagcccaaagcgcaggtggtatggatgggcgtgcaggctgacgaccatcgcgaagccaatggtactcttgtgaaggatgataccgccggtaatctgctaacccgcatgggcgtaaaaacctatattaacggccacaacgctattgatgacgataaatctcgagagttccagccgttcgtggaagcgaactggatccatagtacgcagactgccagcgtaaagatggacgatgtcagcagcgatatgcgtggtacgaagaatattggtgaactgaaagtgggtattgaaggacaaattaccccgcgcctgaacgtatggggtaacgtggcgcaacaggtaggtgaccagggctatagtaatacccaaggcctactgggggttaaatacagtttctga

SEQ ID NO: 391259 - DNA, 240 bp, Salmonella enterica; identical to SEQ ID NO: 377667

SEQ ID NO: 391260 - DNA, 285 bp, Salmonella enterica
ttgcgcaacagtaacgtccccccggcggagacgctggcgatcctgaaaaataaactcagctctatttttgaatacggtctctacatccgcgacagcgtggcgcatccgccgcgctatggcgaccagattgaagagcgcgtgacgctgctgattggctgcgtagagcaggtgttgggcttttcgctgccggaaaatctggttaacccactgcgtaaacacttcctggcgctgataggctacgtgcagcgcggatatggttatctacagcggcgcgaaagcctttaa

SEQ ID NO: 391261 - DNA, 1086 bp, Salmonella enterica
atgagaaaagggattaaatatttgccttgtttattgatcgctttagcttcatctgctaacgctgctgtgatttatcaggcaaatgatggttctaatatcgatctctatggtcgtctgggttttaacgtatccgataaaaaaactggcgatacttccggggattttgatggccgtatcggtttttcagcgcgccaggctattaatgacaaactggcagttatcggcttcacgcagtatcaggtcaatgccgctgagtacgcgaataatatcaaggcggaagacccggatgatttaacagcgcgttatgtatgggccgggttcgattttgcagaatatgggaagttaaccgggggacgtgtttcgtccggtctgattatgtttactgacatcggtgatgtgttcgccagttcagacgtggcaatggctcgtcaggctaactttatcgacccgaccgccgttcaggttttccgtcaggacggtacgattcaatatcagaatacgtttggtaacttcgatttttctaccgcgtatattcttggtaacaatagttcagatctggactacggtgtgaatgctgctgttcgctataccctggatatgggcgttgcaggaaaattgcagcctgtcattgcggcacagcgatcaaaagccagtcacgacgatacgtctgttcaatcagatgacaatgcggataaataccagatgtacggggtaggcacgcgctactatattggcgactttatgtttggcctgctctattcagaagacacggttaaatataatgatggccgcccggacagcacggataaagattatgaagcgacgattgtctattcattaactccagactggtggttccgtaccgggtatcgtcatttgaaaaatgaagacggtgatgaactgaagttacgtgatacaacatttgaagttcaatataaagcgactgccaaaagttcaatctatgcgtcatattcatggcgaaatggtgaggcgggacataatcgtgtaactggcaatacagtttcatttggtggtagcgatccggctgatgattattttcatcttggactgcgttacgagttttaa

SEQ ID NO: 391262 - DNA, 852 bp, Salmonella enterica
atgagctatatcagaaaacttgaggccaacttgaaaaactacgctgaaaaagagcgtaagatagctttatatatacttaataatatcgacacatttaaaaattgctcatctcattctatggctttgacattaaatatagctcaatcctccataacaaaatttgctaaaaaattgggggctcgcggatttactgatttaaaaatgttattaattgaagagaacggcagagctaaaaattccactaaagggaaaaatctacatacgacaatacagaatgatgacccctataatataatagctgaaaaattaattgcagaaaaaattactgcattgaaacaatctactgaacatattgattttgctaatttcgagaaaataataaatattattcactcatccagacgtatacaaataatgggaatcggtggctcagcattagccgcgaaggatttagcatttaagctattgaaaattggttataatgcaatatgcgaaatagactcacatgtacaaattacagtggctcagtcgttgaaaaaacaggatttgcaaatagttatctcctactccggtaataaaaaagaaattttactcgcggcgaaaactgcaaaagccaatggcgcaaaaattattgcgataacttcgctcgcgcaaaatccgctacgagaacttgctgattatattctcgaaacagtttcaaatgaagatgaatggcgtagctcatctatatcatcgcgaacggcacaaaactgtattactgatttaatttttgtctgtctgttacaaataaatgatatccgctcgctatccatgatccagcgtagtcgtgatttgattaataaactggaataa

SEQ ID NO: 391263 - DNA, 159 bp, Salmonella enterica
atgaaagccgactgtttacaacaatatcatttgcttatccagcagcctttcgctttcacgcaaaccggttatcagacggattcactggcgccattacaaaaacagcaggtacgacagtctttaacctttatcctaatcctcaggaagacgatagcgtag

SEQ ID NO: 391264 - DNA, 618 bp, Salmonella enterica
ttgctggacgtcgatccttcagagcagaagcgccaggccgtactcggccccacgccggagccgccgccttatatccctcccgatgaacccgaaccgcgccctgctgcgcgcaggcgtaagccagacgaaggcgaaatgcgtgggggaacggttattccaccgccggagtcaatgccagatgcctcgccgctgtgcgaaggcaatgaacccattacggatatctggcgtatttcaccgctctttaactcaaccgaagcattacagtcgataagcgatcggctggcatgggatctggcagagtgttgcggtatcgaagatcgggtgatcgcggataacgatgatggcggcgttggctaccgactcaatacgctcgcttcagatcaccctatgtattcccggccacagtcccgcgcctgctgggcgctgctggcggcactcaatgatatcccactgacagaagatctgtccgccgcactgacacccgccctgtttattcaacgcgatacgggcggcttcttcttcagcgatctgtttcttattaaagcattccggctgatccgtattgtccgccggatcagagaattacagcaggaggcacaacatgctgccgacgattaa

SEQ ID NO: 391265 - DNA, 339 bp, Salmonella enterica
gtgaaattcaccacgaggttcttattaaccagtgtacttctgttatctacgggcagttttgctgtgtacgccagtgatataagcatggcaaaccagtgcctcgcctacggaaaacgggttatgaaagataaccaggagatgatgaccctgctaagtcaggcaaaaatcaacggggaaagtgttcagataaacaattattcaaaagcactgggtaagcagtttatttccacagagctggtggcgaaaattcacagcgatcaggagcagcctgggaatattttgtgcctgtttgaatctgatgataagcctctttattttcatctaacgttgatggagtaa

SEQ ID NO: 391266 - DNA, 1218 bp, Salmonella enterica
ttgaatgcccgtggtgaatataagccaattgtcgaaattaataacaaaaaaacaaaaaagacagatggtacaacaataaaattatctgaattaaaaagacagacaccttttgatgttgagtcccttgcagatagtctttcaaaaattttcatagtagatgacagttttaatatttctttaaaaaaacaaaatggtgaaataattaaaattgataatgatagaagatatagtggttttaatcagcagtttgtttgggatgttaatgaaattctttcggaagaatctgaatataatggtaagatatatggtaaattatatacatccgaaacgccaataagacctaattcggggcttcgtggtatatcattattctctagagggaaaatggtaaataaccctgagtttttttcaaatagtacttcaagtcatttctttcagtatttgactggatggttttctgtagattttatcgatgagttagatgatgatgttatctcaacaaataggcagtctgttgattgggataatgccgaaatggctaagttgagagattttctatcaactttaattagcaaggttaataatgaatggcgtaacaaaagaaaagaaaaaaaagatgatgaagtaaaaaaaataacagggatagatacaaagcattggatgagcacaatgcctaaaaatatgcgtgagcaaacatctaaaataattgattttttagggaaggaagatgcacttgagtcttactcacctgtaattcatgcattacatgatataataccggaatatccaatgcttcattggcgtcatttaaatgaaaaagttaaagataggattcagcagtattatatcaataagcagtatggtttagcggcggatcagggaacaaaaatatactgtgagattattagagatcttactggttgtgatctagatgggcgtaagcttactgataaaatatttcctggtaattcacccgcgatcagaataggtgatctgtccaccgatactgggaaaagtatgcaagaaggccagcatttcctctccacaggagtcatggcatcctttagaaatccagcttctcatatgcctgcggataaattagttccagaacaattttctgaactagattgcttaaatattttaggcctaatttcttatcttttagaacggctagatggagctgagatcacgagagttgatgctgataagaaaaaatag

SEQ ID NO: 391267 - DNA, 1422 bp, Salmonella enterica
atgtcaaaaaatataagcaaggatttgctcaatttaattgttgatctggtcggcgggaaagataatattgtgacgtgtagtaattgtatgacacgtctgagattgacagtagcagtatctactttggttgatactgaaatcaagggaaaattaaaagaagcggttaatggtgtcgtaataaatggcaatgaagttcaaatcgtttttggtgtgggtaaggccaatcgtgcagccgaagcaatgaatagtttattgggcacaaaagacctgaatactatcgctgcggaaaagaaaactgagatgaaaagcaaacagcaatcttctctccagcaatttttagcaaatttcgccactatttttactcccctgatccctggttttattgcagcaggtttaatgctcggcattgctacattaatcggtacggtaatgcacgtagcaccagatgctaaaggaatagtacccgatgctttaaattttcttaaaatcttcagtaagggattattcactttcttgcccattctggttggatataatgcacaaagagcatttggggggaccggggttaatggtgcaatcattgcggcactatttatcctgggatataaccctgccgctacagtcggctatttttcaggattgcaggatttcttcggtcacacaattgatcctcgcggcaatataattggtattttgttagcatcgtatgccggagctaaaattgaaagattcatcaggaattatattcctgatgaactcgatatgatattaacgtcaatgttgacgttaattattactgccgttctgacgtttattgtgatcatgccaattggtgtctggttattccagggtatgtcatggttgtttatgcatttaaacagtaacccactcggttgcgcggtactggcgggggtattcctgatcgctgtcgtattcggcgttcatcagggttttatccctgtctatctggccttaatggacactcaaggatttaacagtctgtttcccattctctcaatggcgggggccggacaagtgggcgcggcattggctctctactggaaagccgagagaacatcaacgttgcgctcgcaaatcaaaggggcgattatacccggatttttaggtgtcggcgaaccactgatttacggcgttactctaccgcgcatgaaaccgttcgtgacggcatgtatcggtggcgctatcggtggcctgttcattggtaccattgcgtggtttggtttacctgtcggacttaacagtgcctttggtccatccgggcttgtagcattaccgctcatgacatctgacagcggtattcttccagctattgcagtctatggtggtggcgttctgattgcatatgttgccggatttatcatcacggcattgttcggttgcaaaaatgtagatctggattga

SEQ ID NO: 391268 - DNA, 666 bp, Salmonella enterica
  misc_feature (654)..(663): n is a, c, g, or t
atgaatttagatccaggtaagttgatcacagaaggtgctaattcagcatcgatggaactggaccgtttatcaactattgatatgtgtcaggtcattaacaacgaagataaaggagtcgctcacgccgttgaactttgcttaccaaaaattagtgaagctgtagatatgatttacgcagcggtcagaaacggtggtcgtttattatatatcggtgcgggtacatccggcaggctcggtatactcgatgcaagcgaatgccctcccacctacggcgtttctcctcaactggtcagggggattattgccggaggtcaaatcgctataactaatgcagttgaaggcgcggaggattcaacgacagatcctgtactcgatctgactgctatagggcttgatgcgcgtgatgttctggtcggtatcgcggcgagcggtcgtactccgtatgtagttgcagctcttaatcacgcaaagcatactgtaggctgtaataccgtttcaatatcatgtaatcctgacagcgcgataagccactatgccgatattgctatcactccaatagtgggaccagaagtgatcaccggctcctcacgtatgaaagccgggactgcacaaaaattaattcttaatatgttatcaacatgcctgatggttaannnnnnnnnntag

SEQ ID NO: 391269 - DNA, 129 bp, Salmonella enterica
atggagtacggcgagtggaataacgccgccgttatcgcggtgatcattatgctgacggcagggatttgcacactgcttatcgccaccctgattaccccgttcgccacccgcaaaggagaggtcaaatga

SEQ ID NO: 391270 - DNA, 837 bp, Salmonella enterica
atgagccacactaccaacggtcgccgggtggtgacgatttcgctgattttcttcgttgtcgccaacctagtctggctgggcatgccgttcggcatggcgatcctctggtcgatggttgacccggcccatccgtggagctacccggatatcttcccacctgtgctgtcgttcagccgctggctgctggtctgggagaaaacctcactctctgaggcgctgttcaacagctacaccatcgcgcctgcggtggcagtggtcagcctgctgctgtcgctgcccacggcgtatgcctttggccgcatgaactttcgtggcaaggcggtggcggaaatgctgacgctgatcccgctggtgatgccggggatgctgatcggcatcttcttcagcgcgatgctgatcaacctcaatatcgacaacgcctttatcagcattgttatcggccataccgtgctgacgctgccttattcgattcgcattatgtcggcgggatttaaggcggtaccgcaggatctgattgacgccagccgcaacttaggctcaggcgtgtgggggaccttctgcaatgcgtatctgccgctgctgaaaccgagcttcctggcggcgctgattttttgtctggtacgaagtctggaggagttcagcatctcatacgtgctgggcgcgccggattttatcaccgtcccgaccattctttactctttcctcggctattccttcgtccgcccggatgcggcggtggtgtcgatgattctggtgatccccaatgtgatcctgatggtcatcatcgagaagttgctgaaggggaactatctgtcgcagtccacggggaaagcctga

SEQ ID NO: 391271 - DNA, 1083 bp, Salmonella enterica
atgaaaaaagcagtaatgagtctggcgggcggcctgttatgcagctcgttggcgatggcggctgataataccgactgggatgaagtggtgacccaggcaaaacaggagggcagcgtgacatttaacgtctggtacttacagccgcagtggcgcagctttgtgaaagactttgagcagcagtacggcattaaggtgcgcatcccggaaggcagcatcgacggcaatatgaacaagctgctggcggaagcgggcaaagcgaagggcaaaatcgacgttatcgccctgtccgtggcgcagctcccggtgacaacgggggcgaaagcgctggcgaaggtggatgacctgccaggctatggtgacgccattcaccagattcagaatgtcgatacccaaggttatgccgtggcgttctggggcaatcagaccgggtttgcttacgacccgcagcagatggacgaccgggcgctgccgcagacgctggagcagttacagagctttatcgacgccaatccgaagaggttcggctataacgacccaaataacggcggcgcgggggaagcctttatccagcgcatcgtcaccattcagggcggtgagtttaacagcgaggcagagaccgttgacccgaccgtggtgaaaaactggcagaaaggctggcagtggtttgccgccaatagtgacaaaatcacccgcaccgcttccggtgctgacagcctgacacgcctgaacgatggcgagctgatgctgacgcctgcgtgggaagatcatctggtaggactgcaaaaaaccggtgccattacctcgcgactgaaattttacgtaccagagtttggtatgcccggcggcggtaacatagcggctatagctgctaacagcccgcatccggcagcgtcaaagttgtttcttaactggctgatccaggctgatacccaaaaagtattaagtaaaactttcggaacaacgccaatgaataaaaaaaatgaatctgaagtggtgcatcctgatatggcagttcaattttacgggaaatcatacagcatggaaatgaaaaaagaatatgtcagtcaggtgatgatgcgttaa

SEQ ID NO: 391272 - DNA, 1080 bp, Salmonella enterica
atgacaaatgatgatagcgagataaaaatgaaaaaatttaaatattctgtaatgatgatgattgttatgtcctgctccgcaggggcagcagagattgttaataaggacgggaataaactggatttgtatggaaaagttacggcaagacacctcttcagtaaaaatggaaatactggtggggataaaacctatgttcgtttcggattcagaggtgaaacccaaattaacgaacaactgacgggatttggtcagtgggaatataatattcagggaaataactccgaaggttccgatgctcaaaagggtaacgcaacccgactggcgtttgcaggcctgaagttcgatgatgttggttcattggactacggtcgaaattatggcgttgtttatgacattgaatcatatacggacatgctacctgtgtttggcggcgattcttacagtgccagtgataatttcatgagcagtcgcgccaacaatctcctgacttatcgtaataaggatttctttggtctggttgatgggttgaattttgcactgcaatatcagggtaaaaacggcggaacaaacgaaagtaacaatggcagggatgttaaaaaacagaatggtgatggttttgggatgtccgctgtgtgggaaagcaatttcggatttggcgcaggtgctgcatacagtagctctgatcgcacaaacgcacagcagactcagacttacaatagcgccagacgtgctgaggtctggaccacaggtctgaaatacgatgccaataatatttatctggcggcaatgtatgcccggacacgtaacatgacatgggttaatattaaacaaaatagccagattggaaaggatcttggtttaataagtgattctggcgcgttcaccaataaaacagataactgggaaattgttgcacagtatcagtttgattccggccttcgtccttccgttgcctggctgcaatccaaaacccgtaataccgaatttggagatgtttatctcgtgaatttgaaattattgctggtaagtctttttcagtcggcgcgccagctgactcccaccgcttcgggtttgtcctga

SEQ ID NO: 391273 - DNA, 147 bp, Salmonella enterica
atgtactggactggtcactgcaacggattgtgcggctggaactgtcgttcgcgaatatcattcagtcggttattgattaagcgctttgttgaaattgaagggttggggcatgtgtcactcttttttgattgtatattactggaatga

SEQ ID NO: 391274 - DNA, 237 bp, Salmonella enterica
atgtttacagtttacaaaactatttgctggatttttattatagttgctgctgtcattcatatctcacttgggtatgaatacaccgggtatacatatgatgagtgtccacatgaacagtgcccccctctggcttacggtgtggcgctgcttgtgatagtgtatagcggactagcactaattactggttatgtgctttgggccagttggaaaaaatatagacagcgtaatatgaaataa

SEQ ID NO: 391275 - DNA, 1365 bp, Salmonella enterica
atgagaattttatcatctttagcaatatgtcttgccgtagcgatcagcactggttgcgcagatgccctaaaaagcgactatcacccacctgaggtggtttatcctgaacgctggcgccaggatgatactgccggggacccggcgccatttgactgggaagcctttaatgacccccggttgaataactggctgcgtcaggtgatggcacgcaataacgatgttgccatggctgtgctgcgcgtttatcgggccaggctggaagcggaacggaccggtctcgctaacgccccgggcctgaaagccacggtggccctggatggcaggagagtccggaataccccatcagtctggacaaaaagcagttccgccagccttaacatcagttatgaactggatctgtggggcagaattgcacgtcagcgggatgcggcagagtgggcccgtcaggctgcggaagaagatttgcgtgccgcacggctgatattgatctcagccgcctgtaacaactactggcgtatcggcttcattaaccagcaaataacgactcttcagcagagtattgactatggcaaggaaacattacgactggctaatgcccgccacaacgcagggggagcttcatccctggatgtggttgacgctcagcaaagcctgctgatgcaggaaaaccggctgaccgggctccggcacgaacgtctccaggcgcttaatcagcaggctgtgttgcttggcgccccgccagggggccagtttgttgagcctgcagggttaccggtgggggctctcccgcagataaatgagtatattccggcaagcgtgttgaagcacagacccgatgttcgtgccaaagagtcgcgggtgcgtgaagcgctggcaaacgttgatgtccgacgggccgggtattacccggagattaatttgacaggcacccttggtacaggcggtggctcgctaatgacgttgctgcataataccgttggcgccgttggtgcaagtctgacgctgcctttcctggagtggaggcaaaggggagtggaggtcaggatcgcccgcaacgactacgaacagcgggttctggaatttaagcaggcactttataaagcgatgaacgatattgatgacgcgcttttcatgcgcaaccagttgctggtacaggaaatccgtctgcgggaagggtttgaactggcgcagaaagcagagcggttaaatgaagttcgttatcggcagggtgctgtacgcatctctttctggcttgatgctcaggagaaacgccgtcaggccggattattactggatgaaaaccgttttaatcaatatcagaatcttgcgaaaatatatctggaatttggtcgttcaccggaataa

SEQ ID NO: 391276 - DNA, 1941 bp, Salmonella enterica
gtgagtagcattatcgagctgaagggcatcagccgcacctataccaacggtggtcaggcgttaagtgtactaaaagagatcaacctggctatcagtgcgggtgagctggttgcgatcatcggcgcttccggctccgggaagtcaaccctgatgaatatcatgggatgcctcgacgtacctgaccgcggtgattattaccttaacggtcagaatgtcgctcatttttcccccgatgagctggcaagggttcgccgggagcatatcggctttatcttccagcgctaccatttaatgcccgatctgagtgcgctgggaaacgtcgaaatcccggcaatttacgccagcagtaagcgtgatcagcgtcgccagcgcgccacagagctgcttggcagactcgggctggaaggccgcgaacaccataaaccaggcgagctctctggtggtcagcagcaacgtgtaagtattgcccgctcgttaatcaatgggggcgaaattatcctcgcagacgagccgaccggtgcgctggattctcagtcagggcatgatgtgctctcgatcctcagcgaactgaaccagcgtggacacactgtgataatggtgacccatgatatgaacgtggctcagcacgcacagcgcatcatagaactacgggatggcgcaattatttcagacagcgggagccgtgcaacgaccactcaaaggctgccactgcctgagcagaccagacaatatcgctggcaacacatggttgatcgtacccgcgagtcgttgcaaatggcgctaaaagcgatgaatgcacatcgcctgcgcaccacgttaaccatgaccgggattattttcggtattgctgccgtggttaccgtagtggcgctgggcgagggcgcgaagcagaaaacgctggaaagcatcaaagaactgggtaccaacgtagtgagcatttacccgggacgagatttttttgatgacagtatcgaaagcattcgcacactggttccggctgatgccggggtgctggcgaagcaggggtttgtcgacagcgtgagtccggaggtcagcgcttcggatacgatccgcttccgggggaaatcagcacctgcgtctgtcaacggtgtggggcgtgaccattttcgcgtgaacggctacaaacttttacagggagcaacattccgggacgatcgtaatgcgcctcaggaagtgattatcgacgaaaacgcacgtaaggcgctgtttgatgatgccgggctggacgcgctggggcaaattgtttttctgggatctgtcccggcgcgggtggttggtatcgccgaaagtaataaccacagctttgcgccaaaccggattaatgtctggatgccttacagtacagtgatgtaccgcatggtaggtaaaccgacattaaccagtatcagcgtgcggctgaaggataatgtttctaatgaggcagcagtcagcgctatctctcaactgttgacacagcgtcatggtgttaaagatttccagatctttaacctcgagcagatccgaaaatcagttgaacgtacttctgtgactttcagtattttgatcctgatggttgcctttatatctctgatgattggcagtctcggggtgatgaatatcatgctggtatccgtaaccgagcgaacccatgaaattggggtacgtatggcagttggagcccgccgcagcgatatcatgcagcaatttatgattgaggcagtactggtgtgcctgatcggcggtgtgttggggattgccgtatcgtacgtcgcaggggcgctgtttaccgcactggcgggagatatgcttacggcaatctattcctggcaggctgcagccactgcgtttatctgctcaacgttaattggcatgatcttcggttatctccctgcccgcaaggcggcaaggatggatcctgtcgtttcactggccagcgagtaa

SEQ ID NO: 391277 - DNA, 1182 bp, Salmonella enterica
atgaaattcattcgccgtcacatgtggattatttttgtggccttagtcattatcatcctcaccgtagcgattttctattttctacgctcaccaccgcctgaatatgtcaccgctgtggtacgcaggggcgatatcgaaagcaccgttctggctactggccgaatcgatgcgattgagcgtgtcagcgtgggggcccaggtgtccggtcaggttaaatcgctaaaagtaaaactgggcgatcgtgttaccagaggtcagttaatagctgacattgacgatgttcctcagcgtaacgaactgcgaaacgccgaagcagcgctggatgtggtgaaggcggagttgcaggctaaacaggcgcagttaaagcaggctgaacagcgcttcagacgccagcgagaaatgtaccgcaaggatgccagttcacgggaagatctcgaaactgctgaagccacgcttaccgtcgcccgggctgaattacgatcccttaatgccagactggtacaggcgcagaccgaagtggacaagaagaaggtcgatctgggctacacccgtgtactggcgccgatgaacggtatagtcatagctattgtgacccgacaagggcagacggttaactccagccagagtgccccgaccattatcaaactcgccaggctggatatgatgaccatcagggctcagatttcagaggccgatatcacccgcatttccgccggacaaaaagcttacttcaccatcttctcggatcctgatcgccactatgacgccacgttgcgtaccgttgagctggcacccgaatccgtgatgaaggacgattcgcttgccgacagcagctcttcttccggttccggcactgcaaatgcctctgtgtattacaacgcattactggatgtgccaaatctggagaacagattgcgaatcgcgatgaccgcgcaggtcaccctgcgtgttggtgaagccagagatgtactgcttgtacctattcaggcggtacacaacattgagggtaacaaacagcaggtccaggtattgaccagcgagaacagactggaaatccgtgaggtggaaacaggactcaccagcaacgtcgatattcagattatcagaggcctggagcccggggaaaaagttgtactgtcacaaccgggtgagaaagcgcccggggagggatttgttctgtga

SEQ ID NO: 391278 - DNA, 417 bp, Salmonella enterica
atgaaagtcaatatcctgttaatactggcgatgctatcattaacatctgaaacagcggcagcctcagttaatgacattgccgtatatgcggaggagaaatcacgcagttctgtatttgtagccgaacaaacctcctatacaaaaacctttgaagtcaccctgaaaaatatgtcagaaaaagttatttctttatctggcttgtgcataaaaggcgtctcatcagacggaaaggagtatgttatgagtcctgtcggaaatgatataatgaaaggcatgttacagcctcaaaaaactgtcagggggatactgtcagctcttggtgataattcagccatacataaaataacattagcaaaaccatctgatgattgcacgaacagtgaaaatggcactcttccattcacgcttactgattaa

SEQ ID NO: 391279 - DNA, 954 bp, Salmonella enterica
atgaaattaaaatttctggctcttacattttgtgtcccggccatcttcactgtacaggctgacccgtacgcactgccgtttatgccgggtaaaatcagtacggatattagtctgggctccgtgagcgggaaaaccaaagagcgtgtttacgacgctgacgaggggggacgtaaagttagccagcttgactggaaatataacaatgccgctatcattaaaggtgcgctcatctgggatattatgagatggatatccgttggtgcttctggctggacgactgtcgacagccgcagaggttatatgacagacaccgactggctggatgtcagtaaaccacacgaatggactcattacagctggcaccctaaaacgcgtttaaacttcgccaatgaatttgacctgaatatcaaaggctggcttttaaatgagatgtattatcgactgggtattatggctggttatctggaaagccgctacagctttggtacaacgggggggagctatatttacccctcaagtgaaggtgtctgtgaccgcggagatatcggaataatacctgctgaccagagggggattggctacaaacaacgcttcagaataccctatattggtctggtcggtaactatcgttacgaaaacgttgagttcagcggtgcattaaaatacagtaaccgggggtcctcctcagataatgatgagcattatcaaagatcacttacatttcgcgataaatttaagaatcagaactattattctcttgctgcaagcttggggtattattttactcccaatgcaaaaatttatgcagaaggaacatggaatcgtataaataataaaaaaggtgacactccggtatatgattatggtgaaaaaatacataaaaaaagccaaagtggtgcaggaattgaaagctataacttcatcaccacgcttggtctgatataccagttttaa

SEQ ID NO: 391280 - DNA, 888 bp, Salmonella enterica
atgattcatcgatataccctgaagtatcttgaataccagatgaaaaaattacggtatttaattgtaagtgatgaacaataccggagaaaacggtttatccggaattttgggtttcagcctgatatgactgatccacggacatttaatgaaaaaatcatgtaccggatgctgatgacacctgatccgttatttacccgcctggcagataaactgcaggcccgggagtttgtccggcaacaggctggtgaacaatatctggtaccgttgctcggggtttacaggcacatttctgagatagacattaaagcgttccctgcgcagtttgtccttaagtgtaatcatgacagtggtagtgtgattatctgtcataataaaaaccagtttaattcaaaacaggcattccgcaagctcgcgttctgtatgaaaaggaacatgtactatacgacccgggaatggcagtaccgggatattgaaccacggatactgtgcgaaaaatatatttcacgctctccggcgaaagcagggggatatcaggcagacatttaccgggttcactgttttgacggtaatccgggctggattgaggttgaataccttgaccggtataaccggcgccattcgggtatctatgaccctgactggaatattctgccggtatgtatgggttaccctaacccggacgtgttacagcctgtaccggcaaagattcacgagttactccgacttgctgaaaagttgacagccggcattgactattgtcgtgccgatttttatatgacggaaaaccggatttttttcagtgagtttaccttctcaccatcaaacggcagggagacattcacaccacatgactgggataacaaatttggcagctactggcagctataa

SEQ ID NO: 391281 - DNA, 132 bp, Salmonella enterica
atgatgggggttagtcagaaccatacgatccgggtaaccagtgaatcgcgggtgaaacagagttttcttcatgacttatcgatatctgaacaggataattgcaatctggtaaatatcattcagaataattaa

SEQ ID NO: 391282 - DNA, 312 bp, Salmonella enterica
atgatcagacatatattattaatgcgatttacagatttagccatggcagaacagattgctgaggttctggatacttttttgaaaatacctgaatatattcatggtgtggttgttgttgaatgtggtgagaatgacagcccggaagggaagaacgctggtttttcactttgtgtattgatgacattctgtaatgaaacagcaaggcagcaatatctttttcatcctgaacatataaagttcaaaaagatattcaggccgatattagagagccttattgtcttcgattataccctggatgcctgcaccaaatag

SEQ ID NO: 391283 - DNA, 1236 bp, Salmonella enterica
atgagcagagatgagtctgttaacgatttacctggcttcgatataactgctgaggattttctcagaataattgaaataccgtgcatgattatccggcgcaccacaaaaatgaagtctctggaaatgttgacgctgcgccttaaaggcaacacgttgtatgcaacaggtatagatcttaattctgctcaggttatcagtcatggtgaaatatcagttgttcatggcgatatggaggcgtcggtaccggctgttcaaataaattcgttaatccataatatgaggagcgaaggattaatcagtgttcgttgtcacccggttaaaaatcaacttatcgtatgcaccggtaaaaatatttacaatattccactttgcctggatcctgttcctgaaatcacacccgggcttcttcggtgtaactacagtgtgcatttgtctgcacaaatgctgagccatatcattaaacgtgtcagccatgctgctgcaagcaatgatgtgcgttactacatgaatggtgtctgtctgtgtatcgagcatggccagtttatcgctgttgccacgaatggacatcgaatggctgtcagcgcatacgggatcgtctacacagacacacttccggcagatacagatgagcccgctgctccgcggttactcgagaacaggacggtgggcgttattcttcctcgcagtgtttgtcctgttctgcacaaaattctcggctgcagtaaaggtcacttcagcattgattacagtgaccacaacctgatttttaacctgggcaaccatacagtcatttcaaatttgatagacggtcattatccggactggcgtcgggtaacctgtgcgatacagaagaataaagtacggttcaggattaatgctgaaaggctttactcagccttaaagcgagcctccccattacttaagggaggagcagtcaataatgcgggaacgtgtattatggcgtttcatgagaatacgttaataataaagtcaccggaggcaaattctgtcatctgcagagaaatcatggacattattaaagaagagggaatgataaacaacgtgcttgaagtcggtataaatgcggactatttgcttgaaagtctggccagcctgacagaatgtattaaagcagatggtgctgttttaattgggctggacaatacagcaacaggtattatttcagtgattataaatgacaatcattgtgactttattatgccggtccgcatctga

SEQ ID NO: 391284 - DNA, 192 bp, Salmonella enterica
atgtctgcgttttatcggtgtgtttgcctgcctgtcattatcaccgatgcttttgttgccacctggctttggtactcaggagatgcaggcacttcccccctgattttctgtagggagacagagttcaccgcatttggtctgattatgttggtctccggttttgtcattaacctcttatggaaattacattaa

SEQ ID NO: 391285 - DNA, 354 bp, Salmonella enterica
atgaaaaaaaatgggatattatttctgtgtgtcctgactgttttatgctcagagagcgtcagcgcaactgaacgcaggactgagggtgtgtgtgttgagaatactgtgcaacaggatgcgacgttatgcccttcccgtaaaaaaaacaagccaaagaaacgtcagactgtatctgagaaaatcgtgtcagatatcagagtgaaacaggcagaaaacagtaaaaaactggaggtcagactgaagataaaccagctccgtagtgagatgtggagtccgggcaggcagggacagcgtgctgaatatgagaagaagattcgggcgcttgaaaaaatattgtcagatgataaccggtaa

SEQ ID NO: 391286 - DNA, 654 bp, Salmonella enterica
atggttcaggtgctgcatttaagccgcgacattatcagtgacttttggcagtatatcgtgacggataaagggctgagcacggtaacgccacgaaacacccctgattatcttgttgagatgtgcccggtgccgtctgtttttaatgaagcggtccgtttatctgatgggctgtcagaatcccccgttgataaggcccgtcgctgtagtctggccttccttgtgctttcagatttcttatcacaccaccacgcgaaagcgttactgaggcgaatgatgctgtcacgcctcagtgatgatgtttatcgtcaggtttatcagtttccccgggaagtgtggtccttgtcacgtatggcgcggtactttgcaatgagtgacagtctgctgaagaaaaggctgcatgaagaggggacctgttatagccgccttgtgatggcagcccgtatgcaggtggccatgaaatgcttaatgcgcggatgccggaatataacgcatattgcggcgcagagtggttatcgtagtacctcgtattttattgccatattccggaaatattatggtctcccgccgtatcagtatcagaaaaaagtaatatcagaagaccgtaaaaaaacaggtataagtgaaatcgtggtgtcagtacgaccggataattga

SEQ ID NO: 391287 - DNA, 1272 bp, Salmonella enterica
atgataatgataagtgcacttctgctggtgattacgctggtcatgctgtcctacgggatacggcattatatgctggcaataaaccgtctgttttttccccagaaaacaggctttgaaggtctaagggttgcccggtggccggcgctgaccgtgtttattgcggcacataatgaagagacggtcgtcggccactgtattgaagccctgctgcaatcggattatccgctggaatgcctgagcattgtcccggtcaatgaccggtcaacggatggtacgcgggatgtctgcgactactgggcacagcgatatccttatctcgtgaaaccctttcatcgcagtagcggccgggccggaaaaccggctgccctgatggatgcagccagacaggcgccggccagcgatgtttatgtgatttttgatgcggattatctgccggcgcccggactgttaaagcagattgtggcaccgctgtttgatccgcaggtgggggtgacgatggggagagtggtaccgcaaaatgccggggtgaaccttctcacccgcctgctggatatggagcgctctgcaggttatcagggcgatcagcaggcccggcagaatgcgggacttttgccccagtttggcggaaccgtgggagccatcagagtccgggctctggagcttgtcggcgggtttcgggaggatgtgctggcagaagatacggatctgacgttccggttactggataagggatggcgggttcagtatgtgaatacggccgaatgttatgaagaagtgccggagaactggccggtgcgggttcgccagttgcaacggtgggccaaggggcacaaccaggtactgtacagttatttctggcgaagcctgcgtaaccaccaccttaatatatggcagaaggtggatgccatcatgctgctgggctcttatgccgtggcaccgctgacactgctgggctggtgcatcattttactgacctggtatcttcagccggcatggttactgacgctgtccgcaacgtcgatgttgctggtgatgtttggtggttttggcaacctggcggcattttttcagatggcggtggcggtcaggctggacgggcacgccaggcgtttacgcctgttaccgctgacgttagtggggtatctggtgagtgcagtgaccatcagccggggggcttccggcctgcttctggataagctgctgaagcgggagctgcgctgggataaaacagcgcgtttccggggaccgggggaggagaatcgtggtggctga

SEQ ID NO: 391288 - DNA, 1077 bp, Salmonella enterica
atgaaagataagctgatgccacgtatgtatgctgcctggttgtttgtctgggtgtttgcagggagtgcatcctggccggtgtacgcaaaattacagagtcagcgtccggcggtgccggacacactgagccaggcccgtaaacttgacctgtcgtcttatcagacccgggaagggttgcttatcacctttaaaaacggagaggcggctgatccttattttgggctgtactcactggagcttgcgggccgggccggtatggatatccggcatactgcccgcgagtttatccggtgggggatactgaaccagggcagtgatggccgtttcgggcgttactgtaagcagcaggcccgctgggtgtactgcgggcgggcggactccgatgacgccacgctggcccgctggttgcagcttctggtgaatatgagcggggataaagcattacctcccgtctggcagtccagttttgatcgtgcgctgaaggcactgatgtccctgcgtatgagcaatggtgtttacagcgttttcccccatgacacgccgggttacgccgggtacgccctgtttaaggataatgtggaggtactcaatgctctggagcgtctcgctcagtattttcatgccgtgggggatctggtacaggcccgtcgatttgaggctgatgcccgggcgttacgcagggctatagggaaatattttggacggaatatttttgccctgaagagactggccctgaatgcccgttacgataaaccgctgttttaccctcatgccgttgcgatcccgtttgcctggatggagggatacgggccccgcccgacccgtacggatgctgcccgctggttaaaaaagtatgatgcggagtggcgggcaatggccgacagggattatccatggggactgatggcgctggcattgatggatgcgggggattattcgcgggcgcagcgctggctgaacgacaatgagcactggcggcagaagggagagcactggaatattctggaggaaaccagtgcccggattatccgttaccgcctgatgcaggaacaacagaaagaagggaccggacaatga

SEQ ID NO: 391289 - DNA, 1116 bp, Salmonella enterica
atgacccggacgctgcgttttgaaaccctgaacggattgcggggcatctgtgcactgttgattgcctgttcgcattttcctgctgcatttctgggggaccagtgggtactgttccggcacgcgtttgtgttcaccaatctgttttttggactgagcggttttattctgctggccgtttatcgcgaacgtctcaggacgtcccgtcatctggctgatttcaccaggaaaagagtgaaacggttatttccagtacatctggtcaccacgctgctgattctggtcgttcccttcgccgcctggctgctgcagtccctgattgacgtcgtcatacccggacgctctccgggggggctgccgcttctgccactggatgtccggtcgttactggtacatgtttttctgcttcaggggtttggcctgttaccgcagctggtctacaactttccggcctggtcgctgggggcgatattttactgctcgctgttactgggggggatactgtgctttacccgccggatccggattgtcatgtacggggttatctgtctgggagcggtaattgtccttctgcaggatgcacctcattacctgaccagcagctgggattatggcattttccgggcgctgagctgtttctttctcggggcgctggcggccgaggctcgttgccactaccggacacttcccccccgcctggcgtactggctgcctctgctccagacgttaaccctgatgctggccctgatgctggcgaccgcggtgcagacagacagcctgatgacgttcgcattattaccggcactgacacttttcctgtgggtgttcagttacgacgggacggattacacccgggcgttgcagttacccgttttccgctggttatctgagcgggcgtattccatttttatgaaccaggcactgctgctgtttctgggggctgaaatgcagcgcagcagtgcgcttctggccctgtcaccgttcagtacccgggtggccggtacattcgctctggcgctgtatcttgtgttgctgttactgctttcggactggacgtggcggaatatcgagcagcgatttaacggcagaaatgtccgggaaggggtaaagagaaactaa

SEQ ID NO: 391290 - DNA, 726 bp, Salmonella enterica
atggttgcttattattccccgttgcgggggctgcggcactatgacgcccgtaatctgccggtcgttctcagcggcacagtattaatggccgggttatgtgcctggctggtgtggcaggaaatctggattttctacggctggcgcctgattttcagcgggctcggtgagtggctgggaagccggacggatgtggtgctgtctcatgttgatgcccttgccgtggtggtcagtgtaccgccggcgggcgtcactgtggatgaaagcctgtggcgtaccggtctgtcgggcgccattctgctggcggtgtcctgtcttgtgcccgggcggaatgtccctttacgctacctgctgcgtgcattgttttttgttctggcacttcccctggccggttatctgttatggggaaccgacggaccggtggatccggcggcgcatctggccggggtattccgtcagggatactggtttgtcgttctgacgccggcattttttgccctgacggcattcaccctgcccggaaatctggtgttacgcctgggatgggtgatactggctgagatgtatctgttactgattattccggtgattgtgttgtgccactggctggttttgtcgtatttcgggccgctggtgcttcctgttctgaatacgctgggtacgctcctgctcctgtcctgctatctgattgctttttacgggctggccgcctcagtggagacattatga

SEQ ID NO: 391291 - DNA, 780 bp, Salmonella enterica
atgatgagtaacaaaaagagctggctgctggtcttaccgttgtcactggccttcgggagcgtgcaggctgcagagtcgggacgtttcgaaagcagtatttccggcgcccatgtgacgggcccgtatgagggaggaaaatccttcaaatcatcggcgttgtttaatctggacgggaaagacaggctgggtgtgagttacctggcactgaatgcctggggagaatccacgaattacctgaatgtacggtatgtggggtatatcacgccggatgtctgggttgacagtaacgtcagtggctcagacaaaaacgccattaccgcaaagtttcgtggtaacgccatggttaactggggtatagcggataaaggattaatcctgggggccgggtttgatcgctataccatgcgcagtgggggaggatccagcgcagttcgtacgatgctcgtcaaatacctggaaggtattccggttgcgattcagctcaatgccacgctggcccggagtgacatgaatcaccggcccggtggtaatgccggcagcagtattcagtatggtcatgaacgccagtggactattgctgccggcggtggatacgggcgtgtgcattatgaactggtcagacagccgggtgccgttgcggactaccggagcacatcgtattttgccgcggggcgttactggttcggaaaggactggggaatgagtacccgttattccggcgtgactaacgcctattacacccggaatgaagtggaaatgggtgtattcgtcgatttttaa

SEQ ID NO: 391292 - DNA, 1200 bp, Salmonella enterica
gtgaaagcggaaaaaatgaaaaaaatcaggatgatgatagtctgcgggacgcgcccggaaatcatcaagatggcaccggtttatcatgcgctgcgcgcgagccggcatttttcacccgtcgtggtacataccggacagcataccgagctggccatgccactgtatcagtctttccgcatgctgcctgaacgcatactgaccttacagaggtgtcaggggaccctgtctcatctgaccggaagtctgctgacgggggtcagtcagacgctggaagagctgcggccggcggccttactggttcacggcgatacggccagcgccatggcggctgcgctggccggcttttatgcccgtacgccagtcgggcatgtggaagccggtttgcgaacctattcccgatactcgccgttccctgaagagatgaaccgttctgtgatcggacgccttgccgactggcattatgccccgacgcctgcggcccgccaggccctgcttggagaaggcatctgcgactcccgtattgtgatgaccggaaacacggggattgatgcggccctgcagatggtgaagtctctgtcggggacggacttactgccggcggtggtgacccaacatgacctcagccagcgtcttgccggccggcgtctgttactggtgacggcccaccggcgggagaactggggggaagggctgatgcaaattgccagggcggttgatgcgttactgtcccgttacgatgatctgtttgtggtctggccgctgcatgctaacccggccgtctctcaaagcatcagacacgccctggcacaccggtgcggaaatgacggggcactgctgctgtgtcccccgctggattatccctcgctcatctggttacagcaccatgcctggctggtcctgacggattccgggggaattcaggaagagtcggctgctctggggacgcctgtactgattctgcgggacacgaccgagcgtcctgagttagtcagtgccggcggcggaattctggtgggggctgactgtgcccggatctgcgacgcggttcgtcagttgaatgaaaatccggatgtctggtccggtatgaaaaatattcagaatccgttcggagatggcatggcggcaggccgcattgtcagccatctggagacggtattgtcatgtgatgttcaggatacagggagtaagaatgatgagtaa

SEQ ID NO: 391293 - DNA, 717 bp, Salmonella enterica
atgacctttatttccctgccgggcggaataacgctgctcgttataagttttttactgatattgccttttattcctgcagttatggagtggcggtatccacaggatgcgggggcgctggagcccgcaccggatgagacccgtgctgaagagttcgccgggataccactcgcccggaaagtgctggctgtcggcacggtattcagccgtattcaggcggactgcattcgctgtggcgaaggcaattttccgcatccgggctttccgctgctgacaaccctgctcccctgggcacccgtcagtgcccgatggtacccgggccagcgtttctggcgcagtcagggaaacatcactgttccaccaggggtcagggtgaacggggatttgatcgcggatggcaacgttattctgggagccgggagtgtgattaatggctccgtaaagtcaggtggccatctgcagatacacgacctggcgcgtattgaaggaggggggatcgcagaggacatcagtctccaccatgctgcggcagtatccggatgccttgtggccagacgcagggtaaggctgggaacactctctcaggtgggcgcaccgtcctgcccgggaagtgtcgtggccactgacatcacgttatatcccggagcctgtgtgtacggcgccgtacacgcgcaccatcgggcccggattgttgaaatggacaaggaacacagccagtga

SEQ ID NO: 391294 - DNA, 279 bp, Salmonella enterica
atggtgaagaaaaccgatgaatataaaatgctttcttttgagtgtctgcattttgatttcaataaggattgtggtttaagtgaatctgaactctgtgtggttcagttgcttctgaaaggctatacccagaagcagattgccgccatgcgtttgcggagtgtcaagacgatatcagcccagaaatgtaatgcgtttataaaactgggagtcagaagtgatattaccctgttgtccgtattattattgaaaaatatggtgaagatatctgtcagcccgtag

SEQ ID NO: 391295 - DNA, 210 bp, Salmonella enterica
atgtcagccgatatgtatgatgcgatactccactatatgagtgaaaaaaatgccaccgtacgacctttaaaaaccagagaaatcgcggatggcattaatgtgtctgtctatgccgcccgtcattacctccgggaattaagtgacaggaatcttgttgaagcggatggtgaagggaaaggccagattatacggtggtatctgataaaataa

SEQ ID NO: 391296 - DNA, 1026 bp, Salmonella enterica
atgcaaacagccaacaaaattgtaatattaacaaacttattgctagcaagcgttgcgcaacctgttttcgctgctgcagacctgctccaggctgtactctgggcatatccatcaaatgatggaacgactaaagattacgaaatcgactgggcgggtttagaatacaaccttccaaatgtgaattcatggtcctgggggcgtccttatgtccgtgctgtggactgccgtgtaggaaatgggataggcagatttaatcaagatgactataacgttgtcgcatttcctcaaaaagtacaaatacgcccggggtttgatgcaattataaatgttcgtggtgattacgctaatgcttccgctaatgggtggaacatcagtgtaggctataaaaaaagatggactgaatttagggaagtagcctgtgcgaaagctggggagaactggaagggtaattacgatgatggtacttctagtggtatttcccagcgaattaaattccctctcggtattccggcgggatattatgttgtcgatataccagcccgggttggtctatacagtagatactggacggacaaccacaagccaatcgatatgcctgttgcgtcgatgctaagttatcttattccagtcgaaactaaggtaaagatccgtgtgaaagtcaataatagttgtaaatttaacaccaacggaatcactttagaccatggtgcccaaatcttgggtatagctgataaacacgaagtatcaaaatcaatcaacgtgtcatgcacaggaaaaataggtgttcgtctgagccttgtctcgttgtctccccccaataaacatgtaggtggcgaataccgtgcggggttagggaatgggtgggacagccgtctcaagctggatggtatgtcagggcctcgtacactgcaattcccagcagctggtgctcagactgtccagatatcttctgaacttgtacgaggacctcacagcgatgtgggacgattatccggcagtgctgttttagtaatgcagccaaattaa

SEQ ID NO: 391297 - DNA, 378 bp, Salmonella enterica
atgaaatatatgatatgggtattgccattgctgtttttaataaatggctgtgaaaataaagagttaataaaatatcaacaaaaatcagatggtaagccaatatccgttgcaggtgataaactgaatgatgtggaaaaaatggaacgctgccgtcgcgaacttgatgtgttgaagaaaattgacaatgtggtctatacaaagcgcaagatggaatttgataaattgatatcgggagcatcactctataccggcgtaagaaatgaagtaggaaattacactcagaatgcagtggatgcactgtatcgatttaaagctgataagctttgtgcggatatttcaaatgatgtcctgaatggactggcaaagacaacgaattaa

SEQ ID NO: 391298 - DNA, 279 bp, Salmonella enterica
atgaaatgtaaaggttatattatttattcggattatgctcgtaagttaatgtaccctgggaaagtttcacctgagcattttcaatgtcttatcggtttatccaagatacgcagtaaaaaagcagtcgaggctcttgaggcttttcttgttaaaggctggtcaaggaaggatatttttgaaacatacaagatcagtccgggatatttctcgctgaaacttggccagatcagaggctgcaataaaatggtttttgaaatgctgcctttttacacggggtga

SEQ ID NO: 391299 - DNA, 558 bp, Salmonella enterica
atgaaaacaggattaaggccagtattgctgatgctgtcatgctggggcagtctgctctggataccgtctgttcagggtgatgtgaatataaaaatcaccggggaaatatatattccaccctgtaggatcaacggtaatgatactgcgatctatattccgtttggcagaatagcgctgcagaaggtggacgggcgaaattatgcagagacccggacggtgagggtcacctgtgattattacaggggaaaaccgtatattcgtctggcgggggcggctttatcgggtgccggagagaatgtactgagaacaagcggggccaatccggacggactggggatcgcactgtaccagggcggtagtgttgacagtgcttacccgctgaaaataggagcaggggaacaggggaaatatggttttgagattaaaaagggactgtctgtactgaatacgacgaacagtgaattcacatttactgccgttccctacaagtacgggcgtgcggatttaaaggcgggagcattcagtgctgcggtgacgatgagtatcagttatctctga

SEQ ID NO: 391300 - DNA, 1368 bp, Salmonella enterica
atgaataacctttatcagtccgcccgggggaggctgtacccggtcatgacagcctttctccttatcctgaccgggaccgggaccgggacgtgcagtgcggcagggccggcaaatgaaccgacatccggaggtattccgggaatactgaaatatgcacagcagtaccgggaggaggagaaaacggcagcagaaccagaaaaaaccgggaagaaagggaaagcgaccggtgccgtgtcatcaggacaggggctgagcgggagtacggaactgcgtcgccgactgactctgcgggagcaggagctgcggcagctgaaaaaagagaatcaggtcctgcaggccagacagaaaggggggccggataccgcaccgaagagcgcggaaagcgacagacaaatgacgtcgctgaaggctgagctggcggaaagccggaagcagcaggataccctcacgcgccaggcggtgcaggcgcaggaagcactgaatgcccgggttcttgacctggagcagcaggtggcccgtacagatacggagtgtaaagccggggcggcacaggccggaaaggagaaggctgacctgctgtcctccctgacggccctgaaggctgaactggcggatatgccggtggtgaccccggagactctgaaaccggaaggggtacaacagatatatgcggccggggtgatgctggggcgggatatgctgaatctccaggtggcacagcagaaactggggctgaagacagataaccggattctggtggccgggatacgggatgcgctgaaccggaaagtgctgctgaatgaacccaccctggaaaaggctctgcgtgaggctgaatcagtagctcagaaagcccgccaggcggtgatccgggagcagaagaaagccggttcactttatctggaaaaattcaggaagcataaagatgtgaaacaggcggagagtggtttctggtaccgcacagaatatgccggagacggcgggtttattcgtggtgacgacaccattgtggatgtggtggtcacagaaaaactgacagacggcacggtggtggaggatatggatgcacgggggcaggtgatttcccagccgctgggcgactatccggcactcttccggtcagcactggtgttaatgaagaatcacggcacggtggaactggtggtgccgtcagacctggcgtacggagatggcgggtatccgcccaaagttccgccgggggccacgatggtgtacaccctgcgggtggaagaggtgaaacccgcggcagaaaatccgggagctgaggacgtgagtaaaaaagaggcagagtcggccggggccgggaatggggacaggaccggcaggacggaaggagtgaagaaatga

SEQ ID NO: 391301 - DNA, 567 bp, Salmonella enterica
atgagaaaaatcatcacctgggccggtgttgcccgtcttgtcgggggcctgcctttactgttcgcgctgtcagcaggcgcggtgaatgtcacctttgacggtgagctggttgatcggccctgtcaggtggatcccggcagcctgaatcagacggtccggttcctggaacgtccggccagggacttctggtgggcaccggcgaaaagtccggctgaaaacttcagtatccggctgactgactgcgacaccacctccatctggaagacggtgaaactgaaattcagcggtgacagggaaatgaacatgacggggcagtctgattattttctgaaggtgaccggtgtgaaccagggaaaactggccgtgggtctgctggataccgacggcacctctcccctgaaactgggagaggcacataacaaaggccagggggtgcgtattgacgccagcagtctgcagctgaattttaaggcgtttgtgcaggcgacaccggatgctgttgcaaaaaaaagcgtgcagccgggcgaatacacctcggtggctaacttcgagctgttttatgaataa

SEQ ID NO: 391302 - DNA, 573 bp, Salmonella enterica
atgaaaagaatgacaacggcgctttgtcttgcggcgtttttactgagcagcgggatgaacagtgtgctgggtgcaccggatgattttttcgtggcgaacgaatcgcgtcaccagtgggtgaatgagcataacggacgaaccggggtgctcattgtcagcggagcgttgttgtcctctccctgcacgctggagaccagtgaagctgaacttcccctgccacgccggacacaggggatgcaggacggctatgagctgacactgaacctggtgggatgtggcgatggcggtatcgtcacatcagccgcttccggcgcagggcgtgacagcaccatggtggtgtacagcgccctgctgacgggcactgaaggcgggctgctgcagccggaacagcggatggtggggaccgggagagcggtgctgcatggtggtgcgaaccggttcacctggttactgagtcaggcccagcagcaggcgctggtcacggggcaggcttctgaccgggttcaggggagaccgtatatgaatccacgggacaatcatgcgttactgcgtctgcgtctggattatgaatga

SEQ ID NO: 391303 - DNA, 732 bp, Salmonella enterica
atgctgaaagtgaaaccggcgatgacaaagacgctgatggcggtagcgtgcctggctgcagtccctgctgcacaggcggccatctccctggaccggacccgtgcgatttttaatggcgcagagaagtcgatgacgctgaatattgccaatgacaacaaacaactgccctatctggcgcaggcgtggctggagaatgataagcaggaaaaaatcaccgccggtccgatagtggtgaccccgcccgtgcagcgtctggagcccggggcgaggagtatggtacgcctggccaccacgccggatatcagtaagctgcctcaggaccgggaatccctgttttatttcaatcttcgcgaaatacctccgaagagtgataaggcgaatgtactgcagatagcgctccagacaaaaatcaagctgttctaccgtccgaaagcggtggaagcgcagccgaatgcagtgtggcaggaccagctggtcctgaacaaaacggccgggggataccggattgaaaacccgacgccgtattacgtcaccgtgattggcctgggggggagtgagaaacaggcacaggaaggagagttcgacgccgtgatgctggcaccaaaatcatcgcaggatgtgaaggcgggcagttataccacgccctggctgacctatatcaacgattatggtggccgtccggcgctgcagtttacatgtgccgggagccgctgtactgcggtgaaaaagtaa

SEQ ID NO: 391304 - DNA, 2508 bp, Salmonella enterica
atgaaaaaaaatacctcgtttgcaatgaatggcatcagttacgcgattatgctttcgctcgtggggatgcccgcctgtgccgtcgactttaatactgatgttctggatgcaacagacagaaaaaatatcgatctgtcccggttttccagtgcaggttatatcatgccgggtcagtaccagatggaaattatggtcaatgaccagtcgatttctccctcggcttttcaggtggcatttctggagcccccggctgacgggaagaacgggacaaaaacgctgccccgggcctgcctgacgccggatatggtcggaaaaatggggctgacgccggcctcccgggacagagtcaccttctggcatgacggacagtgtgcggatttcagccagctggcaggcgtggagatccaccccagtccggcagaagggatgctgtatatcaatatgccgcaggcctggctggaatactccgatgcctcatggctgccgccatcgcgctgggataacggtattcccggactgctgtttgactacaacatcaacgggacggtgagcaggccacatcagggaaaacagtcccagtccgtcagctataacgggaccaccggggccaatttgggggcctggcgtctgcgtgcaaattaccaggggaacctgaatcacaccaccggtacaggacagggcacggataaccagttcacctggagtcgcttttatctctaccgggctgtcccgcgctggcaggctaacctgacggtgggtgagaactacatcaactccgatattttcagctcctggcagtataccggcatcagtctggaaagtgatgagcgcatgctgccgccaaaactgcgcggctatgctccccagatttcagggatcgcggacacgaatgcgcgtgttgtggtgtcgcagcagggccgcattctgtacgactccctggttccggcgggccccttcaccattcaggatctggacagctccgtgcggggacgtctggacgtggaagtgattgaacagaacgggaagaaaaagacatttcaggtggataccgcctctttaccgtatctgacccgcccggggcagattcggtacaagctgatatcaggacgctcccgggaatatgcccacagtacggaaggcccggtgtttaccgctggtgaggtatcctgggggatcagtaattcatggtctctctatggtggcgggattgtcgcaggggattataacgcgctggccgccggtctcgggcgcgatctgaatgacttcgggacgcttgccgcggatgtgacccagtcggtggcacgtattccgggcagggacacccggcaggggaaatcctggagtgtgaaatattcaaaacgttttgatgatgccgatgccgacattacgttcgccggataccgcttctctgagcgcaattacatgacgatgcagcagtatctggacgcccgttaccgcaatgatttcaacggacgggaaaaggaaaaatatcagattactctcaacaaaaatttcgcggactggcagacctccgtcaacctgctgtacagccatcagacctactgggaccgccggacatcagattcctacacggcgtcagtcaaccgcaactttgacgcgctggggatgaaaaatgtctccctggggctgtcggcctcccgttcaaaatatcagaaccgggataacgactcggcattcctgcgtctgtccataccatggggtacggggaccgccagctacagcggcagcatgagtggcaggcgctacaccaatacggccgggtacagcgacactctcaacggcggactggacagttacagcctgaatgcgggggtgaacagcggcgacgggaagggctcgcagagccagatgagcgcgttctataaccacaacagcccgctggcgaacctgtcagctaacttctcggcagtacagaacggttacacctccttcgggatgagtgcgtccggcggggccaccctgacagcggaaggtgccgccctgcatgccgggggggtaaacggcgggacccggttgcttgtggacaccgatggcgttggcggagtgccggtcgacggcggacgggtttacaccaaccgctggggagtgggtgtggtgactgacgtcagcagctattaccgcaacaccacctctgtggacctgaataagctgccggacaatatggaagccacgcgctcggtggtggaatccgtgctgacggaaggcgccattggttaccgcgagtttgaagtgctgaaaggcgaccgtctgtttgccgtgctgcgcctgtcagacaacagccatccgccgtttggcgccggcgtgacgaatgcgaaaggtcgtgagctggggatggtggcggacagcggactggcctggctgagcggggtgagcccgggagaaaccctgcgggtgggctgggacggtaaaacgcagtgtgtggtggatatcccgaaaaaactggatccgtcacagcagctgttgctgccctgccggaaggcacagtga

SEQ ID NO: 391305 - DNA, 537 bp, Salmonella enterica
atggcggcaccttctgccggctttccccctcccgggatgacactgcctgaatactggggagagcgtgatgtctggtgggatggacgggcatccttcaggggggtgattattgtccctgcctgtacgctggcgatggaagacacttaccaggctgttgagctgggcagtacgccggtgcgggatttacagaattcattttccggcccggaacgaatattccgtctgcgtctgcgtaactgtgaactggccggaacggggcagcatgtatataccgcaggccgtgtacgcgtcacgtttgacggggtgcagggggaaacgcctgaccggttctcactgaccgggcaggcccgcggaataaatttacagattacggacagccggggatatgcggcgcgggtcggtaaggttatgccacctcaggtattaaccgggaatgaagaaacactgaattatacccttcgcattgtccgcaacggtgagccattaaaagcgggtgattattatgcggcgttaagatttaaagtcgattacgaataa

SEQ ID NO: 391306 - DNA, 546 bp, Salmonella enterica
atgaaaatgactaaagctgtgatggctggtgcggtagcaatggccttggtttcttttggcgctaatgccgctaaatctcagggtcagggaacggttaatttcaagggttctgttattgatgcgccatgcgggattgcaccggagtctgctgaccagaccattgactttggccagatttccaaagcccatctgaataatggcggtatttccatgaagaaaaacgtcgatatcaaactggtgaactgtgactttggcacggcgacggcaactgcaccgttaaaaaacacggttaaagtgaccttcagtggtgtgaataccggcggtgacctcactggccttgggctgtcaaccactaatgctgtgattaagatgtctggccaggatggcaaactggttaaatttgacggagcgacggcaagcaattccaccaaactgcagaacggtgacaataccctgcgctatcaggcatgggtacagaaaggtggcgctgctgtgacggaaggtgagtttgccgccgtggcgaactttgccctggcctacaactga

SEQ ID NO: 391307 - DNA, 381 bp, Salmonella enterica
atgcaactgaaccggatcaaagccgtacgcggctataaagcgccacgtcgtatcgccggccgaccttcagtggtagctcctcatcgcgtacagcggcagtttactgttgtccgggacaatcagatctgggacacagacatcacttacatccgcacctggcagggttggttgtatctggcggtggttatcgatctcttcgcccgtaacgtggtcggctggtcgatgaagcccactctctcacgtgaactggcactctacacgctgatgatggccgtctggcgtcgaaaacctgacggcgaggtcatcgtacatagcgatagtaataatgccagtgtcagtttttatcatcactcagtttgctgtttaaccggattggtgtga

SEQ ID NO: 391308 - DNA, 153 bp, Salmonella enterica
atgaagaaaattgttagctttttattggtgtttattattgcattagctgttggtatggctggagatcactttgaaattaaccgttacgttaagtatgttttaatgattgctgctattgtactaactcaaaatatgataaggaggttgatgtaa

SEQ ID NO: 391309 - DNA, 282 bp, Salmonella enterica
atgtggatgaaaccggtcataccggttccaatctttttgaccgtacccaacctgtacctgaagaacatgccaactgaaccacttattttccagtcgggtacgcaaagcgcagggctggagctggttgatatttatctctggattttcaagcggtttatggaagataaggagctgaccaagcctcttgcacgtcttgtttataccaatcttaagactgccagaacagacagcgtttccctgcagtcagttggaaaacgttttgaggcatcttttgaaaattaa

SEQ ID NO: 391310 - DNA, 303 bp, Salmonella enterica
atgagtgcgcggccgttgccggaaggttgggcgatgaacgatgaataccgcgccgagttcggctgcctgttcccggtacaggtccgcttttcccctgaacacaggcagtttcagtttgttgtctgtagcccaggagaggtcaacgagtgctggcctagtcctgttggtggcatgtctggggtcatgagtaacctgagtacgccagcagtcgtacttcgatgccgacgaattcagccgggtgctgaaactgatcagcggtcggtcatcaatcaggtacgcggtgcttactggtatgtcgtgtga

SEQ ID NO: 391311 - DNA, 354 bp, Salmonella enterica
ttgctaatacagcgactgcgatgtcacaggcatgcgttgttcggtcgctgggaccgtggtcccaccagtacctcgaatgcgctgtcaggtcgctgggaccgtggtcccacctgctcctcgaatgcgctgtcaggtcgctgggaccgtggtcccaccagtaccgcggatgcgttgtccggttgctgggaccgtggtcccaccagtaccgcggatgcgctgtccggttgctgggaccgtggtcccacctgccacatgtatgagttatccgcctcgatgactatgaatgcttccctgtttgccgcaatgagtggcgataagtttgaagtccaccgtcaggaacttatgcatctgtga

SEQ ID NO: 391312 - DNA, 855 bp, Salmonella enterica
atggctcgtgggaatgcaattattttaccggtgtgtggtcaggaggttaaatttacccttgaagttatccctggtagccaagttgaagactcttcaagggtttggtctggtaacgagcgagatcaggaacttttgacagaggatgctcttgatgacctgataccttctttcctactttcaggacagcaaacaccagcttttggacgcaaggtctctggttgtattgaagttgcagatggtagccggcgtcgcaaagcagctatcctgacatcaagtgattatcgtgtgttagttggtgaccttgatgatgaacaaatggccgctttatctcgattgggtaatgactatcgccctacgagtgcttatgagcgtggtcatcgttatgctaagcgtttagagaatgaatttgcaggaaatgtatccgcactcgcagatgcagaaaatatttcacgtaagatcattactcgctgtttatacacttcgaaattgccaaaatcggtagttgccctcttctctcatccgggagaactctctgctagagctggtgaagcactttataaggcttttgtcgacaaagaggcattactggaaaagcaggctgctgagttgcatgagcaaaaaaaagttggggccatatttgaggctgaagaaatcatcacattgcttactgttgttctcaagaacacctcttcagccaaaggaactttgagctctcgtcatgaatatgcacctggagcatcagcggtttataagggaaataaagttatagttaatctcgatagaactcgtcttcctgccgattttattgaaaagatagaaaacatcttgcaggaacttcaaacgcaagcttactga

SEQ ID NO: 391313 - DNA, 303 bp, Salmonella enterica
atgaaagattccgattcaataggttggttagtggaacatgggcgtagtacagatattcgccaagcaaaagaaatcatcgattctgcgttacgagctaaactcgaaaatgaaacccaagctaaccgttgttttgaatatggtgtggcattaaaagataaaggttttggctatgttactctcgaggttccggcattgggtatcaagaagggtattcactatcaggaaggcgatgatattgatgccatagccgtagaaaccattaagcagcattttgaggatgattggctatgtgaatatgggtaa

SEQ ID NO: 391314 - DNA, 129 bp, Salmonella enterica
atgattggctatgtgaatatgggtaaggttacgtaccaccaccttcagattgggctgttaaatttcccgagtacgtggattatgcttggatatttgttactgttcttacaccagtatctccctctatag

SEQ ID NO: 391315 - DNA, 240 bp, Salmonella enterica
atgagaaccgtatctatttttaaaaacggcaacaaccgtgccatccgtctgccccgcgttttggattttgagggcgttagcgagctggagatcatacgggaaggaaacagcattatcctgcgtccggtccggccgatctgggggtcattctttgagttcgaaaaagccgatccggactttatggcggagcacgaggacgttgtcaccgacgaaggacgattttacctgtttaacttgtga

SEQ ID NO: 391316 - DNA, 243 bp, Salmonella enterica
atgattaaaacaggtttagtctggtccagcacatccagcgtcagaccaggcacccgcgcaaactctcttgtattattcgtcaccagtatcgccccgaagcgcatttcagaggaggtgacggccggtgacccctcagcactgcctgcccctgcatttcatggcaacttccggctactcacgcatgatgaacgagcagatacaggtatcaagcatataaatcttgttcacaagttaaacaggtaa

SEQ ID NO: 391317 - DNA, 531 bp, Salmonella enterica
atggacggtttaaggattgagattttttctgaggaagttgaatatgaattaagcaacttcgattgtggagaagagtatctgaatacttttctcacagaccatctgaaacgccagcacaacagtaagattttacgtggctatctgctcgtgacgagagaggataaaccgcatgttatgggatactacacgctatctggcagctgctttgagaaaacacttctgcccagcaaaacgcaacaaaagcgtgtgccctacaaaaatgtgccgagcgtgactttgggccgtctagcaattgataaaagcattcatcaccaaggatatggagaaacacttgttacccatgctatgaaagtcgtgtatcaggcctcgcaagcagtgggtatacacggaatgttcgtggaagcgctgaacgacaacgccaaaaaattctaccttcgactgggttttatacagttaaaggaagagaactgtaattcgctcttctacccgacaaaatctgttgaacaattgttcgaggtaaaagatgattaa

SEQ ID NO: 391318 - DNA, 270 bp, Salmonella enterica
atgtcagcactgaaaaagcagcgcatcgacctgagattaaatgaagacgacaaacacatgatcgaagaagctgcagcaatgactaaccagtcaatttcacagttcatggtcagtaccgcttcagaacgtgctgcagaagttattgaccagcaccgtcgcctgctcctcaatgaggagtcctggaacctggttatggaagcaatcactaatccaccagtaccgaatgaccggctgaaacaagccgctaaacgtctccgggaactggagtaa

SEQ ID NO: 391319 - DNA, 558 bp, Salmonella enterica
atgagaaaaagttcaatattcggtgtttttcattcggcttatgggaaagtgaagaatgaaaagcagtctggttttacgttgattgaatcaatggtcgtgatgattattggtgtgatggtattggccggggcggccaccgggattaataaattatttgtagcgaataacgtatcgacggaagctcaaaatatccaaactatagctgctaatatgaaaatggtggccagtgcggaaggcggttttgccgatattagtgatacggctgcagctgagaatctgaaaattttccctgctaatatgaagcaggatggtactggcaatgttaagaatgtctgggggggggctgtgaatgtgaagggggcggctgattcctatgaattggtttataacagcgttccggcagaagagtgtgtgcagattgccagtaaattacgtacagctggatggaataagcttgatgtgggcgggacggaaattaaggcaggcacacctcttagtgatattcagaaagcatgtggtgattctggaaataaagtatttacctttactggccattga

SEQ ID NO: 391320 - DNA, 795 bp, Salmonella enterica
atgctcttagctttttttattctctcaggactggttataggcagtttcagtaacgtcgttatttatcgggtgccattgatacaggaaggtactcagaatgtcacactgtcatatcctccatcacattgtcctgagtgcaaagcttctctcaggataaaggataatataccgctactaagctatgttttgaaaaaagggcattgtacatattgttacacaaagattccgattgattattttggggttgagctgctaacagttgttttttatatagctatatgtctaacatctcattctggtattatacatgctataatcgactgttcgatggtctctttcttcatcattattgctattattgatattaagcatcagaaaatttatgatgttatacttttaggtttgttcgtttgtatcttgactgaattgttactgacttctggaaaactgcttcagggcgtagtttatatggggatagtttatctctccctgcttttttttacgttgttgatgtcaatgttactgggtaaaacgtctcttggattaggtgatgtgaaatatctgtctatgattgcaatttggtctggactaccggggatactaattattttgtttacagcctgttgcttgacaattataggcgtttgtctgatgagaaattgtaagcggtggaggaacagtgttatttctgaaaaatataatggacgtattccttttggccctggcatttctacagcttgtttagtaatgttatttgtgcaaccttatattgattgctttgatttatgtgcatga

SEQ ID NO: 391321 - DNA, 1038 bp, Salmonella enterica
atgatttataaattgatcaatagtcttgtgggggattatcttaataatgataatatcctggagatttatctgaatggtgatatggggttgtgggttgatgatctacgtaatggtaggtatttagcaaaaaaaataacagattcatcgcttcttaacaacttctgggatgaattaaaaaagtattcttcaactgattcagaatttatttttgagggtgagcttcctggatataatgccagaatagaatgtttgtatcagcatcttttctgtggggtatctccgattatttttgccattcgaaaacaccctacaagaatatacacgttacaggattataaagactccggtgcctttgacattgaacgttcggttatccggtcaaaggacgatgttcttagcagtacacaatctaaagggtaccggagcccaatgaatgttatttcagaattcattagagcaagaaaaaatatccttgtcgttggtggaactggtagtggaaaaacaacactgacaaatgctattttaaatgaaatcgctgagttaacgccggatgatcgtgttatcacgattgaagatacgccggagctgcggctgaatgtcaagaataggctgtctctgaaaacatatctgtcggtggacatgcaaatattattgcgatgctgtatgcgtctacacccaacacgtattttagtgggagaagttaggggaggggaatcctattcactgctaaaagcatggaattctggacatgctggaggagtagctacgttgcatgcaaattcggcatcggaggggttagagaaattagcacattatatttttgaagatcctgtcgctatgtcatttgatcaggagactgttggctggatgatatctacttcagttgatatggtattggttattgaacgtacttctgctaataagagaagggttaaggaaatatgccaggtaaagggatatagtaacggaaaatataatcttaacgttctaatgaaacaggctcttacggggctctacgagtttaaaccacagctataa

SEQ ID NO: 391322 - DNA, 282 bp, Salmonella enterica
atggcaaaaatagttaaactctcagaatatcatcaggatggccagtgggcttcgcaaggcggtgattccttgaaaaatacggtctaccgatggtctcaacttgctgggtacaaagtggtatgggacgcgccatatgattttcctattatggctaatgttatcttgtctggctcctatgagtcagcgctgacagaattgtttaatgcctacgcggagtcggaacgaccactcaaagttgatatttttcattcacaaaagcttgttcatattgagccgtattaa

SEQ ID NO: 391323 - DNA, 1536 bp, Salmonella enterica
gtgaaatttatacagacaaataacgcggtatcactggtattatttctttcaatattgtccatgttaagcgggtgcagtgcattaaatactatgaagcgaactgatgcacagattacaggtgatagcgacattttaatgaaatcggtcaatgaccttcgtggtacccagaaacgggcatcacaggatattgttcagattcataaggacggtttttgggtcagtaaaaaagaagtaccactgaaagaggagatcagtcaactatcctgcaatctgaccgtgaatgaatccgccattatatcgcttgatgaattaagccagaaaataacatccgtgtgtggtgttaatatttctattgataacaccccgatagatgatggtgaaaatacaatactcccaatggtcagggtcaactggaccggaccgctcactgggttgcttaataatataagtaaccaatccaagtttagctggcgtgtggaggacggcagcgttattttatcccgctatgatacaagaaactttcaggtattcgctctgccaagtgctgatgatataaatttgggactatccacaactgaggctggttcatccggttcatcctcatctggttctgagtctggtaaagataacactgtgaaggtggaaagcaagctaagatcagacgtgttgaatgatattgaaaacacaattaaagcgatgctctccccaaaaggaaaaattagtctatcgctatccaccgccagtattaatgtgactgataacgctttagtactccagcgtgtacagcgttacatggatgagcagaacaagcttttgacaacgcaggttcttttaaatgtaaaagtatttaacattgactttaatcgtacagatcagtatggcattgactggaatgttctgtataaaaaggctggcaccaagatttcttggtcgaattctccgggactaagcggcttagggaatggaaatattggcttagtgaaaggcggactggatgcttccacctttatccatgccctgtcctcacagggaaaaatttccattttgacccagccttctattactaccctgaacctgcagacggcacctatggaggttatccatgaacagaattatgtatcatccatttctagctcattagtgcaaggggtaggagcccagaccacattgaatccatccactgtgacaacaggttttaccatggggttactaccgtatgttatgaacaataatcagttacttttgcagtattccatcaaattgagtgatcttgaaagtctcactcgttttactgctggtgagggaccgaatgcagccacagtacagttgcctgaagtcaaccgtcgggcttttaatcagaaagtgaaaatcaactctggtgagacactcatcctttccggctttgaacaggaacatttgagttctaatcttaaggggatcggaacaccagaaaacccggcgttgggtggagaaaggaatgccggaaataaacgctcagtgttagtaattatgattacaccagtggtactttcatga

SEQ ID NO: 391324 - DNA, 852 bp, Salmonella enterica
  misc_feature (826)..(835): n is a, c, g, or t
atgatacaagaaacagttaagagttttagtatttccgggaaacacttcatctcaggactggtgtgggaatctcctattgacaggttgttgcttagtggaaagaaaaaagctctgcgtcaagaatatcagtatatctgtcagtacagactggggaaaaataatcttcagattgggctagtaccgaaagaggactctcaggcttgtgatatcgggtacttttcttttgcggcaacgatggccagctatattagcaagccacactggataggtgttttccaggtttcattgacgctgtatgcacttgtcgcggtacgcaacggttttattatggctggacaagatattgtcggtgaagcagaacagatcagtaaagttttcaaggaactcatcgataccatggtggaaatgggggactcttttgagcatgtttttgcgccagaagaatgggacgttccagacagtgagaatatcaatgttagaaggcttttgacggataagaaaaaccgtaacagtttagtaatgttgagagccatttccggtaaccatctttctcaaaagaatattcgaaactgtattctggctggtgttagttgtgccattcttgcaaccggttatattggatatcgctactatcagtatcagcatgaaaaaatgaaaaaagaaattattatgaggaccaaaattattccacctcctcatgaatgggagtatatgccactgtttagtgtacaactcgaacattggcaaaaaatgattgagcaattgccattggttttcgatgggtgggaactgactcgcatacatgtcactaacggagaaataactnnnnnnnnnntccgccgattcgtttag

SEQ ID NO: 391325 - DNA, 351 bp, Salmonella enterica; identical to SEQ ID NO: 377611

SEQ ID NO: 391326 - DNA, 318 bp, Salmonella enterica; identical to SEQ ID NO: 377612

SEQ ID NO: 391327 - DNA, 231 bp, Salmonella enterica
atgagtgacttaattcttgcatcatctgatgcatctgtaaagcggtgccgtcatacgcgtatcaggcgtaccgatattcccgcaaaggccattgacccgacactgcgggcattcgggcggcatatcgcccggagccacaaaaaacgccggggcgtccatatcccggccatgaaaaatgatgcattaggtcaggtactccgcgcactggagctgaaacgcgcttttaattaa

SEQ ID NO: 391328 - DNA, 234 bp, Salmonella enterica
atgagcaataacttaccgtcgttgcgtcagtacgaagtgatttttatgggcagtaacgcgcagggcaaaatcccgatgttcacggtcgttgaggcggtgacggggaagggggcaataagagcctttgtggagcgctttaaaccggtaaagggctggtttctcggcaacccggaagatatcactgaccggatccggaagaaatctgacgacgccggcagtcattcacagaaatga

SEQ ID NO: 391329 - DNA, 774 bp, Salmonella enterica
atgagaaataacacgctcagtacgctgatagtgcgccacggagataatctgttacgccggtccggctggcccgaaaccgtcggcgtgacgcaggtggcccccggtgtggtgcccggctggctggccgtctgcggtgtgctcagtgctgctgaaatcctggctctgacgacgcatctttgtcagtcccttaattatggacgggcgcaactgcttacggccagtgcgcagcggctggcggggacgccagtccggttacatctgtacccggtacaggcatacccgcacccggaacggctggctgactgtcaggtcatccggctaccttatgctcaggagtggctgactatggacgaatacgccgacctgctggcgttcctgaaagaatccgttgaccgggtatgcgaaatcgtccgccaggatgcgcggagtattgcggcggcgctgtcgccgtccggcgagccccgcctgatggaaaagaaaatagggaactggcggctggtagctgacgaatatgaccatgataactggcttgacgaagacgacgaggacgaactggataaggtgctggatgccattatggtccgtaacgcccgtttctgcccggtgctgctgacgctggttaatgagccggaggaagaaatcgaagccgccggcgtgataaccgactgtttgcgcttcccgggggaaccggtccgccgctggtttgaccgccgcgtgctccgggatgtggtgaacgaggcccggagtctcagccaggctgcatccgttaaataa

SEQ ID NO: 391330 - DNA, 306 bp, Salmonella enterica
atgagcttaaagctcgccggaggaataaggcgcgagtcagcgtattacataggggcccgcagcactggctgcaacaaggccggatatagatctgcaacctaccgtcaatgtcaaaactacgaaagccttgcaaacgggatgcgttcatatagccgcgtaatgaactattccggacacgaaaaactccgcgcagaagtggcggcgctgaccgaacgcctgacccgtcagacactttttcgcaccagtgccctgtttatggcggcgtacaacgaaattcctgagctggatgtctgttttaaggactga

SEQ ID NO: 391331 - DNA, 702 bp, Salmonella enterica
atgtcccgtttaatcctggggaattgcgtcgatattatggccagctttccggaccgcgccgtcgatttcattttgacggacccgccctaccttgtcggattccgtgaccgttccggccgcagtattgccggtgacagaaccgacgagtggctgcaacccgcctgtaaccagatgtaccgcgtactcaaaaaagatgcgctgcttatcagtttctacggctggaaccgcgttgaccgtttcatgggggcctggaaaaaagccgggttcagcgtcgtcggacacctggtcttcacaaaaacctactcgtccaaatccgcgtatgtcggttatcgccatgaatgcgcctatatcctggcgaagggccgtccggccctgccgcagaacccgctgccggacgtcctcggctggaagtattccggcaaccgccaccacccgaccgaaaagcccgttaccagcctgcaaccactggttgaaagcttcacacatcccggcgcgattgtgctggaccccttctgtggctccgcctccacctgcgttgccgcgttacaggcggggcgcagatatatcggtatcgaactgatggagcagtaccacagggcagggcagcaacgactggccgccgttcagcgtgccatgcagcgcccggccgccaacgacgtcttttatccggaggaatgtaatgaacgcatcccaactatttga

SEQ ID NO: 391332 - DNA, 921 bp, Salmonella enterica
atgccaaactggtgcgcgaacaggctttttttcagggctgaacccggcaacatcactgacatccgccgtctgctcaggggcagtttgtcacctttttatcagcaggcgattcatctctttgtggccggatgtgccgggctgctgcagccggtggacgattttcactatgcgtcgtatccggcgctgacacaggcagggcgggggattgtctcaccggagaatctcgcttttacacgctggctggggatgttgcagagcggcgttgaactggatgagaaaaattgccggacactgcatgaaatctggttgcagagcggtatcggggaacgccggtgggagagtttatccggtgatgttcaggctgccatcggtcttctttatgaccgtaaacattttgactggaatggcctgtggcataagacaggcactcctgcgtggtggaaccagctgtgcgacaacccggagcctgttacgggaaattcactggatatgcggctgcttctgcctgcgcggcttgatacggaaatcaacggtttcaacggcggtctgctggagaacattccttcatcatactactggtatctggaacgttacggaacgaaatggccgcaggggtatgacctgaatatttcagcctgcggggctgatttcattcaggctgattttgacaccccgtggagtcctcccggtgtggcggtgatggaggaactgagccgtcgctgtgacggcgttctggaacactggtatgcggagcagggttgtaattactgcggctatgcccggtacgtcagcggcgaaacagacgtgtacatcactgatgagctggaatggggcgacacagacccggacgatgaggacagtttcccggatgtgaccggccctgactggattatcaacaacgtggcccactttggcggctga

SEQ ID NO: 391333 - DNA, 249 bp, Salmonella enterica
atgctcagaattgaaattctctttgaccgggagacagccaaaaatatgaaagccggtaccctgcaggcactgcgtggtgaaattgagcatcgcctgtcctcaactcatcccgaaatctggctccgcatcgaaaagagatcacagtcgtcactgacggtatcaggaacacggaatgaccgcgaaaaagagagagtgctggaaacactggaatccatctggcaggacgacaactggttgccgacagcatga

SEQ ID NO: 391334 - DNA, 327 bp, Salmonella enterica
atgagcaaacaaaattttgtcgaacaagcagaaaaacttaaatgtttagtgggatcagctcgactgcaaacttcatctccggcgcttgcttctgcgggggaggtaaaagagcctgatgattatgtgacgtcagacgttcaacatgcggtgaatgtccgagctgaaccgcctaagactaaggctaagaaccttaaggctatacccctgtcgtactttgaggctcatgctgaactaaaattatcaagcaagacctccctggatttcagttcgtatatcattgaggctataagggaaaagctggagcgtgatggcgctattggacagtaa

SEQ ID NO: 391335 - DNA, 642 bp, Salmonella enterica
atgcctataatcgcaaatacccaccctaaaggtggggtcggtaagaccactacatctgttaacctgattggtgaaatggagcccgatgctgttgatcttgatactcatacggggctttctatcattcttgggttgcgcccagatggtaaacagatttccgttaaggtgcccaatacagttgatgagcttattgaaataatgactccatataagaatagtaaaaagtctctgctcatagattgtggtgggtttgactccgacctaactcgtacggctgttgcatttgccgactgtgtaattgttccatcaaaagactctcttaccgaacgaattggtctaatgcacttcgatggagttcttgaggagattagtaatattatggggacagatataatagcccatctctatctgtgtaaggtaaatccaaacaagaaaaactttccaaagctggaagcgattctgccttccttcaaacatctaaaattgatgagtagtcgaatttctgctcgtgctgagtttgaggaagtcatcgaaagtggaatgggtgttactgaaactttgcatggtcgttccactgcaggtggtaaagaaattatcgccttggtcaaagaaatccagcaacttataaatcaaaaaaactaa

SEQ ID NO: 391336 - DNA, 327 bp, Salmonella enterica
atgagaattgcagagtctgtgttactcggaaccctccgacggggcggctgcgtccgcaccttctggcgccgttccgcccgccttgccggcacccccgccccggagctccccgacgggatcgtcctcgaaaccccgggggaatactgtgacaccccgcttagccatgtggattttgctgtggtgcggaaatggctggtccgcggggagtgctggtcgcagatagccggcatgacggagttcggcggctctgtgtggcatctgagccgggaatatcaggttaccgctgatcgacctgttcagggtgatggagaccgttatgaaccgtga

SEQ ID NO: 391337 - DNA, 1680 bp, Salmonella enterica
atggcgtcggaaacatcgcaaattattgagcggggagtggccactcttcccgatgaaacatgggaacaagcccgtcgaagaacggaggttatcagcccactggctgcgcttgacgtcgttggacacagagccgccgacgcggcagctcttgctctgggcctttcccggcgacaggtatatgtcctgatccggcgtgcgcgggagggggctggtttcgtgactgacctggctcctgtgcgttccggaggcggcagaggtaagggacgattgtcggagcctgtcgaacgcatcattcgcgaactgctgcaaaagcgattcctgaccagacagaagcgcagtctggcggcattccaccgcgaggtcgtgcacgcatgcaaagtacaaaggttgcctgtaccggcacgtaacaccattgccctccgaatcgcccgtcttgatccggagaaaaccattcgtagtcgggaaggtatggacggcgctcgtgagctgcagggcgtgggtggcgtacctcccacgataacagcccccctggagcaggtacagatcgaccacacggtcgttgacctgattgttgtggatgagcgggaccgccagccgatcgggcgtccgtacctgaccatcgctatagacgtattcacgcgctgcgtatccggtatggtggtcacactggaagccccgtccgccgtttcagttggtctgtgtcttacgcatgtagtttgcgacaagcgcccctggctggaaagactgggggtggagatggactggccggtgagtggtaaacccaggttgctttatctggataacgcgaccgagttcaaaagcgaggctttgcgccggggctgtgaacagcatgggatccgactggattatcgcccgcccggacagccacactacgggggtattgttgaacggatcatcggtacggcgatgcagatgatccacgatgacctgccgggaacgaccttttctaatcctggtcagcgtggggactacaattccgaaaaaatggccgccctgacgttgcgcgaactggagcgatggctcactctcgcagtcggcacttaccacaattctgtgcacaatggtctgcttcagcctccaggagcccgatgggctgaagttgtcgcccacgatggtgctccggcagtcgttaccagcgctacagcctttctcgtcgattttcttcccatcgtgcgacgtacacttacccgtaccggctttgttatcgatcatattcactactattccgatgcgctcaaaccatggattgcacaccggaaacatttgtcggcgttcctgatacgtcgtgaccctcgtgacatcagtcgtatctgggttctggagccggagggactgcactatctggaaatcacctacagaaccctgtcgcacccggccgtcactctctgtgagcaacgacaggcgctggcgaaactacgtcaacagggacgtcagcaggtggacgaagcggcgctgttccacatgattatgcagatgcgtgagatagtgaccactgcacaaaaggcgacacgtaaagcgagacgtgacgctgatcgtcgccagcacctcagggaatcagcgccaccggataagttgcttccgcccgtaacggacagtactgatccaagggtggaaggtatctcccctgtaaaaccgtttgaccagattgaggagtggtag

SEQ ID NO: 391338 - DNA, 909 bp, Salmonella enterica
gtggacgaatattccatcactgacctgtcccacctgctgccggtggcacaaaagctggccagacttccggcagacgagcgcatacagcgcatccgggccgaccgctggattggttatccgcgagcggtcgacgcgttgaaccgactggaaaccttgtatgcgtggcctggcaaacagcgcatgcccaacctgttactggtcggaccgaccaacaacggcaagtcgatgatcattgagaaattcaggcgtactcatccagccagttctgatgctgatcaggagtatattcccgtactggttgtacagatgccatcagagccgtcggtgctccgtttctatgttgcactgcttgccgcaatgggagcacctttacgcccgcgcccacgactgccagaaatagagcaacaggcgctgacattgctgcgtaagataggagtgcgagttctggtgattgatgaactgcacaatattctggctggtaacagtgtgaaccggcgggagtttctcaatctgttgcgttttctcggcaacgaacttcgcataccactggttggcgtcggtacgcgtgatgcctatctggccatccgttcagacgaccagttggaaaacaggttcgagcctgtggtactgccgttatgggaggccaccgaagattgttgttcgttgctggccagctttgctgcttcgctcccgttgcggcggttatcgccgattgccacacaggatatggcccgttacctgctggctcgcagtgagggtactataggcgaacttgcacacttgctgatggcggcggctgttgtcgccgtggagagcggtgaggaagcgatcaatcaacgtacgctcagcatggcggactacacaggtcccggcgagcggcggaggcaatttgagcgcgaactgatatga

SEQ ID NO: 391339 - DNA, 1212 bp, Salmonella enterica
atgaagccggcctcacgctggccgttacatccggcaccggtagaaggagaggctttgtcctcatggcttcatcgcatcgctggttgttatcgcatggaggtccgtgatctactggagcatgaccttggacacgaccaggcggtcgatctggatgaggctccaccgctgtcgttattaagagctatctcgcaacgtagtggcattgggatggatcgactccgcagtatgagttttgctggctgggtaccgtggcttctggatggtcttgacccctgtctccctgatgctctggcaacctatacattccagttctcaatattattaccgaagcaccaccacaggatgataaccatcacaaactggagagcctggcaacccagcctgccgatttatcgggcgtgtccgctctgcctgaaagacccggccagacaaattacgctacttgtctggaaggtgccgttgatgctgagttgcccactacatggttgctggctggaatcttataaagttaaacaaggacgattttgtggctgggagaacgcagatataactccacgcaaggcaagtgaaccgatagcggcaatggatcgtcgaacctggcaggcactgactacgggttatgtcgaattacccagacgacgtgttcatgctggtatctggtttcggttgctgcgcaggcttcttgatgagttgaatacaccacttgcgcagtgtgggtctggctcatggagtattcgctatgtctgggaacgttgcggctatccatttcgggcgggacaggggctgtggcgtccgtatgaaatattgtccccgactgtacaactgcaaatgctggaagctgcagcgaacgctataaaattgctcgagtcaaacgtggtgcgttcacaaggggagcaggctgcgctgtttatgccggaaccgcaaaccggcttcacaaccggctttacggcggtccagaaaaaggtcgaacctgtcgactactggaaagaggctattgaggcaatcaatgaagcggttgttgatgcccgtcacaaccctgaaacagcccgttcactattcgctctggcttcctatgggcagcgagatccggaatctctggcgcgtgtacgagctatgtttgctgaaaatggcattcccccggaatttttgtcacattacgttcctgatggaccctttacgtgcattagattgaatgacggattaagtgactaa

SEQ ID NO: 391340 - DNA, 615 bp, Salmonella enterica
atgttaattggttatatgcgcgtttcaaaaattgatggttcgcagacgacggatctccagcgtgatggattgcttgctgccggtgtcagtccggagcatctttatgaagaccatgcttccggcaaaactgaagaccgccccggcctgatgaactgtctgaaagcattacgggaaggtgacatgctggtcgtctggaaactggaccgcctgggacgtgatttacatcacctgatcaacacggtacacgacctgacggggcgaggagtcggactcaaggttctgacgggtcatggggctgccattgataccactactgctgcaggcaaactggtttttggtatttttgcggcactggcagagtttgagcgggagttgatatcggaacgaacccgggcaggactggcttcagcaagagcgaggggaagaaaaggcggcaggcctttcaagatgacgatggccaaactacgcctggcgatggcggcaatgggaaaaccagagacccgggttggtgatttatgcaaagagctgggcatcacgcggcagacgttataccgacatatttcgccaacaggagaactgcgacctgacggaaagaaattgctcaatcagccctga

SEQ ID NO: 391341 - DNA, 861 bp, Salmonella enterica
atgagtgatgatgacctgaacgcccgtcgcgcagcggcgctggccggggataaatgtttcagtcagggccggctgcgggatgaattccggatgaaaccggctcccggggcggagccggtccggtggtataaaaatggatacgggagtacatacggcgtttaccggatagcggactgcgtcccgttgcgggagaaaactccccggacagaaaaacagcggcaggccggcgcacgtctgggcctgcaggccaggatgaagagtgaacgcggcaaagctgcccggctggcacacacctggttaagtcaggaccccgtcttcctcgataccgaaacgaccgggcttgatgccggcgctcaggcgctggaaatcggcctggtgaatgcccgtggagacctgatatacgaaacccgcctgaaaccgacggtcagtatcgatccggcagccgctgccgtacacggtatcagtgaagctatgctggctgacgctccggcctggcccgatattgcgcagcagctgcagcaccatatcgaccagcgtccgctggttattttcaacgctgattttgatatgcggattctgaagcagacggcagaagcgcataacgacccggtcagctggctggacaccctgacggtgtactgcgccatgcgtctcgctgcggggtattacggccccaccaaccgttacggcacaatatcactggccagtgcagcgagtcaggctggcctgaactggtgcggacgggcgcattctgcggttgcagacgctgttatgacggcgggagtggtccgggatattgccgaatactggcgtgtactccagtgtgaaatgaatgatgacgcagggagtgagtcagcatga

SEQ ID NO: 391342 - DNA, 261 bp, Salmonella enterica
gtgaaaactgagtacaacggggcggtgagtgagctgaaagcgcagtatattcagacggaggacagcctgctgaagcggattgacaccgccgaaaattcggcctgggaggcgcgaacctcggaagcatcactgcagggcgaaatccgggcgctgaaagagcagaaccgggaactgacggcattgttgtacggaaacgtttccggtatgcccggtaacgctgacattccggaagctgatgaaaaggaagaacggcatgagtga

SEQ ID NO: 391343 - DNA, 657 bp, Salmonella enterica
gtgctactgatcggttatgcccgggtgtccaaatcagatggaatacagaccatcacgccacagcgggatgcattactttccgccggcattgatcctgagcggatatatgaagatatcgcctctggccggaatgatgcccgtccgggactaaaagcctgcctcaaggcacttcagcctggtaatacactggttctctggaaacttgatcggctggggcgcgatctgcgccaccttgttaatactgtcgaggagctacgggtgcgggggatccatctgaaggtactggcgggagctggtgctgaaattgacacgacaacagccaatggtcgcctcgcttttggtattttcgccgcattcgctgaatttgaacgtgaactgattgctgaacgtacccaggctggcttagcagcagcacgggctcgcggacgactgggtggacgtccgcgcaagatggatcgggcaacactgacgatggccatggcggctatggcggatcacaaagccgttgcggcagatgtggcaaggcgactgggtatgaccaccaccacgctttatacctatgtcaacggggatggctctctcaaagctccggggcaggctttgcttaatggtgtgacgaacaacgcatcccggctcactgagggtaaaggtgtataa

SEQ ID NO: 391344 - DNA, 1170 bp, Salmonella enterica
atgagtctctccgacctgaaagagctggaaacgccgccatggctcgactctgaccgacagggttctcctcagttgatgttattcagcgtggtggatgaccgttcgggtgtctgctatcaggaatatcgctgtgtttacggggaagatgtggagacggcccttcgctttttgttcaatgccatgagtgccaaaccggagcaggaactttcttttcaggggatacctgaggccattcagctcgataatggccccgtgggtaaatcagccgtattccgacgggttatggattcactgggggtggaggtactcctgcatatgccccggggatctgacggccgtcggacgacagcccgcagtaaaggtaaggtggagcggccttttcgcacaataaaagaagcgcacgaaacactgtatcatttccacaagcctgaaacggaagcggaagccaatcgctggctggctaactatattgctaaatataatgaccgggaacatcgtcaggagtcccacagtcgttttgaagactggttgtcccggttaccgactacaggtgtacgctcgatgtgcgcctgggatcgtttttgctcatttgcgcgtgagcccgaacgtcgtaccgtggggattgactgccggctgaccgtggcgggtgtggcgtatgagcttgaccctgaactggccggtgaaacggtgaccgtctggtgggggttgtttgaccagtacctgtttgctgaactggatgaccggcagtttggcccctttcagcccgtggggggtccgataccgctccaccggtaccgaaagcatcgtaaaagccgtcgggaatgccgggccgatcaggtcacccttctggccggcaaactgaatatcccgcgtgccgccgtcagtggtgaacaggatcttgtcatcgtggagcccgggaataccgatgttccgcaaacattaactgtgcagccattcaccgggccagatcccttcttcgggcaggtttttcctgacaaactggccgcccgccaggccattgccgacgagttacgcttacccctggccaagctcagaccagaggatttgtcgttcattggacagttgctggatgaaacattatccagaacggtgatccttgccgccattcatgagcgtttccctgccggacgaaaaggaggatataactga

SEQ ID NO: 391345 - DNA, 609 bp, Salmonella enterica
atgcttactgaagtcatgcactactacggactgcgctgcgagccggttgatatggggttcttcgaaacggaacaccatgaactgctcctccgggatctccgggcggctatccagaatggcaggctgatagcgcttactgccgttatcgggtcaggaaaaacgctcttaatgcgtcgtcttcgggaatcgctggaaaaagaagggaaggttatagttgcccgctccctcagtctggataagacaaaaatcaccgcatcattactggatgcggctctgttttacgatctctcgacagagaaaaccatcaaaatccccggagatgcagaaaagcgggcccgtgaactgcaggctttattccgtaaggctaaaaaaccggtggcgttgttcattgatgatgctcatgacctgcatccgaaaacgctgacgtcactcaagcgtctgtttgaactggcgacggacggtaaaggcaaaatatcggttgtgcttattggtcaccccaaactgaaaaatgatttacgacgccccagcatggaagaagtgggggaccggaccacggtgtttgaattcgggggcttcgggatcgtcagcgggattatatcgactgggtga

SEQ ID NO: 391346 - DNA, 363 bp, Salmonella enterica
atgcaggggatcctccctgaaggggcaaaagttggtgatgtcatcaccgatgacgccattaccctgctggctgccaggctgaaaacgccccttcagatagggcgtcacctggtgcgtgcttttgaggccggatttgaaatgggcgtcaggccggttgatgccacgacggtggaaacgattatgtcccggcggattgacgatcttgagcctcaactgacccgccatggttatgatgtccgcgcactttgtgcacagtttgatgcccgtcctccggaaatcaggcaactgatgcggggaacgctgaactcccagcgcactaacgagctggtcgaagaaatgcgcgctgccggactgccattataa

SEQ ID NO: 391347 - DNA, 4047 bp, Salmonella enterica
atgaccactcacagtgacaacatgacctctcaggcgtttatggtggaagctgttgcagggtttcctcattaccaggccgccatcctttgccagtttgctctgctgggggcgttatcaaaaaccgccctgctggataatttacacgtcctgaatatcagtcccgtcagccaccggcgtataaacggtgccgacatcaccggggcgctggaatttttgctggcgcagggctggttgcagaaagcggacacccgctggaagctggctcccggtcatgaaaacgccgttttcctctggttgctgacgcagccggatgcccgtcgtgcggtactggagagcacggggccgtttcatctgcgcggagcattacgaccggaccggtcgcggctgtggatggctgtccttgcgggagataccaccgccctgcctcagttgctggcggagtggatggccggctatgattatgtctttgccgaccatccggccgtcagcctgttcgcggatgatgccggtcgtcgcgtcttttccctgctggacggagaggtgcgaaccctgctgctggcgaccgcgctgagcgatgccagcaaccggctcagcgagtgtacggatatctggcactttgcccgcgctaatgtcaacgcacaggcttctgttccggatgtactactcggtccgctggccctgcaggcactgtggcgtgatgagcgggaactgctggataagctggcgcgaaatggcctgccgttgcccgttgccggctggattgccctgtgccatggtgaccgggagggggcgatggaggtgtatcgtcagttggccagccagtatcgcaaagtcacccgcaaacgccggctgtatctgccgccgttaacctccatcatggcggccctgacgctgatgacccgcgatgagccgtcacatatgaccacattgcgggaagtcacacgtcatgccgtcgatgagggatttggcaccgggtgggcgctgttgcaggagctgctccgggagcagagtggtaccctgtcattatccccgccgcagatgagcggcagaccgctgaacgggatggccggcgtgctgcaggcgctggtgctgttctggcggggggatatccctgaccccgataaattccggaaacgtctggagacctttgcccgtcaactggaaacccgggggtacaggttaccggcgtatgacattcgcacgctccttcacctgcagttcagtgaacctgcccctgaaccgcccgcgggccggcttcccctgagcagtctctggcggcgcaaggcggcctgggaatatgcgctggatgcgctgggtcagttgacgccgaagagcagcaacagcgattcccgactggtctggttgctgacgctggagtcctggaggactgaaattgtgccgctggaacaaaagcgcagtaaacagggctggacgaaggggcgtcctgttgcgctgaagcgtctgcacgaatccgcagaggtcctgccctggctgctcgcgcaggaccgccagattgcccgtcatatccattacacatcggggtattcgtactatgagcatggccggtatgaacttgatgccgcgtcagcgcttcccctgctggccggacatccggctgtatactggcacgatgcaccggatatccgcgtggatattgaagctggtcaggttaccctggtactcaccgaagacggcagccagctgttactgacgctgtctcctgccatcagcgacacgcagcatctggttacccggaaagagacaccaacccgactggtggtctacccggtcagcgatgaacaccgccggatagccgccattgtgggccaggggctgcacattcctctgagcgcacgggacagagtgctgcagtccgtatcggccatcgcgccactgctgccggtccgggctgacctgcctgagctgatggcccacatcccacacgtgccggcggatgataaggtttatgctcatctgctgccgctcggagaggggctgcgcctgcagcttctggtccgccccctgcctgacggtgcctggtttacccccggccggggaggtgacattatcaatggtgaacaggacggtcagtcggtgcaggcccggcgcgatctgccacacgaacgacaacgactgcagcaggtgcttagcgactgcccgctgttggcggataccggacagaacggcaccgaatggcagtttactgacccacaggacgcgctggaagcgctgacgcaactgcgcagtgtggataaccaattgctcgaatgcgtgtggccggaaggtgaacgactgcgcctcggcggacgtcgcgacatgcaggctctgaagcttaacgtccaccgccagggcgaatggtttgccctgaacggtactctgagtctggatgatggtcgggtgctggagctacgccagttgctgacgctcctgcaggaaagccggggccggttcatccggctgggcgatgaggactggatggcgctggacaatcagttgcgccagcgcctgcagcagattgcgctgctgagcggtgacggggaacatatcaacctgaatgcgctgaccctgccgtttctgaaacaactcgccggagaggctggagagttcgatggcgacgctgactggcagcgccagctgagcggacttaaggcccgggaaacataccgaccggtagtaccttccacgctgaaagcggaattgcgtgactaccaggaggacggattctgctggctttcccgcctggcacagtggggcgtgggggcctgtctggccgatgatatggggctggggaaaaccctgcaggcgctggccctgctgctcgaacgggcccccggaggaccacaactggtggtggccccgacctctgtcacccataactggctgagtgaaagtgaacggtttgcccccacgctccggttgcgggattaccggtgccatcgtgatctgtcggaaactggcccttttgaggtggtggtggtcagctatggcctgctgctgcaggatacgaaggcctttggcggacagcggtggcacagcgtggtgctggacgaggcccagtccatcaaaaatgcgcagacgcagcgtgccaggtcagtgacggcgctgaaggcggatttccggctggcgctgagcggtacaccggttgaaaatcacctgagtgagttgtggagtctgttccgttttctcaatccgggactgctggggagcctgaaatcctttaaccggcgatttgtcgtcccggcagaacaaggggatcggctggcggccgggacgctgaaacaactgataaaaccttttgtgctgcgcagaaccaaagcgcaggtgcttgatgaactccctcctcgtacggatgtgttgtatcagatacccatgagtgaagaagaagtgtactggtatgaggcgctacggcggcaggcagttgaacgactggaaaagggcgaagacatcagcccgttgcaggtgctgacggagatcacccgtttgcgccgcttctgctgcaatccgtccctggtgctggacagtgctgcgccggaaagcagcaagctggcggccagtctggacatcatcaatgaactccgggggaaccaccacaaggcgctggtgttcagccagtttgtcgaccacctgacgttactgcggtctgctctggacggttcgggtatcgcgtaccagtatctggacggcaccacgcccccctctgaacgtaaaaaacgcgtggaggcctttcaggccggcgagggagacctgtttctgataagtctgaaagcgggcgggacggggcttaacctgacggcggcggattatgtgatacatctcgatccgtggtggaatccgtccgtggaggatcaggccagtgaccgtgcccaccgaatgggtcaggaaagaccggtcacggtttaccgcctggtgatggaaggtaccattgaggagcagatggtctcgctgcacagcagaaaacggcagatggcagaagatttactggaaggcagtgatacagtgggaaaacttgatactgaggagctgttgtcagtgctgcgaggccagtag

SEQ ID NO: 391348 - DNA, 186 bp, Salmonella enterica
atgccgaactggtgcgccaacaggctttttttcagggctgaacccggcaacatcactgacattcgccacctgctcaggggcagtttgtcacctttttatcagcaggcggttcaggaggggattcatctctttgtggccggatgtgccgggctgctgcaatcggtggacgattttcactatgtgtag

SEQ ID NO: 391349 - DNA, 249 bp, Salmonella enterica
atgctcagaattgaaattctcttcgaccgggaaacaaccaaaaacatgaaggccggtaccctgcaggcactgcgtggcgaaattgagcgtcgcctgtcctccactcatcccgaaatctggctccgcatcgaaaagagctcacagtcgtcactgacggtatcaggaacacggaacgaccgggaaaaagagagcgtgctggaaacactggaatccatctggcaggacgacaactggttgccgacagcatga

SEQ ID NO: 391350 - DNA, 357 bp, Salmonella enterica
gtgcagcaagaaaataacagtgaggggcagtttacagtcgtagtcgcgccagtggcgctgcagtgtctggaaaatattgaatcgtacaaaagtgggactataggcgcgcagctggctgccagttttgttgataatctactgacagagtctgttgcgaacattactcaggagcctgatcggtatcgcttcaacgcataccttttagatcgtggtttgatgttgcgtgaaaggcttgatgtggatggtgaatatcgcgtgctttacgattttgacggtactactattgaaatattgctttttgtcagtatgaagcaagattttgggaagttgctttaccgttataacatactgaaatga

SEQ ID NO: 391351 - DNA, 270 bp, Salmonella enterica
atgacgcagaccatgtcgcaaaaactagccagagacagtcttgggaatactcaaacttttgaagggggtatatacgtaacaaaaaacggtgttgcagaacttttcattcagactgccgcagaacgtcaggcggagatgagggaaattgagcaggaaagaaatataaacgccctttttaagctggcaatgatggctaagaatgaaattgcagatggtaaaggtatgactcctgaagaggtactggggaggttacgtgcagcaagaaaataa

SEQ ID NO: 391352 - DNA, 360 bp, Salmonella enterica
atgtatcagtggggatggcgtattcagtacagaaaacgcctgcgtctaaccgagacccgtgagcaggcgaaggagaacgggtctacatcggaagcgggtattatacttatttgtatgacaaataaaataaacaattactatcccgtgatccaatgtttaatcaatgggttaaacccacaagatcgcgctgtccgaccgggcgggagtgcctactcttacgatgaacgtggcgtggtggcggaaaatagcgcgacggcgccatgttgctccaatgtcaccttagcgaaatgttcgaccaacacgctgcgtaacgtatcggctgagtcattggtattactgaatattcctttcttgttataa

SEQ ID NO: 391353 - DNA, 168 bp, Salmonella enterica
atgccggggacggggaaagatgtgttgaacgccgggacctgcatcatgtataaacaggggccctcccgcagacagaatgttcactttgtgcaaatgtgggctgaatgtcgtccggagactgtggggcagacatgcctgaaatgtcactctgtgactcccgttaattag

SEQ ID NO: 391354 - DNA, 483 bp, Salmonella enterica
atgaacatctactcacctgaacgtaaggctgcggtgatcgccagaatgttgccaccgcataatctgtcaattaaccagctctcccgggaggaaggtattccttccaacacgctttatggatggcgctctcaggcagggatttcaggccggagcgctgaaactggcaacagcgccccgatggcgtggtcgcaggaagcccgctttgctgttctcgttgaaacggcgactctttctgctcatgctgtagctgaatactgtcgccgtaaaggcctctaccctgagcaaattcagcaatggaaggaccagtttatgaaacctgacctgcgggaagaaaaagccatcatcaggaaacagaaaaaagagattcaacagcttaaccgggaattagcccgtaaagacaaggcactggctgaagccgctgcgttactgatactggaaaaaaagctgaaggcgttgttcgacgaggaaagcgggggcgaatga

SEQ ID NO: 391355 - DNA, 501 bp, Salmonella enterica
atgacgcgcacaaccggcaggttacagttgatgaacatggtacaggaggctgtcaaatccggtgcccggttaagtgaagcctgtcgttgtgtcgggctgagcgagaggacgctgcagcgctggaacctgtcagaagatgatcgccgggcgacaacgccacgcccggtaccggcaaacaaactgagcgaggaggaagaacgccagatactggctgtctgccatgaaccccgcttcgccagtctgcctccggcgcagatagtgccacaactggcagatgagaaccgctatatcgccagcgagtcgacgttctaccgggtactgcgacgagccggtgaaacgactcgtcgtggccgacagcgtgtaccgcagagcaggccgcagtcgacctggaaggcaacggctcccaaccaggtgtggtcatgggacatcacctggtgtgtgcccggagttcagggcgggtatggatgctcagatgaaccacgagtctgtctggaatattga

SEQ ID NO: 391356 - DNA, 327 bp, Salmonella enterica
ttgataatcagcgaaatgcaacgcaagcttgccacatgggcagcaactgctccgtcccgacggattgaacggctgctgcgtctgataacacaaccagaatggctggctgaagctgcgcggatcacactttcatcaaaaggggcacaaactcccggcgttgatggtatgaacaaagcaaagttacaggccggactgtctgctgagttgcaaagactcagcgaagaacttctctcgggtcgctaccaacccctgccagccagacgggtatatatcccgaaaagcaacggcaaactgcgcccgctgggtatcccgacggtgaagtcataa

SEQ ID NO: 391357 - DNA, 2085 bp, Salmonella enterica
atgagcacaaaaataacgaagcagcattacaacaaaccagcgtacatctacattcggcagtccacgctggcccaggtccggcatcaccaggaaagcaccgaacgacagtatgctctgaaggagaaagcgctggacctgggctggcaggagacagcgatccggatactggaccgggatctcggacagtcaggaacacaaacggcaggacgcgaggacttcagaaccctggtggcagaggtgtctatgggaaacgtcggagccgtgtttgcgctggaagtttcccgtctggcacgctcaaatctggactggcaccgattactcgaattgtgtgccctgacccataccctggtcatcgatgccgacggttgctacgatcccggagacttcaacgatggcctgttgctgggactcaaaggaacgatggctcaggcagaattacactttttgcgcgggcgcctccaggggggaaaacttaacaaagctcagaaaggagaactgcgatttcccctgccggtaggtttttgttatgacgatcaggagagaattgtccccgatcctgatgacgaggttcggggggccgtacaactggtgtttcgtttgtttcaggaaacagggagtgcctgtgccgttgtcaaacgttttgccaggagcgggttacgctttcctaaacgagcatggggtggtgcatgggcggggcagctcatctgggggcaactcagtcatgggcgcgtgctcagcatgctgaaaaatccgtcttacgccggcagctatgtttttggccggtatcagtatcacagaaatatcactcctgatggtcacgtgcaggcacaggtgaaaactgttcccatggcgaactggcgtgtgtatttacctggtcatcacgaaggatacatcagtcaggaagagtttgaagataaccaggtacggcttgcccgtaaccgcacaaatggggaaggatgcgtgttaagcggcccggcccgggaggggctgacactgcttcagggactgttgatctgcggatgttgtggtcgggcaatcacagtgcgctaccagaaccatggcagtatctgtccggtatacctgtgcaactggcagcgtcgggaaggccttgcgaccagagactgtctggctgttcgcagtgacctcctggatgatgcagtctccgccgcgatgttcagtgcattactcccggcggaactggaaatagctatttcggcattaaaagaaattgagcaacgtgatcaagcaattatgcgtcagtggaacatgcgtatcgaacgggctgaatatgatgcttcactggcagaaagacgatatcaggaatgtgatccagctaaccgactggtcgctgccacactggaacgccgatggaatgatgccttgcagcatctggaatcactcaggacagagtcttcccggttcagaaaccagaaaacccgcattatcacgccagatcaggagggcatgatactcgctctggcgcaagacctgccacgcttgtggaatgcttctacgacacagcaaaaagaccgtaagcgtatgataagaatgcttattcaagatatcactatagagaaaaaaaccgatcagcaccagcttgttctacatattcgctggcaaggaggaatctgcacagatcttccggtggttttaccaaaaccgatttttgacgtgatgcgctatccgactgtgatggtggatagggtacgtgaattatcgcgaaattacaccgatctacaaattgtggagcatctgaataatcaggggttcctcagccctcatggcaaaccattcactcttgccatgattaaatggatccgctacaagtacaaaattgcggcggcaaacctgatgcggcatgatgaatttacagtaaagcaggttgccagccgtctgcaggtcagtacgcatatggtttattactggatttcccgccatgttgttgcagcccgcaagctggatggcagaggtgcatggtggatcacattgaacgaaaccaaagaacatgagctgcggaactggatactccgctcagcacacttcagacaatattccaatcagtcattgaaaggagaggcattatga

SEQ ID NO: 391358 - DNA, 345 bp, Salmonella enterica
atgaaaaatatcccgtcgcaggatttacacaaacgtcgaactcagctactgcagcaaatgcctgccatggatacgttgctgagaggttcacttatcgaacgttacaaacgttgtggcaaacccggttgcaaatgtgcaaatggccccggtcatggtcccaagtactatctttccgtcagttttaccggtcgtcgccctcagatggactatgtgcctctgaagattcgtacagacgtcatggtaagtctcgcgaactatcatcagatccgcgacatcattgaggaaatctgcgaaataaaccgcgaactgttacgccggcgcgaatcgctacaggggcctcagtga

SEQ ID NO: 391359 - DNA, 978 bp, Salmonella enterica
atgcgtacacctctgacattgatcgatgccgtcgatgcgatggtcgcccagaagcatactgtcggttataaatacgaggccgaggaagcaattctggaccggtttgttgcattcacacactgccagtttcccggactggagaccgtcaccgacgcttctgccaatgcgtggatcgaggcggctcaaaagcgagcggtcacgccgtcaactctgcggggactgacttcgccagtgagacatctggctcagtggctgatactccacaacgttgcggcctatgtgttaccgacaggcgtgttgcgtcggccggctgcctacattccgtacatttattctgacgcggaactggtcgccttcttcacccagacggatcactgccattactgcagcgatgtgcccctccggcacctggtaatgccggttctgttcaggactatctatgcctgcggtctgcgctgctcggaggctcgtctgttgcgcgtcggggatgttgatttggcagcaggggtcttgctgatccgcgatgccaagggcggcaaagaccgtcagatccccgtgtccgaaacactacgtattcggttggcacactatcatgcccagtttgactggatggggcatgagtggttcttccctggaagacgaggtctccctctaaggctttctaacgtttacaataacttccgcaggtttctatggcaggcacgcatcagtcacggtggtcgtggccacggaccgcgcgtccacgattttagacattcatttgcggtccacaacctgcggaagtggtttgctaccggcaaagatgtcggcgcgatgttgccgatcctgcagacctatatgggtcattacacgatcgcagacaccgcctactatttacggctgaccgccgagttgtatccgcacattgtctcgcgactggatgagacgatcggagacgttgtcccttctctgaagggagaatcacaccatggcaactga

SEQ ID NO: 391360 - DNA, 678 bp, Salmonella enterica
gtgatttcccccctgatctcaaatttgttcctgcactatgcctttgacatgtggatgcaacgtcagtttcccggagttcccttcgaaaggtacgccgatgatgttgtatgccactgtcacagccagtggcaggccgaagcactgataagtgaactgaggcaacggcttgcgcaatgcgggctggagctgcatccgcagaaaacacgaatagtttactgtaaggatgccgatcgacgagggaattatgcagagacgagcttcgactttctgggctatacattccggccccgtctgtcgatgaatcgctggggtaataccttcgttaacttcagtccggcgatgagtgccagagcagggaaagcaatccgtcaggaggtgaggaactggggtctgcaaaatcgcagtgacaagtccttgtacgatctggcgcatatgttcaatgcgaaaatcagaggctggataaagtatttcggtgctttttataaatcggcactgtatccgacgctgaggcaaatcgatcgcaaactcgtgttatggctgacccgtaaacataagcgacttcggggtcaccggcgacgcgccagccactggctggcgcgtgttgcgcgaagtgaaacgaggttgtttgcacactggccgttactatggggacaggcctcaatgggaagagccggatga

SEQ ID NO: 391361 - DNA, 966 bp, Salmonella enterica
atgagccgagaggttcacgtccggttccgtgagcacctgagggggaggttccctcgggtgactcgacttgtcgtatccggtatcagcccggaagtactgcaaaatgaagtccttcccctgatcaaggaatttatggctgaaagaggccttgaactctccgcggagaaaacactcatcaccagtatagaaatcgggttcgactttctgggacagaatgtcagaaaataccggggtaagattctgatcaaaccctcgaggaaaagtctgaaccacttctgtcaggagataaaacgcatcaccactacctgcggtatgcatgggccggaggtgctcataaacaggctcaacccggttatcaccggatgggcccgttaccaccggcatatagtagccaaacacaccttcagccttgcggatcactacgtatggcgaagtgtgtggcgatggtgtgtcaggcgacatcccaacaagggcaagaaatggattgccagcaaatatttctcatccagagggatgagaaactgggaattcacggcccgggacaagagggggaagttactctctcttgccaaagccaaagccaaagccaaagccaaagccaaagccaaagccaaagacacgttaatccggcgacataccaaaatccggaacaccgcaaatccctatgacccggactgcgaacaatacttcgaacagcgaaaggagcataaaatgcgtacctcgatatgggggcgcaggaagctcatggcactggcacgaagacaaaacgcagtctgcccggcatgcgggaaagcccttactaaggattcaggttgggcactgcactacagagtacggtggtgcaacggaggtcaggacaaacacaataacctgatcttacttcatccggcctgtcacgaccagtaccacagtaacgtttccggccacgaaaacgtggcttacagaggcttgagcggagtgcggtga

SEQ ID NO: 391362 - DNA, 1467 bp, Salmonella enterica
atggaaaccgatctcagtttcgactttcttgaacagttcaaagagcaaagcttggcgcttaagctccttcgctcaacacatttctcgctggtcgccagttttctgcatcgggtctttgttataccaaaccgacgcagcgttccttaccaggagctggtcagtttgctggagcaacatctttttgatattgcagaaagttatggtgaagacaaatatccgaaaaatgcccgaagttatattgatgactggattaatgataaaaacggctatcttcggaaatatctgactcaggacagtgatgaacctgaatgtgaccttttgccggaagcagaaaaggtacttcgctggattgaggaacttcagggacgtcagtttgttggcacggaatcacgcctgaaacttttgctggatatgattggtgaactggttgaaggggccagcgaagatccacagcaaaaactgcaacagcttaaagcgcggagagcggaaattgagcagtctattatggcggttgaacttggtcaggatcagggattttcgtcgacgcagattcgggaaagattttatttattatccgatatatcccgtcagttactgggggattttcgtcaggttgaggctaatttccgtcagttggataaagcgtcgcgtaaaactatcagtaccggcagcagtctgaaaggtgatgtactggataagatttttgcacatcaggatgtgattgatgattccgacgagggcaaatcattcagcgcattttttgagttgctgatgacgccgaaaatgcgtaacgggatgcgggaaaatctccggtttcttctggagcatgagcaggggcgggagatcgttcgaaacgatcgtctgctgatgaatttatacagctggctgcttgatgccgggaaaaaagtgaatgcgacgcgacaacaaatcaccgatcagctgcggcgttatgttcaggaacagtcacaggataaccggcgggtgctggaaattattcgcgaatttgaaattgaggctcatcgttttcaggagcaggaaagagtgtgtgattttatttctctgagcgtaatgcaggcagagatcgaccctttattcagtcgtcagctctggcagcctaaacgggatgagcaactggacagtcagatgattattgccgggggagatcctgatgttgactttagtcagttgctgacgttaagtcatatcaatgaacagcaactgcatcgtaatattttacagctcctgatggcaaaccatggacaggtgaccttggccgaagtgatcgcgcattatcccctccgttccgggcttgatgaactgctcacatacgtcaaactggcctgtgagcaggtgataacggcgaatattgatcgacagcgtaaacagcgtgtttcatggcagcctgagcccggcctggttcgcacggtgtcggtgcctgaaattacgtttgtgcggagtaacggatga

SEQ ID NO: 391363 - DNA, 615 bp, Salmonella enterica
atgatcgaattatttaactcagccttattcagtgaagacagccgtaatctttcttcacggatcctgattaagttgctgaaagggccgctgtatcgttcccgtcatcgtgatttatgggaggcgatggtacgcgatcaacagcatattcgtagctattttcaaccgctgggtctgacgttaacgctcgatgaggcggaaggctatgcttttctggtacaacagcagtttgaaggtgatgatgattttccgcgcctgatcccgaagcgtaatctgacctttatgcaaagtgtattcctggtgtcattaagaaaacgtctggcggaacatgatgcggaagagggagcgccgcgcctgactgtcacacgccaggaaatcttttcctggctgataccttatctgcccgaagtgaataacgaggttaagcagaaaaaagacctggatgcgttaattaaacgcatctgcgaaatgggatttctcagcgtactgccccatcaccccgatgaatttgaagtcttgcgtattattaaagcgatagtcactgccgggcaaataaatacgtttactcagcttttcagggaacgaaacagcggacaggaggaagaaacagatgaatga

SEQ ID NO: 391364 - DNA, 3375 bp, Salmonella enterica
atgaatgataccatgatgctgaagggattccgtcttgcccgcatggaggtgctgaactggggaacctttgatcgacaaatctggaccgtgaccccggacgggaaaaacagtctgctgacgggcaatattggcagcgggaaatccactctggtggacgcgctgacaaccttactggttccgccacgcaaacttgcctataacaaagccgcgggcgcggaagaaaaagaacgttccgtcgagtcctatttttttggtcactacacgtccgttcaggatgataacggtaaggccagagctaaagggctgcgtgtggacgataaacattacagcgtattgctggccgtcttttactccgtcgcgttacaacaaacgctttctcttgcgcaaatattctggttaaagcccgatgaaagaaaggtaaaacggctttatatcgtcgcccgcagggcgatgtcagtggccggtgacttctccgggttcggttcgaaaatcaatgcattacgaaagcggttacgtaaagataacgcgctggatattgccgatacgtttccaccttatcagcaggcattttctaagctgcttggtcttgggagcgatggacgggcgctggagttatttaaccagacgatttcgatgaagtcagtcggttcggttaccgattttgtccgtcacaatatgcttgaacaaccggatgttgagaaacaactggtcgagctcgagcgtaattatgatgatcttcatcgtttacatgacgcggtggttgctgcacgccggaagatccagttgttagagccggtcagccgtttcggggaagaggcaaagcgggcagctcaggagcgtgaaaattataatcagagtcggggattgctggagccctggatgagtgtcaaagcaatacggctgtatcacacacgtcttgagcagcagcagaaagagatggaaaagcaggctattgaactgggtcagcttgatgatgagagaaacagggttcagcagcgtattgaacatattaatgttgagatttcggggaatggcggcagccggctgcagcagcttgacgcggagattaagcaaaaagagacggagcgtgatgaacggaataaaaactgtcatatctatcagagtcttgcgcaggagctggagctcaatacccgactggatcctgaggtgttcatcagtaatatcgcccgggccagggagcgggcggaaaaggtggtccgggagctcgacgggcttgaagaaaagcgtgacgatctgaaccgtcatttgtggcaaaagcaggcggatctggagaaaattgtcggtgaactgaccgcgctgaaaaaacgacagtccaacattccctcacggcagttagcgattcgtgaagcactgtgcgacgcgctgggactggtggaaagcgatttaccttttatcggggaactattgcagataaaaccgactcagcagcactggcagggcgcgattgaaagggtgatgcatggttttgctctgagcctggtggtgcctgatgactgctaccagcaggtatctgaatttatcgaaaataagcacctgggcggcagactggtttattaccgcgtcaggcaaaagggcgatgttttaccacccgaaatcgtcagcggatcattgcctgaaaaaatagatatcagaccggactgtgactgctatgtctggctggataaagaaatcaggcagcgctttaattaccggtgctgtgaatcattgaccgatttccgccgcagtgaaaaagcgattacgctgaatggtcaggttaaatccgggccagagcgccatgaaaaggatgaccggtatcagattcaggataaaagtcgttacgtattaggctggaccaataaagaaaaaattcagttgctggcggcacagtacagccagttacaaagtctgatagcgaaaatcaatacggaactggacggggcgcgcagacagaaagatgcgctggatgcgttatggcacaaagcccttcaactggctgacttcagttattcctttacgcaaatcaactggcctgccataagtgaacaaattgcattattgcagacggagtatcgtcatctggagtcctcttccgatatcctgaaagtattgcaaaacagtctggaggcagcgcgtgcggaactggatcaggtacagacgcgacgcgatgaactgaacaacagacagggcgaactgaaacagaaaatagcgacctggaaatatgaactgggccagcagcaacaactggcttccgtcgtcacgcctcagcagcagagtgattattatccgctgctggatgagatgtttacgcgttatggggctgataaggggttacgtattgagatgctggctaatcagatatcgcttctgcggactaaactgaacgaaaaaatccagcatctggaagagcggcggggtacaaaacaggaaaagatgattgctgcgatgagtgattttattcactcgttccctaacgatgccactgaacttgatcagagtatggcggcgttgccggaatatcagcagcttttatcccggttgcagaaagaggatttaccccgccatgaagcgcgttttaaagaaatgcttaaccgcgacacgattcgtgcgatggcgttgttccgtagtcatttagataaacaggacgaagagatcagaaaccgcatcagggtgattaatcgctctcttgtggaattagactaccagcccggcacgtatattgaggtggtgagtgtatcgtcaccggatgtggatgtccgcgaatttaagcaacgtctgaaacggtgtgtggaatacagtacggatgataatctttattcagagcaaaagttcgaacaggtcaaatcgttgatcgaacagatgcgcagccagccgaaatggacgcaaaaagtcgttgatgtgcgttactggttcctgtttaacgtgactgagcgatacagggaagatagcagtgagaaggagtgttattctgactccggcggaaaatctggcggtcagaaagagaagctggcttattccattctggcagcggcaatcatgctacagtaccggttgcttgacgaaggtgacagcagtgctgcattacggcgtttcaacctggtagtgattgatgaggcttttgcccggggctctaaagacagcacacgtttcggccttgaattattcaaaaaactggggctacagttgctgatggtaacgccattacagaaactggatgtgattgaaaattatgttaatcatgtgcactttgtcgatcagaaagataatcgttccatggtgttgaatatgtcgattgaggattatcgccagcgcctgcaacaacacagggaactgcagggatatgcggctctggtggacgatgacgaacatcatgtttga

SEQ ID NO: 391365 - DNA, 1233 bp, Salmonella enterica
atgcggctctggtggacgatgacgaacatcatgtttgagataaaaacggtccgcgaaaagttgctgagacaatggcgacgttatgattttcatcggcgctggcttaatggtagtcttgagtttccgctgcagatttcattgccgaaaataacggatcggcaactgctgcacagctttgttgatttacagacacaggtcatccgattccgtcaggtatgcgaaagactgccggggattgaaattattgaaaaggagttcagtttttcatcaatggggcggcagcgtataccggtcgccgtcgctgtgatgtcaatggaggatctttgtcggtttctcggacaaaaagtcagctgggacaacttcgtgaatgatgtggcgttattacgttgtttttttcctgagtctgatcggtggccgggtgataatatttcactgattgaagagtatcatggtgtctggccacaattaattcatgtatgccgttattttatggctatgccacgtccgggactgtatctgcgtcaactggacattgtcggtatcgacagcaaatttattgagagacataagcgggttttgcgtcagttgcttgattgtctgttgccgcaggagtgtattgactttcgctattctcagctcactcattctggctttgaacagcgttatggtttattgcatgaaaagcccgtcattcgatttcgactccttgaccccgggctcagacagtatttctgcgatatgcgggatctgtccgcaccggttgatgagtttgtagcgctggaacttccgctgagtacggtttatatcaccgaaaataaagtcaattttctggcgttcccggatgtgagcaatgccattgtcatttttgggcaaggctatggcgttcagttactcaggtctgtgacatggttaaacaacgtaagaatcttttactggggagatattgatagtaatggttttgctattttgtcgcaactgcgcagctattttccgcacgttaaatcgctgctgatggatgagatgacaatactggcttcacgggatttctggggagatgaaccggaaaaaaatatccattcagccgggcacttaccttttcttactgaacaggaacagatagtttatcagaggattaagacgcactactggaaaaagtatctcagaattgagcaggagaggatcccatttaatctcctgatacaggctcttctgataaatcagatttcgggatga

SEQ ID NO: 391366 - DNA, 231 bp, Salmonella enterica
  misc_feature (133)..(141): n is a, c, g, or t
atgaaacttattaataaagcatcagcaatttgtttatcattatcatttttcagcatatctgcttattgctcacaggaacttattcggaatatattcaatgtgggtggtaataatctcactctgccagaaagcnnnnnnnnncacctctctattcgtcggcagcgtcagatgtgtataagagacaggcttaccaacttgcggttgatcctaaaagcaatcttctttatatga

SEQ ID NO: 391367 - DNA, 123 bp, Salmonella enterica
atgaagacgtctgactatctggtaccgggcaccggcgcaaatctccccaacgaaacgccaaatttcagcctgacagatatcactcaggaaaacaaaatcagcagcaagtcttttaacgactga

SEQ ID NO: 391368 - DNA, 3372 bp, Salmonella enterica
atgtctaaggtaaaaatcaaaacactcatcggctccgttgtgactgtcgcgttttttctgacggtcatcgtggcatttctgttttatgcctttccggaaaacgtggccttggccaccggatttggaccgtatgacgaccagcgcatactcacattctgcgccatactggttgccgcgctgtttttactcggctggctgatagagaagtctttcgacttcgcgggtaaatcgggattgtatttacactgggggcagaaaaaggctctgattgttgcgccggtgacggataccattgccagtgaagaagaggacgatgaacccgtcttcagtgaagaggccgtgtccgaacgcctgtgctttcgctatggacgccgctggcagagtaaggtgcgactccttttggtgatgggtaaccaggacgacgtccataaagcggccccgggcctgtgtcatgatctatggcaggaaggcgacggcaacgtgctgatttatggcggtgacgcccagtcacttccggatgagatcttccttgcaaaactgaaacgcctgcgttccggtcaaccggttgatggcatcattcaggtgatgcgtacctcagccctcccgacggatatcgaacgggatgcctttttgcggtgtcgccagaaagcagaccaccagttgggcttgcaggcgcctgtctggctgtggctgactgacaaagccacgggtgctcagcaggaagcggaaacagctgcaataggggttattttcggaccgggaggcacagtaaaagaggtggatgaggcgtttaccatactgacgcaacgcctgcaaaaagccggtatgacacagatactgaataatccggtacatgacggcctgcttcagttgtcctcccgtctgcgacacgaactgagagctagcctgaccgttttgctcagcggactgatgcagggatctgcggtctttcgtttacggggggtcatgttcagtcctgaactggccgttgccggtttggtcccaaacacacgcctcgacacaccgacctggaaagccgtcattgatgactgtgatgccgtcaacggcaggaagctgggtttcgactggctgaagatgctgcggttaattctgctttccctgattgtcctgtggggggccggtacactgctgtccctgatcgttaaccgtacccagatttatcaggcgcaggaaacggcgaggcaggcagcagatactgcaaaaccactggcagaacgcctgcacaaccagctcgtcctccagcaagcgattgcccatctgcaacatcgtgaggcgaccggtgctccgtggtacacccgctttggtcttaatcaggacagcgacatgctatccgcgttctggtccctgtatgcccgtaacaatgccatgctgatgagagatgccaccgcagaccatctcaggcagcaactgaacgcctttgtgcagttgcccccggccagtgacgctcgcacacagggtacacaacatacctacgatgtgcttaaaagttatctgatgctggcccgtccggacaaagcagacgcagattggctggcaaaaaacgtcctgaaagccttaccgaaacgccagaatgtgccggatggcacgtggcaggaaatggcaccaaaactactgggattttatgcgcagaacctcccggcacacccggaatggaaaattaagcccgatgcagaattaatcagcacggtacgccagatcctgctcaagcagataggccagcgtaacgctgaatcagggttgtaccagaacatgcttaagcgcgttgccagcaactggcctgatttaacgcttgccgatatgaccggtgataccgatgcttcaacggtattcagcactgacgaagtcgtccccggaatgtttacgcgccaggcctgggaagagcaggtacaggatgcgattaacaaggtcgtcaaaacccgccgtgacgaaatcgactgggtcctgacggataaaacccatcagtcagggagcgatatatccccggaagcgctgaaggcccgtctgacagaacgttattttaccgattttggcaatgcctggctgaacatggtcaacagcattcagtggcatgaagcctcgtcactgtctgaaacaattgcccagctcagtctgatcggtgatgtccgccagtcaccgctggtggcgttgatgaacacactggcctggcagggaaaaacagggcagaagggtgaggcactggctgactcgatagtggattcagcgaagaagctgattggtcagaaaaaaaatgccagacagtttattgaacaggcacagggtcctaaaggcccgctcgatggggtgtttggtccgctaatagggctgatggaagggaaagagagcaccggtatcaacggtaaccttagcttccagtcctggctggcccgcgttacccaggtgcggctgaagcttcagcaggtcaccagcgcaccggatccgcaggccatgtcgcagatgctggcccaggccgtattccagggtaaagccatcgacctgactgacactcgcgattatggcagtctggttgcagcgagcctggggcaggagtggaacggatttggtcagtcgttgtttgtgcaaccactggacctggcctggcggcaggttcttgccccggctgcagatagcctcaatgaccgctggcagtcgaccattgtcgaacagtggaataaggcctttgcggggcggtatccgtttaaagccaccggcagcgatgcctccctgccgctgctggctcagttcctgcgtagcgactcgggccgaatcaccaccttcctgaaaactaaccttggcgggatacttcatcaggaggggaatcgctgggtcgttaatccttccgcaagtcaggggagggttgtcagcccggatttcctccgggccattaaccaactggcggaactgtcagatatcgtcttcgctcagggcgatgcgggtgttcacttcgagcttatggctcgtccatcccgtgatgttgcccgtatacagctctcacttgatgagcaaaaactggattactttaatcagatggaaagctggcagagctttagctggccggggaacacatggtacccgggtgtaaatttaagctggcgtagcgtcaacagtggcatgcaactctacgccagtaaccagggtaactggggtttcattcgcctgctggacaaagccctgattacacctctcgatgcgagccgtacgcaactggtgtggagcacccccgatggcaatcctctgaagtttgtgatgcgcagcgagctcggcaacggtcctcttgcgttactgaagttacatggattcacgctgcccgacgctatctttaacgtcgcccctggtgcagaagagctccagtaa

SEQ ID NO: 391369 - DNA, 459 bp, Salmonella enterica
gtggcgttttccgggcagtttgaactgcttgaacgggcaaaccatcagttaacactgatggtgccaatgacgctgatgattatcttcgtgttgttatatctggcgtttcgtcgggtaggggaagcgttattgatcattaccagcgttccctttgcgttggtcggcagtatctggttactctactggatggggtttcatttatcggtcgcggccggaaccggatttatcgcgctggcgggcgttgccgctgagtttggcgtcgttatgctgatgtatctgcgccatgcgatagacgccgaaccgtcgcgggaaaattctaacactttttcggcagaaaaactcgatgaggcgctctaccacggggcggtgatccgggtgcggccaaaagccatgacggtagcggtgatgatcgctggtctgctgtctatcttatggggaacggtacgggttctgaggtga

SEQ ID NO: 391370 - DNA, 579 bp, Salmonella enterica
atgaaattacttattagcatattcatctttctgttatttacctttttagcgtcaagaataaatggatttttggcgtatgcaggatggtgtctggctggttttattatgtatttgagtttgaaagaaaattattcatttttatattttttcgctattctgatttcttctgttttgagtctttactctttgtcgatgtctgtctctggctttaccagtgcagatgagatgaaaatatatcaaactggaattgatagagggggtagttttaattttcctgaatgtagtggttttctgcgtgtagatacaggtgatatccttttagctaaggaaagtcagttcaacaattgttctttacagggaccaaaagatacttttcatcaagttattgattttgttacatcttatatgtcaggagtattttcggaagttgctgtggtggcacctttatatccacatgaaaaattagaaaataaatgtctgcattcaattaacagactaatacagctttgtcctgaagaagctgtcttttacgataaacgaatattagcagaaatgaacaaaaaagacttaagtcagtaa

SEQ ID NO: 391371 - DNA, 255 bp, Salmonella enterica
atgcttaaacctcttatcgaaaacaacctcaaatatatcgttttcatgacagcaacctcaagcatcgctataggtaataaattattttgtttaataataaaacgcaccgtaaaaaaaccttcagagttctgtcagcaatatccttttttaactacagcattcttctatatgatcagtcatttcgtcatgctggcatttgttatttattttattgttttctttataacaatgaacattgttattccatacttttaa

SEQ ID NO: 391372 - DNA, 333 bp, Salmonella enterica
atgaataagtatttttttctgatggccgccattgtggcggaggttacgggcaccacgctgatgaaatttacggacggctttacgcggctgtggccttccctgggtaccatagtttgctacagcgcttcgttctggctgctgtcccggacgctggcgtatattccaatcgggatagcgtatgcaatctggtccggcatcgggatcgtgctgattagcctgctgggatggctggtacacggacagcggctcgatttaccggccgttatcgggatggggctgatttgcgcaggagtgctggttattaatcttctgtcggggtcaaccccccattaa

SEQ ID NO: 391373 - DNA, 531 bp, Salmonella enterica
atgaaccctgaaccgatgaaaacgccggaagtatgcccgaagcatggacacgcctggacacaggaggatgacgaactgttgataagcctttacccggacaataccgcagccattgtggctgcccgactggggagaacagtagccacgatctaccagagaatagctatactcagggaagagtatcggatgccccccaaaaaaaacaacttcacggatgagcaaaaggattttatccgtgataactgcctcgccatgacgtatcagcaggtagccgatcatctgggaaaaagtaaggaaagagtggaacgtgtcgccagaatcatgggggtcagttaccacaagaccggaaacttacaccccaacacaatctatcccgacagttatgttttacgcgttcgcgctttacgcgatgaaggcctgctgttcagggaaatagccagaatattagatatttctgtatctgtggcagtacggatgtattacaaacgcaaaactaaagccgacaccattgcaaggcgacagcctcaataa

SEQ ID NO: 391374 - DNA, 1257 bp, Salmonella enterica
gtgtcttacgttcgtcagtctgcctgggaagaccccatgcaggtctggggcgctgtcatcgccctggtcattattttcctgttcatcgcctggttgttcctccccgagctcgtatacctgacctgtctgatgctccattttctgtgggggctgattgacctggggccgttccattccttcgctgctccccgttataacctgctggcggaaaccgccaatcactccggcgaaatcagttttgcccggtgggtcagcgtcatggatcagaccatcggtatcctctggctgtttctggttccgctgaccgcatggtccctgtgggaatggtggaaacacccggcacaaagccgtttcacccgccggccgctcgatatcagtaatctgccccacgccctggctccggtatccccggcgttaacgccggttctcagcgggggtgacagccggaggctgtttcatggcaaaaaacgccctgagcacaggccggccctgacgccggaggcattcgtggaacaacacgcactggtcagggatatgcagctcgatgtcgcagcaacaagagcatgtttcatggcgcagctgggcagtccgctgacatcatggagggcgatggctccccatgaaaaggccctctttgccgtctttggccttcagtatttcctcggtgaccggcaggcagcaaccggcctcatgaatgcgctgaacctctcctgccgggtcagcagccggcgggataccggccggaaaaccgtccccgtttactcgctggtcagaacagcctttaaaaaagtcacgaataccgaaggtgcccgccagtggctgaaacagcaccgctacgttcgcagcggtctggtgtggctctacgcccacgacctgcgactcacgccccccaactggctgtggcttaagggggtggacagaaccctgttctacgccctgcaccgggccaacaccacgaaggggtttatcgaaggcgccggcgtggtcgccgtggcccggacggaaagtgaagccatgcgcttcagcctcccctgcccggaaccctgtgtcgaagaagctgttgagggactgcgccgcgacctgctcagcctcggccttatctgggatgaaccccagccagacagggaaagaaaacgccgcatcctcaccaactggtccctcaccgatgacgttctggcgcgcagcccttcgccagcgccagcgtctgcgtctgcgtctgcgcccgaatccgcgcaggagccggaaaacgaattctga

SEQ ID NO: 391375 - DNA, 1218 bp, Salmonella enterica
atgactttccactacagcgctgcccgccgggggcataatattatcgtgacggctcaaaaggatggcctgccacaaacgctgctcatcctgcagaccgacagccccggacacctggtagcccgtgaccatcagttactggagataatcccgccccacaggggaatgccgggagccatcacgctcattgactcaccggaccatgatgctgcgggcattctggaggccattgccggttgtttaccccggagagtgagtatgacatctcagatcttgctgatcgccgccccgctggtactgtttgtgctcattatcctgtcctcctttctcctccacagtcgaccggtacctgtgccgacgtcagcgtcaacgtcaacgtcagcgatgacacggtcgctgtcgccggtaccggaacaggaacaggaacaggaagacttaccggttcctgagccatcggcggtgaaaagcggtattcagcaggccacgccggagccggacggggaaatacctgctgtcatggaacagcagcgtgaacggctgccgctcaccctgaacagcgtttttccggacaaaccgtctgcagcactgacgccggcacaggctgaagaagcaaaccctgtcgcaacagcacctgaaagtactgaaagcgataaaaaaagcactgaagtcgctgaaaacgctgaagccagcgcggcgcgtaaaaatctcgcgacggtactgaagcgcaatgctgaccggggaatgttcaccatcactctctcttccggccatgagcgtaccctgtacgcatttcttgacccgcgttgcccgaactgtcgtacgctggagccggttctcagacggctggccacagacttcaatatcgtggtttaccctgtctccgtgattggcggggaggcatccgcctcacatgtggcccccctgctgtgcgaaaaggacccgcagaaacgcgcggaaggctggcaccacctgtactcagcagatgacgggatggtcacaccgggacaccgggagagcacaccgccggatgaggagtgcctgaaagcggcccgcgccgccatcgatgtcaacaatgtcgccttccgccagttcggtttccccggtacgccgtgggtactgtctgacaccggctggcatcttcccgccacgctgttacaggagcccggtaaggtcagtctgttcctgaaaaccatcaatgacggggaaaaagagcatgagtga

SEQ ID NO: 391376 - DNA, 2307 bp, Salmonella enterica
atgagtgagcagcaccgcgttaatccggaactgatacaccgtaccgcctggggaaacccgctgtggaatgcacttcagagcctgaatatttatggcctgagcgtcgccggcagtctggtcgccagttttatctggccactggccctgccgctgtgcctgctgatttccgtcatcaccggactgattttcagtctgcagcgctggcgttgccccctgcgcatgcccgtgacgctgaacaggcccgacccgtcacaggaccgtctggtacggcgcagtcttttcagcttctggcccacgctgtttcagcatgaagcccttcaggaatcccccgcccgggggattttttatgtcggttatcagcggctgcgggacgtcggccgggagctgtggctgagcgctgacgacctgacccgtcacatcatgttctttgccgcgaccggcggcgggaaaacagaaaccattttcgcctggatagtcaacccgctgtgctgggcccggggattcaccctggttgacggcaaggcccagaatgacaccgcgcgtaccgtctggtatctggcccggcgttttggtcgtgaggacgacgtcgaggtcattaacttcatgaatgccggcaggtcacgcagtgaaatcatcctgagcggggataaaacccgcccgcagtccaacagctggaacccgttctgttacagcaccgaggcattcaccgccgaaaccatgcagtccatgctcccgcagaacgtccagggcggtgagtggcagtcacgggccatcgccatgaacaaggcgctggtattcggcaccaaattctggtgcgtccgggaggggaaacacatgtccctgcagatgctcagggagcatatgtcgctcgacaaaatggcggagctttactgccgtgccatcgatgaccagtggccggaggaagctgtcgccccgctgcgtaactacctgaaggacgtaccgggattcgacatggcgcaggtacgcaccccgtcagcctggacggaggagccgcgcaaacagcacgcctacctgtccggacagttctccgagactttcagtacctttacggaggtttttggcgacgtctttgcggaagacgccggcgacattgacctccgggacagtattcacagcgaccggatactgatggtgcttatcccggccatggacacgtcagcccacaccacatccgcgctggggcgcatgttcgtcacccagcagagcatgattcttgcccgcgacctgggttaccggctggaaggaaccgaccgggacgcactggaggtgaaaaaatataagggccgttttccgtatctgagcctgtttgacgaggtgggggcttattacactgaccgtatagcagtggaagcatcacaggtacgttcactggatttttcgctcattctgatggcccaggaccaggaacgcatcgagggacagacgtcggccatcaacacggccacgctgatgcagaataccgggaccaaatttgccggccgcgtggtgagcgatgacaaaacggcgagaaccctgaaaaatgccgccggcgatgaagcccgcgccagaatgaacagcctgcagcgtcaggaggggatattcagcgagtcctggactgacgggaaccagattaatatccagatggaaagcaaggtcagcgttaaggatttaatcagtctccagcccggcgagttcttctcaatatttcagggggaggccgtaccgtcagcctctttttatatcccggataaggaaaagagctgcgacagcgaccctgtggtcattaaccgctatattggcgttgacgcaccatctcttggacgtctgcggcggctggttccccggacggcacaacgccggataccggccccggaaaacgtcagcgccatcaccggcgtactgacagcaaaaccgtccaggcggcggcgtaaaatcagtacagaccccattgccgttgttgacaccttccagaaccgtctcgccggcagacagatggcgctggcgatgacggagcagtatgactttgattttaccgcccgggagcaggcgctgtgggaaacggcgatcgacatcatcacctccaccacacgcgaggaacggcgtatccgctatatcacccccaacagtccggaaacagcatcacaggacaacgaagacgatctgccggtgagaacagcgctggccagtttcagaccgttacctgcgttaccggatgatccccggaaagacagtaaggatggggtaaaaatgacttaccgcaaccaaaaatcgcaaaataataatccacgctggcctgaaaaattctga

SEQ ID NO: 391377 - DNA, 243 bp, Salmonella enterica
atgcgaaaaattacaactgtcagtatcggggaacaacaggatgggtttattgcccggatgattcactctggtcgttacggttctgccagtgaagtcatgcgttctgcgcttcgcctgcttgaaaaacaggaatcttatgacgaggcggtcaggctggccgttgtggacggactggagagcggagaaagcgagctgactctgcgtgatattgcagcggaaagaaaattaaaacatcgtgtataa

SEQ ID NO: 391378 - DNA, 291 bp, Salmonella enterica
gtgtataagcttactgaacgggctgtagacgattttcgcagtatttatgactacaccttcatgaaacttggagaagcgcaggcagaccgttatacaggtgctctggagtcgttttttcggatgttgtcaaagatgcctgatattgggctggattatgatgcggttccgggggttatgcgaattagttttcagtctcatacggttttttataccatcagggagaagggagttttgattgcccgcatactgcatcagcagatggatccacgtcgacatctggaggctgaatga

SEQ ID NO: 391379 - DNA, 921 bp, Salmonella enterica
atggttatcacaaaagttatgtctgctaacctcaaacttcatcagttgcgtgcctttgtcgatgtggcgcgtcagggaagtattcgcgctgccagccgcttgtccggactttctcagccagcgctcacaaaagcgattaaggaactggagctggcgctcggggcgcgtctgttcgaacgacgccagcaaggcgtcacgcttactgacattggtgataacttttttcatcatgccagtctggtgctggaagaactgcgcgtggcacaagaggacattcagcaacgactgggattagctggagggcgtgtcaatattggcgttggtggcagtattgcccgcaccatcatgccgcaagtgatcactcagtttcatcgggaatatccgttggtgaaagtgcgtattgttgaggggcaactggtctcaatggtacatgaactgcgtcagggtatgctggatttcaccattaatacttatgaccagcatcatctggatcaggaactgatttttgaacggctgatgcagcgtgattatcaggtggtgatgcgcaaagggcaccccatggcgcatgcgcgttccctcacggagttacagcactgcgactggacgatgccgacgccacagggcagttattatcgtctgcttcacgatctgtttggcgagagggggatagcaccgaagattgtggtgacctgcgaaacctttatggcctgtaccagcctggtggcgaagagtgatttcgtcagcattgtttcgcgtgatgtgattgaggatccgactcacggcgggcagcttatcgccctcgctcttgacgatcctctgccaaaagccaccttttatttgatccagcgaaaggacactgctcttactccaatgagtgcttatatggcccagttattccgtcgctattgtcaatcagggtaa

SEQ ID NO: 391380 - DNA, 1311 bp, Salmonella enterica
atgaaaaacctctccgacctcgtcaaagcgcggataccgcagatgcaagcctggcgtcgcgatctgcatcattttgccgaatcgggctggcttgaattccgtaccgcgaccctggtagccgaagaactgcatcgacttggttatcaactaaagctcggccgtgaagtcattgatgctgactcgcgtatgggcttaccttctgctgaagtactggcgcagcaagaagcccgggcactggagcaaggcgcactgccacagtggatatcacatttctcaggtggattctgcggcgtggtagccacgctggaaaccggtcgtcccggtcctgtaatgggcttccgtgtcgatatggatgcgctggaccagaacgaaagtcgtgatgccgaccatttccccaaccgggaggggtttgcctcctgcaatgcaggtatgatgcatgcctgtggacacgatggccacacaaccattggcctcgcgctggcgggcgtgttgatggaaatgaaagaacaacttagcggcaccattaaaatcatcttccagcctgctgaagaaggcgtgcgcggtgctaaagccatggtcgcagccagtgttgtggatgatgtggatctgtttactgctattcacctcggcacaggcgtgcctgcgggagaaatcgtatgcggtagcgacacattcctcgccaccaccaagatggatgtgaatttcactggcacaggagctcatgcaggaggcaagcccgaagaaggtcgtaatgccttgctggctgccgcgcaagccacactggcgctgcacagcttaccacagcacagtggcggcgtggcacgtgtgaatgtcggcgttttacaggcaggttcagggcgtaacgtggtacctgattacgcgctgatgaaagtggaaacccggggtgtcagcaaccaggtcaatgatgatatctatcaacaagctctgcgcgtcatctccggagctgctgaaatgtatggcgttgagtacgatatcaaactgatggggagcgcacgcagttgtcccccaagtcagccgtgggtggacttcatccaccaacaggctgatgccatggggatttttacctcagtgattgatactaaccaacagacggctggttctgaagatgccacctatatgctggagcgcgtacaacaacgtggtggtcagtcttcgtatgtgatcttcggttgcgacctggcggcaggccaccataatgccagattcgactttgacgaatcgatcatggctactgctgtgcaaacgctggcgactctggcactgaatcaggcacagtttggaggccagtga

SEQ ID NO: 391381 - DNA, 1446 bp, Salmonella enterica
atgaaccaccacgactttattgatcactacatcaatgagaatcagccgcgttttaccgctctcagcgatgccatctgggacgtacccgaaacccgttttgaagagacacaatctgtcgccatcttagccgacgcgctcgggcatgagggattccgcgtcgaacgcggggtcggtaatatcgacacagcctttatcgccagcattggcagcggcaaacctgtgattgctattctgggtgagtttgatgcactggctgggcttagtcagcagtcaggttgtgccacaccgcagccgctggtagaaaatggtaatggacacggctgtggtcataacttgttaggcacagccggtctggccgccgcctttgctgtcaaggcatggtgggcagataacgtccagcgcggcacactacgtttctatggctgtcctggcgaagagggcggttcaggaaaaaccttcatggtgcgcgaaggactgtttgatgatgtggacgcagccataacctggcatcctgaaggttttagcggcatgttcagcctgagcacgcttgccaacattcaggctgcgtttcactttaaaggcgtggccgcgcacgctgccaactcgccgcatctgggtcgcagtgccctggatgccgtcactctgatgaacactggagccaacttcctgcgtgagcacatcgtgcaggaagcccgtttgcactatgcggtgaccaacacgggcggtgtttcccccaatgtggtgcaggcagatgccgaagtgctgtacctgatccgcgccccacaactcgatcaggcgcaggatatctatcagagagtcatcaatatcgccaaaggcgcggctctgatgaccggtactaccatgacggtacgatttgacaaagcctgttccaattatgtgcccaatcgcgcactggaagcggtgatggtgcacaatttacatcattttggcctgccatcgtacagcaaggaagaacagcagtttgccgcagagatccgtgccacactgacacgggacgatctgcgcaatgcacaattaaatgccgctcgtattggcggtgaagctggtatggcatggagcggggagctcggtgacaagatacttatggatgaagtggctccttatgccgtgacgcgcgaactactgtatgcctcaaccgacgtcggcgatgtcagttgggtgacaccgactgcgcagttttttgcaccctgtttcgctttcggtacaccgttgcacacatggcaactcgttgctcagggccggacttctctggcccataaaggcatgtgtctggcagccaaagttatggccgccaccgcgctgaccttattgcaggacgaggaagcgctggctcgctgtagagaagagttccatcgcgtgcgcagtaaacagccttatatctgccctattccggcggatgtgacaccatcaaagttgtcatcctga

SEQ ID NO: 391382 - DNA, 1521 bp, Salmonella enterica
atggaagttaccacggagaaccgcagccccgggaggctgtttagctggattgagcgtgcaggcaataaagtaccgaacccgttcttgctgtttgtctatttaatcgtggtattgatggtggcaactgccattatcaacggcctcgatctggaggtaaaaaatcccaccaacggcgagttggtacgggtcaacaacctgttgagcgtggccggaatccagtggattttgcccaacataataaagaatttcagcagctttacgccgctgggttcgattctggcactggtgattggtgccggtctggcagaaaaagtggggcttttgcaatcacttatggtgaagatggcatcacacgtgagccgtcgctacgccagttacatggtgttgttcatcgctttctttagccatatttcatccgatgcggcactggtggtcatgccccctcttggagcactgattttcctcgccgtgggccgtcatcccgtagccggtttgctggcggcaatcgcgggagtagcatccggttttaccgcaaacctgttgatcgtgaccacagacgtactactctctggtatcagcaccgaggcagcaaaagcggtgagtgatactgtacacgttagtgtaatcgataactggttctttatggccagttccgtcattgtgctgaccattgccggggcgctactcactgataagctcatcgagccacgtctgcccgcgtggaacggcggcaacaacgatcgtcttccgcctctgactgtactggagaatcggggtctgaaagcagccggtattgccgcactggtatttattgcgctgatggcattattggtagtgccagaacatgcgccactgcgtgacccgaaaaccggcggtatcatcccttcgccatttattcagggtatcgtgccagttattattctgttcttctttgtggtggcgattacctatggagcggtaaccagacagattcgtcgtgctgatgacatcccgcagttgttggtagacccaatgaaaaatatggcaggctttattgtgatggtgttcccgctgtcgcaatttgtggctttcttcaactggagcaacatgggaaaattcatggcaatcggtctgaccgatatgctggaaagtgcagggattagcggtgcgcctgccttcctcggcctgatgttcctctcagcgtttctgtgcatgtttatcgccagtggttcagccatctggtccattctcgcacctgtgttcgtgccaatgtttatgctgctgggcttccatcctgcctttgcccagatgattttccgtatcgctgactccgcagtattgcccctggctccaatgtcgccgtttctgccgctgttcctcggtttcttacagcgatacaaaaaaaatgcgcaacttggcacttattatgtgttgattttcccgtatcccgtggtgttcttcgtaagctggattgtactgttattggtgtggtacgcgcttggtttaccgattggcccgggtgtctatcccggcctgcactaa

SEQ ID NO: 391383 - DNA, 2436 bp, Salmonella enterica
  misc_feature (428)..(437): n is a, c, g, or t
gtggttggggagatgaaatatcaacttcgtcagaaatggctgaatatggatgtgtttaaaaaacttgtcagtaaaaaacagcggcgtgattataaaaaattcatctctctgttgcatcatcgtgaattaacgcctacctccatggagttcgattctgaacagaaaaaaagacgtctcgacttcaggaaaaaagtgctcaggacgtcacaccgcataaataagtctattcgtatggagcctgaaaatagacaaccacacagtacagagataacctctctgggcttattacgatttgcacaaaaatacttccataccagtattattgagcctgagcgcatctacaggattgagcaagaagctatcagcatagttaaatctgcaattattcaacaagttaaaaaagaggtaataacaatcatctctcagcnnnnnnnnnnccttgatgcagcgaatgatatattgagtcgttaccccggtaatttcgaagccattgaccaggccgacaaattacgtaacgaagctaagaatccatctaaagagatcgttgacaaaattgccagtgaactggcggaacagttttttagggaaagagagcaggattatattcccgttcttcggcagataatttccagtcatgcgaatttgcttccttttatgcaaacgtgggatgagcaagaagaacggatggtcgttcctcgttatgcgagttatatttcatccagcccagcattcaaccttttaattcaggatgttatcgtcggtgatcatgcttctgaacacaaagagccaatgatgcccaacagcgaactttctgttgaggattgtgcgagagtatccaaattaattgatgcgagtaaggatgtatcgggtataaatgcagatggtcaatatacaacggaggaattgtatattgaccagtatcgaaataaaacaagccagactaatgcctggattagcaaaaataaacgtctccgtcttaatcataaatatccgcatacaagagatattaagatattttccgacgagaatatttttcctgcacaaagtgaacgagcacaacaatcattcagtaaaacgctaaagaatagtacgagaaacagtctggaagatagtgaccgaactaaaattacaggagaaaccggaggaattcgtgttccaacaattgtatcgcatgcaaattctctgaacacaatgtctctacctaatggcatacaaaataatgttaatgcttcggtggatactggaaatgaaagagttaaagtaacgaattctcttgtagagaaccctctcactactgaaaaacttaaacctgaccttaactatttacaacctgtagagcatgagcgagagtccagagtggctcaatcagttactaccaatggcgcgttaagttatcacgctatttcatccacgtatgccattgacaaaaaagatgtaaaaaaattacaagacaaaccttactctccagctctgattaatgataaaaaaatgaaagagaatgttctaccgatgtctaaaccacaatcgtttcaatattttcaatatgataaatcaataactgaaaatgagattaagaaaaaatttgaagtggagaggaataaagcccaaacgcctaattttacttttgatggatatgttgagggtataaaccagaaatctatcaacgaaaaagcgttagttagagacgcgatacaaaaattaaatgcggaatatattgaatgggaacgggaagttaaaaataatagtatggtatctaacgatgcagtggagaccaaagcacattatcaatggaatgaacctgctcttggtaaagaagaggtccacatgaataaaattttgaatgacacacatcttttgaataaagtacataatactgtaaaattaaaatcggaaagtgaaaataacgaaacccactcccgttgggaaagcaaaataattagcgctaatacgctcacatcgcttcctgaagatatccgaagccgatataaagatggctttaattctgctataaaacatattgaagacagtgctaaagctattgttgaaacatcgcagtttgccactatcataaagcatgaggccgctctggttgatgcggttacattttcagataaaatgcaatctaaggactcaacagatactacggtcataaaagctaatagtgaaattcatgatgcagtcgatgcgaagcgaagtgaaatagaagaagaaagggctgaaaagcatgagaaggccttagacaaggccagggaagaagagaagaaaatagaggaagagaaggaaaaagaacagaaagagaaggatgcttataaggcgttaaaaaatgaggaagatgaggaaaaattgaagcggatgcaaaacatgaaagaaccgacacaggcagaaaaacgtgctgcagcactcaagcgttttgagcttgtaccggattctgtgtaa

SEQ ID NO: 391384 - DNA, 873 bp, Salmonella enterica
gtgagatatgactttatccgtgaaaatacagggatgttcagcgtccggcccctttgccgtgttatgcgggtgagtgcgtcagcttattatgcctggtgtaaaaaacctccggtctccggagcggatgacacggaaaaacgggtgcgcctgcgagcactgtttgccgccagtcggcagagtgcaggtagccggacactgaccagagggttatgtgaagaaggcatcaaaatcagccgttaccgggtaatgaaactgatgaaaaaagaaggtctggaatgtcagcaacgacgggcttataaggtcacgacgaagccgcgttccggggcggaggtggcaccgaatctgctgaaccagaactttaatccgccgggacctaatctggcgtggacaagcgacatcacctacttaaggacaggtgaaggctggatgtatctggcaacaatcatggatctgtactcacgacgtatcgtgggctggtatgtggataagcgaatgacatcagatctggtatgcagggcattgatgaaggcctacaacctgcgtaccccaccaaagggactggtggtacatacggacagaggttctcaatatacagggaaacgcttccagtctctgttggccagttacggaatgagaagcagcatgggagatgtgggagcctgctgggataatgcggcaatggaacggttctggggcagtctgaagcatgagtggctacttcgggtaccacagcccacaagggctggcatgaaacaggacgtggcggattatatccgctactacaatctggacagaggtcatacttcaaatggtggaatatctcccgtgcgatatgaacaggagtccttcagaaaagtgtccggtttagcttga

SEQ ID NO: 391385 - DNA, 279 bp, Salmonella enterica
gtgaacaagaaaagacaatttacagctgagtttaaaaaggaagccgttgccctggtgacagagcagaactatacggtagccagggccgcctcgtctctggggataagttctaaaacattgcatacctgggtaacccgggaacgtaacctgagtgaaggtgctctctgtgacgatgaacgagcagaactaaaaaggttacgcaaggaaaacaaagagttaaagatagaaaaggagatattaaaaaaggcgagtgccttcttcgcgaagcacatgtcgtga

SEQ ID NO: 391386 - DNA, 279 bp, Salmonella enterica
atgaaacgtcatttacactctctttctctcgtattattagcggcagccacactcaccgcctgtacaccaaaaaacagtctggaacgccatacccggcattatgtatatgcttcagatgacaggtctgatcctaatttttatacccggaaggcagacatcatccggatgatggtgccattcttccggcagttccgggtgatgtggttgaataaaccggacactaaacttacatccatagcggaggtgtttagtgaacaagaaaagacaatttacagctga

SEQ ID NO: 391387 - DNA, 942 bp, Salmonella enterica
atgtgtaacagtaaatatgttgttacaatcggttcggcaaatatagatattgccggatactcatataacgctttaaattatgcagactcaaatcccggaaaaataaaatttactcccggtggggttggaagaaatattgcacataatctggctttactggggaaaatttcatggttaatgacagccgtcggagatgatttctggggacagtcattactggagcaaacctgcaggtcaggagtccatactgataaatgtctgatcgtgtctgatgaaaatacttcgacctatttatcacttctcgataataccggtgaaatgctggttgccatcaatgatatgggcattactgaacgtatttctgcatcgtttctggtacagcataaagattttatctgtggtgctgacactattattgctgactgtaatctcagcggggagacgctggcatggatcctgaataactgcagtgatgttcccgtttttattgatcccgtttctgcatggaagtgtattaaaattcgcgggcagttagataaaattcataccctgaaacccaaccggttcgaagccgaaaccctgagtggtattacactctccgggcgaaacgatgtcagtaaggttgctgcgtggtttcatgagcatggtttaaggcgtcttgtgctcagtatgggggaggaaggcgtttattacagcgatatcagaggcgtaaatggctggtcgcgaccttttaaaacccgtgtaatcaatgttactggtgccggtgatgccatgatggccggacttgtttcctgccggatggatggcgcatcgttttatgattcggtccggtttgctcaggggtgctcatcaatggcacttacctgtgaatataccaataacccggatttatcagttgcaaatgtaaaatcattaatggagaacacagaatgtctgaattaa

SEQ ID NO: 391388 - DNA, 936 bp, Salmonella enterica
atgtctgaattaaatctgtcttcagaattattacaaatttcgccggaagtacaggaggctttgaacagtaaaaaaccggttgttgctctggagtccaccattatttctcacggcatgcctttcccgcagaatgcacaaacggcaactgaagttgaagaaacgatccgtaaacatgacgtagtcccggcaactattgccattattggcggagtaatgaaagtggggctgagtaaagacgagattgaattattaggccgggagggacataacgtcgctaaagtcagccgtcgtgatttgccttttgtgatggctgccggaaaaaacggtgcgaccacggtggcatccaccatgattattgcagcgctggctggtattaacgtttttgcgaccggtggtattggcggtgtacaccgtggcgcagaacatacatttgatatttctgccgatcttcaggaactggctcataccagtgtggctgttgtttgtgccggggcaaaatctattctcgatcttggattaaccacggaatatctggaaacctttggtgtaccgctcattggttaccggaccagtgtactgccggcatttttctgccggaccagcccgtttgacgtcagcattcgtctggacagtgcgaaagaaattgcccgtgcgatgaaggtgaagtggcaaaccggtctgaacggcggtctggttgttgccagtccgatccctgaacagtttgcgatggcggaagaggtcattaatgcggcgatcgaccaggccgtgaaggaagccggagaacagggtgtaaccggtaaagagagcacgccgttcctgctggctcgtgtggctgagctgacaggaggggacagcctgaagtccaacatccagctggtatttaacaatgccgtactggcctgcgagattgcgaaggagtatcagagcctcgcgtga

SEQ ID NO: 391389 - DNA, 1251 bp, Salmonella enterica
atgaatataatgagaagtattgcaggcatggtggtattactggtaattgcattcctgctgtccgtcaataaaaaacgtatcagtctgcgtacggttggcgcagccctggcactgcagatcgccctcggaggtatcatgttgtatttccccccgggtaaatggctgattgagcatgctgcactgggcgtacagaaaatcatgtcttacagtgacgcgggcagtgcttttatttttggttcgctggttggccccagaatggatgtgttgttcgacggagccggatttatttttgcctttcgtgtgctgccggccatcattttcgtgacggcgctgatcagcctgctctactacacaggagccatgggattgcttatccgtatcctgggggggatttttcagaaggcattaaatatcagtaagattgaatcgttcgtggcggtgacaacgatttttctcggacaaaacgagatcccggcgattgtgaagcctttcattaatcgtctgaaccgtaatgagttattcacggcgatctgtagcgggatggcgtcaattgcaggatcaatgatgattggttatgccggaatgggggtgccgattgactacctgctggctgcatcgttaatggccattcccggggggatcctctttgcccgcatactgagtccggcgacagaagaatcgaagatcacgtttgacaatctgtcgtttactgaaacaccaccaaaaagcttcattgaagcgacggcaaatggtgcgatgacaggtctgaaaatagcggttggcgtggccactgtcgtgatgtcgtttgtcgccattattgcattactcaatggtattatcggaggtataagtggtctgcttggtctcggtcatgcctcactggagggcattctgggcgacatttttgcgcctctggcctggattatgggtgtggactggaaggatgcgacactggcgggcagtctgattgggcagaaactggcgattaatgagtttgtcgcttacctgagttttgcacctcatttgcatacagacggaacgctgagtgtaaaaaccattgcaattatttcatttgccctgtgtggttttgctaactttggctccattggtgtggttgtgggggcattttctgctattgcgccacagcgggcgtctgaaatagcgcaactggggatgcgggcgcttgcggcggcgacgctctcaaatctgatgagtgccactgtcgccggattttttattggtctttcgtga

SEQ ID NO: 391390 - DNA, 1098 bp, Salmonella enterica
atgatgaacaacagggaaaagcagataattaaaatactgcgcagtaatccgttgatccagcaaaatgaaattgcagatattttaaaaataagtcgttcgcgtgttgccgcccatattatggatctgatgcgtaaaggaatgattaaggggaagggatatatcctcaccgaacaggaatactgtgtcatcgccggcgcagttaatctggatattcgcggtagtgctgagctccactatccggaaccggcttcaacccccggttgtatccactgctccgccggaggagtgggccggaatattgcacataatctggcgttgctgggacatgatgttcatttactctcagccattggcagtgatttttatggcaggacgttgctggaacatacccgtcaggcgggcgtgaatgtatccggttgtatctgcttaccgggtcataacacatccacctacctgtcagtcagcaatcaacaggagcctcctgtactggcaatcaacgatacacatattctccggcaacttacaccacagttactggatcattcacgggacttaatccgtcactctggtgtggtactgatcgactgtaatctgagcgacgagaccattgagtggattttcactgttgcaggggatattcctgtattcactgaccctgtttccgaattcaaggtcatgaaaataaaaccctggctctcccgcatccacaccctgaagcccacacaaaaagagctggaaattttatggggacatcctataacttcaactcagggctgtatccctgccatgaacagcctgcatcagtggggggtgacgcgaatttttgtttatctcgaaaacggcgctgttttttgcagcgaaaagggtggagagcagtttctgctttccccccctgcacatgccgtggtggacagttttggcgcagatgatggttttatggcagggttgttatacagttttctggaagggcacctttttcgggacagtgcgaattttgcgatggcctgcgcagcgttatcacgggccagcatcagtattaacaaccctgcactctcggtcgaaaacgtgcataatttgttaaaaacgatgccggcatga

SEQ ID NO: 391391 - DNA, 594 bp, Salmonella enterica
atgagtaaactgccttcccccgacatggtccgtcgcatcgaggacgcagcggcggccctcatcgcggccggcatcccgtacccgaccaacctccgggtgcgcgaccacctcggcggcggctccctggccaccatttccccggtgatgcgcgcgttccgcgcccggcagcgtgagcaggcccgagaggaaaccctcccgttaccgccggagctggcgcagctgctgaccggccagctgacgctgctgtggcaggcggccgtgaaacaggcggaaaacgataccctggccgcccgtgagcaggccgacgccgacactgaacaggccgatctcgagcgcgacgccgcgctggcccgggtgacagagctggaaagtgaactggcggtgctgcgggagattcaggctgagcgtgaccgcctgctgcagcaggagcaggggctgcgggagcacacaatgtcgctgcgcgaggaggtggtgcgccagcagacccggaatgagtacctggccacacagttgcaggagagccgggaggaagtgaaaaccctgcgggccagcgaaaaggcgctgcagcaggcgctgctggcacgggcgcagtaa

SEQ ID NO: 391392 - DNA, 222 bp, Salmonella enterica
atgctcgcctgtatttccggaccgcttttgcctgttccctccagcggcgagtataccggtaatccgatcgttatcttgaatgccatgatggttatggcgccaaatatccgctggcattcctgtcagaatggactggcgaccgataactatgacatctgcaagtcggtggcgaaagaaaacgaccgtatcataaatacaggatgctggagccaggttatataa

SEQ ID NO: 391393 - DNA, 852 bp, Salmonella enterica
atggtggtgaaaaatacatggcagcgcattctgcccggaaggataaaaaaccggacgtcacccacaggggcgggaaagaaaaacgtacagggtacttccggcggcaacacggaagagggttcagattcaccgctggttattcatggcgatagctggccgttcgtggaaggactttgtcatctgggaaaagcaggccttccgggccggcagatatatgccagtcatacagttgccggactgtttatgctgttatctgaacacccggatgccgcgctggtgatgtgtctcagacccagggagcatctctttttgttttacgcattatcggattaccttcgccactcaccggcaacggtagtctgtgacgccctgtacttaaccgattatattgtgatggaaatgtggaactgtgtcccggtatgcgcgccgccccggcacctgtttccggaagaagaagggataccggaagaaggggaacgttttctgatgtcactggtcacccgcaggcagggtgtaagccgggcggcaccgttatcaggcatttttcacgacggaaaccattttgtggaaaccatgaatcagtttcttcaggagtatatcgcccgtaaaggggtgagcgtgtttcagcgcagaatactggaggcactgctggagggaaaaagcgcgtccgtaatagcagcagacatggagaccagtcaggggaggatagaaaaccacaagacaatggtattcagccggctgggagtcccctgttttcctcatgccctgttgtacggaatgaaatatcatttaagcctgcaacgagatttatttacagaaagcggcggattcaagtccgaagtgcaacgctaa

SEQ ID NO: 391394 - DNA, 477 bp, Salmonella enterica
atgacatccggaaaattacctgacaaaataaggcatgctgacagcgatgttctgaacccgcatcagcgtaaccacgatacctgcactgtcccccctgaggtgcgtcaccatacaggcgagcccctgtacattcttgtggcgtactggtgtatacagcagcagacctgggtgagccgaaaccagatatcagaagcgtttcgcatcacagcccgcagagccagctatattgtgacctatatgcgtgtaaaaacagccagggtggtctgtgaaacccgccggattatgctggctaaccatgtataccgttacgaaattctggtgaccgatgtgaagcccctgacacaaaggccacgcacgtcacacacaaagcaggacactccacggtcagcccggaggattggaaatgctgacagtacacggtgcaatgctatctggaacgcattgcgtgcctcccggaaaacagagacaggggagtga

SEQ ID NO: 391395 - DNA, 1140 bp, Salmonella enterica
atgatgaacaccactaatacaatttcacgccggtggcggaaaaacggtaccgcgcattacctgctgctgctgataccggcactttatactcctgtcatcatggctgcaacggacaccagtttcgggtgcggcatcagcgacccgactcacggaggaagcgtgaatttctctctcccgactcctgtcgtgtttcagcagggttcgcttccgcctgtcgggcaggttctgtattcccatcatttcccgacacagtcatacatatgccatgccagaggtactaaccccctgggctttcaggccagcctggccgccacaatctcaggtgactattttaaccagctgcagaccattctggccagggccggccttgcactgcgcttcaggatttattcagccggcacgggggacggagtgtggatacccgataacagaacaaatcagttttaccctgtaagccgtgtttacggtaaaaccacctcggacctcagcaccggaaatcagagttttgatatgacggcggagctgtatgtaaaagaaagaattacccgccccctgaaaatcaacctgcccgcgtctcccgccggtgccataaggctggtatggaaaaaagggggagatgatgaacgttaccctaatatcaagtttaactcttcagcagcagatttgtggtatctgccgacatgcataggaaaggtcaccatacctcaacaggtcaggtttaaccgtatttataccggggcggataaatatgcaggaacactcccgcagggaaagacttttgtcataaaggcgcagtacaacaccgcctgtggttatccggacatgagcaccgggtatgacgacctgaatctgaatctcgccattaaattcacccctgagagtccggggagagtcgataataaatatatttatctgaaaaacgatgacggggaggaaaacggccttcgcttaagaataaggaatatcaattcatcaacggacgctgtttttaacacatacagtaaccttatccctttaagaagcacctcaggcgtgtcctcgaatatgttttctgccgaactggagaaaaatccttcagccggcaccataaagacagggagtttcactcagcgggtgaaagtaaacattgattactactga

SEQ ID NO: 391396 - DNA, 744 bp, Salmonella enterica
gtgaatatccgccctgtcaccacgctgatttcagccctgttgttgtgggtgccggtcacgcatgcggccataaacgttgaccggacgcgcatcattatggacagcagggtgaagtccctgtccattgagctgtccaatgaaagtacaacgctgccttaccttgcccaggcctgggtggagaatgcacagggaaagcgcagtaatcagattatcgccctgccacctcttcagcgtattgatgccggacagaaatcccaggtacgcatcatgcaggtcaaaggcagcggcattgagcatctgccacaggaccgggaaactctgttttattttaaagtccaggaaattccgcccagaccggaagacaccggagtcaacattctgcaactggcgcagcaaagcaggctgaaactgttttaccggccgacagccatctcaaaaccgtttggtgatacctcagaaaggcgactcgttgtgctcactcacggcgggcatgtgacgctgaaaaatccgacaccgtattacatcagcgttatctggatgggcctgacggcagtcaggagcctgaaaggcttcagccaggataccatggtaccgccgtattcagacctgccgctgaacgccattcttccggcagacgctgacggtctcctggtggggtatatcgatgattatggcggcatgaaacttaaccattaccgctgccagagcgggcagtgcacgatacagaataatacaaacgggtaa

SEQ ID NO: 391397 - DNA, 2469 bp, Salmonella enterica
atgaagctgacccgactggcattatcaatatccctctgcacctttgtgttgtctgctcaggcaacagaattcagtgccgggttccttgaagggggaggtaatgttgacctttctgcattcagtaatgatggttatattatgccgggaaattacctgctggatatctaccttaatgacaggctggttcgtaaccgttacctgatatctgccctgcccgacgggaagtcccgtaccgttttttgtattactccggaactcgttgatatgctggggctgaaaaaaaacgttctcgccggactgaaaagtatccccggggccgatgacggtcactgtatggatttaagaacccgggaaagcgctgttaaatacagctctgcccgtcagagcctgacaatcacgttgccccaggcatggatggtttaccaggatccggactgggttcccccttcacgatggagtgagggcgttaacggggctgtgctggattataatcttctcgccagccgttatatgccacaccagggaaattcctccagtaactacagcctttacgggaccgcaggtatcaacctcggtccctggcggttacggagtgactatcagtacaaccgtacagacaacagtaacgggaaaagccactccgatttcttcctcccccagacctatctgttccgggcgcttcctcagtggcgttcaaaactgacgctggggcaaagttacctgaactctgcaatttttgatgcctttcggtttaccggtgtggcgctggccagtgatgaccggatgttgccgccctcccttcagggctatgctcctcagataaccggcattgcttcaggaaatgcggaggtcactgtcagccaggccgggcgtgttctctatcagacccgggtgtctcccggcccctttgtcctgccgaacctgagccagaatatcagcggtaaccttgacgtgacggtacgggaaagcgacgggtcaacacggacctggcaggttaatactgccagcgtcccgtttatgacccgtaaggggaatatccgttacaagattgccgccggacgccccatttatgatggcgggcgacacagtactgaccccgattttctccaggctgaagccacatggggggctctgaataacacctccctctacggaggcgtcattgcttccgctcagcattaccagtcggttgccctgggggccgggcagaacctgggggaactgggggcgctttccgtggatgtcacccgttctgacgcccgcctgcctttcctgcgggcacaacaccagaccggttacagttaccggattaactatgccaaaacgtttgacagtatcggaagtacgctggcctttgtggggtaccgtttttcagatcgccattttatgtccctgccggagtttatcacccgctcccgggaaaacggacggtatgagcgggatgaaaaacagagctacaccgtcagttacagccagtatttttcagacccgggtttcagtgcctctctgtccatgagccgtctgagttactggaactcagatcccagtgacaactggaccctgtcgctgagtaaatccttcgatatcggttcgttccgcggtctcagcgccgccctgtcgctgtcccgtaatcagtaccagtaccgtacacagaatcaggtatatgcgtctgtcaccgttcccttcggcgaagggcggcaggtcagctacagtctgcgccacgataaccagggagccacgcaacataacatcagttacctcgatttcagtcatccggataccgcctgggggctcagtgctgcgtcacggaatcagggggagggacagagcctgagtggaaatatcaacaccgttaccccacggggtaatgcctcagcagactttacccttcagcccggacagtacagcagccttggtctgaactggtacggctcgctgaccgccactgcgcatggtgttgccctggggcagtcggtggccggtaatgagccccgtatgatggtcgatacggacgggattgccggtattcctgtcagtaacggcagtggtgtgaccaaccgttacggtattgccgtggtcagtgccggggccagctatctgcagagcgatgtgtccgttgatgtggcctcccttccggaagatgtagatgtcagcggttcggtggtaaatcaggttctgacggagggtgccataggttatgtccggttttctgcccgccgtggggaacaggtgctggggctcctgcgtcttcctgacggaaaatcacctccgctgggcgcgatggtcacatctgcccacagcgggaaaacgctggggatggtgggggattccggccgggtttacctgaccggtgtcagtgatgaagaccaccgtctcatcgtgtcctgggacactaaaaaacagtgccatctgatgttgccggaaacactgacaatgagtgacggtccgctgctgctgccctgtaagtga

SEQ ID NO: 391398 - DNA, 606 bp, Salmonella enterica
atgatcagaaaaacgctcattgccgtaacaaccattgcagccattatgggatctgcagcagcctttgctgcagatggtactgctcctgcagcaacgacaggtaaatttggcggtggcactatttcatttacaggatctgtaactgaagcaccatgctcaattccacccacagatgttaaccagagtattttcctgggtaatgtttccaataaagaactgtcctcttcagcttcaaaaggaagtgatcctgttgccattaaaattaatcttaaaaattgtgatttagggacgtctcctgtttatacaaaagcgtcacttaaattcctggacgatggtaaattatcctcaacaggtaaaaataaggggttgctgaatactacaggttccaaggatgttgccgttcagttacttgatgcctcagggcataatcccattgattttacgagcgacacgtcaatgaggccgggtacagaagttgctgttgctactggtgtggagccaacgattactttcatggctcatattgttggtacatcagggacagccacgacaccgccagccgggaacatttcagctcaggtcgcatatcagctggattaccactga

SEQ ID NO: 391399 - DNA, 315 bp, Salmonella enterica
atggttattatattagcatccgggtgtgtgaaagtcaccagaaacaatatgaataatcatattaatatttattatcatttatcaaatcattcttatttcagattctgcccgttgcgtattctggtgaagatgaacgtagcgcccttacacgggttctacgccggaaccgccgaaatttccgacctaccatttttagtgatctttcggaacctcaataacgccatccgcaataccctgagccagtcgttccatccatttcgcaaaacgaaaatatccaggatattgctggcagatgtagtccatctgcacctttga

SEQ ID NO: 391400 - DNA, 813 bp, Salmonella enterica
atgcattgcatgggcgaagagtgcagcgagcaactggaatttatccccgccgtcctcaaagtggtgcgtcatgttcgtccaaaatacagttgccgccactgtgagcagcaggagacggaggtcaatatccggatagcccctccgccagccacactgttaccacgcagtattgctacccccagtctgctggcctggataattaccagcaagttccagttcagcctgccgctttatcgtcagcagaagtggttcagtcagctcgatattgagcttagccgccagaccatgagcaactggatactgaaatgtgctgaacgactggttccgttgtatgatctgctgcaccaggaactgcttacccgtgaggttatctggagtgacgacaccactatgaaagtggtcgaagctcaacggtcaaaatgccacatgtgggtctacggttgtggtggagacagcccggttcctggtcagcctcccggtatcgtgctgtatgactaccaggacagccgggaagaaacctgccctgtagagttcctgcgtgggtatgaaggctacctgcaggcagacggctatgccggttacacgaaaacaacggcggaggttgtggggtgtctggcgcatgcccgccgtaagttcatggaggcgaaagtcgcccagcctgaaggaaaggtcggccgtgcagaccaggcactgacgtatatccagaaactttaccgtattgagcgggagctggcgggacaaccagctgatgtcatcgcggcaaagcgacaggaactgtccgtcccgctgctgtgtcaacgccaagatttttga

SEQ ID NO: 391401 - DNA, 1155 bp, Salmonella enterica
atggcgctttgtacacgacatgtaccagccagagaaatcgccaggaacattggcatcagccgcacggtattgtacaaatggaaagatgaaatcatcggtgatgaggcttaccagtccatgcgcaaacatgaaaagccgtctcttacggaggagcgcaacgcgctgcgcgaggaagtgaaccgacttaatcaggagatacttcgacagcagatggagcttgatatcctgaaaaaagcggaggaaatcataaaaaaagatccgggcatcagcgtcagcactctgaccaacagggaaaagacacagatcgctgatgtcctgagaggctcgtatccgttgaaagagctgctgcaggtccttgtacttgcacggagcagctttttttaccatcgggcagcactgcgctcgggagataaatacgcgactatacgtatcgcaatgacagagatcttcaacgataactatcgttgttatggctatcgccgtctgcacgctatgctacggcataaaggtcagcgactctctgagaaggttgtacgcagacttatggtggaggaacagcttgtggtcagtcgaaaccgccggcgccactacagctcgtactgcggagaaatcagcccggcacctgacaatcttctcgccagagactttaacgcggaacagcctaatcaaaaatggctgacagatatcacggagttccagctaccgtcaggcaaagtatggttgtcacctgtaatcgactgcttcgatggtaaagttgtgagctggtcgctgggcacacgcccggatgcagaactggcgaataccatgctggaaggtgcaatcagcacattaaccgcaggcgaacaaccaataatccatagcgatcgaggcggacattaccgctggtcgggctggcttgaacgtgtgaatgctgccggtcttatccgttcgatgtcccgtaaaggctgttcaccggataatgcggcctgtgaaggtttttttggtcgcctgaaaacggaaatgtactatggtcgtgaatggtcaggtgtaacgctggagaacttcatgctacatgtggatacttacatacgatggtataacgaacatcgtatcaagctgtcgctgggagcactcagcccagaaatgtaccgtcggcaactcggcattgcgcaataa

SEQ ID NO: 391402 - DNA, 399 bp, Salmonella enterica
atgcgaatcagtgatcgatctcatgcgaatatgcatttaccgaagcagaacggctccgcgcaattgaactttactttaaatacggcagaaaactggctcccgtggttcgtgaactgggttatccttctaaaagaaatctgcgacgctggatccgtttatgggaagcgagtgacggggctacaaaagccatacgccgtaagcctcgttactctgatatgcaaaaacaggctgctgttgaacattatcttaaccatggttgttgcctggcgtttaccagcagaactcttggttatccctgctgtgatgtactggctcgctgggttaatgaacgtcatcccgacagacggtttattttcaccagtacgaacaatcaaaatgcaccttttgagcctgaggtga

SEQ ID NO: 391403 - DNA, 498 bp, Salmonella enterica
atgcgtgagcttctgagtggcacttatcttgcgcataagaagaatatcctgataacaggtccgacaggatgcggaaaaagctggatcgccagcgcgctgggagaacaggcctgtcgacagaaacacagcgtccagttctggcggatggcgcggttactggaaacgctggcccagggtcatcatgacggaagctggctgaagacgctgaagcagttacaaaaaaccaggttgttaatcctggacgatctggggctggagttactgacaacgaggcagtgtaacgacctgctggaaatactggaagatcgttacggtcagaacagcacgatagtgataagccagttgccggtagagcagtggtacggactgatggaaaacccgaccacagcagacgctatcctggatcgtctaatccataatgcccacagactggaactgaagggagagtcgatgagaaaaatggaggtgggtctggaaagcgccaaaataatgcagtaa

SEQ ID NO: 391404 - DNA, 201 bp, Salmonella enterica
atgaacgatgaactgctcaataaactgcgattactgaaacttccgggcatggccgaagggctgctcagacaacgggaaatgccccactcttacgatgagctggggttcgaggaaagactgggtcttctggcagaagacgaacttctgaagcgggaaaataccagagtggcccgactgaggaaaaatgccagtctcaggtaa

SEQ ID NO: 391405 - DNA, 1551 bp, Salmonella enterica
atggctaaaaagaaagggctcaggaattccatgaaaacctgtcagaaaatacttcaacttaaatttaatcatcaccgaaccaacagagacatcgctcttgccgttggactcagcccctcgaccatccatgatgttctgttgcgtttttctgcttcgggtaatagctggccattacccgaagggatctgcattgatgaactggagaaaatcctctttcctgcccggaaacaggcaggagcactgttcattcagccagactggctgcatgtcgatactgaaatgcgtcgtccgggtgtcacccgccagttactgtggatcgaatacaaggaaagtgccggaaaacaggctatgagttactcacagttctgtcgggttctcaaagactggcgaaaaaaacagcgtcgctcaatgcgtcaggttcataaggcaggtgaaaaactcttcatcgacttctgtggcccaacggttcctcttgtggatcctgataccggagaaatacgcagggccgccatcttcgtggctgttatgggggcgtccaactacacctatgtcgaggcctgtgaaggccaggatatgatgtcctggctgaatgctaacagtcgctgcctcaccttcctgggcggtgttcctgagttactcatccctgacaacctcaggagcgcggtgaaaaaggcggatcgatatgaaccagaaattaacgcgagctatcaggcgcttgccgagcacttcggtaccgttatcctgcccgcaaggccgcgaaaaccgaaggacaaaccgaaagcagaaaacggtgtgctcatcgtggagagatggcttctggcacgtatccgtaatgaaactttttatacattccggagcctgaaccagcgcctgcatgagctgctgaatgatctgaataaccgccccatgaaaggatacggtgggcagacaagggcagaacgctttacaatgcttgatgccccggcattatctccgctccctctgacaccttatgagtatacggaatacagggcggttaaagtcgcccctgattaccatgttgaatattgccatcactggtactccgtcccccatgagctggttggcgaacgacttgaactaaaagccggtcagacgctggtccagatctggcacaaagggaaatgcgtggcgcaacacccgcgcagccataaaccctacagccacaccacccatccggcacatatgcccgccagtcacagggagcataaagggtggacaccggaacgcctgctgaataacgctctccgcacaggcccgtacacccataaagtggtctcagtcatgctgaaaagtaagcctcatcctgagcaaacctaccgtgccgtcctggggttactcagcctgcagcggaaatatggtgcggaaaggctggaaatggcctgcaggaaagcctgtcaactggaaaaaccagagcgccggctcattgaaaacctgctgcgctataaacgcgaagctccggataatgatgataaccagataaccctgccattggagcatgaaaatctccgcgggccgggttactaccactga

SEQ ID NO: 391406 - DNA, 357 bp, Salmonella enterica
gtgagtattgacattgatcctgaaaatattcctgaaaatgttgagctgttgaatacttcatacgatgtggtaccaacagataaagcaattatttatcgtgagtttgctcatgagacggtgttgcgatatatcctgcgtctcaaagacagcagcggaaatattattactggtggtaatgctgcgacggagcaaggaattaatgcaggctttatttccagtaatggcgtattgctcatgaatctccttgctgcacctgaaaaagtgacggtcaaacaggttgatgggcaaatatgcagttttaatggcggtattattaaagaaaacactggtaaaattcaggaggttcgttgtgagtag

SEQ ID NO: 391407 - DNA, 705 bp, Salmonella enterica
gtgagtagcatgagtattataaagaattttatttttcctgtcctgttaacggttactatggctgtacctgcgcaggctgcctttagtctcagtggaaccaggtttatctatgaggaaggaaaaaaaagcacttcttttgaagtaactaataacagtcaggatacatatggtgggcaagtatggattgagaatgtatcccagaatacatcagatgtttttatggttccttcaccgccattttttaaaatagacggggagagcaaacagatagtccgtctgatgaatgttaatgatgaacttccaaaagacagggagtctttattcatgctcaatgtgcaggaaattcctccaaaaccaaaagatgatgacggaaatgttcttgccatcgcaatgaataccaaagtaaaactgatttatcgtccgaaggcacttacacagtcgagaaaggatgcagaaaagcaactcactctggtcaatcgtgatggcagtatgtggataaaaaaccccacaccttattattttgcggtgattgctgttaagagtcatgaaagaactgtaaaactgtctgatgatgtaatgaagtcagttggacagtttgcaccgaactcagagattaacctcaggataccttctctcacaggtgaagtcagtgtggatgcaatcaatgactggggcggggtggttaattatgtggtcacgaattaa

SEQ ID NO: 391408 - DNA, 519 bp, Salmonella enterica
atgactggggcggggtggttaattatgtggtcacgaattaagtattcaataatatcattattattacttattctttttccgtgtgttgcaactgcagcattgacggatactgcaactatatcaattgaagcaacatttactgctcctcagtgtactttaaatgttccgaagagtgttaatttaggcaatattaaaccgggtacgattacatataattcttttataattaaagttgattgtccgggaggcgctcaacgtggggttatttatgctcaggcagcaaaactggtcagtggcagttctgacgtggctcagatgacaggagacgtcaatggacaattgatgttgctggacaaggcttataccaagatttctttaactggtatagcggggacaccgttttgtgacggcaccgcgacaagagaatgtgagctttttccccgaacgtggtttaacaacaaaccgactaatggtggaagtacttcagtaatcattaattttacgctgacacagccataa

SEQ ID NO: 391409 - DNA, 1101 bp, Salmonella enterica
atgaatttaatcgatcttcacctgtggcagaaagcgtataactggctgtgcatgtccagaataaagtctggccacaatgcagatatatgggatctgagatttaaatggccgcatgaaggaaacttgatattttttcagattaatgctggcgtatatcaactttcaccaatgagaattattcattctcgttacggggaggctgtagcgcaatggtctgcccgggatgcactggtactgaagtgggtcgccctgaaaataaaaggacggttgccggttcaggacgtgtgtgctcacgtagccggacagcgaggtggcagaacatctttagcaatgacggcgcaggctatttctggaggtgcacgatatgtatacagaacagacatccgtgggtactaccgaaacattaacaaaagtcagcttttaaatcatttataccgatttattcatgagccggcattacggtccctgttatatcaatatgtgcattattgtgtggatgacgggggcgaaatacatatccctgccagtggaataagcaggggatgtgctttaagtccgctgatcggagcaagtcttctgtggtatatggatgtgtcattttccgaacgaaacgatattttctactcgaggtatatggatgactttttatttttatcggcacgccgctggcctgtgcgcagggctcaaaagcagttatatgaattttttgattcaacgggatttgaatgccatccggataaaacccaaatcggtaaaatttcccggggctttgactggctgggcatctggtttaccagtgacggggccaccggaatagcccccagagcaacagaaaaccatcgtcttcgcaggctgcggcttgaggagcaagcccgccgttccggacggagtcgtcaggaaacagaaatgcgggtgcagatgtatgagagacgatggaatatatgggcagaaagccagctttctgccgcgaacgaaaaaaagaacagcttgaataacacaacggactacgccaatgatgctgacttacacccgaaattcacacgtgtggtttttccctctagttgtgctcgcttgcggtgtgaccgcaaacgctgcgtttag

SEQ ID NO: 391410 - DNA, 900 bp, Salmonella enterica
atgcatagcggggtatactctacttcaaccgtaaatcttactcgatggcctgccaacggtggagggctccgcgcgacgggcaccataaaaactaacctatcttcgccagtgtacgggcatatggctggcgtcactgacttacgcccatacggcacgatgacacgaacagaaatgatgtcgctgctggaccatttacccaataatggggagatggtcgtaaatattaatctggccgattccgtgaacataaacacctcgttgacaaactatgccagaactgatctacatcgactattacgcgacggtcaggctccgattagatgggattacgtgacccctcttgctgcctcgtccgcctattatctgcacgcgtctgcaaacatgaatgcgcctaatgacatgactgtaaacgatcctcagttatgtttgaaactagccaatgtgtatggaaatggtccatctttaaaatctatttggtacgaaaaccctaatacaactgtatccatccgccatcctcttaactcaacaagtgacacctttccataccattggcggtttttattttcgtataaatttaagcaatcactgggattgcgcactcttcctaaacaattaaactttggtgccaatccggctggaaacacggtaaaaagggatgtatcaataggcttgtcatcttctattcagtcacgcgtacaatatacattctcgtacactagcatttccaaaacaagggaagaggtacttattgatgggcggaggttacccgtgcaatttgctgtatcgttacctgcatccaatagtaacagctttactgattttaaacatcaggtctctttgacatcgccagatcctggaaaggttgacgggaacattcttgttgttgctgaaatattataa

SEQ ID NO: 391411 - DNA, 624 bp, Salmonella enterica
atgaaatctgttctggccattggtgctcatccggatgatatcgaactggggtgcggagccgttctctctcgacatattgcggagggcgataatgttattgctgtaatcatgacggctggtgaagccgggggggatggattattttgtcgtctggatgagacccggcgcgcactggctcatctggggattaataatgttatgtgttttaatttcggtgatacttttctgggtggatatattcccaatatgatccgtaacctggaagacgttattaaccattcattatctgatggcacactggaacgggtatacaccatgtgtgacagcgaccggcatcaggatcatcgtgccatattcgaggccagtattgttgcctgtcgggctgtcagccaaattttatgttatgaaacacccagtgcggttactacgttttgccccaacttttacataaatattacaccgcaggaactcagtttaaaaaaccttgcgttgaaagaacaccatagccaacagcgccgtgattatatgcaaccagaatacgtcagttcagtagcccgtttccggggtttgcaggcggggtgtgaactcagtgaggctttcgaaatttataaaatggtgacataa

SEQ ID NO: 391412 - DNA, 1146 bp, Salmonella enterica
atgaaaaccctgttttttttgttgatgagtctggccgttgttgtccgtgccatcatcatgctgcgacacaaaccgagtcagaatttcgcgagcattgatgcagtggttcctgcttttaatgaagggccgtgcctggagaattccctgacctgtttattacagaatccatacattcatcgggttatttgtgttaacgatggctccacagataacacagcagaaatcctggaatccatgaaagtgaactggccggaaaagctgattgtatgccaccagaaaaataccggcaagggtggcgctctgatggctggcgtcaggttatcaaccgctgctcaggtctttctctctgatgcagatacttatgtccctcccgacagtcgggggctcggttatatgctggctgaaattgaaaaaggcgctgatgcggtgggcggtattccctccactgatttacgtggtgccggattgctgccacatattcgtgcaacggtcaaaatgccaatgattattatgaagcgcacgcttcaacagattgttggtggtgcgccattcatcatcagtggtgcctgcgggttattccggacgaaagtgctccttgataacccattttctgatcgcacccgcgtggaagatttagatttaacctggtctctggtttcaaaaggttaccgtatacgccagtgtaatcagtgcatcgtctatccacaggaatgcaacaccctgagagaagagtggaaacgctggcgtcgctggattgccggttacgctgtatgcatgtgcctccataaacgcctgcttttcagtcggttcgggttttttagtattctgcccatgctgtgggttgtgttactggggatcacgacgtactccgtatcatggggagcggcagctctgaccggaaatataacagaattactgtataccgtatttcccgttatctgggttgctgttgtcagctgtattgcgatattcagtgccgtttatcaccgggctccgcttttaatactgctggcccccttttctgtcttttatgttcttcttgcttacacaatatggataactcatggaattacaccattctttaccggacgtgaaccctcacgagacaaacccacccgtcttgttcgcatggtggaaagcacttga

SEQ ID NO: 391413 - DNA, 663 bp, Salmonella enterica
gtgaaccctcacgagacaaacccacccgtcttgttcgcatggtggaaagcacttgaacgactgccggaagatgttcggtataccgaacatcttccggggaccggactccggtccccggggattgatattgctgccagtgccgtgattgacgagacggatggcccggtcaggatcggacaaggtacgcgtatatgccatggtgcagttctgaaaggaccgctgattgtaggccgggattgcctgattggtaatcactctttcctccgcggagcctgtattttaggcaatgcggtgaagattggattcgggaccgaggttaaaaatgcacgaattgaatcaggtgccactattgggccgcagtgcttcattgcagacagcattgtatcacgtgatgcctatctgggggctatggtgcgcacgagtaaccaccggctggacggtaaaacagtcagcgtcatacataacaatgtacttgttgataccggcagagaaaaactcgggtgtttcattggcgagagggcctgtttaggtgtgcaggtaattattcttccgggtagggttgtggctccggaaacacgtctggcgcccagaattactgttgagagaaatctgcccagcgggtattaccggttgcgccaggaaatcatacaaaaagaaatttaa

SEQ ID NO: 391414 - DNA, 780 bp, Salmonella enterica
atgaaaaaaatattaacgctaccaggacttgtattgctggctattcctgttgcaggcatggcaacagaaagtctttcggttggttatgactacactaactatagcgctgaccatggagtcaaaaatattgtatttgcggatttaaaacacaaactggaccatggcgcgatagtactgggcatctctcagggtaaccgtgactatggcaatggtgaggattttgatggtacacgtggcagggcttctctctggtatgactggacaccggtattatcgacccgtactggcatcagcctgggtactaacagtcccgtatttgttcgcagggaactcctgaatgattttaatctgaaactggtaaaaaataccgtgctgacattaggggggcgccatgcgcaatattataataatacggaggtcaacgcctggtcagcgggcggggcattttataccggcccgctgattactacctaccgttacacccgatatgacaccgtgggtgcaggtaacagtgaaagccacctgctgagcatcaggctcagggatatgcagggcaacggatatacccagatttttgccagtaccggaacgggagcctatacctatgactggaccccggagacgcggaacgggaagttacatagcctgagcctcaagcgtttacaaccttttactgaagaggtcagtctggtaatggtattcggaaagcaatggtttgatactccggttaaaagttattccgggataaatggtatgctcggtatagaatggggaatatag

SEQ ID NO: 391415 - DNA, 225 bp, Salmonella enterica
atggcggaactgaatgtgatccagttattgcttaaaggatattcaataagccagatagctacgctccgtcgtcggagcgtaaagacaatatctgtgcagaagaaaaatgctttcagacgcctgaatgtcagtaatgatgcctcgttgttgtctgtattgttgcttcggggtatagtattaatatatactgatccaaaaaaaactttccacgtggtgtcaggataa

SEQ ID NO: 391416 - DNA, 291 bp, Salmonella enterica
atgaacaatagtacattcagaacatcaaaaaacatactatttccaggctcagtacccgcagagcaattctatttattaattgacatttccccccttcgcagtaacaaagttataaaggctttacataattactttgttctgggtcataccaggaatgatgtatgtgaagaatttcaggtgaatccaggttatctctcaataaaaataagagagatccaattactatgtcgaaaacttctggatatgtatccttattttatcagccccagactatctgatgctggtcaataa

SEQ ID NO: 391417 - DNA, 843 bp, Salmonella enterica
atgcaacaggtgatttgtaaatatattctgaaatgggtggaagataatctgacttcagatctgaatgtttcagacatggcggtatcgactggttacagccgcaggaccttagaaatatggttttcagaacaatacggaatgtccccaggaaagtatctgaaccgcaggcgaatgaccagagcagcagtattactcaaacttacacgcctgccgatcactgaaattgccatgcttctgcatcacagtagtaatcagaattttgccagagctttccggcatttttccggggtcacaccgacaaattatcgcaacagtaacgagtgggatttatcaggattacaggcttcatttttttacgctaaagaaattagttttaatgtgacaacatgtacattacctgaacaatatatcacaggagtgtcttactcttgcgcggattcatatctttataatacaaataatttactgactgattatatccaaaaggaagttataagactgataaaatcaggcacgacgaatatttatcttatcggggaaactattctccctcaaaatatcaaagagagccgggtagggcaactagttgctacagtgactgtaggtacgctggttaatgtcagttcagaagacacagcaattatgactagtggaaagttttgtcgatattctttctcatgtaaatgggaggaatattatactaatacaaatatgatgttcatccgtataatgtctgaaaataaatttatttatactggtggtaactgttatgtacattttacaggtaagccagaacaaattgataaaaaaatcaactgcgaggtgtttatccctatacagtag

SEQ ID NO: 391418 - DNA, 726 bp, Salmonella enterica
gtggccattgattacctggctgccctcgcactgcgccagatggcaatgcagcatgacgactacccgaaatatctgctggcaccggaggtgagtgccctgctccactacgtcccggatctgcaccgcaggatgctgctggccactctctggaataccggcgcacggattaacgaagcgctggccctgacacggggagacttttcgctggcgccaccttatccgtttgtgcagctagccacccagaaacagcgggcggaaaaggcggccagaacggcaggacgaatgccgtccggcagccagccccaccgcttggtgccgctgtcagataaccagtatgtcagtgagctgcagatgatggtggccacgctgaaaatcccgctggagcgtcgtaacagacgtaccggcagaacggaaaaggcacgcctctgggagatcaccgaccggacggtccgtacctggattggggaggcggttgaggccgcagcggctgacggcgtgacgttctcagtgccggtgacaccccatacgtttcgccactcctatgcgatgcacatgctgtacgccggcataccgctgaaggtgctgcagagtctgatgggacataaatcagtgagctcgacggaagtgtacacgaaggtgtttgcgcttgatgttgccgcacggcaccgggtgcagtttcagatgccgggtgctgatgctgtggctatgctgaaaggcacagcctga

SEQ ID NO: 391419 - DNA, 165 bp, Salmonella enterica
atggcaaataataatacgccagatagtaaaaaaaatacgcctcagagagttatggtccatgatggcctagatacgtcaacagcaaaaatgatgctaaatagcataaaaaaagaacaggaaagtcaagcgaaagtatctaactcaaataaagaaggtaaaaaatga

SEQ ID NO: 391420 - DNA, 318 bp, Salmonella enterica
atgaaaaatgcaaatattttagcgatgaaaaaagaccttgaacagattcttggtattgaggtatggagtccgaccgaggtacaattaaacagcatatggagtaaactagctactctgccaagtaatgcaaatgaaaacgacatactaaaagtcgtcagttcggtttaccacaaaccgttaattgtctcttgtatggaaggcttggatacatcagttgccaagatggcattattcaaaataaaagaaatgcaagacaacataaaggcagtagaaaaacaaaatgcaacaaagaataactcaacagcaggaaaaggttaa

SEQ ID NO: 391421 - DNA, 774 bp, Salmonella enterica
atgcaacaaagaataactcaacagcaggaaaaggttaatgctctatatgaaaaatattgccaagaccttaataattatgaggaaacaaaaaatctaaatgatgctgataaatcaatgaagcaactatgtaattatctagagcaatgttgcgcaatgaataactccgatgagctactgaaaaatagctcatggaatcaatggattgcggaaacgtgtcatgatgtgatagagcttcttgttgaacattatcagcgttacaggattgatgtaaatgatcaaaccatatccccaagtgaaacagcttactccgggatgcagaggatggttaaagcatactgcggaaaagaaaaatcagaaaagttaagaggattattgcatgacaataacttgccgacatttgggtttgacaataaagagaaggtagatccagtgaaaatagcattagcagttggggtgattatagttgctataattgtctttttatctgcttatttcataggtgacaaagtacaaataccattagtaataggcctgtgctttagttcattggtatttattgcttgcttgtttataaaaaaaccaagtgggatgcaatatttcgtattgagaacattatttagcataagtatccccggcttgctaattagctatccgggttttgttgaattaacatttgagaaatatggttttggtattagtaccgctggcttatttgccatattctgtataatttacaggcttaacccagcaaaacttagtgaacttaataagtaa

SEQ ID NO: 391422 - DNA, 624 bp, Salmonella enterica
atgaacatacgttatccggtacggaaagccgacggacgggactataagaactatgacgagctgctgaccgacatccgcaaaaacgcccacggttggtggttactgggcattagtcgttactggcacggggggatccacatcgggacgtcatcgtctccggcctcggtgctggatcaggaaacgccggaaaaatccgtgccgctccagttcatgatggacggtgaggtggtggcatggcgggttaaccgcgattacgcgcatattgaatgcatgcaggcgcaatcgcttcgccagtccggcacctttgtgctggtcaaatcggtgtacaagcccgacgagcaggatgaatcctcctggctgacgctgtaccagctttacatgcacatcgcaccattatcagaatttccgaaacgccccctttaccgcgtcacgcaaaaaggccacggggtgcgaatgcgtaaacattcccgccacgatgataaccgtgaaatcgtgccggacgtgctggcaaataaacacggcaacgccagaacgctgatgcaaggtgaaacgctggccgtgctgcaacaaaaatcgtttctgctggaacaacggccggagccgttcgctctggtgctgcgataa

SEQ ID NO: 391423 - DNA, 633 bp, Salmonella enterica
atgctccgatacgagttaacgccgaacaatgcgggttttgtactgtggggagattcagaagcgctggatgaactgcatcagttaatccattttcttgtcgatgaaagccctctgatagaaggtaaggatggcttcatgttgtctcttgcttacgatatcagaaaggccagagaaggttgtcgcagaactgagcaatatgagtatgagggacacgacacatataatatttatggcgtcgagcttttatggccactgattctaatccagttagcattattccgacgctcaatggcttacattgaggttaataaaaaacaactatctctgatgtattcatttgaacatattctggaagcagctttaaaaaagttaatgcctgaaagttgggaagacctgataagaacagccaaatgtgcctccgactccgacttcaggtcgattgaaagtaatcttgacagcagatgttgctattttgccaatctgcatcctgaactcagaaataagcaactaagaaatattctctgttcgtttgatccgctatggggaaaatatgtccgcgaagcgcaggatataaaaatgctgaatgagatgaacaatactatctgggactggccggaaaatatcaactggtga

SEQ ID NO: 391424 - DNA, 2460 bp, Salmonella enterica
gtgaataagaaattattagcgcttttggtgtcgtcagcaactcaggcgcatgccgtgacttacatagatacattgggtaatgaatacaacagtgataagaacctatttggatggttatatgtagggcaagattcgccatatggaactcccaaaccatcatctctgaatatcactaatggtgccactgtctctgtcaatagtgatcctgcagattcgtcgtatttaacaggtacaggcaacgtaagtatcgaaagcagtaatttaactgtcgaaggtaatggcagcgctctgaatgttgaagagatgttgtatgttcgtaactctcagcttaaaattgataacaaggctatattgactgcgggttctcaagtggtaagccagttagataactctcatattattgtttctggtaattccaagctgaatacaaatacattagttcttaatgccaacacaaactcaacgatgctggttagtggtggttctgaggttattgcaaatactttttttatgtcatctgctgatgattataaaagttcatatattaaaattgatggtgccgatagccgtttaaatgtcagcgacgcttacctgggatatattggtaatgcctcactggttgtctcaaatggtggtgaggttaatgtcagaaatgaaattgaactggccgaaagagcagggcaaaatgcaaccattacaattggcggtcttgatgagtcagcgccagaagcaccagggtatgtaaacgcatcagaaattgtattcaaatcgggaacgggggagataaggtttaatcacacttctgataattatgatttttcaacaccaatctcagggatgggtgatttaacatttattaacggtacaactaacctgacaggtgataataagaagatgtcaggcaaggttaatgttggtgcgggaagtattcttaatgttttaaatgataacgctttgggtgatagttctgtaactattgcttcaagtggccaactggcattactaacagcaaatgattttaaatttaataataatctggttaatgacggcactattaccttatcagatcaaaatacttacggtaagttggtgactgtttctggtaattacaccagtaataatggggcgttggtttttaatggtgctctggctgatgataatacagtcatagataaactgttaatcaaagggaattatgacggaaccactaatgtggcagtgaataacattggtgggattggggctgaaacactaaacgggattgatattatttccattgacggaaatgttaatggatcatttaaacaggctgggcgtatagtcgctggtgcatacgattatagtctggttagaggtgaaggggctaatgaaaatcattggtacttaaccagtcaaaaacaaccgacaccgggaccggatccagtccctacgccggaacccacacctacacctacaccggagccaactcctgtaccgaaacccagtttcaatattctgcgtccggaagctggtagctatgtagccaataattatttttccaatactatgttcctgaatgattttcaggacagaagtggggaagtaaagtattttgatccgatatctggtacttataagttctctagcctatggatgcgacaagagggggggcataatcgcttcaatgacagcaccggacagttgaagacacaaagcaaccgttatgttctgcagctaggtggagacttatttaaatgggcaggtcgtgacgatgagtcaattcgtattggtattatgggtgggtatggtaataaccatagccgtactcattcgtcaattactgattattcctcaaaggcatctgttaatggatacagtgctggtttatatgccacctggattaaaggctacgatgataaatcatggacttatgtagatgtttggggccaatatagttggtttgataactcagtaaaaggggagcagatttctgaagaatcatattcctcaaaaggttttactgggtctattgaaggaggttatgcttacaaggttggtgaaagtggccgtacttcctattggcttcaaccagtggcgcaacttgcactgatggatgtcagaaccaggaacctcaatgaaaaaaacggcactaacgtttcattcaacggaagcggcaatatcatgtcacgactaggtgtaagagcttatactaacggacataataaaatagatgataatagtggccgtacttttgagccgtatgtagaggtaaattacattcataacaccaaagactttagcgtcaaaatgaataatgagacagtaagtcagtctggcgccagaaatgcatttgaggcgaaagtgggtgttaatggacagctttcagaaaacaccaatgtttgggtgaatgtatcccagcaagtaggtagcaacagcttttctgattcccaggccacgttgggtataaaatacgcattctaa

SEQ ID NO: 391425 - DNA, 459 bp, Salmonella enterica
atgagggacgaaaagagcttagcgcacacccgctggaactgtaaatatcacatagtttttgcgccgaaataccggagacaggtgttctacggggaaaaacgcaaagcgatagggagtattttaagaaagctgtgcgaatggaaaaacgtgaatattctggaagcggaatgctgtgtggatcatatccatatgcttctggaaatcccgcccaagatgagtgtatctggatttatggggtacctgaagggaaagagcagcctgatgctttatgagcagtttggcgatttgaagttcaaatatcgtaacagagagttttggtgccgagggtattacgttgatacggtagggaaaaacacgagcaggatacaagaatacataaagcaccaactggaagaggataaaatgggagagcaactctcgatcccgtatgctggcagcccgtttacgggcggtaagtaa

SEQ ID NO: 391426 - DNA, 192 bp, Salmonella enterica; identical to SEQ ID NO: 378985

SEQ ID NO: 391427 - DNA, 1143 bp, Salmonella enterica
atgaaaaagttaacagtggcattatctgcagtggcagtaacggttatgatggcagggatggctgatgcggcggaggtttacaataaagatggcaataagctcgatctttacggtaaggtcgatggtctgcactatttttccaaagataaaggcgatgacggcgatcagacctatgttcgctttggttttaaaggcgaaacccagattaatgaccaactgacggggtacggtcagtgggaatataacattcaggcgaatcatgatgaagataatggtaccaaaggaaacgctacacgcctggcatttgccggtctgaagtttgctgactttgggtccattgattatggtcgtaataacggggttatttatgatatcggggcctggacagatgtgttgcctgaatttggtaatgatacgtatgaagaggctgacagatttatgaccgggcgtgcaaacggtctactgacgtatcataacactgattttttcggcctggttgacgggctaaatttcagtctgcagtaccagggtaaaaatggcggtgatggcgaaagtaataatggtaagggccgtgaagcaaaaagccagaatggagatggttatggtatgtccgtaacctgggagggcgatgccgggtttggtgtgggggctgcttacagcaattctcgtcggactaaagatcagcgcagcaatgaatacagttctgatggtaagcgagcagaagtatggactggcggcctgaaatatgatgccaataatatttatctggccgccacttatgctcagacccgaaatatgcagtgggctgatattgctcaggacagccggattggtaccgaccttgcgttaaacgaggatgctggtgctttcctaagtaaaactgaaaactacgaaattgtagcacagtatatgttagattttggactacagccttcaattgcttacctccagtccaaagcaaaagatacgggtaagtacggtgatattgacctggtgaaatatgttgatgttggtgccacttataatttcaataagaatatgtccgcctatattgactataaaatcaacctgctgaaagacgataacccggcaggtctgagtactgaaaacattgtagcaaccggtctggtgtatgagttctaa

SEQ ID NO: 391428 - DNA, 459 bp, Salmonella enterica; identical to SEQ ID NO: 391425

SEQ ID NO: 391429 - DNA, 219 bp, Salmonella enterica; identical to SEQ ID NO: 378987

SEQ ID NO: 391430 - DNA, 399 bp, Salmonella enterica
atgacaaaactcgatgaaaaaatgaaggctatgctggcggttcagctacctgtacaggccaccacggggccagggggtctgccggatatcgggccaaagcggtcgctgcgcgtctatgatgatacagcgctgatttacaatgagaacacgggaggacggacgctcaagaatatccgggcaggatcaaaaatggcagtggccgtgattgatcgggagaatcgtgacggataccgctttatctgtacgccagtgataacagaggacggtgaagcatacgaaaatgcgctgaactttgcgcagaataacggcatgcagcagccgttatgtgcagtcgtactgcagattgatgagatatacagcctgcggtcggggacgaacgccgggaaaaagatccagtaa

SEQ ID NO: 391431 - DNA, 471 bp, Salmonella enterica
atggacaacgcaaagcaaacttatgccacatctatcctgcagcacaaaaaaacagcccaaagcaatcacgatccgttcgtaattccaccgtcattacaacagtatgctgacgaaccactctatattttgatcgccctgtggtgccggcagcagaatgactgggtcagtcgaatggtcatttcagaggctttcggtattaatgatcgccgagcgtcatttcagatatcttatatttcccggcataaaaaacgggttgcatgcgagatacgggttgtcagaaccgacaattcacagcgcttttatcatgaaatcagagtaactgacgtagtactgagcggagatacagtaagagcaacccctgttctgccaaaaaaagggcccgtgaaacgaagtaacgtcggaaacgccacgccggagttgcgcaatatgttccacactctgatgggttcgcgtaaaatctgcgggaactga

SEQ ID NO: 391432 - DNA, 1413 bp, Salmonella enterica
gtgttctgtaatcatgttattcccccgttattactgagcgtgttgttgctgtccctgtctgcccgggcgggaatggtggtgtacaccgaccatgcccacccgccatccggggtgaccggtgatacccgcgtggtctggctggatgcgccggaacaattacagcagtcgctgtttggctctctgacgtcagaccccagagaagcagaacgccgggcgcaggcggtgatccactctgccggctggcagcagaaacaggctgaactggctcaggcttaccggggggtgctgcaggcgtggtcgctggggctgcaaaaatatccggccgtggtgtctgacgaccagtacgtggtttatggtactgccgatgtggtggtggccgaaggactgctccacagtcacaggacgcgggaggggggggcgatgatacgcctgagtctgtcatcccgtctgaagccggttgcgctggtcctgatgctggtcaccggttctcctgctgtggctggtgcggcagtgaacaccgccaccctgatagccggcagcgcctcaccctcatgtatcagctggcgggtgaagggtatctgctactggctgttctgcacgccctttggctgcacggtgaaaacgtcggtaaaggtggagcactttattccggaagccgtgatttccgtctatcaggataagggagaaaacccctggactgagatgaagacggtcagcagtctgtcgggcggaattgagaacgccgtcagttcaggcctggccgggctaaatgccggaggcggacagtccacagcaaaacggccgcagggcagggagagtctgctgagcacccgcttcaaatatgccgatgccctcggtcatcctgccacctcacttatcggcgggcagataccggggtattcctgcaaaagtgccgccaccccgctggttccctatttcctgagtacgctggacagcctggtctggcgcacgggcctgccggaagccctgtatccggaggcgctgatacccggtaagcgtgaaatcggcagtactgccggcagtaacatgtggggcaatgtttatccgcgcagtggttttgtcacccagcaggatgactataaggccggagccgttattgcccagcgggtggccgatatcatcacccgcagcggacaggtacatgtttaccagcagctgacgggccaccggcgcccgggttactggccaccggacccggtcacggaaaataccggcacaaaaaaccacaaatggcagcgtctggcacctgcggcatcacagtcctgtgcggtgtttcctgataaaggcggaaaagtggcggaagacggcaactacgcctggacgctgtggcagccgtacagctgctgcaaaccacgcggacagacattcctttacagcactgatttcagctga

SEQ ID NO: 391433 - DNA, 216 bp, Salmonella enterica
atggtaccgctatggtatccgttttctgaacgccactcgctggatggatcaggtaccggacatgtcgcgaacgccatggcatatgcacccgctggtgtttctggatgccatcagcacgtcgaaaaaacgcggctgggcgcacagtccgtttgcagacctgctgggctgcgtggagtcaaagaacgattacacggcttacaaccagatatttcatag

SEQ ID NO: 391434 - DNA, 945 bp, Salmonella enterica
atgtcactgttaaaattatattacgatgggatattaatttccgagacagagtgttctgagcgttgtctcggttttttaaaagaaacgatgtttaattacaatacgggtgagattacgcttgctgctttgggtaatgatagcctgacgctgagcgaagcaggtgggaatgggcgctatgacgcttttgagcaacgtttgatagagtacttgtcaacgctgcctggggcgtcaggcgatgatcgcggcgctattgatcaggtggattcccaacaaccagcgccgatagaggtgtttattacctcgcaagagtttaagaaaaagatttgcatgtctgatattgaaaaaaataaaataggtagcggaagctatgggacagtttatttattaaatggtgaatatgttattaaggttccaattaacgaacagggggtaaaaatcgactttacctctccagagcattgtaattgtcatcctgagcgtgttagtaagtatttgaacatagccaatgacgataagaatttttctcggtccgccaccatgaatattaatggcaaagatgtcatggttttagtttcaaaatacattcagggtcaggagttcgatattgaagatgacgagaactataatagggctgaggcgcttcttgaatccagaggtgtttatatgcatgatatgaacgtttttggtaatattctggttaaagaaggggggcttttctttgtagatggtgatcagatcgtgccttcaaaagaattccggcatcagcggagagtttctcttgcaacagcgcaactggaagaacaaattaaggcccgtcacatggtaaaattaaagcaggccgagaccgaaggaaatgctgaagatattgaatattatagttcacttattacggatattaatgaattaatcggagagaaaacgcgccaggaagacgttttaaactag

SEQ ID NO: 391435 - DNA, 666 bp, Salmonella enterica
atggttttggatgctattgtatattccgccaatcagatgacgggtgaagccctcaggcatatttttaaagctgaacgcagtatccgggttgagttttcaacaaaccaagatactttgatagagaaagcattggaattgaggcctgagtgtatcattcttgatatcagtccccgggattcagtctctctgatatatatgattcgcattcattttccggctgttccggttatttttatacaaaaatattttcttttttcggatcgtataatcagtgaatattttgggcatatttttctatacgaatatgatgcagtgttatgtgcgtaccctgattttactccgctggcattattcaggcaggagatgttttctggtactcattgttccggtggcgtattccttcataacagatattccggtatgacggatatgtcactacgacaacacattaataattatcttcgccaccgacttgcagagctagtgacctctgacagaatacgggatgtgattatgaactggctggtatgcggcctatctgtggcagaaacaggaaaatgtgcacagataagtgacaaagtggtttacctttatcggcgtcaggttatgagcattatggatataagaaacttttcgagggatttcattcggtcattaaaaatataa

SEQ ID NO: 391436 - DNA, 594 bp, Salmonella enterica
atgtcacttaaaactaacttgtctctggttgcgatctgcctgatggcttctggtgtggctgctgcagccacgtctgtgggcaacggcacactgaccatcaacggcactattaacgcatcaacctgtacggtcgtccctagtaaaaccagcctgacggttccgaatttagtacctggaaatatcaatgctgcggcgcatggggcagagttgtacaaagacacattcagttttgattttaaggactgcggtgctgtcggtgacaccatggttatgaaactcaccagggatgttaatccttcagttggtgccggaggtcctggcgcccttaaaaaagcaggctttacttatggaaatagtggcaacacggatacggcaccattgtattatcagatggctccgtcggctacaactaatttctttatgcttgatggtactggtaataacatcgacatttctaccgtccaggataaaggcgctttctccataccggtcgatttgattgtgagtaaatctaataatggtgcggatagtgaagctggcaaatatgtcggtaactttaccgcagctccgacttggtctgtggaatacccataa

SEQ ID NO: 391437 - DNA, 654 bp, Salmonella enterica
gtgacgatgaattatacccgggatctgttttcccggcggggaatattatttccttttttgttactgggatgtgccggcactgttgttgctcaggagtgggcgtccgtcacccccccggtggctgatgctcccgccgtggtggagtttttttccttttactgtccgccctgttatgcgttctcacagacgatggcggtggaccaggccatacgccgggtactgttggaaggtgaccggatggtcaagtaccatgtcagcctgctgggcccgctcggccatgagctgacgcgggcctgggcgctggccatggtgatgaacaaaaccgaagtcatggagaaggctttcttcatggcagggatggtggagaaacgcctgcactcaccggaggacattcgccaggtatttatggtcactaccgggataaccggggaggcatatgaccgggaaataaaaagcccggcagtaaatgaggcagtgacactgcaggagcgattgttcagggaatatggtgtgaggggcacgccttccgtgtatgtccgtggccgttaccatatcaacaatgccgctttcaacgcattttctgtggatgatttcagagaccgttatgcatctgtggtccagacattacttgtcggtaaagacgatgccaactga

SEQ ID NO: 391438 - DNA, 186 bp, Salmonella enterica
atgcatctgtggtccagacattacttgtcggtaaagacgatgccaactgataaaacgggggccgggagaaccggaggaggctttccgtttctgacgctgattttcctgttgctgaccagtgtatttacctccggctttctgactggcgcactgactgtgatctggtttgtcagtgccggctcataa

SEQ ID NO: 391439 - DNA, 711 bp, Salmonella enterica
atgaaactgagacgtttacttaaacacaagctggctacttctgctctcctgataacagccggggtagttaccttgtgtttcccggagacctggtacccgcaggaaactgaatggcaacttacagcagaaaaagaaatctctggtgtaaaagggggattatccggtctgacgtggaacctagatagcggtacattatttgctgtgacagatcatccatcatcagtaatcgaacttgatactgaagggaatgtactacgggtaataccatcggatcgtgaccatgattttgaggccattgagtaccttggccggaactgctacatcctgtcccgggagcgggagcggacgctcaccacccactgtattgacagcaacactaccgtcctgccgccagcgtcatacaccataactctgcatataaacaggaaccgcgataatgccggttttgaggggcttgccagtagtaagggctgggataagcttattattgctcaggaaaaaaaacctcttcggatttaccgtgccggacacagcaaaaacgggatgatgatcagtgacaccataactcgggatgcatcgctgccgtggtttatcaaggatatctctggtctgcattatgaccgtaacattcagaatcggggggccacctgccggaactggacttggagctggtcattcatcaatcttggcttcaatttccagatgtactga

SEQ ID NO: 391440 - DNA, 1068 bp, Salmonella enterica
atgtcaaaactggttctggaacaggtgaccaaaacgttcggcgaattctacgccgccagggaaatctcgttctgcgcagaagagggagaattcgtcaccctgctcgggccgagcggctgtggcaaaaccaccctgctgaaaatgattggcggctttcaccagccggacagcggacgcattctgattggcgataaaacggttaacgccctgccaccggaaaagcgcaataccgccatgtgctttcagtcgtatgcgctgtttccgcacctcaacgtggcacacaatatctgcttcggcctgaagcagaaaaaggtcgccatcagcgaacagcaggcccggctggcggaggcgctgaagcaggtcgggctggagagccagcggctgaaaatgcccgcccagctctccggcggccagcagcagcgcgtggctctggcccgggcgatgatcacccgcccggacgtcatcctgttcgacgaaccgctctccaacctcgatgccaaactgcgcgaaagcgtgcgtttcgagattaaggaactccagcggcagtatcagcttacctctatatacgtcacccatgaccaggcggaagcgctggcgatgtcggataaaatagtggtgctgaacgccggtaacgtcgagcaaatcggcaaaccggaagagatttactaccgtccggccaaccgctttgtggcggactttatcggcgcggccaatatcgacatcgcacaggtcacgcccgcagagcagccgggttattaccgggtacgctgcgccctcggtgaattttacgtgttctcagaacaaccaccgcgtgcaaagaactgctatatctgctggcgaccggaagacgcgcagtatgtcagccagccgcagatgggagacaatcacttcaccctgacgctcgacaaaatggcctttatgggcaacctcactgaagcctggggacacaacaacagcggactgtcggtgcgtttgcaattgataaaaaaaccgcctgtagtccccggcgaacgcgcctgcttccgtctggcagaaaacgccatccattttctggagccggcattatga

SEQ ID NO: 391441 - DNA, 831 bp, Salmonella enterica
atggcgtttaactttcaccgggcggcagaggggattgtgctggccaacagtcatcggggttattccagcagtgcgccggaaaacacctttccggcctttgacgccgcccgcctagcgggaacccactgtattgaaatcgatatccacctgacggcggacaatcagctggtcgtcacacacgatcatcgtatcgaccgggtgtccaccgggcacggatttgttgagcagatgacgtacctgcagctgctggcttacgactttggcgtgaaataccatccgtcttttgccggaacgacagttccccttctggcggatgtgttacgctgggcggtggaaaacggcatggggctgattgttgaggttaaacaacgcaaccgccatgatgcgtttgtagctgaactggtgaggctgctacgcgagcaaccggaggccatcgggcatatccagctgctgtgcttcaaccatgtactgatcaaccgggtgaagacgcaaattccgcaactggcgttacaggtggtgacgctggagcgctacaataatcaacttgcggcggtgcagcagtccaatgccggatgtgtgtgctttgagttcgagttcgcccatatcgacgacctgcgggcctacaaaaatgccgggctgggcgtgcggatgtatctgcatgaaatgaaaaacggcatgacgccgctggagcagtacgactataaattcggctgtgacagtcgtccggtgattatcggctggatgcaggcggggctgattgatatgctcagccatgatgatattccgtatctgcaggggctgattgaagaggccggactgcgctgggattag

SEQ ID NO: 391442 - DNA, 1113 bp, Salmonella enterica
atgaacgcccactctgaacgccttgagctgcgtagttcgcagcgcctgctgctggaactgatccgccgccacgcgccggtgacgcgagccgagctggcgcggctgtcggggctgacggcgggggctattacccaacagtgccgggagctgatgttctccggcctggtggtggaaggggagcgtaataccggacggcgcggtcagccgtcgctgccgttgcgtcttaaccctggtggaggctgcgccattggattgtcattcagccccggctttatcgatatgaccgtcgtcgatctcagtggtcgacagctgttgtcactttccgaagcgcatcaggaaaatcagccgctggaggccaccttggcgcagctcaaaaccctggtggatcagacgctgaaaaagcgtcagctccagtacgcgcgtattctgggcattggctatgccgtgccgggatttctgaaagcggacggcaaaaagcgccatagtgtgctctggctggagagctggcgtgatgtggatttacagcaggtatttgccgacaacctgccgtggccgacatgggtggaaaacaacgctaacgcctcggcggtagctgagctgtattgtggtgaatggaataattatagcgatctgacctttatcgatctcggctacggtatcggtgcaggcattatctccgggcataaaatgctgcgcggcgggttctgcaatgccggagaggtcgggatggcatttccgtccggtacgcctcgcccgtcgtataaggatctggttgccacgctggagcgcgaagggtacagtgaaactcagctaccagagttgattgccgggcagcatccgctgctggaaagctggtttgaacgctgtcgttaccaggtggagcaaacggtgtttggctgtgtgcagtgggtagacccgcaaatcatcgtgctcggtggcgcaatgccgaaaccgattatcagccgtctggtgcaggatctgaatcaacggctggaaacccggctcgatcctaaccgcccgaaagtgaggatggccgcgtcctcgatgggcgcgctaagtgcatcacgcggcgcggcgatgatcccgctgtaccaggtgattaatgagggctga

SEQ ID NO: 391443 - DNA, 180 bp, Salmonella enterica
atgcttcatactaacaaccctattattaaacacaactctggtctgctcaatctcgccgaagaactcggtgatgtatcaaaagcctgtaagatcatcgggctatctcgttataccctttatcgctatcaggaactggtgggcggcattgatgatctggttaaccaaagctacaaatcctag

SEQ ID NO: 391444 - DNA, 1524 bp, Salmonella enterica
atggaagcatttgatttatcctatagaggttgccggcccgcaattgaaattcctgttcagttaacaaaagatcggcgtctagtagtattcaatgattcttatcttgaaagaatgaccgataaaacatttaacccagagttacgtcaaaatttaagggaaaaggtgagtgatacaacccttgcttatattcaaaaactatcacttataaacattaacaaagaagttacaaaataccgaataccaacatttaacgaatttattgaagattacttacaaaaaaaaacaggcacattaatttatgtaaaaaccacagatccagaggctctacttgcagcgattattacattggataaattgattatcaaaaaaaaagacagcactcttgccagccgatttatttttaaggtcaacattgaagatgtgctctccccagaaattttatcattggaattacaaaacttctgggtgattaactataaatcaatgaatttcaatcctgttctaacaaaaaaaacctttaaccaattaaatcgtgaaggcaatgatttaacagcgcgttatgttatagagagatgggttgaccaccctgatataaaagtgccagtagttgacctggagtttacgcaagatgaccaaccagccacaaatggttctatgtcaacaatcgcctctttgctagcatttacttataagaaaagaattggggcgtttgtcccaatttctgattatcctctctggagacaaactcttgctagcggttatacagtaaataatactgatgattataaaaaacctatagatgtcacattggctaattataataaagatggcacctgctgccactctcacaaaattagaacagatggaaaagatatgagaactgatataaagtggttgctcacttcaacaaaatcgagcgttataacatccttagatgttgattctatagaaaactattcgccaacaaaaatattaatcaacaataaagctaggccaaaaatgtcatatcctccctatcagatgaagtcttccctgtcctgggagctagggttttataaaaaaccgaatggttcttctgtttctttgaaagccgtaggtgattctataagtaatgattggagaaatggtgtctgtctttatagcaaagaaaatagtgtcggagtggcgtatagctgcaatgatgacaatattcaagggtggggttttaataagcaattagttgtcagaatggctgatgataattctatgtatattcaagacccagcaacaaaactttgtttgacgggaaataatgatcataatcaaggaattacatactgggcggagtgccacgaaagttcccaatggatacgatatggagacaatacctttgaaaacaaggtattcgcaaatacttatcttagttttaatgtagatggggaatggaaagggtctagatttgggttagtaaaaaatgatggttttagtaattataaatactggaaaatggaatcatcacaaaatagatggagtatatatgattaa

SEQ ID NO: 391445 - DNA, 1845 bp, Salmonella enterica
atgaaaaaatatattactcttggggtagtgctatctttgataacaggaggtagttatgcactcgaaaaaggggaaaaaaacattaattttttccctcctggtgggaatatccaaaactgccagccatggacatttaggtatcttcaacttgaacatgcagcaaaacaaaaaataatcacaacagctcgccaccgaggagattttgacaatcacacaccagaaaacagtcttggagcattccagaattcatatgaaaaatgtagaccgtctattgaaacagatgttcgtttaacaaaagatggtaaggctgtcctttttcacgatttgaatgttggaaaaatgacaaacccagattatgaccctgaacttgatagtggtacaaatacaccattaaaagacctaactcttaaagaattacaagaattacatcttattactattgaaagggatactactaactggaaagtcccaacaatcaatgaatttcttgaacagtatatctcgttagatccagggacattagtttttcttgaagtaaaagagcccgatgccatgccaaaagttatcaatgcagtaagagattacgatgactcccaccctgacaaaaaaattagagacagaataattattaaatttaacatggctctgtatccaacacctgataaatggattgaagcttcgaaattgtctgggaaagacaggatatcattaatggctaacccagtgatatcaccttatgcagcagacactataaataaaggaccagaaattccccaaccagctcaaaaatatgatacaaatgcagaaagagcagtgtacctttggtcaactgctgatttccatactgcacctgtcgttgaggttgtactaaaagactcttcagagtttaaacgggttacagaaaaagaaaatgcatttggtacatattccgttccggttaatattaatcaggataatgccacgaacgggacactagctaaaatggcaaccatagttacaacaaatgataaagccttaggagtatttgttccaatccctgattataatatgtggagagctcatttagttcaaggatatactgtaaataatacatttggtgataaagagccaatatggatagatacagcatttttcaacaataactcatcgtgttgttacgctttaaaagaccgcttgcaaagcagtatttatgcaaaggaagctaatgactggagaatgaatatagactggcaaaaaggtattggtgcaactgtatatactgcagatgacactgattctattgacacatattttgagaccggtgaaggaagtagaccagcacctgggatgaattctgttttatcttggatattgcgctatgtcactgagccacaagggtcaatagttagtctgttaacctggaacggcgcacctgggtcatggccgtggacactggaaggtaagcatgtatgcatgcaagtagctccaagcgacaaatggatacttgaatatcaatgtaattccgcagtaccccaagcagcgggctataaccaatatctaacgttacgtaaaagcacacttaaaaacaaaatgcagatatatgattttcactcaggacagtgtgtttcgatacctcgggatactgatagctgggctctcaaaaaaaactgtaccgaagaggatactttaaacatagtaagatacgctgataatagatataaaaatggttatgggaatctatatatgacatttaaaacccacgggggactttgggttggtatttactggggatatgcatatgcagtatctcacaccgatgctctaaaagatagctggagtcaatggaaaatggatatcagtctttaa

SEQ ID NO: 391446 - DNA, 585 bp, Salmonella enterica
gtggcaaaattcagtgaacaggggctacaaatcaccgacgaggaattattcaataaacagataagcacttacgataacctacccgaagttctggataagctcccgaaactggagctttcctctgcagatttaactgaggacgtgctcactatcgttcccatgctaatgaactacgatcagaatgccgaattgaagcccgattgctccgaaaataaggcccttctctccatggataaattgattgatatcactcatgatattcaggacttttaccagaagggagtccattctctcaaagcgttaaaggcagaccctaaactgatagcgttatatgaaagccgggcagaattggccagagagtatgccagtcagttcccgacacgcgcaacccacccagaaacccatcaggtactctcactgttcacctactacatggtagacgatctggaccaggcagccgccactttgcataacctgggggccaacgtcgatagcactcatcttgcccgtatgaaagatcaacagcaaccactactacagcactttattacccatcgtctgttaaacgatcaactggcagactga

SEQ ID NO: 391447 - DNA, 1317 bp, Salmonella enterica
gtgattgcctccaccggcgattaccagtccgtcgccctgggtgcggcgcagaacatggggctctacggcgcggtatcggtggatgtcacccgctcggatgcacagctcccgcacgggcagagccagtccggttacagctaccgggttaactacaccaaaacgtttaacagtaccggcagcacgctggcgttcgtcggataccgtttctctgaccggcattttctgtccctgcaggagtatctggcgcgttccgtgtatgacggggagtatcttcaggatgaaaagcagagctactccgtaagctggaatcagtatctgtcagccctgaacatgaatgcctcgctttccctgagccgtctcagttactggaatgctgattcaaacaataactggaccctgtcgctcagtaagtcgatgaatatggggcccgtacacggcattaacctgtcactgtcactatcccgtaaccagtcggcgtacaaccggacacaaaaccaggtttatttccaggtcagtgtcccctggggggacagtcgccaggtgagttacagcctgcagaaggataagcagggcagtatgctgcagaccgtgaattacagcgatttccataacccggatacctcatggaatatcagcgccggccataaccggtatgacagcaacagcagtgacagcttcagcgggagtatccagagccgtctgccgtggggccaggccagcgcggatgccaccctgcagcccggtcagtaccgcagtctggggctgaactggtatggctcactgaccgccacggcacatggcgctgcgttcagccagtcaatggccgggaatgagccgcggatgatgattgataccggagacgtgtccggagtgccggttaacggcaacagcggcgtgaccaaccacttcggggtggccgtggtgagcgcgggcagcagctatcgcccgggcgatgtctccgtggatgtgtccgcgctgccggacggcgtggatgtggctgacccggtgatcagccaggtactgacggaaggggccatcggttacaggaagatagacgtcagccagggagaacagatattcgggcatatccggctggctgacggcacaagtccgccattcggcgcgcaggtcgtgtcggagaaaaccggtaaaacggcggggatggcgggtgataacgggctggtctacctgacgggcattgatgcttcagagcggaatgctctggtcgtgacatggggcggcaggccgcagtgccggctgtccctgccggagaacgcgaatctcagccggggagccctgctgcttccctgccggtga

SEQ ID NO: 391448 - DNA, 807 bp, Salmonella enterica
atgacaggaaataaccggatgccggttcggcagatcatcgtgcatggtgactgctggccggtaacaaccgccgtggcgcatctggtcaggtcagtactatctacgtgtgagtatgtaattacgtacacgctgccagttctgttgcagcaactgcaccggaaaccggaagcaaccttagtattgtgtctgcgccctcgtgaacatctttttttgttttacgctctgaaacaagcgatcctggatcacccggtcctggtcatcagtgatgaactgttttttagtgaccagttggtactaaaggtatatggggatatcccggcaattcagcagcaggaactaacggagatgcttatacgggttaaacaagaagagcaatggtatggcggaacgcgttgtcaagtgacgaaaaagctggacgattttctgttatatccgaccctggtgacaggttttctggaagtcccccagatattcaacagcccaaagcggctgatgacctacatgtcactgctgatgcacagggaaattctggcatgtggagtgagtccggcccagcagcgtctgcttgaggaggtttatcgtggccggggaaggctgtcagcgctctgtggacggctgaatgcaagagaaagacaaatctggcaagacaagtatcggttactggtgaaattaggcatgagaaatcggttacgtgaactgttgtacggcacccggttctgtatgaatatgcaaaaaacagtttttatggctccggcagaaaccgtattccctgaccagcagaatgatttcgcaccacactcattctga

SEQ ID NO: 391449 - DNA, 210 bp, Salmonella enterica
gtgagtgaaaaacgtctggcagcagggcagcgacgttcactgtctgccctgaaaagaaaagtcaccggtctggccgccgaatggggcgatattgattacagcgtgatggaggcgctcagccgtatctgcgacagtattgatgaggcggataaacagttgcgttatgttctggaggagaaagatcttatccgcgaacacgatgacagatga

SEQ ID NO: 391450 - DNA, 270 bp, Salmonella enterica
atgacgattctcgccatgaatacttataatgcaattaagtctctgaaaaagtccggttttaataaaaaacaggcggaaaaaatagtggaagtcatagcagatttgcagaatagcagtgttgctaccaaagaagatttaaaaacttccactgacagtctgaaaacggaacctgccacaattaaaacagccccggactggattaaaaaacttacttttgttgttggtgttgtcgttgttattgcggcgctgaaatatattttttcaggttga

SEQ ID NO: 391451 - DNA, 258 bp, Salmonella enterica
atgaccggatgggatctgaaactctggcgtaagagcatgtgctggtcacgcgaacgcgctgcacgggaaatgggggtatccctgagaacctggcacacctgggagaattcggagcaggtggatgttattgtagggtatgcaacgcaggcagtctccatccgtgatctgctgccggcaatgcataaaatgcgaaaaagtgaccttattacccggctggaaaagttacttgaaaaaccggcagcggcagtgaccgattag

SEQ ID NO: 391452 - DNA, 447 bp, Salmonella enterica
atgagctgctatatcgttaacgagaaaaccgccaacgctgtcgtgtcatcactggttgagatgcaacgtattcacgaaagtgaagcagatggattcctggatatgatgatgaagctgaacacgcgttcagtgaatgaacgttatgatgaggattccgctgcaccggtatatcactacgaaaagcaggagaccggtttacaggatgaaaaaaatccgcgcgcgattctccagactatcaccaatattgcgcactatctctaccaggtaagtgaggaaaaaggtgccgaagacacgctgattttccgcatgctgaatactctccgggatgatctgactgacatttgtaaagccgcgcttgtaaaagagggttatcctgaggaaagtttacgcggtaaaaaatattatgatctgccttattctgatgattgtagctgggggattgactga

SEQ ID NO: 391453 - DNA, 321 bp, Salmonella enterica
atggtaaagaaaaaattctactccggatctgatgttgaaatggctaaactggcactttctgagcttcctgatttgacggaagaaagaaaatcacttcatgattttcttggtgcaatacgggatgatattttgctgcttgtcaggtcgaaggggtacactatcaaagatatcagggataccctgaaagaggctggttttgaagtgggagaaaaggcgctacgtgaaacaataagggaagccgaatccaggaaaagcgggcgacgaactggcgcacgtcaggaacgtaaaacggcagtgactgaatctcgtgatactgactga

SEQ ID NO: 391454 - DNA, 318 bp, Salmonella enterica
atgagtaaaagcgaaaaaagacggcgggatgccgtgatcccaaggatccgctgtacgcaggaagaaaaagacatcattaaaaaaaaggcggatgaatccggactaacccttccggaatttatgcgtcgctgtgctcttgaacgtcgtattattccccgaacagacaatgaatttttacaggaactgatgaggctgggaaggatgcagaagcacctgtttgtcgagggaaaaaggacaggagataaagagtatgctgacgtgcttgtagccataactcagttcgctgacacgctgcgaaaaaaactgatggaagagtga

SEQ ID NO: 391455 - DNA, 2709 bp, Salmonella enterica
gtgaacgccatcatcccggacaagagaaaggacggcaagtcttcatttgaggacctggtctcttacgtctctgttcgtgatgatatccccgagtctgatttgcaggaggcagtgaagaaggcgaaagacagcccggaaaccagccacaggaaccgctttcatcgcctggtggactatgccacccggttacgtaatgaaaattttgtatcgcttgttgacgtgatggctgacggttgtgaatgggtgaatttttatggcgtgacctgttttcataactgcggttcagttgaatctgcggcggaagaaatggatatgacggcactggaggcgcgctttggtaaaagcaacagtgaccccgtatttcactatattctgtcgtggcagtcgcatgaaagtccacgtcctgagcaaatctatgacagcgtccggcacactctgaaagcgctggggctgtcatcgcaccagtatgtttctgccgttcacacggatacagataaccttcatgttcacatcgctgttaatcgcgtacatccgaaaaccgggtatataaacgacctgtcgttcagcaaggaaaaactcagccgggcgtgccgtgaactggaactcaggcatggtttttcgccggataacggctgctgggtgcatgcgcccggtaaccggattgtgcgccggacgtcagccgaacgtgaccgtctgaatgcctggcgcaggggaaaaaaacagacgctgaaagagtatattgctgacaccgccatcgccggactacgggaaaaaccggtatctgactggctgtcattgcatcgccggctggcgaaagacgggttgtatctggcggttcatgatggtgagtttatggtgatggacgggtgggaaagaagccgtgcgggcgtcgccctgagcaccttcggaccgtcatggaatgggcagaaactggcgcagaaatttggtgagtatctgccggtgccgcaggatattttcagtcaggtggggacaccgggtcgttacgatcctgatgctgaagttatgacagaaaggccggtcagggtgagtgaaacagaaaaccttcaccagtatgcctgccgtcatttcagtcagcgccttccggaactggcccgggccggacatctggaaagcaccctggcggtacaccacgttctggctgaggccggactgtggctcactaaacagcatggtcatctggttatctgcgatggttacgatcataaccagactcccgtgcgcgcggacagcgtgtggccgttgctgacactgactaatctggaaagtctggaaggaggctggcagcccgttccgactgatattttccggcaggttcagcctgcatcgcgtttcaccggccgacatctggaaagcagtccggtcagcgatcctgagtggcataaaatgagagtgggggccggtccacagggagccatcaaacgggagctgttttctgacaaggaaagtctgtgggggtacagtgtcagtcactgcggacggcagattgaggagatgatcagctccggcagatttacctggcagaactgtcatgagctgtttgcccggcagggactgatgctgaaaaagcaataccacggacttgtggtggtggatgcgtttaaccacgaacagacgccggtaaaagccagcagcgttcatcctgatttgacgcgggacagggctgagccgcaggcgggaccatttgaacctgctccggcggatctgtttgacaggataaagcctgaaagccgttataaccctgaactggcggtcagcgacgcctttcagcccggttacaaacgtgattcggaactccgccgtgaacgccgtgaggccagagccgaagcacgtactgatttgcgagcccgctacctggcgtggcgtgaacagtggtgcaaacctgatttacgttacggggaaagactcagtgaaattcatcaggaatgccggctgcgtaaggcgcatatccgtgtacagtaccgggagccgcttctgcgtaaactgcattaccatattgccgaagttcagcgtatgcaggcactgattgaacttaaaaaatctgtacgtgaggagaggctgcagctggttgctgcgggaaaatggtatccgccatcataccggcagtgggttgaacagcaggcggcgctgggagacagggctgcggtatcgcagctgcgtggatgggattatcgtgcccgcagaaaggataaggccagaacgaccacgaccgatcgttgcgtggttctgtgtgagccgggaggcacaccggtttataacgatgtgggagaactggaggccagactgcagaaaaatggcagcgtcatgttccgggacaaccgtacaggggagattatgtgtacggactacggggacagggttgttttccgcaaccataaagactatgacgaactggctgataagctgaatctgatcgcgccggttctctttgagcgtgagccgctgatggggtttgagcctgaaggcgatgacccgcattttaatcaggtgtttgcggatatggtggcatggaataatgttacggggaggacaggacatggtgaatttgccataacccgtccggatgtggatgaactgcgtcagaacagtgagcgttactatactgattatctgaacccacgtgtgtccggtgatacccaacattactcccctgaagaggagaataaatgggagccgccttcaccaaactga

SEQ ID NO: 391456 - DNA, 291 bp, Salmonella enterica
atggcattaaccagcagatttatattaaaatattctatgtcagtacttgagcgaactgaagctgctaaacttataaaagaacctgaaaaggatgaatttataaagccttatggcatgctttatattctgaaaaaggccgcttttttagttcttgcccttgccgtaattataaatgtaataatgctggctgtgcttatattaaagtctgattttgatatcgcctttttggaaagaacaagatggtttgccattaccattgtcggcggattcaagtccgaagtgcaacgctaa

SEQ ID NO: 391457 - DNA, 231 bp, Salmonella enterica
atggcccttgaaaaagcccatagcggcagcagaaaaatgacctttggtgaaaacagggaccttgagcgtgtggttattgcatcagtcccttcaggaaaaattaaacgtgttaacgtcaatttcaatgaggataaacatactagatttaaagctgcttgtgtacgaaacggaacctcgataacagatgttatcaaccagcttgtagataactggcttaaagaaaatgaataa

SEQ ID NO: 391458 - DNA, 327 bp, Salmonella enterica
atgaggatttcagaacagatactggcaggcaccctgaaacagggaggctgtatccggagcttctggcgccgctccgccagactggcaggcacccctccccccggtgtgccggatggcctggtgctggaaaccccgggggtacagggcgacacgccgctttgtcatgtggattttgtggtggcgcagaagtggctggtctgtgctgaaacctggacgcagatcgtcggcggaacggagttcggcggggcggtctggcggctggctcagggatatcatgttaccaccgggcaccctgttcagggggacggagaccgggatgaaccgtga

SEQ ID NO: 391459 - DNA, 933 bp, Salmonella enterica
gtggacgatgcgctgttttcgcgcattgagcagtcagcaatgaaaaatgaacgttcggtggagggcgagatccgccttgcgctggccagactctacccggctaccgatccgtcgcagaacattgtgccgttgtccatgcgtgaacgctggcagcaggaaaccggtcagcgcctgcggtggctcctgcaacgcctgaatgaggacgggtttgggacccgtgcgcgcaccggcgatgccagtgtggctgattatgtgcgcctgggtgaccagctgagtaccagccccggcctgctgatggatattgctgaagggcgcgcggaaatgacgccggaaatggccggcgcgctacagagctggtgcggcgccagcggagactggctgctcagcggtgaaggtgagtcgtttcctgtggtgaaactcggaacctactccggcgtcagttggcaggaattcttttttccggatgacgatggccggtatgtgtttgagttcatccgcattgagggtggcctgcatgacggtaccctgctgatcctgcgccggcatgaacattccgggagcatcaccacgggtctggtgacagaagcattttacctcggagccgggatgggcaatggcggctatggcaacctgaaaacctttttgctgtttctgaaacagcacggtggccccctggtcatgaatgcatatcagttcacgcccccggagccggattttgatttctggtcagtaatgggcagacatcacccggtctggttccgcgacatcaaccgctgctcgccctcccgctggctgcagcaggtactgaacggcgaagatccgggggaatggtttgccggtggctggtcaccgatcctgcaggaggtggcggaagctgccgccggggaaccacgcgctcctgccggacaggccgatcctgaagaggagaagtga

SEQ ID NO: 391460 - DNA, 261 bp, Salmonella enterica
atgtttaccccagagtttataaatgaagaacgcggcgaatttctccttgtggccaaccacggtctggcatcaccggaatcgataaaactcagtattgcatacaatattgccagaatatgctggggactatcgcagcttccaccgcacattcaaacttgccgggtcgtctatgacatcagagggcaatccatccctgatcaggttcaggcccagatcaggcaagcacttgagcagatagccatggtggagtttaagagctga

SEQ ID NO: 391461 - DNA, 234 bp, Salmonella enterica
atgggacttcagttaattatcaaagcagaacgtaacaagatagaaaaagcattgggatcgctgacaccagagtgtgaaatattcccggtcgctgaaggccttttcggtatttccatttcggagcgaagtctctcatccgcgggtgaagctgcggttctaaaaaaacgtgaaccgcgaattcagataataagtgcaacgctcggtcatatagatggaaggacggttagctgctga

SEQ ID NO: 391462 - DNA, 615 bp, Salmonella enterica
atgcgtaataaaataatacttgccatgacggctgccggtatgatgtgcgccacttcggcttttgctgctggtgctattgccaccactgacgctggcggagggacaatgaccttcagtggctcagtcattgatgcgccgtgcagcattgtgccggacagccagaacatcaaagtggacctgggtcaggtcagtatgaaatcactatcagcagcagacaagtactccagttcggttcctgttaccataagtctgaccggatgttcatttgaggcagcccctggcacgccaccgacagatggcacaacaggtaactattcaaaagtggccgtaacattccctggtgttatgcccccaccgggcggcgatttggttaaaggagaaatagcaaataccgcaaactcccctgccgctaatgtagctattcagctcctgaaaggtgatggcgttaatcctgtggacctgagcaagacgacacctacaacaggtgatattacactggatacctcttcggcaaccaataagctgaatttctttgcccgtatgataaccgttggcggagcagcctcccagggcgctgtcggcgccacagtcacctataaactgaaatatttctga

SEQ ID NO: 391463 - DNA, 1149 bp, Salmonella enterica
atggggcttgaacaatccaaagtgttatgggaatacctgaaagcggcgggacatattgatgcaaaaggaaaagttcaggactccttgaaacaagctctaaaggaaggttctttagccttacctgccgagtttgaagtgcaaaggggacaaattgcagaagtattgcgcaaagtgtcaggccgtcttgagattaaaaatgccgatgaccgtcaaccagtatccctacgtaaaggatcggatggtaaagctatatatcttagcgatgagtttaaagcgctatgggatcgcatcaagtataaaaccacctatcgtgtgcaatttgataacgctaagctgataactgactgcattaatttcttgcaaaaagcgcctgccattgccaaagcgcgtttgcaatggcgaaaggctgatattgctattggtaaggctggagttcaagctacggagaaagcaggagcctcgacggttgtattagatgaaacagaccttgaactgccagatattttaacggagttacaggatcgtactcaactgacccgtcgtacaatcatcagcatcttgactggaagtgggcgtctggatgattttaagcgtaatccacagcaatttatcgaattagcagctgaaataatcaatcgttgtaaacggctagccttagtggacggcattaaatatcggatgttaggtgaacagcatgtttacgcacaggaactattcgaaaaagaggaacttaccggttatctccagaatatgttaatggacacccacaagtcgatttatgaacatgtagtctacgactcaactacagaacgggactttgctgatgcgctggagaagaatgatgcaattaaactttatgccaaattacctggctggtttaaagttcctactccgctaggtagttataacccagactgggctgtacttgtcgaggaagataatgagcagcgcctttattttgtggtagaaaccaaaagcagcctctttgcggacgacttgcgtgataaggaaagtgctaagatcctatgtggcaaggctcatttccaggcccttgctatggaaagtgcaggacttaatgggaatccggctcgttatatagtggcaagttccgttggtgacctcatggttgaagcctctaaggataactag

SEQ ID NO: 391464 - DNA, 3798 bp, Salmonella enterica
ttgacagttacactgcgagaagttgatgattcgggtaaactgggagactggatcaccaataaatcacatgtaaatatagatggtactgcggaggcaggaagtaccttaactattaaaactcagggaggagtcgttgttactacttttgaagtaggaagtgatgggcattggagtgcagagttagatctgagtaacggtaataatatctttgttgttgagtcagtagataaagcgggcaatagtcaacaaaaagaacttttagtagaatatgacactcagatcgaaatcagtgctatttctttaagccgagatagtaatagtggtgataaatatgatctcattaccaacgataaatcgccagagctagtcgcaatgaccgaacctggagcaacagtacaggtttatattaatgatgtattgcaagctacggtagaagctaattctgcaggtaatgttagttataccatgccagcgaatagcgccgatggtaactatcatgtgcaatttgttgctaccgatatagccggcaaccgaactgaatctgctgttgcgacagtgacgatcgattctgaaattgctgtgtttactattgatgaaggttcattaccgactatatcaaatagtcgggcattgtcagtcgctgggcaaggtgaggcaggcgctcaggtaagcatctttgtcgataataagctggtcaatgtggtcatggttgaggctgatggttcctggcgtgctccgatattgctgcaagatgatggtacgtttaagattcatttcagcattactgacattgctggcaacacccaggcgagtaaaaatttcagtgttgatgtcgattcatcaaccgaatttccaacaataacccttgaagattcgagtaactcaggtttggttgacgatctgattactaatcataatacgccatcctttgttggtactgcggaagcgggtgctacaatccatttttatgttgatgaaaaaattgtggcaaatatcctcgttcaagatgatggaagatggtcatatcaatttgataattctctgaaagatggtgaatactccattcgtgttgttgcggaagataccgctggtaacagggcggaatcacctcgcttaattgttacgatagataccagtacatacattgaacctcctacgctgacagcaggatctgataatggtatgtatattaacgacggcgtaacaagtcaaaccagacctcagtttagtatcaacggtgagtttaaccagagtgtccaaatttacattgatggcaagctagtcgatacggtcactgtgacagacagaaaccaggtttatcaacctgtggctccattgggtgacggttctcatagtatttattatgtcattaccgataaggcaggtaacactgcaacatctaaaacactagatttttcaatagatacatcgaataaaactccagtggtgatagaggccattgatggacatacactagcggagatgaccggcagtgatggtaaaatatatataacagatactactcataatataatttttcgcggaagtgcggagcctgatagtttaatggatttaactatcaatgggctaaacgtaggccaggtttgggttagtcagacaggagagtggcagatgccagtcaactctgtttatctctctcaaggtcttctggagataaaaataaaatctacagaccgtggcggtaatgtaaacgagaaaagttattctatctgggtggatacgatgattgaggactttaccagtgaacttgatgacaataaatcatcgtcgcaaaatgactggtggagtaataatacccttatcactatgagaggtctgggagaggctggcgcgacggtatcactagtgctggcaggtgtcacattggcaacgacagtcgttgcggctaatggtcaatgggcattatcgaccgatcagcttccggaaggaaaatacgatatcactttgagtattgaggacaacgccggaaacaggaaggaagagatccgtgaaatattcatcgatcgcgctgcaccggtagcacctgctataacatattcggacattgtcgatgatctcgtcattatgaaagggacgggcgaagcaaaatcaaaattaacgataactgatagcgagggtaatatatatacattaaccgttcctgataacgggaactggagtatggctattccctatccatcagaagggaaatttactatatcgagtacagatcgaattggtaacaccagtgatgttgtctcagtcgatttaataaaagagatacccactatttcgttagcggtagattcgaacagtggctctaaagatgacaatattacgcatgataaacaacctacctttattatcggaaatttagaaagtgatatcgttaacgttcaaatagatattaacgggatggcatataatgctgaaaaaagagcggatggcgtctggttctttacgccagataccgctttagctgatggcacctatacgatatcggtaactgcgaatgacgcggcgggtaatcagaaaaactcgttaccgattactgtcacgatcgacactacgctgaaggtgccggagatcgcgctggcggcaggcgaggacaccggcgcgtcaggcagcgataacgtgacaaatcacacccagccgaagttcactctgcagcatattgacgcggatgtgaccggagtgaccgtcagcgtggcgcataacggaaccaccgacacctatccggtcacgaagggggatgatggctggagcttcagtccgtcagcagcctggagtgatggtagctacacgctgagtgtgacggtggtggacggtgcggggaacacgcagcagtcatcatcgctgacggtgacggttgacagtacgctgaaggtgccggagatcgcgctggcggcaggcgaggacaccggcacgtcagacagcgataacgtgacaaatcacacccagccgaagttcactctgcagcatattgacgcggatgtgaccggagtgaccgtcagcgtggcgcataacggaaccaccgacacctatccggtcacgaagggggatgatggctggagcttcagtccgtcagcagcctggagtgatggtagctacacgctgagtgtgacggtggtggacggtgcggggaacacgcagcagtcatcatcgctgacggtgacggttgattctactataacagcgacagcgcctgttgaggctggtgatgttagtgagttcgccatggcaaccgatgtagctcaaccggaatctgaaagggtcagcattgaaagtgaaaaaaatcatagcccagctatgttttcaatgatgtctgcggttggagaagtggctgcgcaggaggatgcctataacatcgtattattaaataccgagtctggtgatgtcactgaacgttctattagtcagacaccatcttttgcaatatcagtacctgataatattgtgaatgttagtgttatgttcgaaggagaagagattgatttgccgattaataatcagaaggcaatatttgaggtgccagtacctttgaatgatggtgagtatactatagatgtgaaattcatcgataaagatgctgattatctgattaaggaaaaaatattctcagttgatcattcttcggcagatatagttaattccatgagtgaaagaggcaacagcgaggatgaagttaacgtctcagccccagaaagtgctgtaacacaccataataatggtgctgttgagatattcactattagtgaagtaagtctccctgtagataatcaagaagaacacgcataa

SEQ ID NO: 391465 - DNA, 816 bp, Salmonella enterica
  misc_feature (774)..(802): n is a, c, g, or t
gtgtcccacgctgtaatctgctgctatcgagaacgacagacatcgctaacagtatatatggaaacatcaaaagagaagacgataacaagccctgggccatacatagttcgattacttaacagctcactgaacggctgtgagtttccattgctggcaggccgaacactgtttgtggtaggccagagtgatgcgctcactgcttctggccagctccctgatatacctgccgatagcttttttatcccgctggaccatggcggaataaattttgaaatccaggtggatacggatgcgaccgaaattatactccatgagctgaaagaaggaaattctgaatctcgtccggtgcaattaaatacgccaatacaggtcggtgaattgcttatcctgattcgcccggaaagcgagccgtggacgcctgagcaacctgagacgttggagacgtctgaaaagaagatcgagccgcgttttaaaaacggaattgtggcggcactggctggtttctttatattggggattgggacggtaggtacgttatggatacttaactcgccgcagcggcaggccgcagagcttgattcgttgttgggccaggagaaagagcgctttcaggtgttgccaggacgagacaaaatgctctatgtctctgcgcaaaatgaaagggatacgctgtgggctcgtcaggttttagccagaggcgattatgataaaaatgcgcgagtgattaacgaaaacgaagagaataagcgtatctctacctggctggatacttannnnnnnnnnnnnnnnnnnnnnnnnnnnngcgaaacaatatga

SEQ ID NO: 391466 - DNA, 237 bp, Salmonella enterica
gtgacagcaaaacaacgcaatactcagagcgtcacagtgactgtggaacggggattattgagcctggcgcgtgaggccggtattaacctcagcgccactttaaccgccgcactggatgcggaactgcgtgagcatgccacgagaaaatggcaggaagaaaacacggaagcccttgaggcattaaatcgttttcatgatgagcatggttgcttcagcgatgaatacaggacattttaa

SEQ ID NO: 391467 - DNA, 315 bp, Salmonella enterica
atgcagtttactgtatacagtaatacaggaaaaatcgtggcttaccctttgttgcttgatgtcacaagcgatattatagggcagctgaaccggcgggttgtgatcccgctgttgcctgttgaaaaatatccgggcgctgcccgtccggagcgaatgatccccattatcagactgacggacggcagggaatacgcagtaatgactcacgaactggcgagtatacctgttcgtgctctgggggctgaattctgcgatgcggctcagtatcgtacacagataaaagctgctgtagattttctctttgacggaatttaa

SEQ ID NO: 391468 - DNA, 3723 bp, Salmonella enterica
gtgctgacggtggaggcgaccgatattgcgggcaatacggcgacgcggacgctgggcttcaccatcgacaccacgctgtcaacgccaaccattgaattagcgccagatcaggataccgggcaaagtaagaatgataatctgaccagtttaactcagccggtttttgttttgggtcatatcgataatgatgtccaaagagttgaattacagattgagcataacggtacatttaaaaacattattttaaccgaatcggctgatggatggcgttatcgacctgacgcggcattaaacgatggtagttataaattgaccgtgacggtaactgatacggcgggtaacaaaacgacatccgctcctttaacggtaacgatagatagtacgttgagtaccccggtaattgcgttggctaatggcgaagacagcggcgtggttggcgatcagcttactaaccacgatcatccggtatttgacttgagccatattgattctgatgccttgcacgttatggtcagggttactcataacggtagctctcatgaggaagcggcggtatttaacaatggtaaatggagtttcagtccttctgtgagttgggcggatggcttatatcaattagctgttgttgtagaagatcgggcggggaatgtaaaagaatctgcgcaattagatgtccgtattgatactacgaccactatcaacaatatcgtgttgcttaatgacactggcgttctcggtgatcaattaacgaataacgctaaaccatcattcagagttgaggttcctgcggatgttgcccagatgcgcgctactcttgatggcggcacaacctggattccgatacggcgaaatgcggatggacagtggatttttgcaagcacaaataatctgactgatgggcaacatacgcttcgtatcgaggctacagatacagcaggtaacgttgcgagcaaagatttagtctttaatatcgatactcacttacagattccgacaattgctttgggggccggacaggatactggagcgaatacttccgaccatattacgaatatttcacggcccacttttgttattggcaatgttgatgccgatgttattaaggtaatggtaactattggtaccaatacttataacgctactaaagtgggggggacatgggagttcagaccggataatgcgattcctgatggttcttataatgtgagcgttactattgaggataaagcagggaatatagcgacatctcaaccgttatctataatggtagatacgagagccgaaattaatagcgtaacgctattaacagatagcggtgatagctcttcagataatataaccaacgtaaacaagccgcagtttgaaattgtggctgccaatgatactgtacaggtacgcgttaaaatcgataatacgggtaattggattgatttaacgcagagtgttgaaggacactgggaatttaatgtaggaactgcattacctgatggtcaacattcactattagtggaagttgtcgatgttgccggtaacgttgcacagcaaacgcttaattttacggttgataccacgctgcgtgagccaaatattgtgcttgaccctacgcaggatactggcgatgacagtaatgacaatattactaatattaataagccgacatttattattggcaatgtggataatgatgtgtcacatatcgttattcatcttgatggtcgggattatatcatcgaaaataatggtgctaaattaacatttacaccagataagccgctgacagatggtcatcatacgcttactgttacagtgacagatattgcgggtaatacaaaaacatcagctgaactgcaggttgaaatagatacccaggtacaaattgacagggtttcattaacaaccgatagtggtgttaatgatagcgatagaatcactaatgttgctcgtccatcgtttaatattgtaacacctgatgatgtgaccaaagtattggtttctttcgacggtgttaactggagcccggcaagtaagaatgcagccggacagtgggactttacggcgggtagcgctctattagaaggtcattatgtactccatgtgcaggcaacggatcgggcaggaaatacggctaattccagtcttgcatttacggtggatacacatgttgatggccttaacattaccatgctggatgatacagggaatgacgcggcagaccgtataaccaatattacatcgccgcgttttgaaatctcagccagagaatcgctacaggttgtaacggtgacgttaaatgggaacatcaccactctcaacaaagggatgggtaataagtggatatacactcccgaaataccattacttgatggacattataaactagaggtcactgctgaagatattgctggcaatactattaaccaggagatatcgttcactatagatacgactgtacctgtgcctgatgtcgatttgttggatgccgatgactccggtgaaagcgctgtagataatattaccaatgtcactaaaccacgtttcattattagtgatattcctaccgatattgacactgttacgataaaaattaacggtgtctcttatcctattactctggatggcagtaacaccgggacattccaggttcctgtggcgttaaaagatggtgtctacgaagcggttgtcgtcttcagagatcttgcaggtaatatatccgagacgaaactaccatttaccattgatacggcaacaagtgttagtgttcgaatggatcccacatcagatacgggaagttctaatagtgataatctcactaacagaaaaagtcctaaattcggcggtactgcggaaccggatgcaaaacttgttattaccattatcgatgatacatcaggtcatgaggtgttgaaaaaactggtcacggttggtgttgatggtaactggagtatgacgccagatgccctggcagatggtatctacacaattaaagttgtctcaacagacgttgcaggaaatacggcggaggcgcaagatagatttactatcgatacggtaacgcccgatccaacaattcagcttacggattcatcaattgatgatatgcatgaagctaccagcctgcgacctgagttcaagggtatcgcagaagcattttcaactattatgatccagtgggatggcaaagttatcggctcagccaatgcgaattcgaatggcgaatggagttggactcccccatcaatattaacaccaggttcttatgtcattagtatcgttgccaaagataaagcgggtaatgaatcgtcacaagttgactttccagtcgtaatacctgttattgatgtaacccctcctacgattaagctaagtgatgatagtgatagcggggcattgggggactttattactaacgataaaacgccgactcttattgggagcacattacccaatactattgtcagcatttatatcgacggtaagaaagttggcgaggcaacatcggataccgcaggtcgatatgccttccagatgcaggaacagcctgacgggacgtacgttgtggaagttggtatattaaatccacgcgtcaatgaagaaattcgctcagcagccgttagcctcgttattgatactcaggtcgctgaccttgaatggcatatatctgggatacatgaagacaaatatattaatactgtaacgccccaatgcccgcctgcagtagtataa

SEQ ID NO: 391469 - DNA, 876 bp, Salmonella enterica
gtggactatattaccgaactttactgcctcgtcgatgatttttggcaatccgtcaaagaacaaatcgataactacatgatttcagatgataaaaaacacagaaaccgtcaatccatactctcgctttcggagatgacaacactggttattctcttccactccatgagatttcgacaatttaagaagttttatcagtatgttagtatgtttatgcgtcgggagtttccccgtttactatcctacaaccggttcattgaactcatgccccggtgtatcgttttgctaacggtgctgtttgattctcttaaaggagcatgtacaggagtctccgtcgttgattccactccgctggccgtttgcgataatcttcgtatcagtcgtcataaagtgtttgatggatacgcagaacggggtaaaagctccacaggctggttctttggattcaaattacacgtgattattaatcatctcggtgaaataatcagcgctcatctgacggccggaaatgttgatgacagaaaaccagtaccggatatggcgggtggtatttttggcgatctcttcggtgacaaaggttatttgtctaacccactgaaagaaaagctaaaagacatgggaatcaatctcatcactaaagtcagaagaaatatgaagaaggtgaagcatactgactttgaaaaagcggtactcagtaagcgatctgttattgaaaccgtttttgatgagcttaaaaatttgtgtcagattgagcatagtcggcaccgctcaattaataacttcatagtcaatttattatcaggactggtggcttattgcctgatggacaagaagcccagcctgtcggtaagtacgtcagcccctgcgttggtagcatga

SEQ ID NO: 391470 - DNA, 237 bp, Salmonella enterica
atgaagtaccagcaactaaccgagggtcaacgataccagatatcagtgctgcgtgaggataatttatcctgccgtgagatcggcattcgtatcggtgtcagcaagtccactgtatcccgtgaggtcaggcggaacaggacggatggcagttattcagcagcagaggctcaacagttgagtcgtaccagacggcaggcagcagcaaagcgttttatcggcccggacaccatattttaa

SEQ ID NO: 391471 - DNA, 1383 bp, Salmonella enterica
atgactcgttcatcatccacttcaaaacattccagttttttaatactggaatgggatcctgaagatcctgtcttctggaagaataaaggccacagtattgccagccgaaatttatggatttctgtcccttctttattacttactttttgtgtatggatgttatttagtactatcacggtgaatcttaacaaagtaggatttaattttacaactgatcagttgtttatgttgacggcattaccatccgtttccggagcattaatgagggttccttattcgtttatggttcctgtttttggtggccgtcgctggactgcattcagtacaggcattttgatcattccttgtatatggctgggcattgcggttcaggacaatactacaccatacagtatctttattataatttcattattttgtggtctggccggtgcaaattttgcctccagcatggcaaatatcagtttcttttatccaaagaataagcaaggatgggcgttaggaataaatggtggtttgggtaaccttggtgtaagtgttatgcaattaatcgctcctgttgttatctctttttcaattttttcgtactttggtggaggagaaaagctaactaacgggtcttttttgtttcttgagaatacagcctggatttgggttccatttctggtaatattaacctttgctgcatggtttggaatgaacgatttggttacagctaaagcatccctgagagagcagcttcctgtacttaaggttggtcatttatggttactaagtttgctttatttagcaacttttggttcgtttattggtttttcagctggttttgccatgctttctaaaactcagtttccggatataaatatactacattttgcattttttggacctttagttggtgcgctggctcgtcctgtgggaggtgctctttctgataaattcggaggggggcgaatatgtcgtataaactttatgataatggcattattcagtgccctgatattccttaccttgccaggaaaaggagctcatggttatttttttgctttttttggcatttttatggtcctttttttaactgctggtttaggtagtggttctacttttcagcttatctcagtagtatttagggagattatagctgacaggataagaaaaaatggtggagatgaaatacaaatatcgagagaatccgctaccagaactgctgctgctttgggatttatttcagctatcggtgctgttggcggttttttcattcctaaagcattcggtacatctcttgttcttacaggatctcctgcaggtgcaatgatgttatttcttgtattctatattgcctgcttctttattacatggctggtatatgagcgtaaacgttag

SEQ ID NO: 391472 - DNA, 720 bp, Salmonella enterica
atgacgagtaaatgtcgcgccctggtgccgctcagtccggtgtgtcaggctgccctgaaagccgccacggagacggaaaaccgccgccagcgcgggagaaggctggctgcttacccgtatgcgatggcttttttccaatttctcagtggtcgccgccgtgtgagcctggaggaacttcgcctgttctccccgacgctgacggcggacgcactgcgcggcagccggtcgcagtggctgaatgccgtcgatatgctgattgaaagccggggtgaaatctgttgcctgccgctgccgtctgatgcgggcgaccggctttttccgtccgtgcggttccgtgccggtgaaagagaccgtcagaaaatgttgctgaaggagcagaaatactcccgccagctgcaccgcgaggcggtgagccgggcaagggcataccaggcgcgtgtcgggcaggccgaaatcgagctggcctttcataccccggcgacagtgggcagctggctgtcgcgctggtcgggcagtgacgtaccggattacgagctggagagtcagttctggcgctggagcgaacgttttccgtcactggccggatttgagcgggggctgtggcaggacgttccactttggcgggtggtgcatgaagccggcctgtcgggacgggaggcgtctgcgcatgtccgtgagctggagcgctggatggtgccaaacaaactgcgacaggagtaa

SEQ ID NO: 391473 - DNA, 432 bp, Salmonella enterica
atgaaaaatcaaatcacagttgatgtactgaagaaaatgaccgccgcagagtatgaagagtaccgtgcaggcggtgacgaactgcgccgcgggctgactcatgacgtgatgcggtatctggagatccccgacggattcgacatgaatggcgagtatgccggtgaatttggcggtttcttccccgtccaggtgcgtttcaccccgtcccacggtaatttccatcttgccgtgtgcagccccggtgatgtcagtccggagtggctggttattttcatgacaggccggggtcgtcccttttccgtcatccgcaccctggcatcattctgtcccgtacagattaatcatacgctgcggctggtcgcccgcctggatgatgacgggtattcgtttgccgatattatcagcattctggcagaggagggcggcgaatga

SEQ ID NO: 391474 - DNA, 2046 bp, Salmonella enterica
atgtcagtaacagagtctaaagcaaaacccgcagtaaaaaccagccgtaaggcgaaaaacgccgcgatcgccagcgccagtgacaccatattgtctgcggtgctggcgcagaccgaagagcagcacgtaccgctgtccgccctggtcaaatccccgatgaacgtgcgtatcgtgccgtattccgcagagagcgtccgcgaactggcggactctattaaagggattggactgctccagaatctggttgttcacgccctccctgacggtctgtacggcgttgccgctggcggtcgccgtctggcggcgatgaatttgttggccactgagaacacgatcaccccggactggcctgtccgcgtgaaggtggtgccggatgatttcgcgaccgccgcttcactgaccgagaacgggcagcatctggaaatgcacgttgccgaacaaattgcgggattccgcgcgatggcagcggaaggtaaaacccccgcgcagacaggcgatctgctgggctattcgccccgccacgtacagcggatgctgaaactcgcggggctggctccggttatcctggaagcgctggctgcggacaaaatcaccacggagcactgtcaggcgctggcgctggaagacaatcctgaccgtcaggtgcaggtgtacgaggccgcctgtcgtgagagctggaacaataagccggaggtacgggtgatccgcaatctgatcaccgaaagcgaagttcccaccctcaacaacagcaagtacacgtttgtcggggaaaaggcgttttccggtgatgaaattcgcgctgacctgttcagcgatgagcagggaggttttgtggacaggctggcgctggataccgccctgctggaaaagattcagtgggtggcggagtgcctgaaagaggccgagggctgggcgtggtgcgcgggacggatggagcctgtcagcagctatggtgaggatgccgcagtgtaccgcattcaggacgagcctgatgaggtttacacggagcaggaacagcaacgtcttgatgaattacaggaacggtacgacgaaaaccagaccgccagcgacgaaacggatgcgatggcagcggagatggctttcatcgaatgtgtggcgcaaatccgggcatggacgccggaaatgcgcgcacagtccggcgtggtggtgtcatggcgtcacggtgaaatctgggtccagcgcggggtgatgctgcgtgagcagtctgaaacggaagacgaacctgcccaggttaaaatatatgagcgccagccagagcctgtggacgatatcagtgttcccctgctgaccagaatgtgtgcggagcggacgctggcagtccaggcggcactgatgcagcagcctgaaaaatccctggtacttctggcatggactctctgcctgaacgtgttcggtagcggcgcgtataaccgacccgcgcaaatttccctggactgtaagcactactccctgacgaataccgccccgtccggtaaagagggcatggcatttctgactctgatgcaggaagggaaacgccttgaaaaactgctgccggagggctggacacaggacttcaccaccttcttcaccctcagtgccacagaccttaccgccctgctcagtttctgcactgcatgcagccttgacggtatgcagacgcgcggcaccggaggcaccacccgcagcccgctggacaggctggaaaccgccatcggattccatctgcgcgactggtggcaaccgacgaaggccgatttcttcactggccttaaaaaaacacaaatcatcgccgcgctgaatgaggccggactgacaggcgcggcgcgggacgcggagaagctgaagaaaggcgacgcggctgaactggctgaggacaaaatgcgggacaaccgctgggtgcccgtctggatgcgagcacctgatgcacaaaacagcgattctgatgcgcctgataccgtgactgatgcagaaaatgcgggttctgatgctcaggatggcagttctgatgcagatattcacaaaaacctgccggatgcagcctga

SEQ ID NO: 391475 - DNA, 207 bp, Salmonella enterica
atgcagatgctcggaaaccgcccgcagaattccgatggcggatcgcagccgtcacagcagccgccgcagggaaaccagccgcaggcggcaaaacctgccgccgccgcgaaaaaaggacgcggaaagactaaaggcaaacagaccccggcagcacccgtcacgccgtctgaaccgccctatgactttgatgacgatgtgccgttctag

SEQ ID NO: 391476 - DNA, 408 bp, Salmonella enterica; identical to SEQ ID NO: 379281

SEQ ID NO: 391477 - DNA, 2490 bp, Salmonella enterica
atgaaaattacccggcttgccattctgattaccctgacattttccgtcctgaagtcgcaggccacggagtttaatgccagcctgctggacagcgggaacctgtccaatgtggacctcacggccttcagccgcgaggggtatgtggcgcccggtaactatattctcgatatctggctcaatgaccagacggtacgggaacagtatccggtcagggttgtaccggctgccggacgcgatgcggccgtcatctgtgtgacaaccgatatggtggccatgctgggtcttaaggataagattattcatggcctgaaacccgttaccggtatcccggacgggcagtgccttgagctgcgctccgctgacagtcaggtacggtacagcgctgaaaagcagcggctgaccttcattatcccccaggcctggatgcgctatcaggacccggactgggtccccccttcacgctggagcgacggcgtcacagccggcctgctcgattacagcctgatggccagccgctacatgccgcagcagggggagacctctgacagctacagcctctacggcaccgccgggtttaatctcggcccgtggcggctgcgcagcgattaccagtacagccgccttgacagcggacatggggcatcgcagtccgatttttatctgccgcagacgtatctgttccgtgctctgcccgcactgcgttcaaaactgacgctgggacagacgtacctcagttccgctatttttgactctttccgctttgccggactcaccctggccagcgatgagcgcatgctgccgccctccctgcagggatatgccccgaaaatcagcggtattgcgaacagtaatgcgcaggtcaccgtcagccagaacggccgcattctgtaccagacccgggtgtcgccggggccttttgagcttcccgacctgagccagaatatcagcggcaacctggatgtcagcgtccgggaaagcgacggcagcgtccggacctggcaggtcaacacggccagcgtcccctttatggcacgccagggacaggttcgctataaggtggccggcggacgtccgctgtacggcgggacgcataacaacagtacggtcagccctgacttcctgctcggggaggccacttggggagtatttaacaacacgtcgctgtacggcggcctcattgcctccaccggcgactaccggtccgctgcgctcgggataggccagaatatggggctgctgggtgccctctccgcggacgtcacccgttcagatgcgcggctgccgcacgggcagaagcagtccggttacagctaccgtatcaactatgccaaaacgtttgataaaaccggcagcaccctggcgttcgtcggataccggttctcggaccgccattttctgtccatgccggaatacctgcaacgccgggccaccgacggcggcgatgcgtggcatgaaaaacagagctacaccgtgacttacagccagtccgttccggtactcaacatgagcgcggccctctcggtaagccggctcaattactggaatgcacagtccaacaataactacatgctcagcctcaacaaagtgttcagtctcggcgaccttcaggggctttcggcctcggtgtcatttgcccgtaaccagtacaccggcgggggcagccagaaccaggtctacgccaccatcagtatcccgtggggcgacagtcgccaggtgagctacagcgtgcagaaggataaccggggcggcctgcagcagaacgtgaattacagcgatttccataacccggacaccacatggaacatcagcgccggccataaccgttatgacaccggcagcaacagcagcttcagcggcagtgtgcagagccgtctgccgtggggccaggcggcagcggacgctaccctgcagcccggacagtaccgcagcctgggcctgagctggtacggctcggtgactgccaccgcccacggtgccgctttcagccagtcgatggccgggaatgagccccgcatgatgatagataccggagacgtggccggtgtgccggtgaacggcaacagcggggtgaccaaccgcttcggggtgggcgtggtgagcgccggcagcagctaccgccgcagcgatatttcggttgatgtggccgccctgccggaggacgtggacgtcagcagctccgtcatcagccaggtgctgacggaaggcgcggtgggctaccggaagattgacgccagccagggggagcaggtgctcggtcatatccggctggcggacggcgccagtccgccgtttggctccctggtggtgtccgggaaaaccggcagaaccgcagggatggtcggggatgacggtctggcttacctgaccggactcagcggggaagaccgccggaccctgaatgtgtcctgggatggccgggtgcagtgcaggctcaccctgccggaaacggtgacactcagccgggggccactgttactgccctgcagataa

SEQ ID NO: 391478 - DNA, 1011 bp, Salmonella enterica
atggcagaactggacagtaaccatgacggaaaagtgacggcagaagaaatcaggcaggcgctggcggtacgagatccgctggtgaaggatgtggtaaaccggctggtagtcaaacatcacagtgaatggtatggtggccgctcgacaggccgctgggaagggttttataaggatctggacccgctggagatccagttctgtgataaatggcaggcagacctggagtggatgagtcaggtgccgccctttgataaagatgaagcggtgtggcattttcatccggtggtgtttttggatgtgttaaaaccgaatactcagtggtttgatatcgaaaaatttatctctatatataaattacaacacccagttaaatttggtttctatgaaagaggggtgaagataaaaatacctgatttaaattcagcttcggagaattctcttcgtaacctactagtggagatgagggggcaatattacaaatattttgatgagtttaatgtcagatatatcgcatatatgctttcaactctaaggattgaatcatatcaatatagagaaaagcatttttttcaacccacatccgaaagaatatcttatgcacaggctgaaattgattatggttcaggtccaacggctgcagataaaatccgagcaataaagaatcataatactacgataggtgatggctacaaatatagaggtcgaggattagttcagctgacttggaaaattaattatgagagttttaaaaagttgactggtgaagatttagtaggtttgccagacagtgcttctacattaccaatagcagttgaaataatgatggtaggaatgcgagatggaggatttagatcagggcatactttggcaaattaccttggtggttcaaattgtaactattacgatgctagactgataataaatggatatgttcatggtaaaccagataaagccgatgaatttgaagattttgccaggttatttgaaggggttataaatgaaagtatataa

SEQ ID NO: 391479 - DNA, 909 bp, Salmonella enterica
atgaaagtatataagtacgtaattgtatgtgtttttttatcatttatagcacctgcgattgctgatagcgtctcctgtatggattcaattgataaggattgtgacttcatagcaaaaagtaaaggagatgatatttacatttataagtctaaacagtccaagcctgtttttggcattcctgaaacagcgagttcagttgaagcagtttctttcttgaagaaaaaaaataagtatatcctcatcaaagaaacctcaaacagcaacagaacaaaagaaatattatcatttgatgataaactgaatgagtttaaatatttttatctgacaagtgaaattgattttaaccaaaataataaatattggcatggtatctactgttttttatcaaatgcttcaatttcaagttatgcaagttctccacttaagtgggcttttgataatgtatgtaaaaaacgttccgaaactcagagtgaatataagtatgttggtactgatttatttttttctatagacagtgtaattaatggtgaaatgggaaagatgcaattggttgctcttaacgcgaaagataatgacaatgttaatatttcaaatttcggttgtttagaaaattgttcttcagtcagcgagtttacgggaaagatcaacaataaatatgttgtaaaaatgtctttaaaccttggtgaaggaatgattgagggtcattattattatgacaaaataagggtgcttataccgataaaaggtataaaaaatgataaggaaataatccttaaagttgaagggaaggatggtaaaattaaagagatctttgacggaatatttgatggaaataagattcagggagtgtgggataataaattaaataatactaagtatccgtttgtattatatagtgctcttgattga

SEQ ID NO: 391480 - DNA, 237 bp, Salmonella enterica
atgaaactttttttacttctcttaattagcttttctgctttctcatttgagaattgcataagtgaaaatgtaaaaattttagaacaatactctcttaataactataaaaaattagttgtcacaattgatataaaccacatagtcgcaaaacaaaaaccgtcttctgtccgacttagcagggaagaagaaggcggcattgtgctgacatttgacgggcagacagaaggagaacggtaa

SEQ ID NO: 391481 - DNA, 432 bp, Salmonella enterica
atgaaaactgaatataccccggaagaccttgccagtatgacagccgaagagtttgaactgtgccgcgaggcgggacatgaatttcgccgtaacctgacacatgccgtaatggtgatgctggcagtcccgggatcatgggatatgaatggtgagtatgccggtgaatatggcgggttgtttccggtacagatacgattcgcccccatgcacggacgtttccgttttgccctgtgcagccccggagaaatcagcgaccactggctgctgttgctcatttccgctgacgggcgttcggtgacgtgtgtacgtgactgcccgcagttcgcgccggaaatgttcagcgccgccctgcgtctggcggccacactggataacgaaggatataacctttgttatatccttgccatgctgacgggggagtgcccctattaa

SEQ ID NO: 391482 - DNA, 2040 bp, Salmonella enterica
atgtcagtaacagagtctaaagcaaaacccgcaggaaaaaccagccgtaaggcgaaaaatgccgccagcgtcagcgtcagtgacaccgtattgtctgcggtgctggcgcagaccgaagagcagcacgtaccgctgtatgccctggtcaaatccccgcagaacgtgcgtatcgtgccgtattccgcagagagcgtccgcgaactggcggattccattaaaggtatcgggcttctccagaatctggttgttcacgccctccctgacagcctgtacggcgtagccgctggcggtcgccgtctggcggcgatgaatctgctggtcactgagaacacgatcaccccggactggcctgtccgcgtgaaggtggtgccggatgatctggcgaccgcagcttcactgaccgagaacgggcagcatctggaaatgcaccctgccgaacagattgcgggattccgcgcgatggcagcggaaggtaaaacccccgcgcagacaggcgatctgctgggctattcgccccgccacgtacagcggatgctgaaactcgcggggctggctccggttatcctggaagcgctggctgcggacaaaatcaccacggagcactgtcaggcgctggcgctggaagacaatcccgaccgtcaggtgcaggtgtatgaagccgcctgtcgtgagagctggaacaatcagccggaggtacgggtgatccgcaatctgatcaccgaaagcgaagtccccacccacaataacagtaagttccggtttgtcggggaagcggcattttcagcggatgaagttcgtgcagatttgttcagcgacgagcagggcggttttgtggacaggctggcgcttgataccgccctgctggaaaagattcagtgggtggcggagtgcctgaaagaggctgagggctgggcgtggtgcgcgggacgcatggagcctgtcagccgctgtggcggggatatcgcagtgtaccgcattcaggacgagcctgatgaggtttacacggagcaggaacagaagcgtcttgatgaattacaggaacggtacgacgaaaaccagaccgccagcgacgaaacggatgcgatggaagcggagatggcgttcatcgaatgtgcggcgcaggtccgggcatggacgccggaggtacgcgcggaaagtggcgtggtggtgtcatggcgtcacggtgaaatctgtgtccagcgcggggtgatgctgcgtgaaccgtctgaaactgagcccgctcaggctccggtatatgagcgccagccggagcctgtggacgaaatcagtgttcccctgctgaccagaatgtgtgcggaacggacgttgtcggtccaggcggcactgatgcagcagccggaaaaatccctggcgcttctggcatggacgctgtgtctgaacgtgttcagcagcagcgcgtataaccgacctgctcagatcagcctgaactgtaagcattactccctgacaaaggatgcgccgtccggtgagagcggtgttgcgtttgtgacgctgtcgcaggagggaaaacgtcttgaaacgctgctgccggagggctggacacaggacttcaccacctttttcaccctcagcgccacagaccttaccgccctgctcagtttctgcaccgcatgcagtcttgacgggatgcagacacgtggcaccggaggcaccacccgcagcccgctggacaggctggaaaccgccctcgggttccatatgcgcgactggtggcaaccgacgaaggagaatttcttcggcagccttaaaaagccgcaaatcattgccgcgctgaatgaggccggactgaccggagccgcgcgggacgcggagaagctgaagaaaggcgacgcggctgaactggctgaggacaaaatgcgggacaaccgctgggtgcccgtctggatgcgcgcgcctgatgcacaggagggcagttctgatgcgccggataccgtgactgatgcagaaagtgcgggttctgatgctcaggatggcagttctgatgcagatatccgtaaaaacctgccggatgcagcctga

SEQ ID NO: 391483 - DNA, 243 bp, Salmonella enterica
atgcagatgctgggtaaccgccagaacggactggcacagaatgtcggtggcgggtcgcagccgccacagcagcagccgcagggaaaccagccgtcaggcggtcagcccgcatcatcacaggcggcaaaacctgccgccgccgcgaaaaaaggacgcggaaagactaaaggcaaacagatcccggtagcacccgtcacgccgtctgaaccgccctatgactttgatgacgatgtgccgtactag

SEQ ID NO: 391484 - DNA, 387 bp, Salmonella enterica
atgctcctgaaatccggggttagattgcatgaatgctttgaaatactgcagtcccgggctgagtcaaagtggttatcctcccgcttggtagaaatcagtaacgggatttcagacggtttatcgctcggggaagctatggatgaatccccttatactttcccagatgaagaatctatctgctatatgcagttattgtgtaatatgtcaggattcgaacgtgctctgggttcttttgcggcgcactggcttgaaaatacggtaatgaaggtcaaaaaggctgcagcctcgtttttactcatggcgatcattgctatgggctgtactctaggacttgtggtacaagcaatatctggtattgagtctgctatccagcaatctgttatgtga

SEQ ID NO: 391485 - DNA, 2070 bp, Salmonella enterica
  misc_feature (2055)..(2064): n is a, c, g, or t
atgacaacagaagagttaatatcgaagatcgctacgcaaaaatgtgtagtggtatctggtgaaagcggaaccatattttatgttgaccctcggcacagtagcaaaattgtattagtcagaggtgagggtcagtgtcacatccttatgattgcgcgctcataccgccttgatgcttatgtaatgacttataaggatcgggtagagcgtaaatttcgggaactgaaaatcctgatctgtgatgttgctgatattcatgttgtaaacggtttggcgtgtaacaaagcatcccaccgtagtggagaagatacagacacgcaaaaagtggtcaccaggatattgaaggaagccagtaaaatgtattcctctgatgtccattttattgtgaataaaggactctgtcgtatccggtttcgtattaagggcaatttagtggactggacacaactttcagaaaaagaaggtatggcgctctgtgccactatctaccagagcatgtgtgacgtagccgaaccgacgttcaggccttctcaggcccaacgctcaaggatgaatgacgtctatattggtgatattggtctgacaggagcacgagtgaatacgcgtccactagattgtggtttcctgatggttcttaggttgttttatgcggagagcaacatcaataagactagcctggaacagctcggctatctacctgagcagtgcaagcaactggaaatgcttagtaaataccgggctggtattgttcttatttcaggtgctacggggagtggaaaaagtattacgatgaaaaccgttatggatggattattggaacaatctaaaggcctccacgtgctgactctggaggacccgccagagtatgtgatccggggagcaaaccaatcgcccgtgatgggcgatcgcaatgatgccgcaaatatggaactggtatgggggcaggctattgcggattcgatgcgtcttgatcccgatattattatgatcggcgaagttagagacagtatatctgcgaggatggcgttccgtgccgctatgactggtcacttggtctggaccacaatccatgccaatactgtaatgaccattatgtgtcgcctgcaggatgagggtgtcatcggttcactattaacagacgaatcaattctgattggcctcgttaaccagtcgctggttatgacactttgtgagcaatgtaaaatccctctgaaagggaatgaacacaaggtggcacctgaccagcttcaacgaattgagacctgctgtgacataaataaagtatatatcaatggagatggctgtgaggcctgcggcggttcttcttcttccgggagaacggttgtggcagaaattattaaaaccagtgaccgttttatggatgtttacaggacgtctggacgtgcagaggctggtcgttactggcttcaacaaatgatgggcctacgaaaaatggatgcagcaaaaatcagattttataataatattgcaatgcttttagaaaatagggttcagattgtggattctattgcccagctcctcaccattatggagaagggcaatcgaaacagttctactgaagcaaaagtagcccgcagttgttataacgcaatggttgaggggttgtcattttctgaagggctccaggattgggtgacttcttctgaattggcaataatttcagctggagaaatttccgggacgctagataaagctcttcacgatgttattaatcttataagtagcttaggtaaaatacgctcagctctcacgggggcaatagtttatcctgttgtcctgattattatgttaagtgtgcttctgcatattatatcagattctctggttcctaaacttgcggctgtttcgtcgccggaaacttgggaaggggctgcgtatgccttgtataaactcgcgggatggacatcctcgtatggtgttatcatgctgattggtttaattattgctgttatttatattgtgatttcactgcctttgatgactgggaaaattcgtatctggcttgataaaattcccccttggagtctgtataaagannnnnnnnnngtataa

SEQ ID NO: 391486 - DNA, 534 bp, Salmonella enterica
atgcgaataaataatgggttgctggtagcgataaccctgcagtttatttctgcatcagtgatagcttcacaaagtaaaagtgtctcactccctcctacccagaacgagggtatcttaatcacttcagagagtagtggtggggatgagttgattgctcaaaaactgactaaactgaaatcagaagtactcattctgaacgcagaagccaaaaaagctgaagcacagaagcatctgaatgaagtcactggcggaaaaaaacattctgttggagaaggagaaatagtcttaccgagggtaaaaactatttttggtcggggggaaaatctgcatgctgaactcgaactggatgatggtaatatcgtggaagtgagtccaggtgataaaagtatattcggtatagagattacggctattaccaaaagtagcgtggttgttcgcatgggcgataccagtgttagcatacctttactgcatctgagtcataaatcagccagaaataaggataattacattccacaaccgatatttcagtaa

SEQ ID NO: 391487 - DNA, 777 bp, Salmonella enterica
atgcagcagtacgttatccagcgccacatgattaaaatactctggactctcgccgccgaaatacgggaaacccacgtcagcaatctcatcctgactgcccagcaagctaagctgcaattctgcttctgcgccagtagtcccgtcgcgctgttcgagattccatttgcctttttcgccccagcggaagccgatggaaccgttcggcgccaccatctcgccattgctgttaatggcgacggttttccattccgggttattttcctgccccagagaatcaacgagatcggcggcgcgcagcatacggcctgcggcataatacccatcacgttcttcaagcatcaccagcattggcatgtcggtatagcaacggacataatcggtgaagtactggcgcgggttgtccagatggaattcgcgcagcatgacgtgacccatcaccagcgccatcgccgcatcggttccctgcttcggcgccagccacagatcgcacagtttggcgatttcggcatagtccggcgtcaccgcgacggttttggtgcctttgtaacgtacttcggtaaagaagtgggcgtccggcgtacgggtctgaggcacgttagagccccaggcgataatatagctggagttgtaccagtcggcggattccggtacgtcggtctgctcgccccaggtttgcggggaggctggcggcaggtcgcagtaccagtcgtagaagctcaggcaggtaccgccaatcagagaaagatatcgtgctccggccgcataagaaatcattga

SEQ ID NO: 391488 - DNA, 1602 bp, Salmonella enterica
atgaaaactgagcttcctgatgatattgaacaacttaaggccatgttgcgtcagcagcaggcccggcttcgccagtatgccggtcaggttgcgggttatgaacaggagattgaacggctgaaagcgcaactcgacaaactgcgtcgtatgctgttcggccagagttcagaaaaaaaacgacataaactggaaaatcagatccggcaggcggaaaagcgactgtcagagctggaaaaacggctgagcacagccagaggttacctggaagatgctgctgccgttactgaatcccccgaaaccagccctctcccggagcagtcagtagtggatacccccgcagttgccagccgtaagtcatcacgaaagccccttccggcagagctgccccgcgaaacacatcggctccttccggcggaaacagcctgtcctgcctgtggtggagagttgaaggtgatgggggaaacgatctcagagcaactggagatcattaacacggcctttaaagttatcgaaacggtacggccaaaactggcatgcagccggtgtgacgtcatcgttcaggcaccgcttccgccaaaacccatcgaacgcagttatgccagtcccgggttgctggcgcgtatcctggtcagcaagtactgtgaacatatcccgctgtaccgccagtcagaaatatacgcccggcagggcgtggaactgagccgtaaaacgatgatgcgctgggtgtctgaaatggcagacagactcagtccgctgtatatcgccctgaacagctatgtgctggaagccggtaaggtgcatacagatgatactccggtgaaagtcctggcgccgggtagcggaaagacgaaaacaggtcgcctgtgggtatatgtcagggatgatcggaatgcgggttcatccctgccggcagccgtctggttcgcgtactcggcagatcgcaaaggagaacatccgcagagacacctgtcggaatatcagggcgtgttgcaggcggatgcatattcagcttacgacgtgctgtacgaaacaggccgggtgaaggaagctgcgtgcctggcgcacgcccgccgaaaaatccatgacgaggatgcgcgccgtccgacggaaatgactcaggaagcgctcagacggatagcagagttgtacgccatagaagcagagatacgcggcagtccggcagacgaacggcttgcggtcaggaaagccagaagtgtcccgttgatgcagtcgttgtacaactggatacagttgcagaggaaaacgctgtcgaaacatgcggagatggcgaaggcgttcgactatatcctgaagcagtgggaggcactgaacgagttctgtcgtgacggctgggtggaaatagacaacaacatcggtgaaaacgcgctacgatcggtggcggttggaagaaaaaattacctgttcttcggttctgatggtggtggagaaagcgcagcgatcatctacagcctgctggtcacctgcaaactgaacaatgtggagccggaggactggttgcgcgaagtgatcatgaaaatcaacgactggccatcgaaccgggtgcatgaactgctgccctggaacttctcacctgtaaaataa

SEQ ID NO: 391489 - DNA, 348 bp, Salmonella enterica
atgttctccttaccggcaggtacgaagatctggctggttgccggcatcacagatatgagaaacggcttcaacgggctggcgtcaaaggttcagaacgtccttcgggatgatccgttcggtggtcatctttttatcttccgcggtcgtcgtggggatatggtaaaactcctgtgggcagatgcggacgggctgtgtatgttcgtaaaacgccttgagcggggccacttcgtctggccggtaacccgggagggtaaggttcatctgactcccgctcagttgtccatgttgcttgagggcatcaactggaaacatcctcagcatacacatcaggctggcctgcgggtgtag

SEQ ID NO: 391490 - DNA, 630 bp, Salmonella enterica
atgaataaacgagcctggattcatgaagcattaaaccttcgattcaataaaaaaatcaaaataaatcagataagtaagcaactgaatgttcccagaacgacgttacaaagcctgctacgtcgttttgcccgctccggcctgagctggcccgttcctgagggctgtacacctgaacatcttggacgactcctctatccggggactcaccgccaacagaaccagcctgcatccgttgctctggcgaccacacctgatgctcccgtagcacgcagacgcccgaatttccctccggaattcaaacgtcatctggttgagttatccatgcaaccgggggctaatgtggcccgcattgcccgggaacatggcattaacgataatctgttatttaactggcgccatcgttaccgtcaggaactggcctgccagcacggggagtctgtgacattgttgccggtcagtgtctctgctgcggcccccggatcgaatatcccctccactgtggctgaatcgtcttatgacagttccctcagttgtgaggttgccatgccaggaggaactctccggttgcagggttcagtaaccccggcgttattatgtgttctgctcaacgaactgaaaggaggccagtaa

SEQ ID NO: 391491 - DNA, 777 bp, Salmonella enterica
atgcctgctcgtaaagtatgtcagaatttttttaaagatgctctgtcttcatttcatcaatatcgacagaatgctcttactgatgcgacagcggctatcaccagtggggctgcgctgacactttcaagcatcggacgttttctccccggctcaggccaggtaaaaaataaaattaaacgtattgaccgtcttcttggaaacacggcccttcagcaggaggtaccgcttatttaccggagtattatttctatgttaaccaaacatttatcgttatgtgttattgctgttgactggagtagctaccctaccaaagatttccacatacttcgggccagccttatctgtgacggccgatccattcctttactgagtcaggttgttccctgtgtgatgcaacaaaattcagacattcagaatgaatttctcgacgtattatctggcagcatcaatcccgcctcccgggttatcatcatcacagatgcgggatttcataacgcatggttcaaacatataaaatctctgggctgggaatttataggaagaattcggggaaaaaccttactgcaattggatgagcaaggtgcagaatggctaaatccacgacaactgcaggccagcagtactccgaaatatctcggtccgggttcattatccagaaagttgtatgcccggtgtgaagggcacttttaccttcaaaaaaactcaccgaagtatcgcaaagacaaacgatcccggggaaggcaagctcctccacctaaaatggcacaagataagtaa

SEQ ID NO: 391492 - DNA, 627 bp, Salmonella enterica
atgtccctgactgcacttatggcttttgctctgatcatgtcagccgggatcgtaacgccgggtcctacggttctgctgtccctcaataatgcagcccgttttggtatcaaacgggctgtctggggaatatctggcgcggcagttgcagatgtacttctggtaacccttgtctggctgggggcaggtgcggtgctcgctgcatcagaaacgctctttgtgaccctgaaatggatcggggctgtatggcttgcctgcactggcttacggatgctgctttcttctgctacttctctgcctggtaccgggggaactgtcgttcctgcagcgcaggcgcttttcctgaaaagtttttttgttgccatgagcaaccccaaatattatatttttatgacagcactgctcccgcagttcgtaaatatgacacaacctgctttaccgcagtatgccagtctggcagccgttattgtttcaatcgacgtgactgtgatgctgagctatgcagccctggggaaaaagtctgtcaggatctggaaagctaatggcatcagatggatgaaccgtatcagtggcacttttctccttattctcgcgggctccgttgccctgtaccgaaaaagcagtacataa

SEQ ID NO: 391493 - DNA, 300 bp, Salmonella enterica
gtgtccgctgacgtggtattgcgcgttcagaatgcgttcgtggcgcagacgggcgaagtatgccccggtctccgcgctttcagcgtcacctgctgtcaggaagggttcagcataatggtacgtttctccggtggtgatcccttccttaccgggaaggctttcagcgctgtcctgaggcgtcagcgcttcacggtaattgtagtcccgggtggccacactcccgctcaccacgttgtatgcggtctgaatatcccagatactctcctgaccgctgtcactcatcccggcctggttacgtaa

SEQ ID NO: 391494 - DNA, 456 bp, Salmonella enterica
atggatatttggacattgagcgaaaaagccgactttatcgctaacaaacagcaatgcttgcttgagcagtggcggaaatacaataacaccctaactcaggttatcaccttatcgaaagcgaaactatatcagaccataaactgcgatccaggtgatgggatgcgtttctttttatttaactattttgttatccatatacgtctcgccgtagattttaatagccacgccattgagtacgttcttgaacagcgcggcgaaagtaataaggtcctgatcgcctcggctatcatggattgcgaggtgcgtattgatgacatcatcgacaacggtaatcacgagcaagtgcttgagcactacctcgggttgatccgcccggtgtatgacaatatttaccagtccattgacgagaatacgcctttatccctgccgctgtttcagctgaacgctgtggtgtga

SEQ ID NO: 391495 - DNA, 954 bp, Salmonella enterica
gtgaaggcgggtgaaatctggatacagtacctgctcagtctggtgcccgacggtgaatggcagcacatcactttcactgtcccctgcgagttctggtcactgatataccacaaccgctggttgctggcagaaatgagccgtctggcggcagacgtggtcctggaaacaggacggcgagcgggttttctgccgggatgcttcagcgtcatccatacctggggccgcgatcagcagtggcacccgcatatccatctttcgacgacagccggtggagtgaccgacaggcacagctggaagaaagtgcagttttacgcccggaatgtgatggcgatgtggcgttaccggataacagaattgctgcgtcgggaatactggcggctggagatgccggaaacgctggcagcagagagccggacccgccgtgactggaaccagtttctggaccggcactaccgcaggaagtggaatgtgcgggtatcgaaggtaatggacaacgcgacgcatgtggcgatgtacttcggcgcttacctgaagaagcccccggtctccatgagccggctggagcactatgccgggcgtgacgggataatcatgcactaccgcagccaccggacgaagcaggatgaaacactgacgctgagcggagatgaatttatggagcgcttctcctggcacgtgcctgaaaaagggttccgtatggtgcgctactacggttttctgagtccgtcaaaacgggaagtactggaggaggtctatgcactgacagaaacggaacgtaaaacagcgcgtaaagtgacgtggagaatgatgtaccagcggttagtgaaagtggacccactgaaatgtattctgtgcggaaatgcgatgtgtttcagcggactgaagcggggtctgcggctggcggaattactggcgtaccatgagcatctggcgcagatgaaaatttgtgtttaa

SEQ ID NO: 391496 - DNA, 360 bp, Salmonella enterica
atggcccgttcagctaaaccccgtaaacgtaaatcccgggttcgccacgccgattatccccgttatgtggttaaacttcatgaggatgaagaaaccggcgaggacgcacccgtcctgcgctttgatgagttcgaccatgccgtgacctgttgcgctgaccttgatattccctttttcgttgacaacggcaacaaaaagctcgtcttctggtttgtccgcaaagatggctgtgggcaccctgaaatcgcccgctgtacggagcgtgagtttgcctctctctccgcgcatatcaccgccggcgccatgtactgccctgaatgtggcaccgttcattaccctgacgaaaacggccatgcctga

SEQ ID NO: 391497 - DNA, 606 bp, Salmonella enterica
atgcgtaataaaataatacttgccatggcggctgccggtatgatgtgtgccacttctgcttttgctggtacagagggtggtgacgggccctcggggtccactcccacattagccacagcccacatcaccgttaccggaaccatcaacaattcaccctgcgatatcgcagcgggagatgacaaccttactataaattttaatcagttttctaacagacaccttagtcaaccgggggctgccgattcaaggtacaacagggacttcgccattcatctggagaactgttcgtttgatcagggaagtgctccgggggaattaaagatgtccatggtgaccgtgagtttctctgccggggggaacgtcgagccccctgccaatggtgttttccctaactcacaggatacgggaatggcgaaaaatgtcggggttcagttcctggataccagcgggaaggttatcaagcctggctatcagagcaaacagcagttagctcagggtaacaaccagataaacttaaccgctcagttagtcaatacgggcactgagaattctgtcactacggggcatatcaatatcccgctcacctataccctgacatacagctga

SEQ ID NO: 391498 - DNA, 213 bp, Salmonella enterica
gtgggttttccccactccggggggacccagcaggatcacgttctcactacgctcaacgaacgccagccccgccagttcgcgaacaaccttacgatcgatgcccggctggaagctgaagtcgaactgctccagcgtcttaacccatgggaagcgagcctgtttcagtcgggattccattccacgttgatgcctgccgttccattcctgttgtaa

SEQ ID NO: 391499 - DNA, 1173 bp, Salmonella enterica
atgttgagcaaagaggacttttacatgataaagcaaatgcgccagcagggcgtttatattatcgatatagccagtcagatcggatgttctgagagaacggtccgacgcctgcttaaatatcctgaaccaccatccaggaagacacgccataaaatggccaaactgaagccgtttatggactatatcgacatgcgactggctgagaatgtctggaacagcgaggtcatactcgatgaaatcaaagatctgggttataccggcggacgttccatgctgcgttactacatccagcccaaacgaaaaatgcggccatcaaagaaaacggttcgtttcgaaacccagcccggttaccagttgcagcacgactggggggaggttgaggtcgaagtggccggacagatatgcacagttaacttcgcggttaacacactggggtactcccgtcgcttccatgtcttcgctgcgccaaagcaggatgcagaacatacctacgagtccctggttcgtgctttccgctactttggtggtggcgtgaaaaccgtgctggttgataaccagaaagccgctgtactgaaaaataataacgggaaagtcgtgttcaactccgggttcctgttacttgctgaccactatggcttcctgccacgggcctgtcgtccacggagggcaagaaccaaaggtaaggtggaacggatggtcagatacctcaaggagaacttcttcgtcagataccgcagattcgacagcttcgcccatgttaatcagcaactggaacagtggttagctgacgtagctgacagacgggaactgcgccagttcagggaaacgcctgtacagcgcttctcgcaggaacaggagtatcttcagccgttaccggataccgacttcgataccagctacttcgacatccgtcatgtcacctgggatggttatatcgaagtaaggggtaaccgttacagcgtaccggaagccctgtgtggacagcctgtctcgatacggatcacactggatgacgaactgcgtatctacagtaatgagcaactgatggcatcacaccggctctgctctgcttcctccgggtggcagacagtaccggaacaccatacaccgctctggcagcaggtaagccaggtggaacatcgttctctgagtgcctatgaggatctgctgtga

SEQ ID NO: 391500 - DNA, 198 bp, Salmonella enterica
atgtgcggcaaacgcttacggaccttcaacgtggtggacgattttgaccgcgcagcactggcgatagaaatcgacctgaatatcctggcccaacggatcgtgagggtactgggcaggatagtggtaaaccatggatattcgttgaagatgcggatggataatcttccagaacttgtgtctttgacgctggcgaaatag

SEQ ID NO: 391501 - DNA, 1416 bp, Salmonella enterica
atggataattgggttattcaggagttagattcgctggagattggtgatattcgacttgaaaagcggattaaacacctgcttagtacattgagtcattctcctagtgaaagcatacctgtatcctgtcgcacatggagcgaaacaaaagcagcttatcgttgcttttctagtgataaagttacagctgataaaattatggcgccccataaggaaaaaataatagaaagaacccaacagtttgaacgagttttagttttacaggataccacagaactcaattattcaggacagaaaaagaagcaaggagttggtccaagaagacatgaagccgagagagatctatttatccatcctcaattagtaatcagtgagtcaggtgtttgcctgggtatttacgatgattatcaatggttcagaaaagagctcaaaacacagaagcaaagtcgaaaagaaatcactaatgactcacttcataaaaaacatattagtgaaaaagaaacagggcgttggattgaaggttataaaaaatcaacagaactggctaattgctgccctgacactcaggtaatatctgtttcagatcgtgaaggtgatatttacgatctttttgaatgtgcagaaaaaaagaatgggatcaaagccgactggcttgtaagaatgaaatgtattaaaagagccacaatgaacatatcaggatatagagataacttactcctgaatgaaagagtaatgcaaatttgcccacagcagatagttgagtttacccttccagaagggcggggacagccttcccgaaaagttcagcaggagttacgtttagcgaggctgacattgcacccaccaacaggacggagaggaaaattacgatgttcccccgtaacggttacagttcttcttgcaatggaaataaacccgccagaaaatgtaaaaccattaacatggtggttaatgagtagtgtctcgccagatgaacttactgaaccagcacagcttattcaatggtatttattacgatggcaaattgaagttttcttcaaaatattaaaaagtggatgtcaggttgaaaaattacaacttgagacttttgaacggacacggaattgtttggctttatatctcataatagcctggaggatactttacatcagttcattgtataaagttgagccagaaggaaccagcactttaattttcgaaaaaaaagagtgggaatatctttggatactcgtggaaaatacaccaccaccagaagatataccgagtataagaacttcagttctgatgcttgcacggttaggtggatatctggcgagaaagaatgattcacctccgggtccgaaatcgatatggtctggattaatgcgattgatgttatcaataaatgctatagaaattgccaaaaatacttatgggtaa

SEQ ID NO: 391502 - DNA, 1017 bp, Salmonella enterica
atggatgataaatcaatggcgctttatgcgagtattctggataccgtgagtcgaagcgcgttactggaaccgaaaatggcagaaaaaattgttcatacgttggttaatccggatgaactattttctgtgattcgtatcgctttacagcggaattctgctccctggatgcactcaatatggagtgcattgtaccatgccacgaataaatcggaaaatatgacacttgataagataaaagaaattcttttatccaatacctatagtaatgaaatgattgggtcgttaaagtctattcgaggccttatccatccatatggttacaatgcttataaaaccatcttcagacgccctgtttctgaccataagagacaactaccacgacagtttttacccgaacggagccaaatattacgatatagcaattccaccaggcttcgtaatgaaattgaacagcataaaaacgtcgctccggatgtgacaacgtctcaatacatatctttaggggccttgttttcacgtctttttgctgatggggatgtcagaaaacctctggcgagtattgagcataataatatccgaacgcctcaaacgttggctcaaagtttacaagcgaggaaagaaaaggagcaattggcactgagtcagttttatacttctgctacactggtaaaagaaagcgattggctccgtaatgatattatctcaactcaacgtaatttgttacgaacagatcttttgctaaatgatttttggtctgaagagatgcgccagtatgcaccatcattgattggacgtattttgcattgtaatattatcattagtaataatgacgtagtacgtagtgttggtggaaattatcaggataaagtacagctcattgaaactgctgaaggatatattcctcagcatgctaaagatactgattataagcctgcaccattttttactgctttactctcggcattacccgatcagatgcacttcgcaaaaagacaggaaaaactctggcccatttga

SEQ ID NO: 391503 - DNA, 357 bp, Salmonella enterica
ttgattaaaattcgatatccacaatcgaaagccggacagggggcagtcatcgaagccggggatacaatctcagtgtatatgaaaaagggagacccggaaaatgatgccgaaaatcctgatatccagcctgtaaaaattgccactcacaccgtaagtaaagcggagatctccggtacaaatattgagttcatagctgataagtcttattttattgataatgtcaacgacacttttaatggtgttaacgtatttatttactatactgttggagattcaaatacattatgttcttattcagcagagctatatgtagatacagagtctcctggtaattttattatcaggttaattggctga

SEQ ID NO: 391504 - DNA, 237 bp, Salmonella enterica
atgaaaaaaaacagattaatgcctgtaaacataacatacaaacgattagatattccctcatcaacgctttacagtctgagtgagtttatttttaaaagaacacagcagagccggttttccttacttttcagaaagatttatccggttactgataaagagatgtttgtcatcgataactatcataatgaatggagagatatttatgacaaaaaaaattgtggtctctggatcctgtag

SEQ ID NO: 391505 - DNA, 900 bp, Salmonella enterica
atggggcacaccgaggctggtgcaacagtaacactcatgattaatagtaaaacgtatatcaccactgcaaagactgatggtacgtggagtattacgcttcctgacgcggataccctgcaggataagacctacgactatacggttactgccacagatggagccggtaacatctccccccctttaacgggatcagtaactatcgataccacatcgccatcgtccccgaccggggggctggctcctgcctcaaacagtggtgatactactgataatattactaacgcaagtaagcccacatttatgggaacagctgaagcacatgccgagattaagatgagtattaatcatcacgaatactctactaaagccgataatagtggtaactggagtattaaggttacggacgctcttgagaacaaaatgtacgactatactattactgcaaccgattcagcaggtaatattaaagaaatcaaaaatagcctaattatagatactcaggtaccacaagagccagtatttataagtggagtagataatacagatagcaatacatatacactctatgggaaaatggacggagatacaggaatacaagtaaaagttgagataaataatgaagtattcactgcaaatgtggataccagcactggtacatggtcagttaatgtacctcacgataaaattattgcgggtgaaaataactacatcataactgcaacagacattgcaggtaattcatcctctcatactggaacattttccgggagctcttctgatagttcagtaaccccgccaagagatagcatttcccctatctccaactcagtagatgagcatttaattagcgaaacagaattcacggtaacaacagaagatgagccacatcattatctgtaa

SEQ ID NO: 391506 - DNA, 162 bp, Salmonella enterica
atgctcacctcagaacattacaggtgcctcaatgaaaaaaagaaatttcagcgcagagttaaacgcgaatcagctcaactggtcgttgaccagaaccacaccgtggcagatgcagccagcactatggatgtcggcctttctgtaagtatcccgcataattga

SEQ ID NO: 391507 - DNA, 600 bp, Salmonella enterica
atgaagctaggtcaggagtttaataatgcgcctggtctgtataacattagcagtcaatatcagccgctggacttctttttacagatgcgagcctgcacaattgcgccagtcattaacttttcgccggtcaccggacaatatgaaaatttatatgagaataatattctcaatatacataatgcacttagcaaggctatatccatggaaatgacaggggcaaaagtaacgttaatcggagggtcggaaattgaatttagtatctcgcaagaatcaggcgacgaacaaaaaaaatcacagataactaatgggttacaagttatggaagttgaaggtactttcaccgatctctgtcgggaatacgagttattactttatacaaaagaccagaatattgattttacaacgctggatgaaaggttagctgaggtaaaagcgaataaaaactcagccggggcaatccctgatctggaagactttactcttacagcacgctgtatggctgacgcagaaacggcgcgtcttgcagaagccacccaacggtttaatgcagcgtatggtgatagcgcgccaccttcaagacccccactacgttttaagtaa

SEQ ID NO: 391508 - DNA, 330 bp, Salmonella enterica
  misc_feature (316)..(325): n is a, c, g, or t
atgcacatcaattcagcgaaaacctatgccagggcgtttaccgcaaatacacaactgcatgaagctgcaggaaattatgaaaataaacttgccactaaaatcgccaaaggtatcgttggagcactcactctgggaattggatatggtattatccgactaattgaaaattattgcaacgttcgtgataaaattaatgattattgcgctaatgccgagaatattcataatgggattgcggtagctatagtgacggggaataacgttgccgagattaaactccaggacaatagaattttaacattagaacaaattaacnnnnnnnnnngttag

SEQ ID NO: 391509 - DNA, 618 bp, Salmonella enterica; identical to SEQ ID NO: 380946

SEQ ID NO: 391510 - DNA, 633 bp, Salmonella enterica
  misc_feature (591)..(600): n is a, c, g, or t
atgccatcgttttcttcagggcaaaatatctatgcgctatcaactttgattaaggatgggattacttcatcaagttctgtggcctcagcaaaatggggttctgaagcaaaaagagaagatattaatatcgcaaagtcaacattatatccgacattagatatgacatcagaggttgctcgtgcatatgagaaaggctctacgcgcaccactgaagacaatgtaaaaaatcagatcatgctaaattatcgcatacttgattttggtgtaagagatcagttaatcgatgagagtaataatgaatggagttctgcaaattatatatatctggatcgtgagagtgaaattgcagggaaagtgacgaaaagtttcttaaccgtgaataaacaaaaagaactactggatattatccaaaatgaattgagctactatcatgaccgcttgcatgattttgaatatctcgtgaaatctggcgagtcgaccgagtcagatctaaaaaaaatacaggcttcaattgattcattaaatgtccaaaagataaatgttaacgaaaagcttgatgatgaacttaatacgctaaatatatatactaannnnnnnnnnatactaatgatcggatatccagaaataatctga

SEQ ID NO: 391511 - DNA, 354 bp, Salmonella enterica
atgaaaaagaaaaacactacgccgactccccacgacgcgacattccggcagtttctgacacaacctgacattgcccgggattttatggagctgcatctgccggcagagctgcgtgccatctgcgatctcagtacactgaaactggaatccggctcgttcgttgaggatgatctccgccagtatttcagcgacgtcctctacagcctgaaaaccacagccggcgacggatatattcatgtcctggttgaacaccagtcaacacctgacaaacatatggctttccgcctgatacgctatgcggtagccgccatgcagcgccacctggaggcagggcgtaaaaaaccacctgcatag

SEQ ID NO: 391512 - DNA, 279 bp, Salmonella enterica
atgacctctcaagagcttgatgcttgtatctcaggctctggcagacgttctgtcgcttctgcattaatcgcttttattcttgatgcgcttgatgacggacaggaaagagttgatcttgataccttccagatccacacgcgcttcgttcgtaataatgtaaccacggtagccagttatctgcagctaagatcagatattcaaaagggagaaatgaggacaacaatgaattatctccttaacgtatgttttcgttccattgcccctcaaaccccgacataa

SEQ ID NO: 391513 - DNA, 591 bp, Salmonella enterica
atgcgcgacttcggcgaaagtttgctggtgtatcgtccaccgatcgacacccgctcggtgaaagcggtgatgggccgtaaatccaacggcaacccggagaaggcgctcaacttcctgacgccgcaccagaaatggggtatccactcgacctacagcgataacctgttgatgctgaccttgtcgcgtggcggcccgatagtctggatgagcgaaaccgacgctaaagatctgggtattgaagataacgactggattgaagtgtttaacagcaacggcgcattgaccgcacgcgcagtggtcagccagcgcgtgccggcgggcatgaccatgatgtaccacgcgcaagaacgtatcgtaaacctgccggggtcggaaattacccagcagcgcggcggcattcataactcggtgacgcgcattacgccgaaaccgacccatatgatcggcggctatgcgcagttagcctacggttttaactactacggcaccgtcggttctaaccgcgatgagtttgtggtggtacgtaagatgaagaacattaactggttggatggcgaaggcaatgaccaggtacaggagagcgtaaaatga

SEQ ID NO: 391514 - DNA, 1035 bp, Salmonella enterica
atgaaagttgaactcaccgacgggcaaaaggccgaacttgaattcctccatcgtgcatgccgcgataagagagaatgcgatcgtattaaagctatccttctggcttctgaggactggagcgtccccatgattgctcaggctcttcgcctgcatgagacctccgtgcaacggcatatcagtgagtacctgaacaagggtaaactgatgcccgaaaacggcggttccgacagccatctcagcgagactcaaacagttgaacttactgaatatctgacgaataaccttctgcccaccacacaggccattatcgcactggttgatgagtggtggggcgtccgttataccgttgcgggtatgaccaaatggcttcaccgcaatggcttcagctacagaaaacctgttggcgttccacataaatgcagtgcacaagcacagcaggcgttcgtggaaacttacgaaaagctgaaacaggaagccggtgatgatgaacccatcctgttcattgatggcgtccacccgacgcagggaacaaaactggcgtatggctggatgcccgccgggaagaaagcccacgtagtggaaaccacgggcagtcgaacccgcctgaacatcatgggagccctgaacctgaacgacatcggcagtgcggtgatcagggagtatgacaccatcaacagcctgagtatctgtcagttctttatcgctatccgggagacttacccgataacgcagaaagtacatattatccttgacggagcaggctatcaccgtgcggaactggttcaggactgggcggtagtgatgaatatagagcttcactggctgccgccatacagccccaatcttaacccgatagagcggctgtggaaggtgatgaatgaacgggtgagaaacaatcattacttcgccacggcaaaggaatttaaggagaatatacaccacttcttcagtgataccttaccgacacttgccgggagcctgtcgtgtcgtattaacgatcacttccagaagatgaaaaatgcatcttcaagttaa

SEQ ID NO: 391515 - DNA, 612 bp, Salmonella enterica
  misc_feature (524)..(533): n is a, c, g, or t
atgagaaacagcatttcaaaccatcaacagggtttttcactgctagaaacaacagtagctatgatggttactgttagtcttattggattaggtgctaccctttataatcatcattcagattcgctaaatataaaaaaatctgctgatgtattcgggatcgcatcggattcctatttcagataccttcacgactcaaaatcaaagctgtcggatatctgtcaggtattggcagttaatcagactggggtttatgaaaatatagccctgaagcgagtggatagcggtcggtgtagcattgctctggagaatccttcacagagtgagggcctgaaggcatttatgccggacggaatggtttttccgtcatcaatattatctggttatgctattgccgggagggggatgcttgagctaaagaataaaggaaatggtcagccgaaaatcacgtcattgttgattgctggtctgaaaggaactaacataaaagatactgtcgctctggcaaaaatggcaaatgaatatgnnnnnnnnnngtgtcggatttggttacgttgttctacgaaatggcaaagtcaatataaaaggggatggtggacttttcagcgtccctga

SEQ ID NO: 391516 - DNA, 405 bp, Salmonella enterica
atgtcactggataaactgataaccacactgatgaaagcgaaacaggaaaaccgacttgaaaggcagttacagcaactgagttatgccagggtactgatcctggacgaaataggctatctgccgatgaacagagaagaagccagcctgttcttccggctgctgaaccgtcgatatgaaaaagcgagcatcatcctgacatcaaacaaagggttcgccgactggggagaaatgttcggcgataatgtgctggcaacagcgatcctggacagactgttacaccactcaaccacgttgaatataaagggagaaagttaccgactgaaagaaaaacgcaaagccggaatactggcaaaaaaatcaacgccaatcagcgatgatgaaatggcggaaaacggacaaggttaa

SEQ ID NO: 391517 - DNA, 186 bp, Salmonella enterica
atgcacagtacaacaacactcagcgctgacatcgatatgcagtccggcgcgaatgaactcatcccgtcggtggccgtggatcgtgtcatcgcgcagcgtaacagcggggttgatatgttcatgcagggggttgcgtgcgcgcatcgatgccgatcacgatttcgcatcgcatgtcgttacccataa

SEQ ID NO: 391518 - DNA, 345 bp, Salmonella enterica
atgctaacggctttggggctgatatctcttaatagtatagactattttttactaggtgattatcgcagggtgctaattaatctattaggtgaggtgactgttaatcagcttttttccttatggcacggtgaaaattccgcgcctacagttgcggcgcatgaattacctgcagtttccttttctttaggactgcaaattttttctcagatagttggtgatgactggattggtaatatgattatgcatacattaccccctatagaatatagcgatgtagagcagttgagacagaatgaattagatgatataaattcaatgctggcacggattgggaggtttatttga

SEQ ID NO: 391519 - DNA, 345 bp, Salmonella enterica; identical to SEQ ID NO: 391518

SEQ ID NO: 391520 - DNA, 153 bp, Salmonella enterica
atgatgtttcgtcattcatacgtaaagctgttgaaattaaagatgcacagcgaccaaacagcagtttggtcgccgaccaaactgctgtttggtcgctggtctctgagcaattttctattggtccaaacgaagttgctgatggcgtccctttga

SEQ ID NO: 391521 - DNA, 258 bp, Salmonella enterica
atgggggtagtacagctttgcctgaaatatgatctcgactattcaccgttaaccaaagcaattgcctgtggtctggcatattatgctgaggacgataaggcatcagtgaaattacagcggtttattcagcaaaatggtttgctgacgagtgcagcaaaagtaatagggttaccgaaagaccacccggttacacttgatgtggcatatcaatacttagcactggatgccgaaaacttaattccaaccatacagctttaa

SEQ ID NO: 391522 - DNA, 552 bp, Salmonella enterica
atgaatctgggacgctgggttgtaaccagtgatatgaatgcctcacgaaacaaatggggaagtgaattttccaccaacagtattctattatccactgcaattaagcagattcgtggcgatttacagatcggtcgctctcagacacaaaccgagcttttcagtgattttggattttatggggctgctttgcgctccaacagcaacatgcgttcatggaatgccaggggttatgcgccagttataacgggcgtggcatccagtacttcccgtatcaccataacgcaaagtggttacacaatttattcccgggttgttccgcctgggccataccacctggaggatgtttctccggtaagtaatggaagcctgatggtaactgtagaagacagtaatgggcataaaacactgaaggaataccctgtcgcaaccttaccttcattgctgcgtcctggagagtttaattacaattttgcagtgggtgagcgttcggacagcaacaaagtggatgatgctttcagttccggactgggtgtgttcgctcgccagccttga

SEQ ID NO: 391523 - DNA, 354 bp, Salmonella enterica
ttgcttgactttgaagctcatctccttgaaggacgtagtgaaactgatatcctttatgagttgttgcttaaactgggcctcgatctctgtgtacctattgaaaaacgtattattgctgaacgtgtggtgtactctgtcggaggtggtgtgttggtagcctgcttggctgagcagattaataacggtcacatagaatctcttgcattagggattattgcttggcgcaaagaattagcaactgtaggtgatactacttgtgtattccgcgatagtgctttttccgatgatgtagcaaaaactaaccttgcagcgatcctggaacagcatggcatccagaatgtgcgtagtttgtga

SEQ ID NO: 391524 - DNA, 126 bp, Salmonella enterica
atgacgttgctcttttttatactcgtcttcattcttcttctgagtgtcgattgcatcttgctgctgctgcttgataccagcaatctctcctttattttgaatggcttgactctgaacagaaagtaa

SEQ ID NO: 391525 - DNA, 549 bp, Salmonella enterica
atgttaaccctgatgagcgcggcgcagaaaaaacagtggagcactgacctttacagtgataactgccccgaaatcagcctggataacgtactggcgaccttccggcaacttaatgcctcaaaagcagagacgtttgagcagggcgtgatcgacgtgttccgcaacctgtcgtgggactatagaacaaataatccgcgatacctcggtaaacgcatcattattaatggcgtgctcgataattatcagggcaaatggtactccgtgcgctcatacggccaggagcggatcaacgacctcgcccgcccgttctggttactggacggtaaaacggtgccggattttcgcgtatcggagggggctcaactgagcgactttattcagcagggcggcgtgaacagcgtgggggagttgctgacctgcgattatttcaccctccgggtgttcaaaaaaggttcagcacacatcacgtttacccggcctgacctggttgaccgggtgaatgatattatcgcccgccactatccgggggcgctgccgcctgcggtctga

SEQ ID NO: 391526 - DNA, 369 bp, Salmonella enterica
atgagtgatgatgaaaaactgaatagtaaatctctcaaaggttatcctttggaaagaacgccaaaacatgcagcaaatgcgaagcttgaatgggaactcaaccaagatctaactttgtataccagcggtaactatacaggtaagcaaatatgggctgctcaacgtaacggggcaaagcaacctcgtatacgtaaaggtctggcaactatggatgttggaatgaattaccagatattgcctaatgctttacttaatttctccgtcatgaatgttactgacaagaaaagtgaggcaataaataaggttgacggtaactggcaagtcgatgaaggccgtcgctattgggcaaatgtgaggctgagtttttaa

SEQ ID NO: 391527 - DNA, 663 bp, Salmonella enterica
gtgtccattattgatgttaatgctgaagatcttggcgcattaggtattgattgggctgcaaacgctgatatagggggaatgaacttacagcttaataccaatttatccagcggcagtggctatgcgacttcagtgatcactaatgcgagcgattttatggtcagagtcaatgcactggagcaaaaatcccaggcaaaggtgttatcccaaccttcggtggtgacgttgaataacgtacaggctgtattggataaaaatacaacgttttataccaaattagtgggggacaaagttgctaagttggcctccattacaagtggaacattaatgcaggttacgccacgcgtcgtaaaaaatgaggctggaattgctgaagtgttgttacttttaagtattcaggatgggagccagcagtcgtcagctcttggtgcggatggtatgccgcaggttcagaattcagaaattgatactcaggcaacgttaaaaagtgggcaaagtttgttactggggggctttgttcaggatcaagatatcgtaacggaacgcaaaattccgttattaggtgatatctatttgattggtaatttttttaaaagcaaggaaacaacaaaagtacaaaccgtgcgcctatttttgatcaaagcggtaccacttaaaatttaa

SEQ ID NO: 391528 - DNA, 591 bp, Salmonella enterica
atgcgcgacttcggcgaaagtctgctggtttatcgtccgccgatcgatacccgttcagtgaaagaagtcataggtctgaaatctaacggtaaccctgagaaagcgctcagcttcctgacgcctcaccagaagtggggtattcattccaccttcagcgacaacctgctgatgctgaccctgtcgcgtggcggcccgattgtgtggatgagcgaagcagacgccaaagatctgggtatcgaagataacaactggatcgaagtgttcaacagtaacggcgcattgaccgcacgcgcagtggtcagccagcgcgtgccgaccgggatgaccatgatgtaccacgcgcaggaacgtatcgtaaacctgccggggtcagaaatcacccggcagcgcggcggtattcataactcagtgacgcgtattacgccgaaaccgacccatatgatcggcggctatgcacagctggcctgggggtttaattattatggaactattggctctaaccgcgatgagtttgtggtggtacgtaagatgaagaacattaactggctggatggcgaaggcaatgaccaggtacaggagagcgtaaaatga

SEQ ID NO: 391529 - DNA, 441 bp, Salmonella enterica
atggtcgatctgatggcccagtatgagcagcacggcttacaactcgacagccgcgagttaccggaccatctgccattgtatctggagtatctggcgcagttaccaaaaaacgaagcgctcggtggtctgcaggatatcgcgcctattctggcgttgctcagtgcccgcttgcagcagcgtgaaagccggtatgcggtattgttcgacctgttattaaagctggccaatacgacgatcgacagcaacaaagtcgccgaaaaaattgccgatgaagttcgtgatgataccccacaggcgctggatgcggtctgggaagaagagcaggtgaaattctttgccgatcggggctgcaatgagtctgaaattgccgcccatcagcgtcgttttgccggtgccgtggcaccgcaatatctaaatatcaccaccggaggacagcactaa

SEQ ID NO: 391530 - DNA, 237 bp, Salmonella enterica
atggggcctactggacttggtattgtaagtggtgcagccaaagactctcgcgtagaaattaaaactgtcaacgcggaaggtgcaaatcaggtaacgattaccagcacaactgataatgctgagttcactggcgctgatgtattagctgagggagcaaaatacacagctcagttgaaaggcgggacaactcctggtgatttccgatctgctgcagcgtattccgtagtttataagtaa

SEQ ID NO: 391531 - DNA, 303 bp, Salmonella enterica
atggtaaagcacatcgtcttgatttcttttaaagataacgtttcaaatgacagtattgagcgtataatgagacttttcaataaagtcacagatagtattgatggtgttgtgggttttgaacaggggaggagtatcagcagtggagataaaagatgtaactattctcattgtgtgatcttaaccttaagaagcaatctggcaagagatgtatatctgactcatattgaacttcataacctaaaagcaagacttctaccattagtttctgttattgaggtgattgatttcgagttattcctataa

SEQ ID NO: 391532 - DNA, 306 bp, Salmonella enterica
atgcgccactacaaacgtgcggaaaccgtggacggtaaagtggatacgcgtgcgctggaagaggtgggtttaagcgaagcccaggcacaggagatgtatcgttacctggcgattgccaactacgaagatcgcttcgtggtgccgagcagccaccgcgaactggcgcgtgacgcgttcccggaaaaaagcggttgcggcttcaccttcggtgacggttgccacgggtctgacagcaaattcaacctgttcaacagtcgccgcattgacgctgttgatgtgaccagcaaaacggagccgcacgcatga

SEQ ID NO: 391533 - DNA, 333 bp, Salmonella enterica
atgtctggtttaggctggattcctggtcaggttcgcacattcagcagcaatatcgcttcaaaaaatcttccaatgccacatatgggatggaatagtataaataaaagaacaaatacactattgctgaaagattttgaagaaacaccttccttttatttcttacattcattctattacgaatgtgacgatgtagatgatgtattggcaactgctgaatatggtcataattttcattgcatcgttggaaggaataatatttttggcatccagtgccatccagaaaaaagtcattcttcaggttaccaactattgaaaaattttgcagagatctaa

SEQ ID NO: 391534 - DNA, 162 bp, Salmonella enterica
atggggataatatacgcgacggaagtgatggtggtgggggaaggattattcgtcgctccgctcctcacccttcgggtcgttgcctgcggcaacgctttctcgctgcgctcgaatcgaaccttagtcaaagcttctcatccttccccgtacggagagatatga

SEQ ID NO: 391535 - DNA, 378 bp, Salmonella enterica
atgagccgcttcacaactcctgcaatccttgaaatgttgggccattataactggcgtgtatacgagccttttgagttttccctcagtgacgacaacagcgacgtaatcagcgtgccagccggatttatcactgacctcgccagtgtgccgcgcatcttctggacaccccttcccccggacggcaaatacgctaaggccgcaattattcacgattatctctacgacaatgcgctacgcacaaagaaagaggccgatttgatattcctggacgaaatgacggtgctgggcgtgccgaagtggaagcgtattgtgatgtatctggcggtcaggtggtttggtagggggatgtatgggaaagaacgtaaatactatgaatga

SEQ ID NO: 391536 - DNA, 708 bp, Salmonella enterica
atgacgttgcaatattttaaaaatttcacactatatgctcctgttcctgatgaaaataataaaatccctctacgcaaaggggctaaattctttaaatcagaagacgggcatgactggtatgaatgtcagaaattattttcccctgacacaatcaaaatcgcgcataacagtgcgggggttattgtatccatcgggagggatgtatcaggattctggccggaggggaaaagtattgctgaggttcacgatactactgctaaccgtcgcgctgatatctccgggcgttggggttttgatggcacaaatattattgaccttatgacactggaaaaagcccgcgaacagaaaacccgcgagattgacgcatggcgcaacaagcaggaaaacggcagcgttacgtttacctggaataatcattcatgggatgccagtaaagcgtcacaagaccggttagcgcccgttctggtcgtggcaaagtcaggccagttgccggagggctttttctggactgacgcgaataatgaagacgtccctgttaccgttgacgaccttaccgctattgatgcaggtatgacgcaggcaatggtcattcaggggtttaaaatccatgagcgccaacggcaaatgaaaaaggatatatctgaattaaccaaagttagtgacattctaaattaccccgtaggctggactgataataacggtaattaa

SEQ ID NO: 391537 - DNA, 363 bp, Salmonella enterica
atggccagcaataagaactttcagctggcttttgaaataggcggcaaagttgccgcctctctcccaaagagttttaacgttgctcatcaggcagtggcgaaacttaactctgagttaaccgatctcagaaaagaccagggcgaggttcaaaagcttcaggcgatgaaagccagggttgggcagacggcgcttgaataccataaagcggccgctcgcgtggaagagctgcagcggcagataagtaataccgagaacccaacccgggcgatgatccgggagtttgaaagggcaaaaactcagtcatcaaatttacgcacatcgttacgaactcgcttcgctgaaaaacgcctacggtggggctga

SEQ ID NO: 391538 - DNA, 1470 bp, Salmonella enterica
atgggctaccgtcacggtatttatacatctgaaatacctacttcaattacacctccagtaaacgttagtgcggggttaatcgttgcgtttggaacttctccagtaaaccagcttgataatccatcatctgcggttaataaaccggttattgcatacacctatgccgaagccgtttcaaagataggtttcagcactaactttgaaaaatatactttgagcgaagtgattaaggtcgcttttggtatctatggcgtggctccggttgtgtttatcaatgtactggacccgacaaaacacaaagcagacgttgtcgatgaagccgtcaaactttcaggcggtaaggcaacgctggctaaggatggggttctctacgactctgttgttgtaaaaagtgctgcgcccgatgcggccgttcttgttgttgataccgactatattcttgctcttgatgacgatgggtatacggtcattaccgcaatcactggtggggctatcaaggataaagatgcagcgctaaccgtaagttatacacaccttgatcctgatgcagtgaccaaagatgacgttatcggcggtgttgatcttaacactaagttaagtaccggccttgagctgcttgctgacgtttacccgcgctttaaactggttcccggccaggtgattgcgcctggatttagtacggacagtgaagttggccagttaatggcgactaaatccgcgatgataagcgagctgtttaaagctgaagcgttaactgacgccccaaccgatacggcgataatcagtgattactcagcggtaccggaatggaagcagaacaataaccagctcgccgcgaaccagactgtatgttggccgatggtgaagctgggaaacaccatttattaccactccactcatctggcagctgcaacatgtctgatggacagtaaaaacggtgatgttccttcacgttctccgtcgaatatcacattgcaaatggatggtgctgttcgtaaagatggctcagaggtttggttgaataacagtcaggccaactatctgaacggtcaggggatcgtaaccagccttaattttgatggctggaaatcctggggaaaccgcaccgcaatttatccaaaaaatacagacccgaaagacgcgtttcgtgtcgggcgccgaatgtttaactggacagggaatacgctaattttgacacactggtcaaaaatagatgaccctgctaaccgacggcttattgagtcagtcgttaccagcgctaatatctggtttaacggtcttaccgggaatcaggacattgctggcggtaaggtcgaatttaatcaggctgaaaatccgacgacggcgttgatggatgggatcgttaaattccatgtgaaatttactccatactctccggcgcgagatatagagtttattatggaatataaccccgactatttattgaatctgtttggttcagctaattaa

SEQ ID NO: 391539 - DNA, 468 bp, Salmonella enterica
atgaaccgtatagcccttaccgccatcatccttctgctgatagttgccgccgcgctggtatggactaccgaccactaccacggtaatgcggtgaagtacaaagagcagcgcgataccgctacccacaacctgaatctggcgaacgagacgatcagcgatatgcagactcgccagcgtgacgttgccgctctcgatgcaaaatacacgaaggaattagctgatgcgaaagctgaaaatgatgctcttcggcgcaagcttgataatggtggtcgggtgctcgtcgaagggcggtgttcagtgccaaccacagccaaaaccgccagcaccagccgcgtgggcaatgctgccaccgtcgaactctctccagttgctggacaaaacgttctcaatgtccgcgccggaatcatcagcgatcaggaaaaactgaagtatttgcaggagtacatccggacgcaatgtctgaaataa

SEQ ID NO: 391540 - DNA, 306 bp, Salmonella enterica
ttgaacctcgaaaaacacactacgtggctggcctacctgtgggcgtttatcagtggcctgtttgctcaatggacgctgaatgactacggcgcgttgattggcatcatcctcggcatcggaacgtttctggttaatcgccactacaaacagcaatccgcgcaggcacagaaagaccaggtggcagcgatggagaaacgtaaccagatactggagcaactggccagcaggccggatagttcgctgaaatcgctggtactcaccgcagaagaaccggagggagacgatggcgctaaggacgaaagttaa

SEQ ID NO: 391541 - DNA, 876 bp, Salmonella enterica
ttgatcatccgggcagttgataaggttcaaaagatcctgccattcccgcttctcggccttgatgttgataacggtgccgaatttatcaacgaagccttatttgaatactgttctgccagatgtatcgcactaacgcgttcccgaccataccggaaaaacgatcaggcctggatagagcaaaaaaatggctcagtggtcagaaagctggcgggatatggtcgtcttgatggtgagcacgcagtaaaagcgatgaaccagatgtacatggctaatcgattgtttattaacttctttcagccatcgttcaaacttctggagacgcaacgtattggcgggaaaacagttcgcaggcatgacgctcccaaaacgccttataaccgcctgatagaactacataccctgcgtgctgagcttcggcgccattttgacgatatcatccacgcacttgaccctttgaaattgctggaaactatccgactctatcagcatcagttggcgcgaatagctgtcggggatcccgtcggagacaaaaacagcgatttaaccgcgtttttgcagggtctctccgtagcctggcaggagggtgcggtgaatcctttacatcatcctgcaccatcaaaaccccgccactggcgaacccgggcagatccctttgcagacgtctggaacgaaatagaatgctggctgaaggatgaacctcaactgggcagtactgaattacttctcaaacttgaagacgcacatccgggaaaattcaccgaaggccatcgcagaacactgcaacgcaggttgcaggaatggcgggtcagggtggtcagagaactggtctacggaactcgtgctgatggtaacattttagctgaggcaagaaagtaa

SEQ ID NO: 391542 - DNA, 582 bp, Salmonella enterica
atgaaagagcgtggaataactgatggattaaccaagaatcggcttgcagaacgtaatgcggcgctgactgcaaagctgagcatgattaacgacctcatggaagttgacgaacaagcaaacaaactggctcaggaagcaacggaaaatctgattcaggagcgtaatgcgttggctgcggaaaatgtagcactgaagtctgcacttaacgacatcctccagcctgacgcagcagtacttgagagaaaccaccgtgtccgcgcactggatgcaatggagaccccagccactgacgcttttctggctgaggtgcgggcaagtgcaatccctgaaggttacgcgcttgtccctcaacaaattttccttgagccatcggacattgagttaatttgttcacaatgtggtgacggtcatgaatccgggtacggtgattttactgacggactgctgtgggttggcaacattcaacgagacgacggcagcattgttcatggtctgcatatctcgtcagcagattacacagaggaaggcggtgtaacagtttgcgagttcgccgcccaacctcgtaaaggcggtgcggtatga

SEQ ID NO: 391543 - DNA, 1011 bp, Salmonella enterica
atgccaacaaatgaagaaatttcattacctttgagcaaacctaaacaggttactcttcgtgcttttgagataaagaatcctaatctatcaaaaacatccagtaacgctaaagcatcattaacctccaagcttgctcaggtaaaattggctaaagaaagatgcatggttcttaatccggaagaccctaaccaagaaagagatgtactctcttactttaaagaatctcctatttcaaattcagtgttttgcactatgttaaggataacttctgataaggatgtccaacacataaccgacacgctattcgaaaaagaggttttctcgatggatgatattgagaccgctcatatcgacgcctcggcgatatgtaaaaaccattattatttttcaatgactgatgaatacttagtcactaatttaccattaaataagactatcgctcgtcttcaaacttatcttagctggttcaccaataacgatttgctagagtttacacctttaatatcagctaaaggacaaactaagttaagcgatcttaaggcaattatcgttagagatcctgaaccattgagtggacaggaaatgagtgttgtacaaaatagcaatgctacaaacgtacctgcaacaactgaagggaaaaaatcaatcaagttaacccagaaggttctagatatcataagaagttccatgtcagatactgagcaacttaacgatattgccctaagccagatgatatctgctgagttgttgataaaatttaaaaagccacgaaaaatgaccgatgatgagtataaaaaagcccttggtgcttacttaaaaccagtcagtgatcttgataacatttcttttaaacgtaaggacaacaagactgaagttaagggtaaggatttacttcttacaaaacgagtcagcatagaaacgacacagtctggcaaactagttgaacatcaattgctacaggaaatgagcaaatttctggtagaattgagaaatgataaaactattggctag

SEQ ID NO: 391544 - DNA, 456 bp, Salmonella enterica
atgataaaactattggctagcacggttaccatatcattgctaacgatgtttagcagcactgtctggagtgttcgtccggacagcttttttgcatctactgtttttaccgttgccgggattatgttttctataggccttgggttaatcgtcacattcaatccaagtggtgttaaaaatattaactatctgagagcgatcagaagaaacgttgctaaggtcaggaattcatttctgtttcacttcggattaactacacttttttacattataaatcaatacattgctaattatgaattctctttcctcttattccataaagtgacaatactgttcagcgcttcaatttttttatgccttatgatgatattctcatcaatttatttcataataaatttcatagagttacagcgccttaataatgacatatttgatgtggtaaacaaagagactcggtaa

SEQ ID NO: 391545 - DNA, 744 bp, Salmonella enterica
atgtggttttcggcaaaactggcacttccggcaggaagcagtaaccccataacatgctcatcaatagccgtacacccgtgggacgtggaagcggggcacgtcacgcctgacggcgcgtatttaagcccggtcaacgcaataaaccacctcaacagcaaactttcagacctgacaggcaacagcgatattgccatcataatgataacaggcagtgataataacggttttattcgtcagctatccgcgctggcagacacattccctttacccacactgacgcaaacgctaagacgcgcaagaacgcagctcacccaggcaatcacccgaatgcagatcccggcaacaccacagaacggactaccagccccgcagccgctcattgtcagcacactacagagcgccgtcagcaacagcaccgcactcgacgccgtgaaagccgaaggtttagcctccattgactcactaaaaaatgcattatccggttttcaggcgcagcgccagcagttacagcaacagataaccgccgaactggcgggaatgagtgataaagtggcaaaagtatatgcattcgtgcagaccggcgacgctgttttagcccgtctggaaatgatgaaaaatattccgcaccccaccgcatcactgacgtatgcgcacctgttcacaggcgacctttccgggatgctgaactggataacgaaggtagaaaatgagccagaacacaacaacgccgttactggcccttaa

SEQ ID NO: 391546 - DNA, 573 bp, Salmonella enterica
atgcctgataaattaccggacattaaactgccatcatggctggatcgcggtgatgtggttcgcctgaaaaatacctttatccgcttctgggggaaggtgcatagctgggtaacgtggcccctgacgcagaccgaccccctgacatgcgctgaaatcatcctgaacctgatagcctggcaatatgacattgcccgttttgacggcgaaccgcttacgttgtacaggaagcgcgtcaaatacgcttttatcaacgcgcaggacgcaggcagcgtggcgggattcaaggcaatttttgaacggctggaaatcggctatgtggagatccaggagcgccagccggatctcgactgggatattattcttttgcgcctgacagacaaccaaatctcagaaaatacggcgttactgaatcagataatccgccagtatggccgcacctgccgccgttaccatctccagataatcacaaccacaaattttgctatcggtcacggttactggcatggcagctaccactatttttacgcatcggagatgaaaaatggcccagagcgttatcacttcagcatttga

SEQ ID NO: 391547 - DNA, 1179 bp, Salmonella enterica
atgcagaataatatcgacttcaaaaaaatactgcgtgaaagcgggatgccggtcgatgaacagacggtacgggacaccctgcaacaggcggcggatgatgaaaaactcgtcaccaacacatcgcgtatgtcgccgttctggcggttgatacagttactggttattacaccgtacatgtggatcgttgacgcgctgactaacaacgtactgcataacctgttcctgatgaccgccgcaggcccgttcgttgacctgttcgccgccgccctcaaacttgcccgcaaggaagccacccgcgcagccggtaaaatcaccttcaccaaaagcgccccggataacagcgtgaccgtaccggccggaacgctgattcagacggagcgtattaacggcgtcatttacaccgtaacgaccacggaacaggtcattatccccgcaggcacacaaagcgcacttatcgacgtgaccgccaccgacagcggcgcggcgtttaatctggcgccgggctactatcagatactcccaaaagcgatagacgggatagcgtctgtacgtaacggagatgactggctgaccacgccgggcgcaaaccgtgagagtgacgacgaactgaaagaccgttgccgcaaccagtttaacctcgcaggcagttatcacactgacgcggtttaccgcagcctgatagcggcgcaggccgggttaaccatcgatcgcatcttctttttgcatgatgccccgcgcgggccgggtacggctaacgcctatctgctactggataccggcgttatttcgcagccttacattgacagcgtgaataattacatcatgacgcagggccatcacggacacggtgacgatatgcgttgttttgccatgccggaaacccgtcacgatctggcggtcacggtgtatgttgaaaacctttccaatatcagtagcgacgatatcgacgccctgaaatccggcgccgaaaatctgatccgctgcgcattccgtgaaaacagtaactacgacataacccgcacatggccgtacagtcgcttttcattctcacaactggggcgcgagctgcataacgcattccccctggtggaatccgtgacgttttcccttgaggatatcatcagcgatctgaacgtgccccgcctgaacacactgacggttgaggtgcaaaatgcctga

SEQ ID NO: 391548 - DNA, 2181 bp, Salmonella enterica
gtggccgctgaacttgatttcacattaagcctggttgataagctgacgaagcccttaaaacaggcgcagtcggccttaaccggctttgctgacaaggcaacggctgattttaagcgcatcggcggcggtgcgctcgccttgtggggtgttaacaaggcgctgatgggtatgatgcgtcccgcctatgatttacaggacgccctggatgattcggtgggttcaggctatgccgccgcaggactggataaactcaccaaagccgcaaacagtttcgccattgaatacggtcgctcgtcgctggagttcgttaaaaactccacgctcattcgccgcagtatcggcggcattaccgataacgatctgcccgcttacacccatgcggcgagcgtgctcggcgttgccatgcgcaccggcacagaagacgccgtgaattacctttcccatatgactaatctgataccgcagatggtcagtaaaatgggtagcgtcgattttgcaggcgcaatggccgggctggcctcgcagatgaaaaacagcttcaacagttcccttaacgatatcagcgccatgattgagcagtcgaaaggcaccggcagcgcttacggcgtctcactggcggagcagcttggtacgatgggaacggcaagccaggtattaggcagcggagcaagcgccggatatgatcagttattacgccatcttggcagcggcgacgccaccaaagcaaccgggatcaacttccgcgacgcgcaggggcagatactgccgatcatgtcgattctggacaagctgaaagcgaaatatggcgaaaacatcgaaggcaacgcccgcgcacaggcggcgatggaaaaagccttcggtaaaggcgcttcggtcattcgtgcgttgtggaataacacggacggactgagcaagagtattaacgcgctgggtaaaaatcccggcctgaaagccgtcgaagagatggcaaaaaaaaccgttgtaccgtgggaacagttcgccgccattctggaagccatacgagctgaaatcagtctgcgcctgcttcccaccttcgggccgttctttgataccctggtagattgcggtaaagaatttgttaactggcttcacgccttccccaaccttgcccgctggattggctatatctcggtaagcctgctcggactcgccgcagcgggcgctatcaacaacatcatgctcggcaccttcagctttattgcaaccggtcttaaaccgctgattaaggggcttggctgggcactgaacctcaaggcccgttataccgatcttgccacatggtctacagcacgctatgaaaaggtaatgaagggtcttcgtaacacgctggcgggggctacctggttattcaaatcgctcggcgcaagcgaacttctggcactttggccgattctggcgataggtgttgccattgctgcgctggtcattgccgtgatcaaattctggcaaccaatcaaagcctttttcagtgggtttattcagggctttactgacgcattcgaaagcgttggcccgctgcatgacatactcggccccatcggcacactttttagctttatctggcagcaggttaaagcgctggttagctggttcggcgatctgttaagccccattcagtattcagatgacgcgctcaaaggggtaacggacactggcgtgtcatgcggccgttttgtcgcagaagcgatcggcatgatcctgacgccgataaatctcgctatcagctactttaacttcctgattgacaccatcggcatagtgagccgcgcagccggtaaaatatgggatgcctttgacgcttccgatatcaccggcagcttaaagcgcattaagggcatatttaccgacacctttgatgaactgtggaaagcgcttaaaacccagtttgcgggtacgttcaattccattattggcatgttgaataagctgccaggcgtcaatatcgacctgatggaggtagctcccaccaccgcacccacactcaccaccggcaaccgcgccgccgcaatccccggaggcccggtaagtagccagatcagcaacagcaaaaccgaaaaagtcgtaagcgaccaccggagcgttaacattcagaacctgaacgttgacaccatgccaacgccggggcaactggcggaatacagcgaactggcggcggggtga

SEQ ID NO: 391549 - DNA, 465 bp, Salmonella enterica
atgaaccgcgcaacgctggtattcatcatcttcatggctgtagccgtggcagtgtcaggcaccatcgccagccactggcgcacccgctatgaccaggcagaaaaagcccgcaaggaagcggtagcgcttgccgacgttcgccagcagaccattgacgatatgacgcagcgccagcgacagaacgccgcccttgatgcgaaatacacgcaggaattagccgatgcaaaagccgaatccgaaaagttacgcgctgatcttgcttctggccgtcgccggttgcagctccacgccgtctgtatgcccgccgccgcgcgtgataccaccgccaccggcgcaactgatgcagccaccgcccgacttactacagacgctgaacggaattatcagcgtctcagaaccgaagccagagccgttacagcacaggtgaacggcctgcaacagtacatcaacgaacaatgccactga

SEQ ID NO: 391550 - DNA, 354 bp, Salmonella enterica
atgaaatatttacctgatgttttctttgatctcattgtggctgcattgtttgcaaccggtattggtctgagcatcggcggcgctacagctactgtgcatggtcttttatggctgtatgccattgccatgttactggccttgttgcttcccaatgtcaccaaaaagacagaagaggaatacgtacaccgcccgttatggtgggttgtctacgacctgataacggatctcgccattatcgcggtaaccgtctggcttaactggtatgtgctggcagtatttcttttgtttgccatgggactacagcaggcatttttccgtgaacaggaaaagcgcctgaaggaacaggcagcatga

SEQ ID NO: 391551 - DNA, 339 bp, Salmonella enterica
atgaacagcagcccgcacacctggtctgactggctggcgatagtcaaagcctggctgcatggcgatatcccgttagacagcctgttaatgaccgcagccgtcgcggcgctcagggtgttctatacaggccgtagctggcgtcgccttctgcttgaagtgccgttgtgttgtctgctcgcggtagccgccttcaccatcatcaagccggttcccgtcgcctggctgaccgaagactggcgcgtggggattggcgcggctatcggacttatcggcgttgagcatatccgggcgctcagcgtgatcatgacaaagaaatttgcagggaaaacagaacaatga

SEQ ID NO: 391552 - DNA, 744 bp, Salmonella enterica
gtgagcaccccgacactggaagtacgcgtcgaattttccagagcgcagatgcgccagataaagagcgctattgaccgctacgacctgacgccagcgaagcgtaagcgcctgttatggcgcattgccaaaaacggcgtgatcggggccactaaagccaacgcgaaaaagcagcacaccccggacgacaaggcatggcccgcaagagccaaaggccacggacataagaaaatgatccgcaaactgccgggaatgctcggtgtgcgtcaggtggacagcgacacaatcaaggtcgttttcaatggtggaaaacgaaccaaagcggctgttattgcctgggcacagcagcacggcgcaacgatccagatgaaccgcagccagttaaagaggaacggggaaaatcagaagagccacgccgccacaaagtaccaggcaaaaaagctcacatcactgggatttaaagcccccgtaatggtgcagaagggccgtcaaggaaagtacacgcatgagcggcagtatcgcgcggtgagtcagaaatggatatgcgaacacctgaacatggcgcaggcagggttaatcattcgcaagctggaaggtaaagcgccggttgatagctggactatcaaattaccgtcccgctcgttcctcggtattaccgacgaccagttagccgccagtatcgcccgtgagatgcgcagcattcagtacggatcggacataaagaaacaggacattaagaggaaataa

SEQ ID NO: 391553 - DNA, 483 bp, Salmonella enterica
atggaacaactcagcaccaaccaactgaaatcactgacccactacctcaccgctgcgttaggtgagcgggttatgcaggcttgcgaaatcgacacaagcgaagtgcgcatgattaacgccgccaaaaatctcggtctgggctttctgcgtaccggttttgatgtgttcgatgcggagtttacctggtacgactggccgtatcgtcagttcgatccgaagttgctcacttccctgtttgaggcgtggatttacgacaacgacgagatgcgcgacaggctggaacttggcacacccatttttgacgtggcgacaggcgacgacgacaccatgaccgtaacagtggatatcaccctgtacagtgaccgcgtcatcaaagaggacgataacggcgttattcgccgtggcgataagcgttacagcctgcaagtaccggaaatctgggtagccgaagacatggatctcagcgtggagagtcgcccgtga

SEQ ID NO: 391554 - DNA, 501 bp, Salmonella enterica
atgtacagcagcaaaagcactgactaccagacagccaccattactaataacggcttctggcctgatatcgcagcgggcgagttcgaagaggttcgcgccattccgccgcgcgtcagtcatgagtcggtgcgtgacgcgctactgacagccgtcagtaacattaataaccgactggcagaactccagcgccgatggcagttactgggctatgagcgtgcaggcgacgtaccggccccgcatgtggtgacgttcgcgcagggttcaaccgacaccgaacaggaagccaccaccggacgtaacgccgtggaagcgctgtatatcaaagccgtttacgcccaggctaaagccgatctgatgccggaattttccacaacaggcatgaaagacgtctggccgggagagagcgccccggatgcacgccggggattactgactgaatccgcgatggcaattcgcacgctgatcggcgcaccccgcgcctcagtcgggcttatagggtga

SEQ ID NO: 391555 - DNA, 1161 bp, Salmonella enterica
gtggccgacgagaaagagagcgaacagccaaaagtaacgggatgggtgacaatttgccgatccggtctttcgctggatggccgcaatatcagcgcgaaaatgttacatgacgccgcaggcgtttataagccggaagaattcaccgcgatgatgtggccctatcacgtctcatctccgctttaccgctggaactcaaccaattttggcaaggtggtagccctgaaagcggaagacagaccggacgcaacatatctgctggcaaaactccagcctaataaatttgcactggccgccaaccgtgaccgacagaagattttcacctccgcagagttcgaaaaaaactacatgggcaccggaaaaagctttcttaacggactcgccttaaccgatgttcccgcttcaccgtggacaaccgaacttatgttcagccaacagcaacacgacagtatttacgggcaaccggaagtgttttcactgggtgccgacgacaatcaagaggaaactcaaatgaatcaacagcaatacgacaccctgctgaatgctatccataacaaaggcgttcagattaacgatctggaagcccgcctgaataatttctcgcgaacgcttacccaggctggtacgcagccacagcagcccgcaacgcaaccacaaccgacaccggcgcaacagttcgccactcagccgcaacctgtagccgcacaaccgcaatatttcgcgatggttccggtacagaatcaaccgcagccgcaaccagcgtacgcacagccgcagcagttcgccgttcagccgcaaccagcatacgcacagccgcagcagttcgccgtacagcctgctcccgtgggttatccgccgctttcacagtcgccgcattttgtgaccgttccgccacaggtggcgcagcagttcataacgcagacaccggtacagcagcccgcacagccccagcagttcgccgcacagcagccgcagcagtattccgcacagccacaggccacggatgcactgaataacgcccagttccagcacctgctaacggcaatcagcgggatcaattctggtgtggcaggaatggaacagaagttcgcgcaactgatgcaggacaccacacaaaccccgtcactgaatccggctggcggcaaccagatcaccattgtgtaa

SEQ ID NO: 391556 - DNA, 399 bp, Salmonella enterica
atgaacaacactgaaaaaatgatggcggtcgggaagctggtatacggcgataactggcaatccccgctatcccgcgatattgatgttgacagccgcactattcgctacgccctgaaaggggagcgcgaaatcaaccatctttcttcgcgcctgttggaagcgctggagcaaaaaatagaaaaacttaaatcagccatcgatattataaaccgcgataaagtgagcggtgatgatgttgatgtcgatattatcagcaatattattgacgggtatgaataccacgacgagcaatataaaaaagccgctttcgacgagatgaacaacgctgtttacgccgatacctggctttctgatctggattcaatcgcccgcaagtggagcaaaattaataaaaattaa

SEQ ID NO: 391557 - DNA, 315 bp, Salmonella enterica
gtgagaaaatacaccgcctaccgtcagggcgaagagcgatttgacggccagttataccggatgatagtacgcgcggaacaaaaggcgcggcaaaaccccagcgttggcataccacaacagccgccagtgccggaaattcaggaaccgaagccggaaacgccgaccgcgatttgccctgcgcgtcaggtaatgaacatatacagggaactcgaagcggaaaaagagcgggctaagtgggaaagaaagcgccagatactggcgcataaagcggaaaccgccgcacggtatctgggcaataaaaagtcagaccgttaa

SEQ ID NO: 391558 - DNA, 2523 bp, Salmonella enterica
atggccgtgaccagagggcgttacacaccgacacccccaccaccgtttcccggcaaagccccggacacgacggtttacccgtatccgtggaataagccccgcgaggcgatcggcgttgatttcgccagtatggcagacattgccgcagccgcccgcgaagaggaagcccgcaaacagctcgacgacgacattaagcgtgagacacaccgcctgccgctattcatgcgcctgcgtatcgaggggcgtattgatgaagcctgccagcaaaaaggcgtctatatcggcagacttaaattccgtgactttgtgcgccgtgaactgccgctactgaacgcagtaaataacgcttaccgcatcgtcattaaagaccccatgccgcctgtctggtcactgctggaaacatcgaccatcaccgcccgacacgttggcgatctccagggattaaccgaacgctttaaccgcctgccggaatacaccgaagaagatattgagttgctggcgcaagatatcgctatttttatccgggcagaagttgccgatatggtggacgtaaccgccgatctggatgatatgacctgcgcccgccagttgtacacctgcgccctgcacatagcagaacatttcggaatgccaccggccaacgctgagaaattccggcgttacaagctcgatcttctggatacgtccgtcacggttcaaaagatgatggatgaaaaaatatggaagcgccggctaaaacgcctggcgtaccgatggcgcgaacacctgcaaattgcttacggcgacgttggccgcactgcgtcagtgtattgcagcaaaaagcaaataagcctttgggaagaacagcgacgccgtaaccgccttatcatgaagaatctggagctggaagacgaggacagcggcgatcgcatatcgctcgctgacactattgatgcctccgtctctaatccggcgctgcgccgcgttgaactcatggttcgcatcagggggtttactgatatcgccaaaaaagcgggctatgaagcacgcttctacaccatcaccgcgccggggaaatatcacccacgcctgcactatggcccgcgcaataacaagtggaaccatgccagcccgaaacagacccaggactatctcaacaacatctggaagctgatccgcgccgaccttgcccgcgacgaaatacaggtttacggcctgcgcgtggcggagccacaccatgacgggacaccacactggcacatgatgttattcgttcgcccggaacaggtggacgcgctcactaacacccttcgcgagtacgccatcagtgaagaccgcgacgaactcaacaccaaagaaggcataaaaccccgctttgacgtgaaagatatcgacgaagaaaaaggcgacgctgccgcctatatcgccaaatacatctcaaaaaatatcgacggttacgcgctggatggtgaagtcgatgacgaatccggcaagccctgcaagctgaccgcgaagcacgccaccgcctgggcgtcattgtggggcatacgacaatttcagttcgtgggcggtgcgcccgtttccgtctggcgtgagctgcgccgtatgcgcgacgaggcgttggcggcgaaattcggccctacatttgccgaactccatcaggccgcatctgtggaaagtgactggggagcctacattacgttacagggtggcccgcttgttgcccgcaaggatctgatcctgcgcccttactacggcatacggaagaacgccgacaaatacggaagggaaatccccgtcattaaaggggtatacctccagcatgaaccaaaagaatttcccattatcacccacaccaaacagtggaaaatggtcaaaagacaaccgacgccggatacggcggcgggcctaaccgggtgttcatcttttgaccttacggtcgcgtccgcgaccgctaggacccgtgtcaataactgtactttgtacaaaaaacaaccaacagatgacgaaaaaacgcacagtaacaccgaaccaattcagcagacaattgaccagcaaataatcagcacgctggccaccgaccagaatcagggcgaaaacgcagcaccagacgggcgcggcgcggatctcctttcccttttgcgcgtcattccgccgcacagacacgaacaaaaacccgtcgccagtgatgaaaaagcgaccatgcgccttattgccgaactgcgcacgcgcggtatcgatgatgaagacgagatcgggcatgtgctgaagggccggatgattggctatggcgctgatagttaccttcaggccagaaacggaaacattgtgatcgttaagcgccagcgctggtgcggtcatcgcgaatgccgcaacccactgaatgaagaagacctgagttacggcgacgaggcccgttgccttgcgcattccgaccccgaacgagtggcagaacggcgggaacagcacgccgacgaacagcaaaaacgacaaaaacgcgacgatattttagcccgcgtggacagactgaggaggttaaagtga

SEQ ID NO: 391559 - DNA, 234 bp, Salmonella enterica
atggcaaaccgtaaacaacgccagagccgcgatcaggtcgcgcgcatccacacccaaaccgaaatcaaccgcagactgcaccgcgcccacacgctggcgctattcctgccgtcagatctgcgtcgcctgccatgcggcccgatgccgttatggttgccgtcagtcctggactacatcgccgacgatatcggcgacattaagaagctgcttaaccagccagcgcactccgcgtaa

SEQ ID NO: 391560 - DNA, 558 bp, Salmonella enterica
atgatcctgccacctatgggagcgccgggtaaatgcccggcacatcgccgaccatggacagcagaagaagatgagttgctgataagcctgcatggaaagaagaccatagcagaaatggtaaagcttcttccggcaccaggcagatctttttatgccgttcaaatcagaatcagaggcttacgcgagcgttttcctgagctgatcgactacgtcagccttccgtggacgcaagaacatgacaacttccttcgcaagaatcgccacacgatgactgcaaaagaaatcggtaatcgactgacacctcgccggacagaagcctcagtaacgctaagggcatttcgtcttgggatcagtctctataaatgcggggataacctgcctattacacgccacaaagacgaagatgtgatactcatcagggagttgtatgacagttccgatctgtcattcaagaagattggcagaaagtttgacatcagtgaaagcatgaccgcatggctgtatcaccaccgccatactgccattgacgccatcgcaagggagtatctcccacgatga

SEQ ID NO: 391561 - DNA, 306 bp, Salmonella enterica
atgtcgattatctacatcgctggccctatgacggggaagcctaatttcaaccggaaaaaattcatcgaaataacaacccttctttgggcggaaggccataccgtacttaacccggcaatactccctgacggcctcacctatgagcattacatggatatcagccttgcaatgttgcgcggggccgacacgatttacctgcttgaaggctgggagcattcagaaggcgcgaaaagagagttcaacctggcggtacggttacgcctggatatatccaccccggaaagccgtaaagggggtgcatcatga

SEQ ID NO: 391562 - DNA, 981 bp, Salmonella enterica
atgaacggcatcctgaatcaacgttccccgctcaagtgggcgggcggcaaatttgatgttgtgccgcagctacgcgagcacttacccaaagcaagctacctgatcgagccgttcgtgggtggcggttctgtcttcatgaatacggactacgaacgttacgtattgtgtgacagcaaccccgcgctgattaatttctacaggctcctgacttataacaccagtgcattaatcgatcgcgcctggtcattcttcaaagatggcggcacacgcgcagcctacgaacgcaaccgccagacgtttaacaccatcacccttgcgaccgccaggttacgtggtgaatatctggaatgggcagcgctgttcctgtacctgaaccgccacggctttaacggtatgcagcgaaccaaccagaagggggaatttaacattccattcggcaagcataacctgccgtacttcccctatatggaaatgcgcctgtttgccgataaagcccgcgaaactatgaccagatttgtttgtgctgacttccgcacaacaatgaaggggcttcccgacatctgccatcgcgtctctttccatgctggcacacccagcgatgcggttatttactgcgacccgccttatctgccactggaagataaagacagcttcacccactacaacggcaaggcgtttacccgtgaagaccatcaggcactcgctgaggcactggtaaaggcccatcagctttacggcgttaagtctgttatctccaacagcgacaccgaagagacccgcaagatctattcacagttcgaacttcacaccctgaacgttcgccgttctgtctccgccagtagcaaaggacgcaagccagtaaaagaagtgatcggcgtttatccgccagcccctgaatgcaaagacgtagacgtacacgccggatcgcacgacataccccacaccaaacctgaacaaccagttaacccggaggtgatctga

SEQ ID NO: 391563 - DNA, 240 bp, Salmonella enterica
atgaaacccgcctttgcctgcatcttgtgcgagaacgtcgccaacggcaatcagtgtcgtatcagggaacgccacatcaaccctgaccgctcgttactggacaacatcaccggcccggatgatgaacgcatcatatttctgactgacggcagccagatacgcgcccgcaacatccgccgtgaaatcacgatcgaacctacgccatacaccccgaaaaaacagcagggaggccagcaatga

SEQ ID NO: 391564 - DNA, 534 bp, Salmonella enterica
atgctacagatgaaatttaacccccgctttattgaagcgttccgcagcggtcagaagattacctcactgcgcatgatggattttagatgtcgttgctatgacaaccctgattatccacccgtatatattcacagtgacaccctgaaatatcgtatgcacgtcgatactgtggaaggtctgagtctaagcctgtcaccgggttcagcagtgaaatactcaaccgatttagccggacttctggaaagacagccctacaagccaggcgacgatatcgaactggtcgcagtatatgaaagcggcgaaacagtgccgtttgctaccgctactattgggcacatttccgttatcaagggcaacaagatagaagatgttgacgccattcatgacggatttaaccctgaccgtgatccgcttgccgaactccatgcattcatgcgggatgtttaccacaccgcaacccccaacgaagaaatgttctggctgtacaccttcagaagcattcagatgttgccgatgtggggaggtgcagcatga

SEQ ID NO: 391565 - DNA, 249 bp, Salmonella enterica
atgaggaattgcaacaagtttgtttatctcaaggggtcaggacgccattttattagagcgccagaatgggtaacgattcgcactcgttgccgtgctggcgacgcctggcttgaaaaatatgaaattggttctcgttttatctgtatagatcgcaaggattacggcgtcttaattactaatcgcttccctgatccagaagaccaggaagagataatcgctcacagagtatccgtatatccagaacgttaa

SEQ ID NO: 391566 - DNA, 216 bp, Salmonella enterica
atgaacgcattcaccgtaacgcaatcatggttattgcttattggttcaatagtgctggctgtatttattgtcaggcttccgttattgattaaagactatcgccataagcgaagccgtaaaaaacaaccaatacccccggtatggttcccagcagataaatacacatcacgggacggacatttattttttataggtggaaaaacaccagaacaataa

SEQ ID NO: 391567 - DNA, 228 bp, Salmonella enterica
atgaccagagacacaacgagaaaggttaacgccgctataggctggtatccgatccatgacacggacagaccaggagtacagcagacagcccgtaaaagattaaaagcctccttgcaattgatagccgatgattgttgcgatgaaaacaacgaaggcgactttgaagaaatcgccctgttaattaagtatctggacgacggcaagaaattaaagccgttaacactgtag

SEQ ID NO: 391568 - DNA, 276 bp, Salmonella enterica
atgaacagtaatcttgaaaatcaaacaaagttattccttaatgaacttaaaaactctcgcaaaaaacacaccgatgaagaacgtatgtgggcgcttgaactgctttgcgcttgccttgcggcctcattagaagaaaacgaaagagaacgtttccttaagttaagcaatcatattgttggcattacaaaaacgttcgatccaataacgccagaatataaggcatacgccgatcttcatgtgttggttgaagatttacgtagcaagctgccttgctga

SEQ ID NO: 391569 - DNA, 231 bp, Salmonella enterica
atgcaagaagaaaaagaatcagttattactttcagtaatgaaggtgaagatattggtaacggtattatgcgctacgggcattactgcaatggtgcgcttatgggttatgtcgctgtgggtataactaaatttggcggcaatgttagccgccaggaaatattaaatattttagaaaagtttgtagaacatcagcaaggcagcttgctacgtaaatcttcaaccaacacatga

SEQ ID NO: 391570 - DNA, 777 bp, Salmonella enterica
atggaaatgatattcagaaacataccgcttgcccgttccggctattcagacaagcgcggagatttaagcgttggtatgctttgcatgattccggcgcactcatacagtaaactcgcccaggttcactacaaaaacacaatcattggcgtagtgaaaaacctgacctttgccgatttgcaaaacggcgtggcagaactgcgcggcgatatcgtctttagtcgcaactacagcactatcgctgaaatggctttcgatgaagtctatccgtcaatttcagtattcgttacacccaatactaaagcggttgccgatccctatctggccagactgtcactggtcaacagagaagaacgagagtttgaagatcagcaaccactcaacctgtcaaatctgcgcgatctgattaacagcgcaacgaaatcagaagcgccagtagaattattccgcaagcaatataaccttgcagatagcggatatattggcagcatcacaaccaataaagaaaacaagatccacctcaatgaaacagacactttggaagcaaaggacggctatttagttattaaaacaaacgaaacaacggaagccgtcaagattgaggggatcgggattataacatcaacaaaaaacaaaaaaggtacaaataatatttgcatatccactacatcatgcggcgtagagataaggaatagcgatataggcaccagtggcatattgaaatttatagagcgatacaaagaaagtcagttcgcagagctaaaagtatcatgctcatag

SEQ ID NO: 391571 - DNA, 405 bp, Salmonella enterica
atgggcacattaattaaaaacgtagtcattgccagaacaggcaagattattgatggtcgtgaaattacactgccaatacttgagcactgcgtaaagacgtttaaacctgaatattatcagcctaatgttgttgaacattttgatgacgttgtgcatcaacgccagcatgtagcccgtaataagggaaaggtaataagcctgaaactcgaagacggcgtattgtttgccgatcttgaaatgtacgcaccagtaagcaacgtaaaaaaaataaaacggtatcccaccatttgctacatggcaaacggaaaaccgaaaaccccggcattaatgagcgtgatacttgccgaattacctaaccgcaatgacaacttagccattaatcgctacaaaatgaaagaggtctaa

SEQ ID NO: 391572 - DNA, 333 bp, Salmonella enterica
atgacaatcagaacgcaatcacgcaccccgaaatacgaaatgaccgtaagcgatatcaggcgtaaagaagcccatgagcgcgaaattatggttgttgaggccgtggcaaaggtatttattcaggaaaaaatagagccgcaaatgacccttaaaaaatttgccgagcgttaccgtaacggcgattttcaaagtgtgattgacgatgcgaatcggggagaattgacgctcataaaaactgaaaagaataagttacgcaaggttgacatgatcgcttatttcgctgacgggttattgaatttcttcaacagccaaagccagagaataagaacatga

SEQ ID NO: 391573 - DNA, 246 bp, Salmonella enterica
atgattttagagactaacagtagatcacaatatatcactatgggacagactagcgacattcgatctcgcgccccaagagcgaagaaacccagaaaggcggtattgctacgccttgatgaggaagaattttcaacgctggaagggatagcgaaaaaagaagaccgttcaaggtcaaacatggcccgcttggtttacctgcgcggcttaactgaaattaaaaacgaaatgcagaagggggagtcatga

SEQ ID NO: 391574 - DNA, 393 bp, Salmonella enterica
atgtgtcaatcaaaagatataaaaatttatattggtgctcgtcttcgtgaagaacgggagagggtgggacttagtcagccagaaatgggggaggtcggaggggtaactaaattaactcaactaaattatgaaaaaggggaacggatgccggatgcggcctatctatctgttttacatgaatctcttggtattgatgttagctacattttaacggggcaacgtacaccaaaaccggaaggaattgtaacggtaagccaagaagaaaaagcccttctcgaaaactatcgcgccatggataaggcggcacagttaaatatgcaggcggttagcgctgcgttcgcgcaggctaacatgaacaaggatgaaattctgaaagacggcagcagcgagtaa

SEQ ID NO: 391575 - DNA, 975 bp, Salmonella enterica
atggggatcagtaaattacctgatggccgttacctggtggatctgcgccccagcgggagcgatggaaaacgcattcgcaaaaaatttaccactcgcggggaagcgaaagactatgagcgatgggcagtagcccgctacaacaacaaagagtggaaagcgcccgttgttgatgatcgctatttgctggagttgatagaaatctggtggaaagtcaaagggcagatgatgcgggatggggaaagaacgcatcataaattactggtgctcgatcgcgcactcggtcatccgcttgcgtgtgacgtaacgccaaaacttttttctgattaccgcgcccagcgaacgacggcgggcataaagcccaaaacgcttaacactgagcaggaacatatcagcgcgatgtttaattccctgtacgcgctcggtcactacccgtcacccagtccgctaaaaggactgaaatctattcaattgacaaaaagcgaaatgggttatttgacgcatgacgatatcgcgcgattactggaggtgatgaagggcgataacttgctggttgccaaattgtgcctttctacgggtgcccggtggaatgaagcggcaatgctgatggcaacgcatgttatgaaagatcgcgtgacattcgtcaaaactaagaacgggaaaaatcgcacgattccggtagcgcctgcacttatagctgagattctggagggcaggagtgggcggctttttcctgatgctgattacgttcttgccagggaaacgattaaaattgttgttccgcatttaccagacgggcaagcaacacattcgctgcgtcacacctttgccagtcactttatgatgaacggcggaaacatcctcacccttcagcgcatactcggtcactcaaatattttacagacgatgatatacgctcatttcagccccgatcacttgatcgacgctgtgaaatacaaccctttaacctcgttttaa

SEQ ID NO: 391576 - DNA, 165 bp, Salmonella enterica
atgtatacaattaaatttatgtgtctgatattttcagtcttcatggggtctgttttttccgtaccagcacaggcgatgacgtgtttgaatgaatatcactcggtagatttatgcacggaggtatgtagtggtcttgatccattcggatttatattttgtttataa

SEQ ID NO: 391577 - DNA, 159 bp, Salmonella enterica
atgagggatatcgatgagtcatattattataaaccgatgattaataatcactatcattcacatattaatccttgcgacagcgacaatccaattaaatacaggaggaaagtatttattcgcacatataaaacgattattgcacatgtgttgatattttaa

SEQ ID NO: 391578 - DNA, 243 bp, Salmonella enterica
atgatgaaacttattaacagaagtaagcaatcaccagtcggtcgtcgcgcatatgatgttgcactggctgcgcaccatgagaaattcggcgattacggcagacaaaagcacgttaccaattacaccgttgtagtggatggcgtaaaggttcctgtcgaagtagttaaccgggccaccagctacgtagccaccgcaatgatcggcgtccggaaactgaggaacctgccaggacaatgtaactga

SEQ ID NO: 391579 - DNA, 369 bp, Salmonella enterica
atgaatgacaaaacgtttgctactgttgaaattttgataaccagtgatgttttatcaaggtacaaaatttcgcgaagcacacggtatttttggtgtaccccctcccggatgccagcctatttttctcagccatttccgaagccgagaataaatggaagcccgaagcgctggagactgccagacctcctggaatgggagggaaaagtaagcatcacaccagatgataccaatcagcctctcaagatggttccgccatactgcaagccaatgtcgctgatcatcaatgtagtcatgaagattataccgtgccatgactcctgccctatgatgaccaagcagtttttcaacaacatggggtggcgcacctaa

SEQ ID NO: 391580 - DNA, 264 bp, Salmonella enterica
atgagccgatgccatgaatccagcagtgaaggccagtatgagaaagactctggtgaacaagttttggctaagaagctggggatcgctacttctgatgagatggatgaggctgaacttgtcctgttagaacaactctaccagtctgttgttgaagaacagttcccggaaggccaactcagcgtagccatgctaaaaagctggcaaaataggtgcttatacatattagtaacctccgtttttgatgaccactgcaaccagacatga

SEQ ID NO: 391581 - DNA, 558 bp, Salmonella enterica
atggaaattgaattactcgacaaaagttcgtcattgtccagacagaattggctgaagcgagtgcaactccctccggacatgatagagtccgtgcgccactcctcagtcctttttctcccaatcgaaaactttagaggtgtcatcaactactcgtttcctcagggaactgtcgatcttttccagtttattcaaaaaaatatgacccatcttgggcagacagaattatgtattgccgatgatgattatcaggagctcgcgctctattcccgagaaataagactcggacacttactggtaacgcaggtggttgctccagttctgatcgggctacttactagctatgtctatgatattattaaaagcgcgccagaggataatgtttcgcttaccttgcaaatagaaggagaatgtaacgattatctccttaggtacaatggcccggcaaaagacttccgacagattgaaccccgcttattacaacttaccaacggctgtgatggacctaaaaatgccgtgttgtcaacagaagaaggaccggatgacatcattaaaatttga

SEQ ID NO: 391582 - DNA, 189 bp, Salmonella enterica
atgctcacgctaaagcatatgttacatccggctatagacggcatcgctcaaaacactagcaggtactgcgttcacatagaaaggctttttaatcaaaacgttaggcgtaagcaattacagacagaaaaagtagtaaagtttatgcctcaagtgtcgataacctggatgacacaggtaagcctggcataa

SEQ ID NO: 391583 - DNA, 1203 bp, Salmonella enterica
atgagtagatttgacgatacggataatgcatataatgaagaaattcttcaaaataatgaagaagaagtgcttagcactgcctctgagaacgacgttagccaattggtcgtttactcacgcgattggacggttcaaacgatagtccaacaaatagatgaaggtaatgttgatcttaatccagattttcaacgtagaaatgtttgggacaatcaaaaacgctcaagattgatcgagtcattaatgattggatatcctgttccagaaattgtattggcagaagttataggcgagaaaaagaagtacgttgtgattgatggtaaacaacgtttattggctatatatggatttagtaaggttgatcctgaaatttgggatgggcttccaaaattaaaaaatcaaactattttgggacacaataacggtttgacctttgatgattttacagtcgaagaaaaacgtcgctttctaaatgcagatgttagatgtactttactttcaggttataaaaattatgcaacactttatgatattttttatagattgaataccggttcatcgcctctaactatgcaagaattgagaaattcaatttataaaggtgagttttctaggttaattattaagcatactgatgaagagataccccttcgaaatattttaaatatcaaggttgcggataaaagatttaaagatgcagagttactcttaaaatatctatatttagagttttcacaagataagtatggtggtgccttaagaagagaactggatctttttaccaattatatgaatcttaattgggataaatactcggtggatttaattaatggatgcacgatttttgataatgcttgtgctattttattgaatatttttagtttcgcagatgcagacggctcagttgctaagaaatggttaactgaaaaaggagcatgggagtcgcgtttcaatcggtctttatttgaagttcaggttcattatgcttcaagattgttagagaatggtatcaatattgataagtcattttctgatgattttattgaaggtgtgaaagatgctttcaaaaatgaaagatttgtcagtgcagttgaatccacaacagcaggcgtgatacaacacaatgaccgatttaatatattctttgactgtctcaatagtcgattaaagacaaattattcagtgccatttagtgtaaatatttga

SEQ ID NO: 391584 - DNA, 945 bp, Salmonella enterica
atgtcctaccaggtacatatagactcattaacacaaatggctaatgatctgtcaaaaacaaaagacgatttggagcgaaagtttcttgcaccttattttaacgacccattagtggaacctgaaacttttaaattagatgttaagtcatattgtgtcctactgcatgccgctattgaagattttatcgaaggagttgttttaagtgtctataaagcatcacatgatttgtttttagaagatggtgttataacaattccatttatgtattcattacatttgtccggggttcttgaaagaagattatctgagatcgcagatgatgatgttgaaatatcaaaaggtgaggtgctttatccagtatcacccatagagtattttttgaattccaattatacttgtgagccttttattcattcaatgttaacttcaaaccatggtatatcacgtaagtacataaaaaaaatagttatggtattaggcatacatgttgattttagtgatgttatgtattcagattggaaatcaattgcagaatatcgtggtgcctatgctcattcagatatatcatatatagataaaacaaaagccaaaaaacctctttctccagaaaaatgccgagatgctgggaattcggctatttctttctcatataaattagtcgagtgggctaaagaatccttaatgaaagagtataaaaactcagttagttcgcttattatcaaaaataatgagaaaaaagaagctcgagtcaaaaatgaaaaattaaaagaagaggaagaaaaaaataataataagaagaaagaagaagaaaaggagaagagggaacatgaaaaagaaaaagcacggttaattaatacagaaagaaccaaaaagctggatgttttgttggaatgggcccagaagaaacatccagaagtatatcatgatatatttggagagacttga

SEQ ID NO: 391585 - DNA, 201 bp, Salmonella enterica
atgacactggataaggatgtgcgtatttctgtagaaaatatcagaacaataagccatgaatcagggcttgatgtttatcagtgtgccgctgatttaacattcacaaaacctgagctacaaaacgccttaccaatcacctacctgattcagaaaaccgatgagggtaaaggccagttctatataaacgtatctggattataa

SEQ ID NO: 391586 - DNA, 1221 bp, Salmonella enterica
ttgcgtataacattgtgtataactgagttcgatcttttttctatacacatgctgctatctgacatccaaataaaaagagcaaaaccgaaggacaaaccctatacgcttaacgatggtatgggactatcactcctcatcgacacaacgggcagcaaaggctggcgtttccgctatcgctttgcaggtaagccaaagatgatttccttcggcgtctatggcgatgtgtcattggcacaagcacgtgctaaacgcgatgaagcgcgttcgatgttagccaaagggatcaacccaagtgaagccagaaaagcaaataagatagctttgcagttcgcgcatgagaacagctttgagtctgtggccagagaatggcactcatcgaaaaaagctacctggtcagagggatatgcaaaagaggttctcaattgtatggaaaaggatatttttccttttatcggtcagcgcccaattgagcagattgaaccactagagctgctaaccgtcctgcaaaaaatagagaaaagaggtgcactggaacaaaccagtaagatccgccgccgctgcggtgaggttttacgttatgccgtcgccaccggacgagctaaatataactttgctcctgacttggctattgcactcaacaagcctaaaactcaacacttcccgttccttactgaaagtgaattgcctgattttgtcaatgctctggaaaactatcaaggcagtttagtcaccaaatatgccacgcagctgttgatgctaaccggagtgcgcacaattgaactacgtgcagcggaatgggctgagtttgatttagataatgccttatgggagatccccaaagaacgaatgaagaaacgccgccctcatctggttccgttatctactcaagcgatcagcatcctgaaaaagctgcaagaaataactgggaattacagcctcgctttccctgggcgaaacgatgtcaggaaaccaatgagcgaagccagtatcaacaaagtgataaagctgcttggctatcatggtcggttaacgggtcacggcttcaggcataccatgagtactattttgcatgaacatggctttgaaagcgcctggattgaaatgcaacttgcgcatgttgataaaaactccattagagggacttataaccatgcgcaatatttaaaacaacgagaatctatgatgcaagcatactcagatattttaatcgctaggtactaa

SEQ ID NO: 391587 - DNA, 723 bp, Salmonella enterica
atgggtaaatatcgactgatatacgcagacccatgttggagctatgacaataaagcttcccgtgcgtatgctggaaatcattacaaaacactcagcattactgaattaaagcgccttccagtttgggatctagctgccgatgatagtgttttagccatgtggtgggttccccctatgccactagaagctattgagttggcgcaggcatggggatttaccgtcaaaaacatgtgtctgtttacttgggcaaagcttaacgagaagtcactggataatctggatcgtgtgctaaccgatcaccatgaaaacatcggggcactgagtagccttgattttatggatctccttaacaaccaaacacgaatggggcttggaaactacacgcgtggaaacgctgagaacgtgctagttgccgtcaaaggtcgtggcattgaacgcctcgttggtaacgtgaagcaaatggtttacgctcctattggacaacatagtcaaaagccgtgggaagttcgccaacgtcttaataatctttatggcgatgtaccgcgcattgagttattcgcccgccagtcttcacatggttttgatgtgtgggggaatcagtgcgatggaccggctgtgcaactgcaccctggttatgcactcgatatcgcaggaatggcgaaggcattcaaaaacgccccgctatcaccatcagacaaccaggggcgggagcgtgcagcatga

SEQ ID NO: 391588 - DNA, 501 bp, Salmonella enterica
gtgaccggtgaaaatctaagaaaattgctacattacaatccagaaacaggagtgtttacctggttagtaaaaccaaacagaagaattcctgttggaagtaaagctggctcaattaacaggcaaggttacataaagattaaactgaatggcgtagattacaaagcacaccgattagcatggttgtatatgaaagataaatggcctgaaaaaggtattgacaatattgataacgttaaaacccataattggttctcaaatttacgcgaagcagatcagcaccaaaatatgactaactgtggagcgcataaaaataacacaagtggttacaaaggcgtaaattttcacagtattgcttgcaaatgggtaacgcaaatcaggtttgatggtaaaagagtccatcttggattatttgatacaccagagtctgcgtttgatgcttattgtacagttgctaaaaagcatcacggtgagttttcaaatacaagcgggggggggggataa

SEQ ID NO: 391589 - DNA, 201 bp, Salmonella enterica
atggagattattactcgccttgacgctgcaaaggcaggtcttaagcgttattacactggcaaacagtgtaagcatggtcatgacagtgagcgctacgtttacaacgggcactgtgttacatgtgccatcaacacaagcctgcgccgccaggcggaaataaagcagctcatggccgaagccagcctgcaacattcaagttga

SEQ ID NO: 391590 - DNA, 771 bp, Salmonella enterica
atgagcagacacgcaacagagtgggcatggaaaacaaatccaggcagctcatcactgaaactcatcctgctctcgatggccgatcgagccgatgaatacaacctgtgctatccaagcatcgaacgtctcgttaccgacacaagcctgaataaaaaaacggttcaggctggactgatttcgcttatcggaatggggctaatttcagatacaggagaaagaaaaggggcaacaagaagggttcgggttttctctttaaacatacccaaaaacggtaatgttaccaatattgggaatatacccaaaaacgggatgttgaatgatcccaaaaacgggatgttgaatgatcccaaaaacgggatccagaaccagtcatataaccagtcatttaaccaagagagggagagcaggacaaaaaccggggattctgtgcctcatgaccccggcgcaaacaacgcagtgatgaataactttgttcctcctggcgggccagggcaattaggcaaatttgtcatgcatgaacaatggcagccatcagatgactttcttcggaaaagctcattgcagggaatctacctggacagtctgccaacagcacaggaacttgcagagttcagaatttactggatggctgagggtaaggcataccatcagtcacagtgggagcagaagctggcaaggcggctgcagattagcagacagaagcaatcaacattacctgataacaacgttccgcactggaacagccctgaagcgtgggaggatttcctttga

SEQ ID NO: 391591 - DNA, 786 bp, Salmonella enterica
ttgaacaacgtatttaacgccattaagaaccgagacagtgatgcattagcccgcctgacagggtcagatcgtcagtatgcaggtagcgacaacgtggtgaacatcacggcagagcgccttgtagatgccctgtttaaacagcttaagcagctattcccggcagctgagcagaccaacctgaagactccagcgcaggagacagcagcaaagcaacagtggattgctgcgtttgccgaaggtggaatccgtacccgtgagcaggtatcggcaggaatgcgacatgcccgcgccagtgaatcaccgttctggccttcgcctgggcaattcatcaagtggtgcaaggacagcaagatggtgctgggtgtgagcatcgaggacgtgatggttgagtttcaccgttacgccaaagagaaaagcctccagcctggtggaccagagcgtttcccgtggcgccacccggtcatgtactggattgtgtgcgatacccgccgggcgatgtaccagcgccaactgagtgaggctgaagttgagaagcatgcccgcaagctgctggatgaatggtcggcaaaagtggcatccggtcaccagattccagatccaatactcagcatacaggccaagccagaaccaatgagcacaccacagacaagctcaggtaacgcctaccatccaccagggcgaagtttcgggtgtatgcctaacgcagctaccctgggatggataacaccggcacagtggctcatggaggaatacaggcgaaggaaggcagcaggactcatcaagtaa

SEQ ID NO: 391592 - DNA, 357 bp, Salmonella enterica
atgagcaatatcgacaaacaggcgcttcgtgaagaactttcaaacccggcaataggcagcaaagaccacctacggaaactggctttgtcgctgctggatgaactggacgttaaagaagagcagcgcgctaactggttccagatggcgcagaagttaggcgaggatttggaagccgcagaacgccgcgtagcagaactgtctgcaagccacagcaaattgcgcgacacaatggcaaccatccacaacacaatccgaatggatggcggctatacgccactggcagcaatccttaacgccgctaaacgcgcacatgaagaatcagccaccgccgctggcatcaaggttgaggagtcgtga

SEQ ID NO: 391593 - DNA, 474 bp, Salmonella enterica
atggcatcgcaagctattctggatatgtgctgcggctctcgcatgttttggttcaacaaacaggattcccgcgccgtattcgccgatatccgcgccgaggagcatatattgtgcgacggtcgccgtctggttatccgtcctgacctgattgcagacttccgtgcgctgccgttcgctgatgcgtcgtttccggttgtggtgtttgatccgcctcacctggagcgagtgggcctgtctgcctggatgggtaaaaaatacggacgcctgaataaaaaaacgtggcgttctgacctccgcgccggattcaaagaggcgtttcgggtgctgcggccacacggcgtactcatatttaaatggaacgaaacgcagattccggtaagccagattctggcgctgacggacgtaaaaccaattattggccagagaaccgggaagaacgacaaaacccactggattatttttgtgaaggactaa

SEQ ID NO: 391594 - DNA, 507 bp, Salmonella enterica
atgaccactatcaccaataacaaactaacagacgagcagttacaggaaatctacggcgaggcggtatcgtgcgaactggcagagaaaaacggggcgtatatggcttgtttcgacctgctttgcaaaatggacgatgtaggcggcacggcgcacgttgtccgaaagctgatcgatatgctccgagcggagtgggtagagctacaggaactacgccgtaactatctggcgctacgtggtgagattgaggacgtacggtcgcagttgtacgaggcagaaaaccaggctaacgagtacgccagcgagctacaggatcgccgcagggctgataacgatgagccgtttggtttcgttactaaaagatgcgccgagcacatgcatgacgacgatcgcgacgaaaataactggatgtggtctatctcagcagtagtcattggatgtaatccgaagctcaaacatgaggttcctgtttacctgcacccagcctcatccggcaaggagggagcatga

SEQ ID NO: 391595 - DNA, 456 bp, Salmonella enterica
atgaccactattaccagtaaattcactaaagagcgcctgattgattgggctgtggtagctgtagctgaaagggtgcgagatttaaaggatggcccggaatcagtagaggctgcggcgaatttaaaattagctgaaatagcgctggcatcgcttaccgctgagcctgtagcgtggaaatacagacttgttgatatcaattcaggcacaggggaacattggaaatattcaactcagtgcataacacctacatccggaaagacgcactgtattgagtctgttcctctctacacagccccgccagcgccggacaacaaacagacggacgaacttgttatgtgggttaagcgtttatcccactcactcagaaacgccagaccagacagcgagttacacggtgctgcaatggactatttgagccgtaaagggttaatcagtgtggaggatgtattgagatga

SEQ ID NO: 391596 - DNA, 753 bp, Salmonella enterica
atgaccactattaccaaagaacatgcacaaaaaataattgatgctgccgacgaggtcatcactgcacttgctggtactaacgatgattctcacccggacaacagcgaaaagatgtgtgggttatgggatgatctgaacgacagatatgcgccgcctgaagttgtgcgggaacttgcgcgggctatgctggcatcgatggacgctgagccagccggataccacgtcatcaaagagtgtggaaagattggctgtagtgttgcaacgcttgagaaggccgagaaaacgcgagacttctggaataaaaagtggactatcaggccgtatttctactccgccccgccagcgtcagagcgcgaacgtattcgccgcgagcacgccgaatggtctgatgccacgttcggcgatgtcggtccggtcggtccgctgaaacacctctcgaaagaagcgctggaggctgctgccgacccatcagacccgcttgaatgggctgatatgcagtttttattgtgggatgctcaaaggcgtatgggtatttctgacgaattcattacgagggcaatggttgaaaaactggcaataaataaaggccgccagtggccggagccgaaagacggtgagccgcggctgcatatcaaagagcagtcagtgccggtagtgccggaggaaatagagccggacagcaataatacttacgactatgtcgacggctggaacgcctgccgcgctgccatgctcaacggagattcaaaatga

SEQ ID NO: 391597 - DNA, 468 bp, Salmonella enterica
atgagactaaaccccggagatgttatcaagagcgttcatacaggtagcgcctttgtagttgagtatgtatcggttgacggacattgtttcatcctgcaaccaagagacaaagaaaattcacgcagctataacatgcacgatttcaaccgcagcttcgttcgtgtatttgaaagcgatacgcttcaggctggcaactctccggtaactccggattgttggtgtcgaacttgtcgaccggtgacgatgagcgacatgcgatttgtcgtctgcccagaatgcggaaacaaacgctgcccgcaagccaatgaccacaggaatgcatgcaccggaagcaatgagccaggacaggaaggtagtgcgtacccagcagcaccgcagcagccggtgattggtatcgacctcgctagcgaaaaggacgcatctgttgaggttgttattgaaaatggaaaagttatatctcatggctaa

SEQ ID NO: 391598 - DNA, 357 bp, Salmonella enterica
atggaaaagttatatctcatggctaaatccgcagcagagcgcaaagcagcgcagcgtgcccgtctggctgaagctgggaaccgcaaacttgaattgcaactcgacactcaggagctggagatgctgtcgcggaactgcgccgcccgtcgccctggtcgttcgccgtacgaaatggccgaatacatcgcgttgctgatccgccaggataatgcgcgcgttcaaggtcgtatcaagtcaatcagtaccaaccgatgcggtaagtgcggcgattcgctgcctgttgagtcatgtccgtgcgatggtgattcggcatgctgggtgacgcgtggctggcatgagactaaattatcagtgtga

SEQ ID NO: 391599 - DNA, 1803 bp, Salmonella enterica
atgagttactttggtctcaacgcagttaaccagaatcagcaactggatgaagcggcatctaacccggcagggtttaataccgatgtcggtttcttcgataactcaggtaccgctgcggtatcaggactgtattctgggctggttgctaaacctgatcagcttctttgggcggggatggataaaatcgtctcgcccatcgcgaagttagttaacgaaaatacttccatcaacgacacttctgctgagtatatcgccgaacaacgtaagctcgcagagcaacaggtaaagcgcctgacgcctgacgccgccacaacaggaactgctggtcaggttctgcatggtctgttcgatatgggtggacaggcggtagtaggcacactgctttctggtcctgccggcggggctgccgccgtcactgcgttgcagggattctctgagtttgaacgtttgactgctcagggagtagatttcaggactgctcaggaagctggtttggtgcagggtgtcactgctggagctggtacattgatccctatgagcctaggtttacgcgccggtggtgcgctggcagaaagtgttggcgcacaactggcgagaacaggtgaaagtgctgtgcgtaatgttgcagctactgctgttcgcgccgctccagacatcgcatacgcagccggaactaacattgcctttgggatggcgcagcgtggtctgacagcaaagacactgcgtgatggcggttataacgaaatggcgaatcaatatgatgtatttgatcgccagtctatcgccattgatgctgttcttggtgtggcgtttggtggtgtaggtcggttccttaacgcccgcggtgagagcgctgcaactcctgaattttccccggctgaggtggatgctgcgctggcggctaatgcctcacatcatgctgagattgatgttgcccccggcgtccccgtaaatgttctgtctcgtgatgcgcatatacaggcactacagaaggcgatgaatgacgtaagccagggtcgtgcagttgatgtggccagcattgccgaacgagcatcatttagtgatgtaccagggcgccgcagtctgatagcgcagtctattgatgaggtgcttttcaatgctgatgagggatcggcggcgcgtgcagttgagacaaggactcttgaagagcaggcagcacaggttttaccgcgtggggatcgtcacgtttaccagtctgaaatcgtcaacagtcagcgcattattgataacctgacggagcaacgtaaccaaatcctttctgaagaaccaaagggaagcggaaaggaactggcacagtcacgtgctgaaaagcaatccagattgcgcgacattgataagcgcatcacagaggcacaaggccgcctcgaattttcgcgtaacgcgctgtcacctcatgagcctggtggggagttcttcgaggctagggctgagcttgcacgacgtcaacaggcagaaagcgatctgaacgcacagaccatgtcattctataaaacagcagaagtgcgcacttctgatgaaatagcaccttttgaaccaggcgccgtattgcgacaggcagatcaaaggccaacggcggaacaggtcggggatatagatcttcgtatcgctgaagactcactggttgagtctccggacatgatgatcaccgttctcgatgatgaaggaaacccgcagtcgcgcagcgcgcgggaagttcttgacgaagctaacagagagaacgagcaggcaatacaggattcaaacctgtttgacgtggctgtagcgtgtttcttaagaggataa

SEQ ID NO: 391600 - DNA, 168 bp, Salmonella enterica
atgttacaccgcaataaggatgcgaaaatgactgcttttattcttgttgtgttggcacttgtcgcacttggcgcaatgaaccgtaaaggtatcattgaagatggtgaatttgccgtcgcagttgttctaatattatctggtgttgcaggatacataggtatgtcatag

SEQ ID NO: 391601 - DNA, 417 bp, Salmonella enterica
atgactaattcacctcgcggcattcgtaacaacaaccccggcaatatccgctggggcgacgactggaaagggctggtaccgaaagagcagcgtaccgataaagcgttttgccagtttgtaacaccggaatacggcatcagggcgatgatcgttattctgcgcaactaccagcgtaaacacggcctgaacaccatcaccggcattattaaccgctgggcacccacaaacgagaataacacgcaggcatatattgacagcgtagcaaaaacgactggcacagcccctgatcaattcgtccacaccgacgacagccgtttcatgatgaaactgctacaggccatcatccggcacgagaacggcgagcagccctacgggtttgatgtgttcgtcagagcgctgggtctggctggcggctga

SEQ ID NO: 391602 - DNA, 465 bp, Salmonella enterica
atgaaccgcataactactggcgtaatcatctcgttgctgatagtagccgccgcgctggcatggactacagaacgctatcacggtaacgcggtacgattccggcagcagcgcgacaccgccactcacaacctgaagctggcgaacgcgacaattaccgacatgcagacgcgccagcgagatgttgccgccctcgatgccagatacacaaaggaactcgccgatgaacatgctaaaaatgctgatttgcagcgccgcctttctgatggtggccgggtgcgcgtcgaagggcgctgtacagtgccaaccacagccaaaaccgccagcaccagccgcgtgggcaatgctgccaccatcgaactctctcctgttgctggacgaaacgttctcggtatcagagccggaattatcaacgaccaggaagcgctgaggtatttgcaggactatatcagaacgcagtgcagataa

SEQ ID NO: 391603 - DNA, 1455 bp, Salmonella enterica
atgggtgttgcatattttttaaggcgaggggataaaacaacctgcggtgggactattattacgggttgtagtaatcatctaatccacggacaaccaacggcacgagttggtgataaatacatatgtgatgcggacgggaaggtttatcatatagtgggaggacagccgggctattttatccatggtgtgcaggctgccggaacagcgcatagtattggaacatgcccgtgtaaatgtcggtttattaattccatttctaatatgagatacggatatgagaacgaaatccgttctgtgccgaagtcggcaactcaaagagtggtatctgaaacgcttcagagtacaccaaaaccgtctactgtagcacttgggccgtcctgtccggttaaagaggataaattgcctcgcgcacctgtagatgcggggttttgcgtattgccctacggggccacaccatcatcttacgaaccgtggtttttcattaatccccccgctggtacccgtgagctatatcacaagctcaatcctgatatgaaaaaacaacccggttcgattctgattgttgttgatcctgcaaagcaagatcaacaacagattgagacattgcaaaaagcgcgtgacagaattgataacgctcttgaatctcttactttacaggaagcaaagttactgcatgataacagaggggccgtagacgcattttcgtatcagcttttcggtgattatttaggtaaagctggtgatggtttgggatatattagcgaagtcggtaaaagttactatgaagaaattaataagatactaatcgaaattcaggaactatataaaaacacatatacctataacaaaggtattatttcaggggaagaattttttggtcaacgagcaagactgtttaaaaagttagatactattttaaacaaattttctaaaacccatcttaatctggaagaatataatagcattaaaaaagctttgggtttatctacaagttcaattatgcatcaatgggataaaactggcgtagataatattgagagatatgctacatatattgagaactcagcaaaactaatgaagttaatgaaaacagttggctttgttggtataggtttagatttagccggatacacgtcaaatgtttatgatacttgttcaaaaggtcgcgaaagtgcttgcagaaaggctgccattactgaatatagtaaatttggattcaagcagacaggcagtatgcttgcaggattggtttctggtcgtgctgcaaatgcgctttgtatgtgggtactggggtttactacgatagaagccgctggagtcggtactgctctatgttttgtatcaggagttggggttagtattgcatcagggaaaattgcagaaaaatatagtgaagattttggtaaaattgtaggggaacacatcatttatgaaaaattatttaatacaaaatag

SEQ ID NO: 391604 - DNA, 228 bp, Salmonella enterica
atgcaaaacgttacgcttattggtatcgatctcggcaagcattccttccacgtccattgccaggataaatcaggcaaggcattactgcgcaaaaagtttacccgcaccaaacttattgagtttctggccagttgcgcatcggctaccgttgtgatggaggcctgcgccgatgctcatttcatggctcgtcggagaaagcataaaaaatcgtggggtaatcgtgactga

SEQ ID NO: 391605 - DNA, 537 bp, Salmonella enterica
atggctgacaacaacatgacattcagcaataccctgatgcaacctggcggcgaggactttctgcgtgagctcaccgaatttatgctcaaccgtatcatggaggctgatgtcactcagagcatcaacgcagaacgccatgaatgtagctacgagcgagagacttatcgtaacggataccgcgaccgccagtacaacacccggcccggtacacaggagctgcgtatcccgaagttgcgtgaaggctcatatttcccgtccttccccgaagcccgccgcctgtcggagaaagcgctgaatgcggttatccaggaagcggggataaacggcgtatccacccgcaaggtatcgtccatctgtaaagcgcgagagtgggtgcacagcttcatccgctggtacaacactcagcatcgacatagtgggattaagttcgtcacacctgagcaaagacatcctgagcgctggtcaggaaaaactcctgactggacaccgatagagatagtggcacttaacccggagaatgaacgccgggcagcataa

SEQ ID NO: 391606 - DNA, 738 bp, Salmonella enterica
atgaaaccaaaatcagagacgttatttcattttaccaaaagcagtgatgttttagaggtaatattagaagatggcttttggcctcgtttctgccttgaagacgttagttggcttggttttactgagtatgattatgtaagttatcctatggtctgtttttgtgatattcctttatcacgaatatctgaacatgtagatttttacggtagctttggattaggaatgtcgaaagactgggcagaaaaaaatggattaaatcctgtattttatgtttcaagaagcagcgcaacttcaaaaacattaagaaaactaaataatcctataataaagttatctgacgaagacgacgtaaaaaaagctcaaaatacaatacggtatatatatgcttttacaaaaccaacgaaaggtgaaatggttgtggataatcaacctgttggaaaaaatttttatcaagaatcagagtggcgctatgttccaactgacataaaaattacccacctgacgagagtaaatcatgaaaatgtaataaaattacaaaaagcaaatgaagcaactaaaaaatcatcactattaaaattcactcctaatgatataaaatacatctttgttaagcaagattcagatataccacgtatagtcaattttatacaatccaaaatggataaatatccagcttcagatataaaaatactcctttccagaatagtttctctggaaagtttaagcgcagacatataa

SEQ ID NO: 391607 - DNA, 189 bp, Salmonella enterica
atggcctggggcgaccaggagcagaagctgcttagcgaactgcaagaaatgcagcagaaactgaaaaggattgaaaaggcgctggcggcggttcactcatctttattcgaacctgtaagtcttacttacaggttcagtttaatgctggaggaggcttatccagcctacatgcctggcatcagcgaatag

SEQ ID NO: 391608 - DNA, 2418 bp, Salmonella enterica
atgtctgccagcaacagagatctgctagctattctcgaagaacaattaaaatataccttgtgcgttagtttaagtaaggccacacgcggagatatttttaacgcggtggctctggcgattcgacattttcaacaagatcagtttctctacagtcaggctcgtcagcgtacggaaaagaaaaaacgcgtttattatctctcaatggaatttttactcgggcagtcattacgcaataatctgatgaacatggatttgctagatgatatgcgtcaggttgtcaatgagcttgggtttgatttcgatgatatttttgatgaagaacccgacgctgcacttggcaacggagggttagggcgcctggccgcctgcttcatcgactctatggctacattagatattgctgcatcaggccatggtatcaaatacgaatatggtttgttcaggcaatcatttcaggatgggcagcaagtagaatacccggatgactggcattctatgcactcaccatggttagttgaacaccatacgcagtcaatgcttatcccgattggtggttatattgagcatgcatatgatgctgatgggaattacaatccaatgtggatgggttggaatagcattgtaggtatcccaaatgactatttcgtttcgggttatcgggtcagtaccacgaataagctgcgtttatatagtgctgttgcctctaattctttcaatgtccatatttttaattgcggcgattatataaaagcggtaagcgaaaaaattgcatcggagaatatttctaaaatactttatccctcggatgaaatccttacgggtaaagagttacgtctcactcaagaatatttccttgttgcatgtaccttgcgggatatctttcgcgaatatgctgaagttgagaaggatatttcgttattgccgcatcatgtggctattcagctcaatgatacgcaccctgcgctggctgttgtagagttgatgcgaatacttgtcgatgagcatagcattccctggcagcaggcgtgggatatcacgcagaaaacctgtgcttacacgaaccatacgctgatgcccgaggcgctggaaacctggcctgtgacgctgtttgaaaaactgctgccgcgtcacttacagattatttttgagattaaccatcgattccttgaagatgtcgccacccgctggccggacaaaccgcatttgctgacctccttgtcactgtttgcgggggataaggacaaatacatccgaatggctaatctggccatcgccgggtgccatcatgttaatggggtcgcgatgctccattcggagctcataaaaacgcatctggtacctgatttttattttattaccccagagaaattcattaatcagaccaacggaatcacaccacgcagatggttgcagcaggctaatccaaatcttgctgcgtttttgaatcagcaactgggtgccagatggccgacggatttatatttgcttcgccaactggagaaaaaagtagatgacgctggtgttatcgatcaaatccgtgccattaaattccagaataaatccgctcttagccagattgtttcacaacgttatgggattacgctcgacccgatggcgatgtttgattgccaggtaaaacgtattcacgagtacaaacgccagctcctgaatattctgcatgttatttctctctaccttgatatcaaggaaaacggcaaaactatagcacccaaagtacatctctttgcgggcaaagctgctcctggctatcggatggcaaaactcattattcagttaatcaataccgtcgcgaaaaaaatcaacagcgatccgcgcattgccgggcagttgaaagttgtttttcttgaggattacaaggtctcgttagccgaatgcatcattccggcaaccgatctttcggagcaaatttcgacagcagggactgaagcctctggaaccagtaacatgaagttcgcgttgaacggcgcattaacgattggaacatatgatggtgctaatatcgaaatccgggaagcggtaggtcaggataatttttatctcttcggcgccactgccgaagagattaataaaatccgatacgaggggaataataatctcttataccatcacggtaatccacagattgcgcacattgttgattctcttatttctggcgtttttacctcagatcatgatcttttttcccctttataccatatgttaactagcgctgataattattgccatttgcttgatttcgacagttattgccaggcacagcagcaggcgatggcagaatttgagcaccagcggcagtggcatcgaaaagcattacttaatattagccggatgggggagttttcaagtgatagaaccattcagggctatgcaaaggatatttggggaataaattgctaa

SEQ ID NO: 391609 - DNA, 834 bp, Salmonella enterica
atggcgtgggctgcggagggtactacgccaaatacacccgctgttcgagtttttaccagcccgtgggcgcgtttgttttcaggcagtgagtcttcattctcaaccgcattaatctacagcactactctggatcaggagattgtgagggttcctacgggcgaggacagctacgagttgcacgacagatataatcagcgtgcgttactgagtatgcagtactcgccgctgagctatttttttgccagcatgacgctccgggctccgattcaggacatgaacaagtacagcaccagttttgtctatagttttggttatgacgattggcatcccggtacgtttagcctggtgtatggtaactatagcgacaacaactatttctaccccgcgaaagagatgcagcgtactcgttttgaacaagggacgtggacatttgcgtataaattcacattgcctcagaacattgaaaaaaatcttcttatcaataaagaagatgccttgatctgccagctcggttatagctatgtaccgcgctattattccctttctgataactcggtgcagcagaacaaaaatatttttctggcaagctgtggttataccttattgcaacattattttttaagggtttccgctttttattatcccgacagtcaacagcagcagccctgggattatgattacacctacagtttcggttatgtctccagttaccttccgggagcggtgtcggtgcactatgataactatacagggactcgttacccctggcgtggcagtcctgatgctaactttcgacatgggacaattaatctgagctggacactccctttctag

SEQ ID NO: 391610 - DNA, 1245 bp, Salmonella enterica
gtgacaataacagtggcggacggtatggatcaacaatccgaattaacgcttttggttgtcgatgactcgaaaagttataggcatttactggtgaacatcttgagtcagtgggggtttcatgttttacaagctcaggatggcctgcaggcccttactatactgaatgaaaacagcatcaatgtggtaataagtgactgggaaatgccgggaatggacggcggggagctatgtcggcaggtgcgtcggcatgattacggccactacatttacattattttggttacggcccggcaaactacggacgatttagtgttagggctggaatctggtgcggatgactttttatcaaaaccgattcatcaaagccagctccgcgccaggctacatgtcgcggaacgcattctgatgctggaaaataagcttgaggtgcgaaaccagcgtttgagcaccgcttatcagcaaatcgaacaggatttgcaggctgcagcccgcctgcagcgccgtgtcctgccggcgaccgcgctgaattttgaggggtttcaggctgactggatatttttaccttcggcctatgtgtccggtgatctactgaattatttcatgctcgataagcaccatattgcgttctatagcattgatgtggcgggccatggggtgagcgctgcaatgctgtcattagccgtgtcccgggagtttctttccggtcggattaatgaacgactattaattgttgaaggacagattattccgccgcatgacgttgttgcggcgttgaatcagcgtttttgtcttgataatgaggatattaccagctatttcacgcttatttatggactgattgatacccgaacaggaaagggggccctgtgccaggccggacatcccaccccctttattattcgccaacacggagagcttgtttccgtcgggcttggtggtgtaccggtagggctgtttccagattcggaataccaaagctgtgatttctatcttgagccaggcgatcgcctctatttatacagcgatgggattagcgaatgtgagaatcttgacggagaattatatggtgagatgcggttacagaacatgatgatagcgctgcgtgacaaagacaaaacagagctttttcagttggtcgaagaaacgctggtacgttggtgtcaacctgagccacaggagcgtactgaatattcacggttttttaatgatgatatttcattactggcgatagaacgtatcgcataa

SEQ ID NO: 391611 - DNA, 339 bp, Salmonella enterica
atgaactttgaaatgcacagtgaaaatggcgtagagattgttgttccattagtacgcaggctggatgcttctgtcgcactgacctttaaacagcaggtgctggaggtcatcgaacagagcaataaaaatatattactggattttagccatgtagattttattgacagtagctgtcttggcgcattggtatcaatactcaagagcctgaacggtaagggggagttggtactgtgttcgctcaatatcaatatccacaacctctttaagctgacccgtatggaccgtattttttcgattagggataatcgccaggatgctttgcagatgttgatgggctga

SEQ ID NO: 391612 - DNA, 444 bp, Salmonella enterica
atggcaaaagtcaacacggtatttcgcttacccacatcacttgacaatctggacacgctgagcggcactcttcggcaatttaccgctcagcttgaacttgatccggcagtggtttatcagcttgagttagccacgtgcgaagccttcagcaatattgtcaggcatggtgtaaaccatgatcctgagcagtctgtcggggtcaggttgtcctatgagaatggcggggtagagatcgtgctttctgattgcggcaaaccgatacctcaagcattactgcgtgcgttggaagggcgtgagaaatctctgccagcgcccgatcctcatcagcaggcgagctggccggagaacgggattggcctgaagctgatttttgccatgatggatgatgtcagctatttatcgcagaacggacacaatgagcttattctgattaaacatgtataa

SEQ ID NO: 391613 - DNA, 2211 bp, Salmonella enterica
atgaaaaaggggatcctgtgtgctgccttactccttgctggctgtacgacgcagatagctgacccgaccttagcgggctccctctcacttgatggttcgtggcagtaccatgatgctaatccgccatttgcagacatggcgcaggcaacagacgccgctcatacgtggaaaaccattccggtaccggcaaactggtatagcgcaggtgtcgatcaccagggggcgctctggtaccgtacccgctttacctaccctgagccgggtgccgatcagatggcaacgctcatttttaacgcggtcgattatcaggcggatgtctggcttaataaacagtttatcggtcagcatgagggatatttccaacgctttcagtttgacgtcacccgtgccctgcagcaacaaaaccagctgctggtcaaagtaaacagcccttttgaaacccccgggaaaatctggccgctgcataagcaggcaataaaaggcgtattgtcgcaacatgatacgcgccctgggggagcctggtcacctgcggcgcaggacgcgaactcaggggggatctggcaaccggttaccctccacatcagccgcggtgccgttattgataacatcactgccttacccgactggcgcaacggacttgataatcccaccttgaatattcgcctcgactatcgcgtgaatcgtccgcgcgaggccctcctttctttaaggattgtaccgctgaattttacgggtcaacactatgaacaggctcagcggataaacctgaccggctctgcgctaaccgctacgccgctttctgtttcgattaagatgccgcacgcgcggctgtggtggccttacgactatggcgagcaaaatctctaccgtattgaagcaacgctgtctgatgccggtggcgttatggatcaaaaacagagtcaaaccggcctgagagagattcgctgggcgcctgaaaaccaggcctggatgctgaatggacatcgtctgttcattaggggaaccaattatatcggctcgccatggctgggtacgatgacccaggcgctctaccgtcgggacctgcaattaatgcgcgatgccaacattaacgcggtgcgggtgcacgcgcatgttgccagccaggcattgtacgatcaggcagacgagtccggtatgctgatatggcaggatatgccgttacagtgggggtatgacgacagcgcggcctttgctcagaaggcatcacgccaggcgaaagatttattacagcagtggggaaaccatccttcggtcattgtctgggcaggtcaaaacgaacccccgtttgactccccctggatgaaacaacgctttgccgactggacgcctgacctgaaccgaccgttggcggaaagcgtcgccaccgcgctgcgtgaggatcccagccggatagtccaccgctggtcgtcagtcagcgaacactactggcaaggctggtattttggcgtaccgaccgattttctcaaaccggcccaaagccgcatcatcagtgagtttggcgcccaggcgctccccggactggcaaccttgcagacaatcattccggcggacaaaatgtggcctgccacaaccgcccctgacgatcccggttgggatgtctggaaataccatgacttccagcccgcagaggcctttggaatagcaaaattatccagaggacgcactccagaagaatttattgcaaacacgcaggcgtatcaggcagaggtggttcagatggcggcagagagctatcgccgtcaacgctatcagcctgttgtggcgcttttccagtttatgtttagcgaaacctggccatcgattaactgggctatcgtcgattatcggcgcattcccaagaaagggtattttgccttacagaaagcctaccagccggtacttccgtccattgagccgataaccctcaactggcatccgggacaaagcggcaagataggtctttgggcgattaatgaccgttggatgaattaccccaacgccaggctcagctggtttgtgctgcaagggggtcgcgaactcgcacgaggcaacctgacgctggatctcccggcggatagcggccataaggtgacagaactttcgctcgtaccgccgacggcgcaaaacttgctgctggttaccgaactccaggatcgtgcaggtaatacattaggacagaacagccgctatttttcagtaacggctaaataa

SEQ ID NO: 391614 - DNA, 2703 bp, Salmonella enterica
atgataagcaatgagcaactgcatgccgcgctggacgcaccgaatgtcgcgctggccatttatgacgagcaggaaaacttacagtactggaataaacgtcttattgagtactaccccgccctcgcagactggctgcatcggggggttcaactcaccgacgtcctgcaaatgtccctggatattgcttacccagctatccatgccgaaagcaaaaagcgaatgatggcatcgatgctggctaactatcggcgcaacaatcactatgaagtcagacgagtcaccaaacgcacgctctacattcaatatcagcggacgcccgagggcggtattatcagcacccataccgatatcagtcggtatgccgatgtcatcaaaaatgaacaacatctgcatagcgattttattctggcggcagaaacctcgcatattggcatctgggactgggaataccacaacaatgtattgcaggtgaatgaggcgctgctgttgctgctgggtattcaacgcgagcaaaacatcctgacgagtgatttatggacgaaagcctttcatccagaagatcttgctcactttcatcagagtattcaccacgcaacgcgggcggtgctgcccattttcacctgtgaaatgcgcgtgctgcgcgcgaatgaaacctatggatggatgctgattcagggacaaatcatgaccctgagcctgcagggttcggcacaaaaagtcatcggtaccctgcaggatattaccgagcaaaaaaatactgaagccgcctcccggcaggccgttgaagcagcaaaagccgcgaaccaggcgaaaagtgaatttctggccaatatgagtcacgaaattcgcacccccatgaacggtatcctggggatgacgcagctttgtctggagacggacctgaccgccgaccagcgtgactatattaatatggcgcacagctcggccagcgcgttactgaatatcattaatgaaattttggacttttctaaaattgaggccgggaaactgaccttaaacgctgaagacttcaccattcgcccgctcattcaggaaattacccggccgttaatgccaaaattcacggagaaaagcattgagctactggtggatattcaccctgacgtggccatcgagatccacggcgatccgctacgtttacgccaggtgctcaccaatctgatcggtaatgccctgaagttcacccttcacggtgaggtcgtattacgtattttgccggtacctgaagcgccccaccgacttctgtttagcctacaggatagtggtatcggtattcctgaagacaaacaaaaagtcatttttgaatcatttagccaggccgataactccacgacccgcaaatatggcggtaccgggcttggattaaccatctcctcaagactggtggaaaaaatggggggcgaattgcacctgacaagccagctcggccagggaagctgcttctctttttcgctgcctgtattaccgggtgcccgcaaaaaattattgtcctggccaccgacactttcgggcgttgaggtgctggtcgtcgacgataacgacaccaatttgcgtctgctctcggggctattgcggaacatggggttaaaacccattgccgcgaattcgggtaaagacgcgctggacatcatgaacgccagaccggtgtttccactggtactgctggatgcgcaaatgccggaaatggatggtatggcattggcgctggaaattatgtccacgccgactctgcgacagagcaagctcatcatgctcagttcaacgggtaaccggatcgataaggacgtacttaaaaaagtgggggtctctttctttctcactaaacccattgatgcgcaggaactctttgcaaccatggtacaggcactatcatcaatgccgccggtacccgcgccgggcgtcaaagacagtaatagcgcctcccgcgatacctccgtctcaacatcaccgcattaccatattctgatcgctgaggataatctggtaaatcagaagctggcgctaaacttcgtgggtaaattagggcacagcgccgaccttgccggtaatggcctggaggtcattgaaaaactgggaaactcccgctacgacgttattctgatggatttacagatgcctgaaatggacggcgtcgaaacggtagcggccattcggcaggcagaagaaaggctaccggcaggcgcgccgcgacagccgattattgccatgaccgcccatgcgatgaaaggagacagagagcgttgtctgcaacacggttttgacggttatatcgctaaacctatccgcctggagctgttagataaagagattgatatggtcatgagcgcggaagctctcgctcttccggcatttgactttcaggcggcgctcgcccaactgaacaacgaccggcagctgtttgatgaactggcggtgatgtttattgatgaactaccccacctgctggcagaaattaatacagcaattagcggccagtctttcgataacattcggcgtagcgcgcatcgatttaaaggtgaaacgctgcactttgtctgcaagccgctggaaaactgtctgaaaaacattgagatggcggcaatcgaacacgttcttgataccattacccatgagcaagtgcgtcttgaagcactatgccaacagctgagcaacgcgctgctcgcggtgatggaggtcgaatga

SEQ ID NO: 391615 - DNA, 450 bp, Salmonella enterica
atggggattaattacgaggagttattcaataacagctatacccgaattttacctggcgataagggagaccgcttttttacccatttctatacgttgtttaccaaaagcaccgatgatgaagtctctccgctttccgtggctctgcgtctggaaaagcaaaaaatcatctacaaaacctttttctatatgctttccgtcgccaatacacatattgtcgccgactatctggtgaaaataacgcgagaaagtaacccgcaaaatatcaatctgcccccttcggcctatgcgctatggcgcagggctgtgctgcaaaccgtccgggatcttgacccggaatgtgatgaagaaataatcaccgcctgggcgattgtcctggcccccggccttgagtttatgcgccgacaggccgagctataccataaacctcccgctcaggaggggtcggcatga

SEQ ID NO: 391616 - DNA, 1368 bp, Salmonella enterica
atgcttaagacaataacgcttatcttcgctgctgcgatcgcgattacctttacggttctgatgagcatgatggcgcgttccggctcgccatccttgttcagcgcgggagaatccaaagacgaacagcgacagtgggcggagacggcctggcgctatgtgcagaacaatacccagcccggttcaggattagtcaatggaaaagaccgctatcccgtcacttcgctgtggaatatcggggatacgctgattgcccttaccgccgcaagacgtcttgaaataatcagccaggctgaatttgatgcgcggttatcgacactcctggtaaccctcgccaacctcccgctcacgcctgcgggaacgccaggctcgttgtataacgcggtggatggttcgatgaaccaccagcagccagccgccacgaaggcgcaggatcttgcccacctgctgaccggtatgcgcatggtcatcggttattttcctgaataccgcacctaccttgagcgttcagccatgcggtggaatttttgctctgtcgtcaataaagaggggttaccgctcgatggagagcagcaaaatacccagtggcgcactcagaccgtcgtcgatactgaatattcagactacagtcgggcggcattggcgctgtggggattcacgccctccgaacagccattgcccttcaaaacggcgatcttgtctggattacccattgactacactagccgcgatccgcgtctgagcgggtcaccggcgggtgtcgagagcacgccctatattctgaccggtatcgaactcggctggacgatgccggagggattgccatcagccagtacgcgcatggaaaaccgcgcaaagctgatttatcaggtgcaggagatgcgctggcagaaggagaaaatcctcaccgcgcgcgcccagtactctcgctcgaccgccccctgggaggtctatgacagtatttttgctaacggttatccctggaatacgctcgccgatggcaacctctacatgcccgagctgtcgctcctctcaacgcgcgcgattttcggtctgtgggcgctttgggacacgccgtttaccgacgcgttaatgcagcttggcagtctgcatcgcgatactgaacatggatggtttgaaggccgctatgaaggcaacggtgggtacaaccgtacctacaccctgacgacgaataccgtggttcttgaggctatgctttataagcacaccgctggcccactcatcaagccggtaaaccacggtggttatcttgacgcccgactgcaggacatttttaactggccgcaccattgtctgccaccagagagaaatccgcaggttattaagaaagggggactacatggggattaa

SEQ ID NO: 391617 - DNA, 1575 bp, Salmonella enterica
atgcacatgtatctttctgtcaggccgttcagcgcgtggctcagcacgatcaaacggctcctgctgggcggtttgctactaatggtgcttccggccgcgataggtgatacccaacttcctgctgcggggtacccacagcgccacggggaactgaccgcgcgtgaacaggctatcgccaacaaagcgtggtcctatttcgtcaccaattaccagccgaccaccggtctggtgaacgccgtgaataattatccttcgacaaccatgtgggacagtgcctcatacctggcggcgctcaccgcagcccgtgagctcggcatcatcaacaaagagacgttcgatcagcgcctgattaagttcctcgggacactgaacacgctgcagcttttccagaatcaaatccccaataaagcctataacactatcaacgccgagaaagtggactacctgaacaagcccggtgagattggcttttccgctatcgacattggcagaatgctgttatggctgaaaatcattaaagaacgttatccggaatatgcgaatgatgttgataacgccgtattacgctgggatttcagccacgtcgttgatgattgcggaacgctgtatggcgcagttctggatgccaataagcagccgatgtacgttcaggaaggacggcttggctatgaggaatatgccgccagcggtttccagctctggggcttctcaacgtgccaggcctcgcggcccgaaccctatcagcttgctgatatctactgcgtactggtcccttatgattcccgcgatcctcgcaccagcagtcaacataactacgtcgcgtctgaaccttatgttctgcatggtctggaaatggggtgggataccagcgacgatcgttccatggataacagcaagcatagccacccctggatgcaggattttgcaaaccgggtgtatcaggtacaggaaaaccgctaccaaatcaccggtaaattaacagcacgctcggaacaccagctcgataaagccccttacttcgtttatgacacggtctactccgatggctttgactggaacaccattaccgataaaggcgagtttgtacctgacatggccgccgtctcgctgaaagcggcgctgggtatgtggagtttgtggcagtcgccctataccgacaggctgtttgacgccattgaaaatgccaatgaaaaagacaaaggtttttacgagggtctttacgaaaacggcagtggtccgattcacgagttcaccgctaacaataacgggatcatgctggaggcgctgctgttcaaaaaagagggacgtcttctcaaattcaacaccaacaaccaggcggatgctaaatatgcgccgtcgctgtgggataaaaccctggtcaatacgttcgatgataaaaacacaccgtttaatcgcccctttattcagcctgataaaaacctgaaaacatggtgtcagcagaccggtatcgccttgcgtaatgccccctcatgcaaggcctgcaaatgtccgcagtgtgacattaacgcgccagtgaaactgcctccggtggcaacatcatgcttaagacaataa

SEQ ID NO: 391618 - DNA, 1365 bp, Salmonella enterica
atgtcgtggaaacggaacctactgcgggcacgcagctatattgcggtgatgattggctttttgattgcttccggtgtggttttatatgttgaaacacatatgccacaaagcaagcccgtacagaatgaattaacgctgagccatgatttcccggaccttcctgaaccccgggcattaaccctgaatgaggcaatctgggcccgtatcgcctggcaatattttgtcaataacgcccagcctgccgggctggtcaacggcattgataaccagccctactccacgatgtgggatacgggtaattaccttatcgcgatgataagcgcggaacggctcggcattatttcgcatcaagagctcaatgagaggatgcgttccgtgcttaccgcactttccactctgcccctcaccgaggggaaactgcccgccgtttattaccactctcagcaactgattagcctgcgcagtcaggatcaaaatgagaaccagccagactggtccgctgtcgatatcagccgactgcttatgtctctgaacatcagcgcatggctatacccggagcatgccccggcgattaaacagctcacacgacgctggcactttgacgctctttttgtccaacgggaaccggaaaaacgtctgagcttgcgtgaggccaaaacctggcaattgatctcgcaagataaccgacaaagctacggttatcagctctatgcgcttaacagcctgcgcagaacaagtatcctggcggggtcggtactcagcgcccctttcccctcgcaacacgcaatcagtatcgacggcgtgagcattccttatgacggtttggtgaacattggcaaactcgaccacccggtcgtctcaaatctgcctttcctgctcacgggcttagaggttggttttgatattaactcagcggaaatgagctggcggatcatgaaattacaagaaagccgctataaaagcaccggcgatctcgcctggatggggaccgattacgaagaacgtttacccatttttgagaacggtacgctcccacgtcgcgctcccgccgccatcggccggacgcgcaatgaagtgaacggcaccgcattgcaactgtccacccgctccgtgtttagctggtatgcgctatttcgcaccccgtggaacaccatgatgcgtcaacggtcagcggcgctctttgaacctggccggggctggtatgacggtatcgtctcaggcagccagcagcgcagtaatatcatcagcgcaaccactaacgccgccgttttagaaagtcttgtttatctctcgcaaggccctctgttttgtcagaactgtatgccggcatcctcttcaacgcccgctgacggccagcagccataa

SEQ ID NO: 391619 - DNA, 1833 bp, Salmonella enterica
atggcaaatttttatttttcatgttttgaaaaaagaagaccgccacctccactaaagcataatcctgtcatcgagtttatctggcaggtgttatctgtcgtggtcattattatcggcataaattacattcgctggcgctggatggagtcattaaattatgatgcgctgtggtatgctgttccccttgtcgttgctgaaaccctggcctttatgggtaccattttgtttacgattaatctctggcaggtcagagacgtagaaaaaaaatcagcgcctgactgtatttcccaatgtcttgaagcagaactgaatagcgctccgcgaccgataaaagtagatttatttattgccacttactcagaagataccgagttagtcagattatcgattcaggatgccaaacgggttacctaccctttcccgatcgactataaaattcatgtgcttgatgacggtaaacgcccggagatgcgtcgggtaacagagcaggaaggggtcaactatttgagccgggaaaccaatattggttttaaggccggtaatttgcgcaacggtatggaacacaccgatggtgatttcattgtcatttgcgatgcagacactcgcgttttctccaccatcctgaccaataccctggggtattttcgcgacccggcggtcgcctgggttcagactccccagtggttttacgatctccccgccggaaagcgcctgcccagcgtattgcagaaaaaattaggccgcccgggccgggcatttggctggttagtggaaaagctcgtgggtccgctcaccgtcggccgcgaccccttttttaacgatcctcagatgttttacgacgtcatactgcggcgcagaaactgggctaacgccgccttttgctgtggagccgcgtccatccatcggcgagaggccatcatgcagagcgccctgcgccattatgttcatgcggtggagtcagaaataacccgctatacccgacaagtcccggacggtgcactacgggaagagctacgccaggccatgaaaatgcatgtggcgtacgacacggagctgaccccctataaattccatgtttctgaagatatctatacctcgattctgctgcacggcgatcgtgagcatcgctggcgctcggttatgcatcctgaggtggaatcaaaaatgttatcaccgcaggatctgttaacctggatgattcagcgttttaaatatgcggcaggatccctcgacatcctgctgcatgacacgatattccggaaccgtaaggttaaactgagcattccgcagaagctgatgtacggtaccaccttctggtcgtaccttgcctgcctgtggaataccgtctttttaatttcgccattggtctatctttttaccggtattcctcctgtttcagcctactcgacgccgttttatctccatttcctgccgttttttctgttctccgagctggcttttatgttcggcacgtgggggatatccgcatgggatggcaaatcgtcctatctttcactgttctccatgaaccttcgcgcgctggatacggttctgcgcggtgaaaaaataaaattccatgtcacgccaaaagagcgccagcagggtaattttctgacgctggtgaagccccaactgtgcattatcgcgctgacattgctgggtctgatatggggcgggctacagctctatcttggtaacgtcgcggacccctccggctatatcattaatatcttttggggaggcgtgaacattgtcgccatgctccccatggtcttagccgcattatggcgtccagaggagaatgaatcgtcttctgcacaggaggcggcttaa

SEQ ID NO: 391620 - DNA, 1203 bp, Salmonella enterica
atgagtgtacatgataccattttacgtccggtgtcgggcttacagtatgtatcagaaggcaaacgtgacttacgcattgatatgctccgcggtatcgcccttgtgatgatggtggttgcacatgtggagattctatcagcctttaatgtcgttacctgggagcgctttggcctgacaaccggggcagaggggtttgttattctttccgggtttgttctgggttttcttaaacgccgacaattggatactgagccactgttaagcgtctcttattcactggtcagacgcgcagcgatgttatatatcgtgaatattgtcattattctcaccattcttattcttcggcatttgagttttattgatacttttgaattaacgcattttaccgaccgctattctggtgtcgcctacgcgatgtatccggtcagtgaacaggtaaaagaagcatggtacaatgaaatcctctttttacagattggtccgcaccagtcccagattctgggattatatttttatctgctgttgctgagcccgatttttctgtggctgttatattccgggcggtccgtgattctgataagtatttccatgttggtctatggttattttcaaatcacccgcgaacatcttatctccgctgaatttgattttgcttttccgctgatggcctggcagtttatctatgtgttggggatgtgctgcggatggtacaaagaagagttgctctctctggcccgaaccccacccggaaaggtctttgtgtcctgtatggtactgattgctgttgtcatgatgtttattgcgcaaaaccatacgaatccctttatgccgcggttcctgatgctgcatgtgatccccgcgaaaaattttgactggctttatcataactttgccgggaaaaatgagctgggcccattgagaatactgaatgatgcctgcctgattgtctccgtttatctggtgctgacctatttctgggtgccgattaataaactggtgggctggtttcttattcagttgggacagaactctctgtatgtctttatcctgcatgtgtatgttgttttagcggtaagccagtttgtgacgtttaatttgtgggaacgggactgggtattgaacacggtgattcatgcattgtgcctgtcatttttgtggttaatggcacggtttggaatattgagaagaataatacctaattaa

SEQ ID NO: 391621 - DNA, 336 bp, Salmonella enterica
atgaaaagagcaatacttctggtattaattgctgctggtttgctggctggctgcggcgaaaaaacgccaaaatgtagtagtgatgatgcaaaaaatctggtcgtagatattgcaagaaagactatcgagaaagggatgacactggataaggatgtgcgtatttctgttgataacatcaggacaataagccatgaatcaggtctggatgtttatcagtgcgctgctgatttaacgttcataaagccggatctgcaaaactctttaccaataacttatcgaattcagaaatttgatgatggtaaaggacaattctatataaacgtttcaggcctataa

SEQ ID NO: 391622 - DNA, 528 bp, Salmonella enterica
atggcaaccaccatcactgaaataacggaatgctttgagtattttttcagttctctttatcgcagggagttcgtcaaaacactgcgtctgaacgaatgtagcgagcgggaattactgcctctggtacgttgctatttgctgggttggtttgcagataacgtctcaccggaagtcaaaagcaagctgccaggaacagtatccgggcacggttacattgattttgtcattgatgatgtagccgttgagtttgcagtacgtaaaccaactgcggcacgttcgaatgtctccgcaactgtaaatagcactgaagttaaaaaattgatgaagcacgacggcaaagccttgcttgtgctgtttgacttctctgacacgccctactcagaagaacagattgaatctttccgcaactggccctctctcggtcgagggaatcatcgcaagtccgcattcaacgtcgtttatttctttgtgggaaaacgcagaccgctgacactgggaaaaatcaccaaaaacatccgtatcacttaa

SEQ ID NO: 391623 - DNA, 270 bp, Salmonella enterica
gtgcgtaactcaacagcatcgcagaaaaagcagagcaaaggaagttcagggaactggcatcgtgccgatattgtggcagcacttcacaagcgagggttaacgctggcgtcactgtcacgcagtcacggccttgcgccacggacattaaataacgccttagagcgtcattaccccagagctgagcgcattattgccgtggctctggataccacaccagaagcattatggccggaaaggtatgcccttaaaaatggacctaatagcaggtaa

SEQ ID NO: 391624 - DNA, 489 bp, Salmonella enterica
atgagcagtaagagaacagtttcggctatacctactcatcctgaagcttctgttgaagaggctaaagactggctgacagcagaggaattcactcatattgaggggatgccgggcactgcgcgtggcgccaggatgcgcctggaaaagctggcatccctgcatccggaaatacgtcgtaaaaggactgccgggaaaggcgttgtttaccatatcagcgcagccacaatgtcgcttgatgatgagagaaacagggctaagggtgaagcgtttactctcaccgacagcgatcgccagcttagcctctggatacagttgtatcgcaatatgtcaccagcttcgcgggcgcaactgatggagcaggccctcaggctggtaaaggacgatctgatgtctcaggggcccaatgtttctgaactggcggtacaaatcatgaagctgcccgaagatgagcgtaagcgcctctttgaaaggctgaacgggaaggtgtga

SEQ ID NO: 391625 - DNA, 249 bp, Salmonella enterica
gtgtattcattattacaatggcagaggttagttaataaactcttcattaagtattatggcatagacattaacgacactgccttttgtgaggcaagttatatgaaaagatactggactgattgtgttcgtccttatcaggcagtcaatgaatgggcatataagtatgatctgcacagacttgattcagttgacactccattgagtgaagttaatgaactatccgtcaaccaatacatggaattaaaatga

SEQ ID NO: 391626 - DNA, 393 bp, Salmonella enterica
atgcccgtcagtcaggaattgatacatatcatattaaatgaagtgggaaatccaccgccgcatagagccagaattaccgctgtcagtctgttatttaaagacctgagttatagcgctgaaaagggcggttaccatcctgtcgaaatacggattatttcacgcaatgatgaatggtatttcgattacattaccgacttcagttatatgggagtggtttaccccgaactggaaaaggaaattgattttagctggagtcagcaatatgtctttctggctcatgttggtgacctgcctgttaacgccggaagggagttatttgaactctggcaatccaactttattcagtatcacgccatgaacgtctacaccattacagtcctgtgggaaagctaa

SEQ ID NO: 391627 - DNA, 453 bp, Salmonella enterica
atgaccctatttacccagcgtgaaacccgtatccttgaccaagcgcgtgacattatcagccggtactatcagcgtggggttcaactctgctcccctgatgatgttcgacggtgcgtgatggttgagctggcaccgcttgaacatgaagagtttggcatcatcctgctcgataatcagaatcagctgctgcaccgcgaaatcctgttcaggggtacgctaaactcggtcagcgttcacccccgtgaagttatcaaacgcgtgctgaaacataatgccgccgcagtcatccttgttcacaaccaccccagcggcgagcctgaacccagccgctgcgatatcaagttgactaaaaagcttcaggagctgctggaaatgctggatgtgcggttacttgatcactttattgtggcaggaactgaaacggtgtcgatggctgaacgggggctgatgtga

SEQ ID NO: 391628 - DNA, 930 bp, Salmonella enterica
atgaacaggacagcgttacgtcaggtcgtttcggtggtacaaacaaccgtgtttgatgcgtatattggcggtctggcaccatcgggtcggcggggtatcaccagtctgttgaaccgcagtgcctgcatactcaaacgtggtgcggatgcagcagattatccgtgggaacaactcaactacgccgccgtcgctaaagtgcgcgcggcactgctggatgacggttacgccgtgtcgtcggtgaacatggcgttatcagcgctacggggcgtagcgcagacggcctttaacctcaattgtatgaatgccgaaatgctggcacgtatccagtcagttaagcgcgtaagtggtgatagccagcgtaagggaagggcgctgggcaggcaggaaatctgggcactgattcaggctgcaaaacaacaccaacacgcatcgcgccgctgtcgtgataccgccattgtgctgacgctgtgcggaacagggctgcgggccggggaaatggttaaaattgagcgtcgggactatgacaatggcattctgacagtgaggcaagggaaggggcgtaaataccgtgaaattcacgtagccaatgtggtagacaaagccatccgtgcatggctaaagatcagtgcagatgaggatgacagtgcgttgttcaggagagttcagcgcaacgggaagaccgccattcagccgctgacaacaaccggattaacgggtatcctggcggagttacagcatacgtcaggcatagcacgatttactccgcatgacatgcggcgtaccttcatcacccgtttgctggagcagggcgtggatatcaatactgtgcgccaactggcaggccacagcgacatatccacgactacacgctatgactgtcgtggtgagagcatgaaaatcagcgccagcaaacgcatcaagtgtttttaa

SEQ ID NO: 391629 - DNA, 1290 bp, Salmonella enterica
atgagccaatacattggtgaagttcttaaccttccccccttacttcgtgcagtagcgcattggaaaaatgagtgtcttttaaaaaatagatctatttttagtaagaaaaaactgtggactaccaaaaatgtaaacattttattagaactatatgttaacaatccagatgagagcaataaagacttttttgaaaagttaaaaggccaacttggtgttaattatcctgatgttatttgtctcgtcgcagaaatgatgtggattctgttattaccatccataaacatcacagaaagaacaaaaattgagaatattgctcaggtatgggagtggtccggctcacctttcaataaagtgcataaccttctatctgatgaaactctggctggctatgccaatactagcattggttataatactaataggtggcgggagttatcctatttaattgagataacgggaaagttgctttcacttccgttagcagcaagaaataaggtgctaaacgatggatgggagctggcatactggcttgaaaagacaccagagagtagacgcaggcaatttcgacacatcctgttatatctcttatttcctgatgacttcgaacgtattactagtggtgttcatcgtctgaaaattgttagtacttttgataatgccgctgtaaaaaatttgcgcaaaatggaactatggaagattgatagaaggttactggctatccgtaagcagcaagaacagatactgggaaccacgaaaatcgacttttaccaagacccattacacgacatatggcacatcaaaaaaaaatcatctgccatagatatagccccccagataatcaagaaagaggaggcacgtgttaacgccattaataatgataagaaaataaatcaaaagataaaagaacaaatgatctacgcgcgccaaggacatggcatttaccgtcgaaaacttgctgaagtggaaaaaagatgcagaatcactggggttcaagatacaagatttctgacggcaagccacattaagccatggcgagattgcgatacacataatgaatgtctagatggaaacaacggtctttggatgtctccacatcttgatcgattatttgatcaaggttggatttcatttaatgacgacggcgacttactttttaccgatgaaattgtcatgaacgttttgtctgtgtggaaaataaaattacctgttaacattgggacactgaataaattacagcaatcttatatgctttatcatcgaaagtatgtttataagaatggggatgcataa

SEQ ID NO: 391630 - DNA, 531 bp, Salmonella enterica
atgatggttgactacaacattgggggcttaatgaaaaagcagaaaacaagtgatgccgtgatccgggttatagccagccgggaaaaactcgaagaggagattggaagtgctttctcaatcaatatgagtgacgatgtcaaaacaagattacgggaactatgcgtgctctatggccatcaggatatgctcgacaggatctctgggacaggtcggcgttttagcgaggtactggctacactgattgatgctcattacattgtttatgtattcaatcctcgaactgatccagctaaggagctgattcgagttttcaaacatgttcatcgtttgaaaatgagaggcaaggataacgaaaccatcagggagaccatgatcgacagaggatttgacaggcctggcgctattgcagatgtcctgacagaccaaaaaatggaccctaaagcatggacagagaaggacgtagaaaagatgctaaacccggcgagagtcctgaggcttttggtaaaaatcgaaaacaaacaaaatgaatga

SEQ ID NO: 391631 - DNA, 243 bp, Salmonella enterica
atgatggttgtaaaagcctgttcgcatcagccgatgcgtaacttaaacaggtgcgttatgaccacaattcgtatcatcaaagtcccggaagttcttgaacgttgtgccatgagcagggcttcgctctacagaatgctccagcgtaatgaattcccccggcaggtccgcataggtatccgttcggtaggtttctacgaacatgaagttaatcagtggctagctgaccgccagcgtgttcagtaa

SEQ ID NO: 391632 - DNA, 1119 bp, Salmonella enterica
atgaaaaagaacaagttgcttaacaagaagaatgttgaatttagtccatcagataagatttgtgacagccttgaggggcatgagatgaagttgcgcatcgactggctttcaatagtatcccgcttccacagtgaggatgagaaaactgactttgttcagaagttgcagtctttaccgggacgggagtggaaaaactatgttgtgcataagaaattgcctcagaacgcaaaaggtacatatcaaaaaagtactcgtcacccttacaagtatggtttgtgcatttctcgtaatgaacctgatgcaccaatgctggcatatctcatgtgggggccaaaagcaccaggaactggcgggttcagtatccagtttcatccccaacacatgacgggtaaacggatggatctgctacttaaatggctaggggaccgtctcggtgaaacttttgctcacctgcttgcgcgagcatgggtcacccgtcttgatatcgctctggatatctatgggtgcaagttgaatgactatctttgggggttaaaaaagtcatcgaaatataaagactacgataatgataacgggttgccggggttatcccttggggcgttagactcgaaactttcagttttaatctatggcaagattgatgttgcgcactttaagcggattgctttccctgagcatgcaggatatgtgaatgaaaaagggaggcgtaaacgggagtatttccttgaaattgacaaggaagaacatccgcagtttctacgtgttgaagcgcgtgtacaacctgaatctactggtcccggtaaacggggatgcaggcaaaaagcactaatgctttcggacctagcaaagcttgagcatccctttgagcgcctgttggtgtataagcgcaaactggagggggaactaatgaacgccgcttttaccaatgaccgccctaaaacgaatgggatcaaagcatggacaaatacgttgagtgatggcgattcaaagggacgcctggcccgtaaattcgccaaactgctgtaccttaatcaggtagagctgtttaacaagcatgacgtctggtctttttggcgcctgtttgcatggttaagttggggcaggctattggtggattaa

SEQ ID NO: 391633 - DNA, 297 bp, Salmonella enterica
atggtgaaaaatcccgttaacaaatatagtgttcccttcaagacggacgagaacgggaaaactgtggatcattatgattataaatgtattaaaatgatcatacgagaacttcctaccctattttactggtgggaaatcaacaagacatttgactggcatcgacgcattgacttcacagaaaccttgccggatgatatttgtccctgtggcgcagatcgtcttttcaaggactgctgctcttccaaaccggcaattttgacgccgcacattgaaattgtcccccttagaaaatgttag

SEQ ID NO: 391634 - DNA, 846 bp, Salmonella enterica
atggctatcaaacttattgctatcgacatggatggcacccttctgctgcccgatcacaccatttcgcctgccgttaaaaacgcggttgctgcagcccgcgaaaaaggggtgaacgtggtgctgaccacggggcgtccatacgcgggcgttcacagctatctgaaagaacttcatatggaacaacccggcgactactgcatcacctataacggcgctctggtgcagaaagccggtgatggcagtacggtggcgcaaacagcgctgagctatgacgattatcgtttccttgagcagctatcccgcgaagtggggtctcacttccacgcgctggatcgcaacacgctctatactgccaaccgtgatatcagctactacaccgtacatgaatcctatgtcgcgaccattccgctggtgttctgcgaggcagagaaaatggacccggcgacgcagttcctgaaagtcatgatgattgatgaacccgccattcttgataaggctatcgcgcgcattccagcggaagtaaaagagaagtacaccgtgctgaaaagcgcgccgtacttccttgaaatcctcgataaacgcgtcaataaaggtacgggcgtaaaatcgctggccgacgcgctgggcatcaagccggaagaggtgatggcaattggcgatcaggaaaatgacattgcgatgattgagtttgccggcatgggcgtggcgatggacaacgccattccgtcggtaaaagaggttgccaacttcgtcactaaatcaaatctggaagatggcgtcgcctgggctatcgaaaaatttgtgctgaaccccgaccactcatccggccattttcccgcccgataa

SEQ ID NO: 391635 - DNA, 267 bp, Salmonella enterica
atgcgtaaagcccgttttactgagcatcagatcatcgccgtgattaagtcggtcgaagccggacgaacggttaaagatgtctgtcgggaggtcggtatctctgaagccacctattacaactggaagtctaaatatggcggaatggaggcctctgatattaaaaagataaaagagcctgaggacgagaacagacgtctcaaacagatgtttgccgacctcagcctggaatgtcgggcgctgaaagacgttatcgaaaaaaagctttaa

SEQ ID NO: 391636 - DNA, 1614 bp, Salmonella enterica
atgtcgggcgctgaaagacgttatcgaaaaaaagctttaaaaccagcctctaagcgtgagctggtcactcatctgataacgacattcggactcagtatccgtcaggcctgccggagtctgaacctgagcagaacggtttaccattaccgcccggattctacgcgtgacgaacccgttattgccgcattgcaggcagcggctgaacgatacccgcgatacggttttccgaagcttttccaggttctgcggcgacagggataccagtggaatgacaaaaggaaccaccgtatttactgtctgctgaagctgaattttcgccgtaagggtaaacaacggctgccggtgcgtaatccctcgccactggccacaccggaagtgctgaaccagagctggtctgtcgattttatgaatgatgctttggtctgtggccgtcgttttcgcacgttcaatgttgttgatgactttaaccgcgaggcgttgtcgattgaaatcgatctgaatctgccagccccacgagtggtccgggtgctcgacaggatcgcggcaaaccgcggctatccggccatgcttcgcatggataatggaccggaatttatctcgctggcactggctgaatgggcagagaaacatgcagtaaaagtggagtttatctggccgggatctcaaaaaatgcatggaactaaaacgggtctatttacacagaagttcagaatcaccaactggcacacctataacaacgctctaatcaaccgtggttccatgactttctggctggatgacgaggcgattaagtcgtggtatgacacatccccgccttcagcacgcggaagacctcagcgctattctgaccttgccatcactaccgttctggtgattaaacgcgtattccggctgcccctgcgggccgcacagggcttcattgattccattttcaccttgatgggcgttccgctacgctgtctggattacacctgtgtcagcaggcgggcaaagtcggtcaatgtcagttttaaaacggtcacccggggtgaaatcacgcatctggtgattgattccaccgggctgaagctcttcggtgaaggcgaatggaaagtcaaaaaacatggcaaagaacgccgccgtatctggcgaaagttgcatctggccgttgacagcaaaacacatgaaatcatctgcgcagacctgtcacttaacaacgttacagacttagagggtttccccgggttaatccggcagacccaccggaaaatcaggtcggtcgctgccgatggcgcttacgatacccggttatgtcacgatgaactgcgccgtaagaaaatccgcaccctcattcctccccgtaagggagcgggttactggcctggtgagtatgaggaccgcaatcgcggcgttgctaatcagcggctgagcggaagcaatgcaaggtggaaatggacaacggaatataaccgtcgctctatagcggaaacagccatgtatcgggtaaaacagctgttcggaggttcactgacactgcgtgactacgatggtcaggttgcagaagctctggccatggtacgcgcgctgaacaaaatgacgaaggcaggtatgccagaaaacgtgcgtattgcctga

SEQ ID NO: 391637 - DNA, 594 bp, Salmonella enterica
atgttgttacgccatatccgacattctgtctctttcattcccgccgttctcgtcgctgccgggctttccctcagcgccgtcgccggcgtccacgcggaagaccttaccccctggaaaggtgaatgggtctctgccgtctcgctcctgaacacgcctgtcgtgaacagtgaactgcagtctgcctatgaggagcagggcaaaaaagacgacatcagcgcacaggaatggaaaacgaacaaactcagcaaatggaacaccgccattaagggcatgaaggttgatgacaatgacatcacgttcaccctgggcgacggcagccaggtcgccgggaaatacacttatgccggctctgtcatcaccacatacggagagcacgaactgcagtggagtaaattcaccagcgaagatgaaggcgcatggcgcgacgtcatgctgatgacgccggaagtgtctgaagaccatagcgccctgacgcatttccatttccgttacggaaatgatggttttgaggcgctgcaggaggcagacgtcttcccgaccatggtggcaccggacaccacggcagcgcagttcgctgctgatttcgcggaataa

SEQ ID NO: 391638 - DNA, 258 bp, Salmonella enterica
atggtaaaagaaaagctgaaaacccggaacgggaagcggtttctgttatccgttgcggtggtatttattattgcggcaaccgtcatgacgcgggcaacaatcggaggggttatctggcagtatcatattgaactgtccgactggacgctttcaatgtatatgatccagtcggcgatgatatttgtttacagcgtggtgtttacggtgctgttttctattccgctgggtatttttttcctcagcgatgataagaagtga

SEQ ID NO: 391639 - DNA, 816 bp, Salmonella enterica
atgaagatgaagctgaccgccgccatactcctggcctctgcgggaattctccctttcactgccgccgcaaaccagaacgccgctcccgtcccggcacaaaaaaccacaaccagtccctttacgccggagcaggaaaaccgtatcggagaagtcgctgctgattatcttctcgcacattccgatattctggtgaaggtcagccaggagcttgaggcccgctcacagcagcaacagatgcagaaaatggcaaccgccgccatcgccagtcagaagctattactgctggataaggatgcgccgacttatggtccggctgacgcaggcgtggtggttgtcgagttttttgattaccagtgcgtatactgcagtcatctggctccggtgctggaaaatatcatgaaagctaatcccggcgtacgcttcgtcttccgcgaatggcctattttcgcacgcaactggccggtgtcaatgtcggtagcccggaccggactccggatttggaaacagaaaggaccggaggcttatctggcctaccataacggggtatacgccacaggtcattttgaaggaaagctgacagataaggatgtcagcaaggtggcggattccgtgaagtttaacgtatctgtggcggtaaacgtacaggatgaactggataaaaccagcacgctggcacaggaaatcggcctgcagggaactccggggctgattattatgcccgcgaaaaatgccacgccggaaaatacgacggtaattcccggcatgaccacagaagaaacgttgcaggcggcaattgataaagcctccggcaaataa

SEQ ID NO: 391640 - DNA, 279 bp, Salmonella enterica
atgccaggcaataacaacgacgacagcgaaacgacatactgtgaaatgaacgtcagtatggaggcgctgaacgacctccactgccttcttgacacgtactcagaaaatctgcaggaaaagctgcttatgctggccgtggcgacccactccctgatgaccacgcaggacattgagtactttgagtcccgcctgccctgcggacacaggattcagtttattaacgacgaagcacaggaggtgttttcctctcctgaaaatcccacaccacatctgcactga

SEQ ID NO: 391641 - DNA, 318 bp, Salmonella enterica
atgagccaaagaaagatatttcacagtgacagtttgtctgagcatcttgatgtactgatatcccggcttgttcagaaatcagaaaagaaaaccctttcccggtacccggtttatggtttccgggtttacatactggatatcagtgaggatatgagagtgttttgcaggagacacggaataaaaatcgggtatgcccgatttatggaaacggagttcaggggaggggaggatacccttactgttttcgtcaaaagatttttttctgctgtgccggagaatgaggctcgcatcagttatctgtatgatgctgaaacctga

SEQ ID NO: 391642 - DNA, 270 bp, Salmonella enterica
atgagtaatcgtaacaaaaagaataaacaaagaagccagcccgtcacgccggacgccattatggcagtcgtccggacgctggaatctcacaccggtgacccgcatgaggcgctgatggtgctggccgccacggtacactcattcatgacatcgctggatattgactgtatcgaatcccgcacaccagacggacacggaataacgctcacccgcaccgatgacgatgaagacggggatgaaccggaagcggaccgttcgcatctgcactga

SEQ ID NO: 391643 - DNA, 4908 bp, Salmonella enterica
atggcagtggaaaataaattcaaaattaatgttattgccgcatcagtactgatggggctgagtctgtccgccgtggctgcggggggtaccgataatgctggtaaaacagaaaaaggagctgtaactgcagaaaaggaagccactccggctaaagctaaaagtttagctgaggtggcgggtacggcaaagcctgaagatatcagcgttactgtggggacgtccggtagtataaagcttgatgctgcgctcaaggcagttgatggtgcagggggtaaaccagccgaagataccagtgctaaaaaaggctatgttgatgctgtcgcagcttatggaaaacttaagccggaagacgtgcaaaaaattactgatttaagcagcaaaaaatctgcgtttgacactgcttctgcgggttttgacgcatttgatgttaaatcaaaagctgttaatgacatttataacagtaagctaaagaatctgtatggttcaactggtgacactgcaggccatgcctggataattacagagggtggtaatgtttccgggagtgctgcaggtattgcactaaatgagaatgccccggattcagtctttgttgaccttattaacagtattaaagcgacaaaaaatgcggtagttgcccttgaagcgcaggcgattaaatcagccggggatgcaaccgcatcggacgctgcaaaaaaagccgatgcggctgtaaaagcttatgctgcctatctggataaatcttacaaagttatacaggagcaacaaaagcaggctgctgctgaaaattatattcaggaaaaactgccggactttctgacgctggttgagcggtataagaaagctaatggtaataccgcttctgataagactgaaaatgcgtcaaagcttgacggtaaatacgatgcgtatatcaaagccgtaaacgattaccgggacgctaaagagagcgataaaccaggtaaaaaagcagctgtttatacagcacttaatgaactggtgactaccgctggtaccgcaacaattcctgatgttgctgataaagcaaaagtcagcgaattcgccaaatctcttggagccgctcatactatctgggagacggcagcaggacaactgggtgaaactggtaatctgcaatccgggcttgatgcagcaaaagatttgaaagcattaaaagataatttacccgaagacattgatctgaccatcgctgataatgcggcagcattttccggtgttgataagtacctgaaagtgttgattgcagcagcagaaaagaatggtgctgagaaagaagcactgacgggagccattactgccgccaaagatgcgaataaggtgttcacagaaaaacagggtaaatataccgctgcgcttgctgaactgaatgctgccggaaatgagcgccttgcccttgttcccgaatggaagacgctgaacgatgcgtggactgaagcggctgatgcgttgaatactgcgcagacagcctataccggtagcgctgctgaaagtgcagtcaatactcttgaggaaaagaaaaacgcatatattaaggttcttggcgatacatctgcgggtattcagaccgctattggcagtgctgcgagtgcttatgctgccgcagtgaaagaaggcggtactgcgaaaacccagcaggagaaaaatgcggctctgtacacactgattggtcagaagaaagcgcttgttcctgcaaaactgcagatggataaagagttgcttgagcttaagtctgagaacgtggcaggtctgcagaaccagttaagttcagcagagaaaaaccgggcagacgctgaaaaatcatacaacgaagcggttaaagaatatctggccgcgaaggaggtattcggtaagacgaatgctgttaccgatgagactgcggtatcagttgcagcgcagaaactgtttacgctcacaggtaagaagaacctgcaggagctttataaggactcagtgaagggacaaaagagtggctttaaacagtttaatgaatttactgatgctccggccatcacttccctgcagtcggccagaaatgctttgttcaccagtgctggaaatgatatccagaatgcccgtaagaacgttgctgaaggacttcaccatcttgccagcctgatgcccctttccacggctgaagagcagaaggcgttccgcgcagattacaacagtgcgctgaaaaccgtcagtacggctgccaccactgcagaggaccagagcagggttgcaaatgctgaagtcatcactcactatctcggtggtctgagtgccgacgaaattgcgcagtatgaccctgtttccggtagctataaatcggtcatcgttaatgttgataaggaaggtaatgtaacgggcgtgaaggataacttcacagggaaagacctgtacacgggtagccaggacaaaccgtttaccaccacggtgctgaatattgaagttccggaactgggtaacggcgcgctggctgacaccaatacaattaccgtgggtgaggccggtagcaaagccgctccggttgatgtgtgggcgaaaactgcgggcgcgaggcacgccctggatgacagttctccttatgtaagcgcagaacacggccccgcagtaaaactgtctcaggaactgagaacggccaccgctcaactggatgaaaatggtaatccagtggaggggcaggttgtccgtggtgctgaccagattcatctgcagaatgttaacatccacaacagcttcacgcttgctgataaagtgcagatgctgaaggatgacgtggctgcgctgaaccagcaggctgcggataaactggctctgggtcagcctgctgacggtgagacgggtgtcaatgcctggctgaaaggccagactgatttactgaaccgtaaatacgacaaccttaaactgaccggcctgcagattgacaccagaacggtcaatcctgtgtttgatgttgataacggtgtctgggcaacggcggctgaaactgcaatcccgacagaagctaacattctgcttgataacctgaacatcacactgcacaacgacagtgtggctggtatatcgacagcgattggcctttccggaaccggtaaccacattcttgccaacggtggtgtgtttgatgccggcaaagcagataatctggcacaggcatatgtgcttaacatcactggtaaaaataacctcattaattttaacagttctgttctgaacggcgatattagttccggtgcgacaggtaacaccgttaacctgaacaaaggcagtacgttgacgggggacgtctcagcgacaaatcatgattacctttcactgaatctggataacagcacctggactggtggcgcaggtccggccagcccggatgtcagactgagcaacaactccgtctggaatgtaaagggctatgattttaatgccgacgagagtgatttcccggagtcttctgtccacagcctgaccctgaatggcaacaacaggcttaacctcgtttcctccacaggtctggcgcaactgggtggccgtggttttaccggcagtaaatatggtgtcaccctgaacgttgacactgacctgaccagtgatggtaagggcgtgtcctccgttctggcaggaacttattctccggataatcttcacagcctgacaaataccggtcttgcagacggttatcagtttggctccctgtatgtggatggtctggcgagaggcggtaagtatgccctgtccgtggaaagctccggtgctgagccgtacaccatcagaggccgtctggctgatgctccttatgcaaccagcgcgcatgagtttgtgtcatacaaaacgtctgaaagccgccctgttacggacaaggatggcaaaaccacagtcgctcagattgttaaatctgacgccgacttcaccagccagagcgcaccggctgaactgggtgtgtaccagtacgccgctgagcaggtgattgatgcggtgaataaccgtacgaacatctactacagcagcaccggtaagctgtccaacagtgccgctaccgttgtttctctggctgcggcaccggttgatgtggcgaacctggagtcagataccctggcgaagcacatgaacagtgtacgtcacggtaaggattccggcgtgtggctgtcgtacttcggcggtgaaaaccgtaacaccacggctgtggggccggagtataagctgaagaccaatggcgtcatgctgggcgttgacaccctgacggagaacaactggctggcaggtgtggcggtttcttctgcacgttcagacatgagcgtaatgaacagcagtggtgacctggacagctatggtgcgcagttctacatgtcccgtcgttatgacagcggcgtgtttgtggatggtgcgctgcagtttaaccacttcagcaatacagcaaaagcccgcatgattaacggtcagcaggcgaaagcggacttcagcggtaacagctacggtctggaagcgaaggtgggttacgcctggaacagcgaagggttctttgctgagccgtatgtccgtgctgcggcccgtgcctttgacggtgagcattatgccctgtctaacggtatgaccgtgaacagcaatgactataagtccatgctgggtgaagtgggtgcggacctgggttaccagtatgacatcagtggcggttacgtgaagccgtacctgcacctggctgcgctgaatgagtttgctgacggtaactctgtccgcgtgaacaacgtttcactggacaacagcgtgaagggtgccgccttccaggccggtctgggtgctgaggtgaaagtgacggataacctgggtggatatgcagcctttgattacacgaagggtgataacaccgagcgtccgtggcaggccactgtgggtgtgaactacacctggtaa

SEQ ID NO: 391644 - DNA, 789 bp, Salmonella enterica
atgagaaagatttatatttatggtgacaacccggaagttatcactgtaatgcgtgagggtataaaagaccttctgtctgaatctgtgaattacagtgaaagtgctgaaccggtgtttggttatgccggtgttattcataatgcgggagagcttctggagcgtgtacagaaatccattctgccgccggtggtgttactgaatcttcagcccggcagaaatattctgttgttacaggccctgagggaaatccgtgaagcggtgggaattgccgtgttcagccctgaaataatgtacccggacagaattgtggccaggtggtttaactgcacgctgaatcaggacacggatgtggcagagggagatatgggacgatatctgttccatgcggtgagaaagggcctcatgaagtaccgcagaaagacagactgtacccgggtcgggctgctgataccggagctgtcccggcgtatgacggagacggtgaaggagctggattacatactgcatatatcgttgttgtcggagtcgctgacgaaaaaggaaaggacgatgctgtcgtatatccgggaagggcggtcagttgaacagacggcggcattaacgaaggcggggaggagtgccgtgggtggatggtacaggaacctgtgtgagcggctgacccttcagtatgacaggggggacctggctgaaaacttcacgctgtcaccggacaggcagaacaatccgttcaggataccgggcagtacatggcgaagaagcgtcactcaacagacagaagggatattctga

SEQ ID NO: 391645 - DNA, 144 bp, Salmonella enterica
atgaaacagaaagacaggtccgtcagcagtccggttacccggataagatataccaccggagcgaaactgtttcttggtgggctttatttcgggatgctttttcttgtggtgttgctgatttacatgatgagaaactcttattaa

SEQ ID NO: 391646 - DNA, 300 bp, Salmonella enterica; identical to SEQ ID NO: 378543

SEQ ID NO: 391647 - DNA, 489 bp, Salmonella enterica
atgtcattaacagcactaatggcttttgctctaatcatgtcagccggaatcataacgccgggcccgactgttctgctgtccctcaataatgctgcccgctttggtatcaaacgggccctctggggaatatctggcgcggtagttgcagatgtgcttctggttgcccttgtctggctggggcttggtgtggtactcgctgcgtcagaaacgctttttgtgaccctgagtaaccccaagtactatatcttcatgacagcactgctcccgcagttcgtaaatatgacacaacctgctttaccgcagtatgccagtctggcgaccgttattgtttcaatcgacgtgacggtgatgctgagctatgctgcattgggtaaaaagtctgtcaggatctggaaagctaatggcatcagatggatgaaccgtatcagtggaacatttctgcttatcctcgcgggttccgtcgccctgtaccggaaaagcagtacatag

SEQ ID NO: 391648 - DNA, 165 bp, Salmonella enterica
atgaaacttcattttgaacctaatcttgactatcagatgcaggcaattgaatctgtatgcgatctatttcgtggtcaagaagtttgtcgcacggagtttactgtgacgatgaaagctccgtcgcagagttcagaccagtttaacgtgacacaatattcgaactaa

SEQ ID NO: 391649 - DNA, 894 bp, Salmonella enterica
atgagtaatgtaaaaaaaccatcagttaaattttcactcattgaaaatgcattggattcaattgatttaggttttgaatatttttatgaagcaaaaaaggtattcacccctagaaagtacaaacaatgtcttattaatatgtttcatggctctgagctgatattgaaagaattattgaggagagttgatgtagttttgattttcgacaaaaattcactttttaaagtatgtgagaaaccactaaccccaacagatgatgagttatataaagttaaatcaatagatataaatacattatgctccgaagttttaaggcattatcctgttgaatttaagggtaaaataaatattgtctcaggccttgcaaaggaaagaaataagatccagcattttgctatcgatattgatcctgaagtattgtcaaaattattaactagcctttatgtagatgtttttaaaccatcatttaagataattttatctgatttaagctatgttaatccatataactctccacttgaaaaacagattatagattctgagaggaaatttttagatatacagggggatagcgacaattatttagcaatgtgtccgaagtgtgaaaatcattcacattttatattatataaaggtactggttaccctgtagacacatattgtatttgttgtgattataaaaatgtcgatatagatgcgtctgaactatttgtttgtcctgaatgtggtaatccttcacttatatatgatgaagataatctggctggtgtttgcctttatgaaaaatgttattatgcgaaagagggaggctttgtagagatgagaccatgcgaacgatgtgatggttttattatcgaagattcgtgcccaacatgtgatgaggatgttgattag

SEQ ID NO: 391650 - DNA, 348 bp, Salmonella enterica
atgaaaaaacttatcgctccgatcgttaatataattttctgctcctatattattactatatgcttcatttgcctgattgagtttgataactggcaagataaaatagtcgcagttacgattacaatcggcagtgcttatatcatcaccattttattaaatagattactgagcacgaagatacgtatattaggcggtttttttgatttactatcgggcccattattaattataggtgctattgcttgtatagccttacttgacccttggcctgttaagattgttggtgtgtttttatgggtcgttataatgttttgcttaccttcatttataaacagagataaggaataa

SEQ ID NO: 391651 - DNA, 321 bp, Salmonella enterica
atgaaatcttgtcatccatttttcatactttccatagttctttgccctgtggctggtgtttttgccacccccctcaccgagcgcgaagagctaaccctgaccctcaaccaacttagccaaattgaagcctcgctccaccgcgcccaacaaagcgccagaaccggcatcaacgagcgctactacttcgactatccacgtatccatggcgatatcaccactctgcgtcgcgggattgaacattacctcacccctgcgcgagcccaaccgcgagatacggcaacgctggtcgggcaatatcgtgaggagaaaaccacgccatga

SEQ ID NO: 391652 - DNA, 459 bp, Salmonella enterica
atggataaatatagttcgtgcattattctgttcactaactcaagcacttccagcacagttattactggcgtactcatttttgtaatcgggcaaattatacttaaatggtttttagaaccattgctttcccttaaagagcaattagggaaaacatctgcactattcctgcgagagcaagccattataacaaactgctctaataaaaatgatattgttaaccaacttaaagagagtgcatccagtttattagcaaaaaaaagtgctgtaacatggtattgtctattttcatgctttagactcgtgccatcagcagagaacatccagaatgcatcccaatcaatgaatctgattgcaggattaatccaaaaaaacaataacgaaggaaatgtagcaacggatatttattctgaaatggagaaaatagccaactatttaaaaataattgtaaagtatggttaa

SEQ ID NO: 391653 - DNA, 543 bp, Salmonella enterica
atgaacgagctatcagatattcttaatacagcaactgcttcagttgaccagaattattttttgcttcctcgatatgaaggttcagatgttttacgtgaacgccactactgctatgaactttaccatcaaatgagatgttcatggccaaagcaacagccctttattctttctggagaaattgataaaaattctcattattacattcgagatcttattgactcgtaccctatccctgactttctcattcatatacctggaacgatggacaactacgctatcattgaggttaaaacgaccaatttgccatcagaagggattaaaaaagacctagaaaccttatctattttcgttgagcgagctaaatatcaaagagcaatatttcttatttttggtcattctttttcaaaaaataaactagaaagaattaagaatgcttataccaatctaagtgctaatggtgtgaatgtccagcctatagagatatggctgcacgacacttgtgggcagtcagcaaaacacctcatcactttggaaaataaatag

SEQ ID NO: 391654 - DNA, 408 bp, Salmonella enterica
atgggatggaatcgccgtggaccgggaatgcgggttttagctaccgcttctaaagcaaaagaacgtggtcttaatatcagtattaccgaaaagataaagtgtaaatattctggcgatattcaattcaaaaagatgaaatattatcactatggtaaaaaaacaaactcacaggtaaccctgacctcgatattacaatcgtatatctatcagcgccgaataaataacgtcaacgcctatcaatacctgctaaccaatagacgaaacagtgatgccagtggcatcaaaatttccatcaaacactcttcacgcctatgttttcgcttttccattgcttacaacccctcacaccatcactctgcgccagagctaactctgaacgggaacgttttgacagtcttcatgttttag

SEQ ID NO: 391655 - DNA, 369 bp, Salmonella enterica
gtgcatggcccgcccaaactgggtatgtccttcgccaccggtggcgtgcttattgttcacgcgaaaaacaccggctttatcaccgtacagcgccagcggcttgccatgcttatcaatataatggcatgtggcttcgaagtaagaaaacgtggactcagatttgacgaacaaaagctccatgattttactggttgcatcatcaacgtagaccagtgcggtacaggctggtcctcggccttcaaaccagtcatgatcgcagccatcgatttgtatcagttcgcccgtacacggacgccggtaacgtggctgagggatccttgcggcgctgagctacaggcggacattactattgagcctctacaacgttag

SEQ ID NO: 391656 - DNA, 480 bp, Salmonella enterica
atgagacaaccgttaccgcagttcacctcagaactgccggcagaagcccggcgtaccatccaccgcgccctgaccctgcttgataaccatctgcgggagcccgggacagcgttcaccggcacacaggccgtccgggactggctgcgcctcagaatggccgggctggagcgggaggaatttatggtgctgtacctcaataaccagcaccgccttctcgcccatgaaactctcttcaccggtaccgttaaccgcacggaggtccatccccgcgaagtggtgaaggccggtctgaagcataacgcccccgctgtcattgtggcccactgtcatccctccggactcgctgagcctggccaggcagaccgtcagataacagagcggctcagacaggccctgaaccttgtggacatccgtctgctggatcacctggtggtcggtggaatggagattgtttcgttcgccgaacgcggctggctttaa

SEQ ID NO: 391657 - DNA, 276 bp, Salmonella enterica
atgtgccatattcctgctgatgcccgtcagacagggatttatccggtatccctgaaaaaccagcctggctgccgctccatatccgacgacgacctttgcgcctggtgttctcacctctgttaccgccccggtgaactcagcctgtgccggttgttcattactgacggtatctggcctgcccggtctgacgctgacggttatgcacagtcctgcccgttattccacctgaaccagaatactcactccgacaatatcatagcagaccagtcttactga

SEQ ID NO: 391658 - DNA, 819 bp, Salmonella enterica
atgcgactcgccagccgttttgggcggacaaaccagatccgccgcgaccgccccttaacccgcgaagaactgatgcaggtcgttcccggcgtcttcagtgaagataaacacgcatcccgcagtgaaaaataccgctatataccgaccatcaccctgctggaaaatcttcagcgcgaaggctttgaacccttcttcgcctgccagtcccgcgtgcgcgacccggaacggcgggactatacaaagcatatgctgcgcctgcgtcgcgccggtcagataaccggccagcaggttcccgaaatcattttgcttaactcgcacgatggcagcagctcataccagatgctgcctgggctgttcagagccatctgcaccaacgggctcgtctgcggacagtcgtctggcgaaatacgtgtaccacaccggggaaacgtggtggagaaggttatcgaaggcgcttacgaagttctgaatgtgttcgaccgggtggaagagaaacgcgatgccatgcagtcgttactcctgccgccacctgcacaacaggcgtttgcgaaagccgcgctgaggtatcgctttggtgaagagcaccagcctgtgactgcatcgcagatactgacgccacgacgttatgaagaccggcagaacgacctgtggtcggttttcaatcgctgccaggaaaacctgctgaaaggcggtctgcccggacgtaccgcgaaggggaaacgtacccatacccgctcagttaaaggtatcgacggtgacgtcaggctcaatcgcgcattatgggtgatggcggaacaactgcaacaggcgctgagctga

SEQ ID NO: 391659 - DNA, 234 bp, Salmonella enterica
atgtcagacgctggcaacacgctgctgtccgaaggtccctttacccgcaggcaggctgaggctatcgtggctgcgtaccagaacgtcaccatcgaagacgaccagtccacccattttcggctggttcttcgtgactgcgaaggacagttactgtggcgggcatggaattttgaaaccaacgccggggaatggcttaaccgctatctgctcagccacggcatcccaaaaagataa

SEQ ID NO: 391660 - DNA, 939 bp, Salmonella enterica
atgtctcttgctttgcgtaaaattaaactggcaatactgctgtcctcgctttgttttattaccacggaggtttacgccgccgttgttgccagaaccgcagcagacgcaatgcgttgcagtcctgatgcgggtgataatgacggcggatacggctcctgcccttttctgggtagcatttacgatgctgacccggtattcaggaaagaccttgatgccgcgctgaagtctgcaggacttaccgggttaacgggcagacaggggtcaatgaatggcccggacagtgggctgataccggtggatgtcggtggtgagaagtggctgctgggctctgtctgtgaacggggtaactgcggtgaccattatctgaagattctgtatatcccctcagaacatgttgttgccggtttttattacaacggtggtgaggaaaacatgtttggcgatgtcggggatgcggaggcacgcattctgcgcagtgatgtaccggacgttgcgccagtgcagcaggctccggcagtgacggtaacgcctgcggacggggcacctgcagacactatccggacctttaaagacgacggtggtaaatcgttatggcaggtctgtggtggtaagaacagcagttgcaccattatcgccaacacgaagtactacgttgccattctgaaccgcaaatcagcaacgggctgtgctttcggtgatttttatgtcgccgcccgcgataccacatcctggcggcagtacgataccggcacctgcagcgcggatgcgtatatccgcaagggcagcatcaacaacggtcagtatctgtccgtcgatattggtatcaacggggtactcgtgaagcaattcccgattggttactggtcaatgcgtaaggaattttccggtagccgacgcccttcatggtcaaaggttaaggaaaaaaatcagcagcactga

SEQ ID NO: 391661 - DNA, 411 bp, Salmonella enterica
atgaaagcattcatattgccattaatggtttcagtttttttattgagtacatcagtcaatgctgcaacggttaaattaccccggacagtgactgatgcgaaagacggcagtgagctgatgtgtggaagtgaagacgtgaaagacgggacgtgcagcctcactggagtttctgatgatggtaaatatgccctgctgagcagccccggaggttcggcctgttatgacccttatctcatcgttgtcaaccttgccaccagcaagggtaaaatgatggattataaccgccatgcgacatgcagcggtgaagccactgcgaagtttgtccgttcaccgcaggatggtcatcttaccgtggtcatttatgaccccaccatcaaaaagaatgttggccttaataccgttgacttctga

SEQ ID NO: 391662 - DNA, 216 bp, Salmonella enterica
atgggattctggaataccgccgggaaactggctaaagaagtggcaaaagatgctctggacagtgcacgtgaagtgaaggcgacacatgaccgtctggaaggcaaaagcagcgcagagctgagaaagataatcaccgacaacggtatgttcagcagcgcaacggagacggaaaagcgcctggcacgcaaggtgttgcgtgatcggggcgaactctga

SEQ ID NO: 391663 - DNA, 876 bp, Salmonella enterica
atgactgaacctgacggccttcaggccctggaacgaccactggcatcgctgccgcacacccttcgccggcttattctcgaacgcattcagaccctgacccactatgagccggtgattggcatcatgggcaaaagtggcgccggcaagtcttcgctctgtaacgccctctttcacggggaagtctctctcgtcagtgatgtcaacgcctgcacccgggatgcgctgcacttccggctgcgcagcgggcgtcacagcctgctgctcattgatttacccggcgtgggcgaaagcggacagcgggaccaggaataccgcgccctgtaccggcgcatgctgccacagatggacctggtgatgtgggtcatcaaggctgacgaccgggcgctggcagtggacgagcagttctggcatgacgtgatgcaaccttatcagcagcaggtgctgtttgtactgaaccaggccgacaaaatcgaaccctgccacgaatgggataccgcgaccggttccccctcgccacagcaacaagaaaacctgaaggcgaagcaggctgcgattatatcgatgtttaaaccgcgtcatccggtctgtgtggtgtccgcctgtagcggatggggtattgaggagatggtggcaaccatgatgcgttgtctgcctgaccgcgctgccagtccggtggcgacacagctgcacgggaggctctgcacggagccggtcaggtcacaggcccgtgacggcttcggtgaggctgtgggccgggtgttcgatacgactgagtcctcatcgttcctgcccgcgccgctgaaaacactgattcgtaccgtgcgtgatgcggtggtgtcggtggcccgggccgtctgggactggattttcttctga

SEQ ID NO: 391664 - DNA, 825 bp, Salmonella enterica
atgggaaaacgcactgaaactcattcactcagcatccggaaaacaacgctcaaagtgctggaggaataccttactaagagaggaaaatgctcgcggtccaaagtcgttagtgaactgcttgatgctgctcttgaacagaaaaggcaccaacctgaaactgaggcggctgtcagtgatggcgtcattccggaagggatataccttaaatggcatgagtctctgtattttaatacgctgcgtccctatctctacaccagcgaaatttgggctgaagtaacccttccaggcatctggataaataatgagagcgctgagcatgaaatgcttgttgtaaaattgcgtgagctgtacagagaaattgtaaggaaacgccacattaaatcaccacaaggatgtcttttagcccgtatatttatgagggatatcagaaaagataaaataaaagttttggctgtcaggataaaagccacgcaacaccgtattgaaatgggtattcccgtatgcagttttgtatatgccgttacactcattgatgtggaaaataacactgattcaaaagaacatttctacctggattatcattctattcaggtgttcgacttaagagaagtgggccgttcctctctcagaaccctcgtggtaaaaaagaaaaaactggcacctcttaactatatgtactggatgccggtgaacatcttccagaataagatgctggttattggcgtaaaaaaacgttcacgttccggtaatgaaatttcactcgtcaaagccgaaaaaatcattatggtaaatactcaggaaatgagtaaaagcaggtgcaaataa

SEQ ID NO: 391665 - DNA, 615 bp, Salmonella enterica
atgaaagcaaatacaaaccgtcacgaagaacttctcagatattaccagacctggctgatggattatacaaagctgacggtccggcatggaatatgccgcccgagtatctttatttaccacaatctgacagtcggacgactttacttcccgggtaaggaacccgttattgccattgtccctcagcgccttcagaagattatttacggcaaaagtacagaagcttcactgttatcccttgatgatgatttaaatatcagcctgtgcatccaggagcatctgcttgcgcatcacccgatgctggagggaatactgctgtctgaatgcgtacgtttaaaacagcgcccgctggctaacaggcttatcagtttatttcagcaattcagtggtacggagttgcggctgcagctggtctggttgtgctggtatgacttaatgctgggtcacagtctggtggactggactgagagcctgaaatttaaaacgccggaggaagtggatatctggatcatcggacgacagactgagaatcgcgccctggctaatgaaacaggcgagtatgtcgaaatggcttaccgcaccgtttttgattttcagaaaacagttgctgatcgctga

SEQ ID NO: 391666 - DNA, 429 bp, Salmonella enterica
gtggcccccatcagcgtaccgtctattccgtggacgtttctgtcctctgatgacagccacaccagaacaacagggatgcccgacaaagcgatgcacacgaagaaagatgccagcctgagatccccggacgaatccgtggatccctgtatgcggtcccgcagggtgttttctgaacaaaaatcactccggagtcagcttcttcagaaaagaccactgttcaccctgcacaagccgcatgtaccatcagcgatcagcaactgttttctgaaaatcaaaaacggtgcggtaagccatttcgacatactcgcctgtttcattagccagggcgcgattctcagtctgtcgtccgatgatccagatatccacttcctccggcgttttaaatttcaggctctcagtccagtccaccagactgtgacccagcattaa

SEQ ID NO: 391667 - DNA, 570 bp, Salmonella enterica
atgaaaccttacaacgccaataccaactacgtaatgaactatcagctcctggaggacataaacgcccacatggacgcgatgtttcagcgcttcgcgaagctgttacccttcaggattgattttgcctaccgtaagacctctgccagcttcgggcacgcctgtaaatacgcgatgtgtactgaaatccgccacctgcttaccgaaacagaaaaggcgctggccggttattactgggtgatggaatacacaccgcgtaaggggctgcatatccatttcctcggttatctgaacgggcagtatcaccagaacccttacccgctctcccgaacgatgggggagggctggaagcggataaccgaaggcgacggataccaccacctgtgccggaagaaagagaattacccggtccggattgaccaggttatccactacgctgatatcccggcagttaatgccctgcggtatgccatcagctatctcgcgaaatctgaacagaaagaaaatgacattattctgggacggagtacggtaccggagaaaagcggcaggggcaggccacgacagggttga

SEQ ID NO: 391668 - DNA, 276 bp, Salmonella enterica
atgcttaaccacgccacttccgcattacaacccggacaccctgaaacgcaggctaccgtacattctgtaagaattttacggttacgggatgtcgtccgtaaaacgggtatggcccgttccacactgtatgactggctgaacccaaagtcttcacgctatgacccttcgtttccgaagcaggtaatgctgggcagacagtcagtgggctggctggagtccgaaattgatatgtggctgcagcagcgtatagccgattcccggggagtacgggtatga

SEQ ID NO: 391669 - DNA, 411 bp, Salmonella enterica
atgtacgccaaatctttcctcgcccttgacggtaatggtcgtctgaccggagcccgtaccgcacagactgccccttacgaccgctacacctgccacctctgcggcagtgacctgctgtaccatcctgaatacgatacagaacgcccgtggtttgaacaccggcacgatacgctgacggagaacgggcgacagcactgcccgtacgttaacccggacgccagcgaagtccggctggtgaaacgtctgcaacggtgggtaccggaagcgctgccgctggtacgcaaagccggatggcattgtgcaaactgcggttatgattattatagggagcgctactgtctgaactgccataccggtaaatacagtactgagcttaacgtctcagtggaggtaccagtatgcgcatactga

SEQ ID NO: 391670 - DNA, 393 bp, Salmonella enterica
atgcgcatactgaaatgttaccttgccagtaacctcaggggacactttgtgactgctggcgaagccatgagtgcacccgggcaggtatggagttgcgtctcctgtggctgtcgtctggtgttacatgccggctcttccggtgacccggcctggtttgaacacgaccagcgctcagtggcgcgacatgtgctgatgagctgtgcccatcttgatcccgaagtgaaagccgatgcccggcacagaaaactgcgcagtatgattgacagtctggatacgcctgtggcagcgctgtcctggtactgtgtctggtgcggacaccactacagggggaagaagctttgccccgtctgtgacacgggactctacagcacagagctggctggtatccggtaa

SEQ ID NO: 391671 - DNA, 132 bp, Salmonella enterica
atgtactggctgaccaccgtcagccatgccgttaatgctgacggcgctcttttagttgataaccggcagggatggcatcccctggttcatctgaacgcagcgccgtatcagcaggtagccggtcagacttaa

SEQ ID NO: 391672 - DNA, 405 bp, Salmonella enterica
atgagggaaaacgccttaacgttacatgaatttctggctgtccgaaaaaacctggaagatatctccacaacatgggctgacctgtggacgttaatctgcctgacccggactatggtaacgcggctcatacggctgaaatatcaggatattcatgacgatgtaatagtattgcgtaaacacggtaaattcgctgaaaagcggctttcactcagcccggcgatacgtaagacagtggcccgacgcagatcccgttatcctcatgatatttatcttttccagagtcattcaaatcgggtaaaagcggttgcccgccctgtaacgcttattgcattcaaccgggcgcttaaaaaagctgccatcggggtgacggataacaccatcagcagtaaaagtgcatatctgtaa

SEQ ID NO: 391673 - DNA, 528 bp, Salmonella enterica
atgacacattgtcagtcatctcccgttgacactcacgctgagagttcgggaaccctttgtaaaatccttcagcaggccaccgaccagtatccacgtctggcggcgtttctgcttacgctgccggtcccggagctgtattttcacgatgttgtttatcaacaggtaagggaactggctgccacccgtcagatgagcggcagaccggtgccgccaacggtactgcgctggatttggtcatctccgccgggccagacgggcagaatgttactgttgctgaaccaggacaccttctgtcatccccgttacgacaaaccaccgggccgctgttttgaaacgatgggttcgttgctgcgggatgcggtcagtacgataaatgacttccggcacccccaacagccggagataaccgtgctcagggtggacagaacccacccggcacaggctgacgcgcagtacagccgtcttcgggaatgtgccctgtcgctgttacccgcagccactgccctgagtgagcgaatcagcccctga

SEQ ID NO: 391674 - DNA, 585 bp, Salmonella enterica
atgtataacccctgtaatgaaataacgccactcgttgaagtttaccagcgctggcttaacgaccacacccggcttgccgttcgctatggtatcagtacccgcaaaacgcacacatggcacaccctgacgaccacaggcatcatgctggcagacggacgacagctgaccatcgtggtcccgtcctgtctgctgtcggtttcactggtgccggagcagaccagtaatgaggggacggtatcagtactggtcgatatgaacagcctgcggacatacccacagttacccggtattctgctgagtgagtgtattcgcctgtggcttgatggtttacataactgtcttgagcgggttttcagccgtctgaaggcaccggggctgcgggaatccctgacgctgctgtgctggtacgagctgataaagggccggcaggattgcaactggcaggacctggtaacattaaatgaacgggaggtggctgcatggctggtctgtcaactggcgcggtatccgcttttacaccgaattgtggatgaatatgtgttcttcgcctgcgcgggcttctggtcagataatccacctgcctga

SEQ ID NO: 391675 - DNA, 243 bp, Salmonella enterica
atgaagaaaaaatgttttgattcagatttaaaaaatctgacgaaagaacagcttattgatgaaataactgaacttcgtaatgcaataagaaaacataaaacctgtacaggccatgatttatgctggtttcaacctgaactttggtcattcctgccagagctatcaaatgaggatattgaagtccctggctggcctcagtttatgagagggtgtatcaggtacagagaatctttagatacttaa

SEQ ID NO: 391676 - DNA, 204 bp, Salmonella enterica
atgcgcatagaagtcttactctatttaaaaactcgacccggcgaaagcccggtccgggatgtcaaacaactgcgtctttggtggggggacagcctcaacgggggcctgttcgcctgtcacgcgcagggtggcgaagacggaaagcgcgctgccggtgatgtgaagctcatgaccaccgataaaacgccgcgtaaagcgcattaa

SEQ ID NO: 391677 - DNA, 1422 bp, Salmonella enterica
atgaacaatcaacgcgtgggtatacttgaaaaaataggatacggaatgggcgacgctggctgcaatattgtcggcggtgcagttttcctgtttcttaattattactataccgatgtctatgggctaactgctgctactgtggcagcaatctggcttggtgtcagagtgattgaagcgatttctgaccctttaatcggtatgctggctgaccgaacccgtacccgctgggggaagttccgtccgtatattctcttttttgcttttccctatgcgattctgtgcgtactgatgtttactgtgccggatttcagctataccggtaaggttgtgtatgcctttgtaacttacctgtttatgtcgataacctattcatttattaatattccttactgttccctgggtagcgtcatcagttataacgatcaggatcgtgtctcctgccagtcctatcgttttatgggcgttggagttgccacattaatattaacgaccagcttactgcctatggtgcaaattcttggtaaaggtgaccaggcgctgggttatcagcgggcggtatccatcctgacctgcgctggcctggtattatttattttctgttttaaactggtcagggaacgggtggttcctgttatccctaaaaataatgattcgttgctcaacgacctgaaagatatcctgaaaaacgatcagtgggtcaaattactgctactgacattcactaacgttttacccggatttattcgcatggcggcaacactttattttttaacctatgtcgttaaagctgacagtacattcattaccacatttatgagtatcggtgtggtggggatgatcatgggtagcgctctggctaaacctctgagcgatcgcttctgtaaattaaaaatatttttctggatcagcgtatttcttttcctgtggtctgccggaatgtattttattgatcctgaacaacgggctctgttgacggttgcctatttcattctgaatatcgtccaccagattgctcaaccgattaactggtcaatcatgtctgatgtggatgattatggtgaatggaaaaccggcaaacgcttaaccgggataaacttctcatgcaatttccttgcactaaaaattggtctggctatatctggcgcactggttagctctgtactggcatggagccattaccatggcggccagccacaacaaaccgaaaccacgctaaccatcatcaaaatgtctttctttattttgccggctgtgggctacttgttaaccgccggatgtgtcaggttactacgggtgaaccacgcgaccatgctgatggtctccagtgagctgaacaaacggcgcaaaaattacagtgagctgactgactatattgccgcagaagaaggcctgatatctgataccagcgtagcgaggtcataa

SEQ ID NO: 391678 - DNA, 870 bp, Salmonella enterica
atggaactcctgttaactgacagccgacttacctgtctctgttcaccggcagtctgggcggaaggacctgtgtggctggcccaacaacagtgtgtcattttcagcgatgttaaaggcaaccgtatgttccgctggcagcctgatggtgaggtgacgctatggcgttcggcttctcactacgccaatggtaatgcctgcgatgccggggggcggcttatcacctgcgagcacgggcgtcgggcaatcagccggacggaacaggacgggtcggtcacgctactggtggataaaatagaaggcagacgctttaattcacctaacgatgtggtggtacgctcagacgacagtatctggtttaccgatcctccgtacggcattatcggtgatgaagaaggatataaatcggaaagtcagataataggttgttatgtctactgctttaccccgtgggatggtcacgtctatatcgcggccagcgacacccagcgcccgaacggactggcgttttcgcctgatgaacagacactttacgttgctgatatgtcgattgtcgattttccaacccagggacgacgggaaatacgcgcttacccggttgatggttatcaactcggtagcgggcatcgtattgccgatatcagtcccggctttccggatggattttgcgtggattatcggggtaatgtgttctgcagttgtgctgacggggtcgttattctgtcaccacagggccggattattggcaaaataccggtacctgaacgggtctccaattgtaccttcggtggtccggaaaatgatgaactgtttattaccgctacccgttccctgtaccatattcgtctcaatacccggggggcgctcaattag

SEQ ID NO: 391679 - DNA, 975 bp, Salmonella enterica
atgtcaaaaacagattgtttttttaaaaccatttataatcaacgtattattattttttgcgggttcgtgaacgaaaacaggctttgcgttactatcaacccacggcagagcgcgctgctactgccagcaaactttaaagagaacatcatgaatcaagagaaagagagaccggcaggcagccagagcctgttccggggactgcagttactggaaattttaagcaactaccccaatggttgcccgttagcccatctctctgagctggcgcaactgaacaaaagcacggtgcaccgtttattgcagggactgcagtcatgtggttatgtcaaaccagctcctgcggcgggaagttaccggctgacgacaaaatttattgcggtcggtcaaaaagccctgtcgtcgctgaatgttattcacgttgctgcgcctcatcttgaagctctcaatctggcgacaggagagaccgtaaatttctcgaatcgtgaagatgatcacgccatcctgatttataaactggagccgaccaccgggatgttgcgtacccgtgcttatgtcggccagcatttaccgctatattgttcggcgatgggcaaaatttatatggcttttggtcaaccagaatatgtcgcgcaatactggcatacccatcatcaggacattaagcagttaacctgtaataccattacgcagcttgatgatatgcagcgagagctggccgaaatcagggaccggggacaggcaaatgaccgggaggagaatgaattaggcgtatcctgtgttgcagtgccggtttttgatattcatggccgggtgccttatgccatttcaatttcactttccacatcgcgccttacgttatcaggcgaagataacttgctgggcgcgctgaaaaaaacagctgccgatatttccggtgaactgggctttgtgagtacggaacgaattcctggcggacaacaggcgcgcaccgactga

SEQ ID NO: 391680 - DNA, 999 bp, Salmonella enterica
atgaaagtgacttttgagcagctaaaagaggtcttctttcgggttttgtgtagccgtggcgtcggagccgatacggcagacgcctgtgccgaaatgtttgcccgtacaactgagtcaggtgtctgttcccacggcgttaaccgctttccgcgttttattcaacaactcgagcagggtgatatcatcgccgatgccctgcctgaacgtgtgattagtctcggggcgattgagcagtgggatggcagacgatctattggcaatctgacagcgaaaaagatgatggatcgtgcaattagtctggcctctgagtacggaatcggcctggtggcgctgcgtaatgctaaccactggatgcgtggtggcagctacggcttacaggcggcggaaaaaggctacattggcatctgctggactaactctgtcgccgtcatgccgccgtggggttcaaaagagtgccgtatcggtaccaatccgctgattgtcgctatcccctccacaccagtcactatggtcgatatgtcgatgtcgatgttttcctacggcatgctggaggtcaaccgtctggctggtcgcgaactgccggtggacggcggttttgataacgacggaaacttaaccagggaaccaggcgtcattgagcagaatcgacgtattctgccaatgggctactggaaaggatcggggctgtctgtcgtcctggatatgattgccacgctactttctgacggggcatccgtcgcggaagtgacccaggataacagtgatgagtacggcgtttctcagatatttatcgcaatcgaagtggataaactgattgatggtgccacccgcgaggcaaaactccggcgcattattgattttgtgatcacggccgaacgtgccgatgaaaatgtcgcggttcgcctgccgggccatgaactgactcatttacaggaggcgaatcgccgcaacggaatcactgttgatgacagtgtctgggaaaaaattcaggcgctgtga

SEQ ID NO: 391681 - DNA, 495 bp, Salmonella enterica
atgatttttggtcatatatcacaaccagatgcctgtcgtttcccggccgtaattgaaaagggactcgattttttacgcactactgattttcacaatctttcccccggagtgatagatattgatggcagtaaaatttatgctgaattaattgaattcaccacctgtgactgcctgcaaaaacagcctgaagctcaccggcgttatctggatattcattatctgctgagtggtgcagaaagaattggcgtagtcactgatgatggtaacaatgaaatagcggaatcttattctgaagaccgggatattgttttttttaaacagataagaaatgaattttttctcgaaatgatacctggaagttatgccatccttttttctcaggatattcaccgtccggcatgcaataaaaccagtaatacatatatacgcaaagtggtggttaagattgcagtcagtgaactggaatatcatgtaaataaccacaaagggaaataa

SEQ ID NO: 391682 - DNA, 351 bp, Salmonella enterica
atgaatgaaaaagagtctttctggcttggcatcgattgtggcggcacatatctgaaagccggtttatataaccgcgaggagaaagagtatgcgattgaacgtcgtgctctgcaaacgatcagccctgaagcggggtatgccgaacgtgacgtcaatgtactctggcaggtatacgccgcaaccgttcgtcagttgttacaacattgccagatctgtggtgaacaggtctgtggcgtcggaatttccgcacagggtaagggattgtttctcctggataaatatgacaaaccactgggtaatgcgatcctctcttccgatcgtcctgcggtggcagcaggagcgcatgcctga

SEQ ID NO: 391683 - DNA, 270 bp, Salmonella enterica
atgcctgaacagctctacccggttacccggcagactctgtaccggacggccacctggcgtgacagccggcaggatacactgccggtggacacggatttcagcgaatcgctgtttttcacccgtccgcgcagtgacgcgaagaagggtgtgtggtggtttgatgacgtgctgcaccgggcggtggcggtggaaaacctgacggagccgcccggaccgggacatctcacggcggagtgtgtgcgtggtgaacgtattaacgcgctgatatga

SEQ ID NO: 391684 - DNA, 1842 bp, Salmonella enterica
atgatgccgccggggacggtggcctgcctgaccctgctggtacagccgcagaaggagctggaggaagagcttgcccggctggggaaacgagcactcggggataacgtggagtctgagcgtacccgtgaccaggtggaggaagcgcgggcctggctcaaggagaagcacaagctgtaccgcggggcgctgaccttcctgctgaaggcgccggacatgaagacgctggaccatcaccatctgtcgctcagcaccatcctgatgaacgccgggctgaaaccactgaacccggaatatgacctctcgccgctgaacacctatctgcgcgccctgccgatgtgctttaacccggagctggacaggcacaggtggtacacctggctgacgtttgtgcagcattttgccggtctggcaccggtatatggccgctcaacggggacgggtaaacccggcatcagctttttcaaccgtggaggagaaccactgcactttgacccgctgaaggaccgtaaaaacagtgcgcacctgctgctgttcgggccgaccggggcggggaaatcagcgaccctctgcgtggcactgagccagatgctggccatgcaccgcccccggctggttctggtggagtcgggtaactcgttcggtctgctggccgactactgccggagcctggggctgacggtgaataaagtgggtatttatcccggcagcggggtgagcctgccggtgtttgcggactcgcatctgattctgtcgctgccaccggaacaactggtgctggatgagaatcagttgccggagctgggcgaggacgtcgcggatgaacagataaaaaatggcgctccgaagggtgataaacgtgacgtgctgggtgagatggagattgctgccatcctgatgataacgggcggagagaaggaggagaagctgagccgtgccgaccgcgggttgctgagccgggcgctggtgatgacggcacagcggatgtacgaagaaaaacggcagatgctgccgtcggacctgaaggcgacgatggaaaacattgccaccgacatgtcagagaagcccggcggtggtccccgctggcacacgaagatgcaggccagggcgtcggagatggcgttgtcactggagctgctgacggagggtacggagagcgagctgtttaaccgtgagggcgaagcctggccggaagccgacgtgacggtggtggacctggggcacctttcccgggaagggtatgagtcccagatggcgctggcggtgatatcgctggccggcagggtgaactatatcggtgagcgtgaccagtatcacaacagggccggtctctttgtgattgatgagggacacgtggtcacgacgaacccgctggttgccccgtattttgccaaaatctcgaagatgtggcgaaagctgggatggtggctgtggctgggaacccagaacctgaaggactacccgaatgagtcagagaagatgctgaacatggccgagtggtgggtgtgtctgacgatgcccccggatgagatagaacagatagcgcgttttcgcaacctgacggaggagcagaagcagatgctggcgtcggcgaaaaaggggcagaaagtgaacggcataccgtgctacacggagggtgtggtgatgggcagtaccctgaacgcgctgttccgctcggtgccgccgagcctgtacctggcgctgggaatgacagaaaaagacgaaaaggcgcagcgatatgaactgatgcaggcgcacggctgcacggagctggaggcggcctttatggtggcaagggagctggacagaagacgcggaacgggggagatgaatggtgaggcttag

SEQ ID NO: 391685 - DNA, 381 bp, Salmonella enterica
atggtgaggcttagatatcctgaggcggaggtggcggagacgggggcagaggggctgttgtttgacagtctgccacagttggcaccggtgacgggacatgcgcaggcggtgttactgcaacaactggtgaaccacctgaggacgcggctgtccgggccggtgaacatcgtctgccaccctcaccgggttggtctccgtggaagcgtggcgatgacgctggagggagagacaggacgtgtcgaccagctcatcacggtgaacggcaggacgctgtttccggaggaagaggactacagcacaccgcgctggtacattgatgtggtggatatggtggatgcggtgtacctgatgctgaccctgagcagcgggctggtgacataa

SEQ ID NO: 391686 - DNA, 591 bp, Salmonella enterica
atgaaaatacccccctccaatattcaaacaccttttctatataagaatcataattctcatactggtatagtaacggagcccgctctcggtaagctaataggagaaggctcgacagcagaagtatttgaagatgggaatgattcatctgctctatataaaaagtatgatcttgttggtaaccagtacaatgagactctggaaatggcaagacaagagtctgacctttttaatgctttttatggcgatgaagcatcaattgtcatacggcatggcggcgatgtgtacctccgaatgctacgcgtgcccgggattcctcttagtgaaattgatacagctgatattcctgataacctggagagcctttatctgcagttgatctgtaaactgaatgaattaggtgtaatccattacgatctcaatacaggtaatatgctgtacgataaagaaagcgaaagcttatttccaatagattttcgtaatatttatacggaatattactctgcaactaaaaatgataaagagattatcgaccggcgattacaaatgcgtacaaatgatttctattcgttattaaacaggaaatatttatag

SEQ ID NO: 391687 - DNA, 1746 bp, Salmonella enterica
atggcggtggaaaaactgattgtcgaccatatcgatacctggaccacggcgctacaaacccgctccacggcggggcgcggcagctcgggtaagattgacctgtacggcattaagaagctgcgcgagctgattctggaactggcggttcgaggtaagctggtgccccaggatccaaacgatgaaccggcgtctgagctgctgaaacgcattgcggcggaaaaagccgagctggtgaagcaggggaaaattaaaaagcaaaaaccgctgccggagattagcgaggaggagaagccgtttgagctgccggtggggtgggagtgggctagatttgaaacagcgctagatttcagcggaggaagtcaaccaccgaaatcattttttattgaagagccaaaagaaggttatgttcaactgattcaaatcagagatttgggggaatacccacaacctgtttatgttcctataaataaagtaactaaactttgcacttcagaagatatattgattggccgctatggtgcatcggttggtaaagttttctggggaaaaaatggggcatataatgttgcattaatcaaaatcgataattcttacaatctttataataataaatttttgttttggttattaaaaagtccattgggtcaaagcttattttccgggatttctcgttccgcacaggatggctttaataaatcagacattgccgcaaaattactccctgttttatcggagaaagaacaatctaaaattgttgtaagaataaacgatctcatgtccctctgcgaccaactggagcagcactccctgaccagtctggacgtccatcaacaactggttgaaaccctgctaaccacgttaaccgacagccagaacgccgatgaactggccgagaactgggcgcgtatcagcgagcatttcgacacgctgtttaccaccgaagccagtattgacgccttaaaacagaccattctgcaactggcggtgatgggcaaactggtgccgcaggatccgaacgatgaaccggcctctgaactgctcaaacgtattgcgcaggaaaaagcgcagctgatgaaagacgggaaaattaaaaagcaaaaaccgttgccaccgattagtgatgaggaaaaaccgtttgaactgccggaggggtgggagtggtgcatattcgaagacgtcgttgatattcaaagtggtataactaaaggaagaaatttagctaaccggaagttgattactgtaccttatctacgtgtagctaacgttcagcgaggctaccttgacttgtcagaagttaaagaaattgatattcctgcggaagagaaagataaatatcatgtcattaaaggagaccttttaattacagagggtggcgactgggatactgtcggtagaacaactgtatggtgccatgattggtatatagcaaatcaaaatcatgttttcaaaggaagaattataggacaagacattgatccttactggcttgagacatacatgaatagtccttattcaagagattattttgctagtgcaagcaagcaaacaaccaacttagcatccattaataagactcagttaagaggttgtcctgtagcaatcccttcaagtagtgaagcagaaaaaatcatgctcaagttgaataattttaataaattgtgcgaaaaacttaaattacaaatacaatccgcccaacaaacccagctccacctggccgacgccctcaccgacgccgccataaattaa

SEQ ID NO: 391688 - DNA, 993 bp, Salmonella enterica
atgaaaactcacgatgttgataacctctgggataatctgatggatgagtattttttttgtaagtcgttacggagagccacggagtggagttatcgcaagatgttgtcagggttccggaattttattggttttcaccggactcctgacagcattgttcgtcgtgatgttcaggaatggcgtcgttttgtgctgaaagatcagggactaacttcccatacctggaataacaaagtgaggcatatgcgtgcaatttataactttggcgaagaatctggcttgatcactgttttagaaaatcctttcagtggcatgctggttaagcaggaaaaaagacggaagaaaacgctgacaaaagcacagatctcgcggatcgtgcttattctgcaacaattttcggaagcagaaaatcagtacaccggactttacatcaaatgtgccataagaccagcgtggttctggctgacggtggtgaataccctgcgttacacaggtatgcgtctgaatcagttgctgcatttacgcctgaaggatgtttgtccggtagagaaatggatcgatttacgggccgaaggcagtaaaactcacagagaatggcgtattccggttacgcgtcagttacagccacaactgcagaaactgctggacgaagccgtcaggcggggtgccacaccggaagactatctttttcactacaagcgttttgtggtgccggtgtcagaagcaaaacgtataaccggtttgccagaagagcagcccgtgaaatcgtttttccgcaggttatctcaggagtgtggttttcaggtgtctccacatcgcttcagacatacactggcgagcatactgatgagtacaccggagcgtaatcttcacttggtgaaaaacatgctcgggcaccagaacgtatcaaccacaatgggatatgtggagatgaatctggagattgccgcacaggcactggaacatgaactggaggtgtttactgacagactgtaa

SEQ ID NO: 391689 - DNA, 1455 bp, Salmonella enterica
atgccccggagtgctgagaaactgacatccacactgcgcagaaaacagtgcctgaaacagctgtgggaaaacagcagtatgccatccggcgtgtatcagcagttctgcctggcaccggtacaaaaactcctgatggcggcgcagaacgttcccgctgccagagactcgcgatggtctgatgccaacggttttggcgacctgacgctgcagttcaccacatatgctgttcgtctggctaaagggtatatgtttccgcccggtgccacaccggaagaacaggctgcacagtccggtgtatggagtgccgtggtgttctggtcggctctgttttatcacctgccacttcttgcacacctggaaggtgaactgatcagcggaaagttatggcagccgggaatgtctccaccgggagaggcatttcgtttccgctacagacagcaacgtctgcatggcacagaggcgcagcaactggctgcggtgatggccgggcaactgttgccggagggggcgactgcatggctggctgctgtaccgggggcattacagaatctggctggttctgtctggcatcagcatccggagatggcattgattcgttcagtcctgaaaaccgcggcagaagaggtggagagtccgcttcttgataccccagtggcggaaatcgtgacggcacctttgccctcagaaaccacagtgcagcctgaagacaatgcgccatccggcagccagccagaaatatcaacagaggccagtgcaccggaaacgctggccactgccacggaggaggaaggatttacgctgcaatcctctgtttcaggaaccgatgaaacagaagcggaagtccgggatacgttgcagtctgcaacagggggggaggaaaaggcaccggaggggcagggcctccatgatgataccgatatgctgctgagtctgttttctgtggttgatgacaattcttctgtaccagtaacagcgggagaaggagtacagagaacactggtgttggctgatcatgatctttctcatggaaaatatgacgatgccgctatctcattgatttccggaagcttcgctccggaagccgttatttcagaaggagagatgtttataaactggttaaaaaaaggagtgagaaacggggaaatcagcctgaacggaaaaaaagataaaattcatattgttgccggctttgtttttttacctgtaccggggattttttatgaatttacgaaagcagcaggtatcccggcagacaaaaaagatgatattcaggcatcgtttgagcgcctgaacattcataagcggcgggataaccggcgcttttattttgcacatttgtgtgaagagcctgaaaacagaagtcgttttagaacgctaaaaggttatctgataaaaggcaggcagctcctggatggacaggaactgcaggacagccgttatctcttctttccatga

SEQ ID NO: 391690 - DNA, 1308 bp, Salmonella enterica
atgtcactgactctcaccgatgaacagtctgccattattcactggcaggggcagaagttggttgtgaatgccttttcctgcgccggaaagaccagtactgtggttcagtatgcactggcaaatccttacagcagaatgctgtatctggcttacaaccgagccgtacgcgatgaggctgagcgtaaatttccgtttaatgtggaatgcaaaaactcccaccaactggcctggtcgcgcttcggcaaacattaccagaagcggcggattgccagcctgcgtattacggatgtggacagaaagctgaatccccgccactggcagtggggttgtctggcactcactagtctgaatcagtttctgttcagtgctggcccggggctgctgcacccgccggatgaggatacctgcgccggtatggatgtttctgccattctgcaggcggtacaggtacgctggtatgagaagagccgccctgatggctcattccctctgacgcatgatatctgcctgaaactgtttcggttgccattcccggaccagtcccggagtagggataccattctgtctgatgaggcacaggacgctaacccggagacatctgtactggtgctcagtcagcccggcggggtgatactggtgagcgaccgttaccagcagatttaccgcttttgtggagcagataatgggctttctcttccggccctgaacgatgcagaccatctgtggttgacgcagagcttctatttcggcccgtcagtggtctggatggcgaatctgcttttgcagtgcgccggtgagacccgactggtaagcggtaatggcgggtgtgatatgcacgcactgatggccagtccgggcggcaggaaggtgtaccgggtggggggtattgaaggttaccgggtaacagcgccggaggacctgtactggttttctgctgaaatgccggcaaagaggctgtctgatgcactgtggctggattaccgtgattttgatgataccgtcacgagcgaaaaggacgtggatatttccgtatcaacggctcacagcagtaagggactgaagtggccggtggtgatactggatgaagattttatggatatcactgatccgcagatgccggaggatgaacggcaggatgaaaccaggctgctgtacgaggcggccacccgtgcccgtcaagcccgggtgctgaacagtctgatacgccagctggcagatgaggccggcagaaatgaacaaaaccagcatgcaactgatatgtccccgacagaagacatagtgcaagagctggagagtgaagatgcttaa

SEQ ID NO: 391691 - DNA, 3264 bp, Salmonella enterica
atggtaaagacgaatccatcttcttcaaaggtaagacgtgtcgtagtttatgggctggcaggattgcagttcttttttcaggttaccccggcatttgccggcgtctttcaggctgacgaacagtcggtggcacagacggcggtggaagccggacgtgtgctgcagggcagcaacaggggtgacgcagcacgccagatgctgaccagccaggtttccgggcaggcggcagatgccgtcacacagtggctgaatcagttcggtacggcgaaaacgcagctgagcgtggacagtgacttctcccttaaaggctcgtcgcttgacgtcctgttgccgttgtataacacctccaggaacgtgctgttcacccagctcgggatgcgggataacgacgggcgattcaccaccaatgccggtctgggccaccgtcacttcacggacaacggctggatgctgggatacaacgtgttttacgatgttgactggcgcaacaccaaccgccgctacgggattggcgtggaagcctggcgtgattaccttaaagtatccgccaacgggtacaaacgtctgtctgactggcggcagtccccgaccgttaccgattatgacgaacgtccggctgacggctgggatatccgtgccgaaggctggctgcctgcctggccgcagctgggcggtaagctggtttacgagcagtattacgggaatgaagtggcgctgtttggcgagtctgaacgccagaaaaatccttatgccatcactgccggtgtcacctggacgccgttcccgctgctgaccgccggtgtcgattaccgccggggcaaaaacggggctgacgacacccgcctgaacctcggcctgacataccgtatcggtgaaccgctggcgcatcaactggacagcagtcgggtgggggccggacgcttacttgccgctaaccgcctggaactggtgaaccgtaacaatgatgtggtgcttgaataccgtaaacagacgctgattaccctgcagctgccaccggatgtgtacggcgcagaactgacgaccattaccctgacgccacaggtgaatgcgaaatacgggctgtcctgtattgagcttgacgacgcagaactacgtcaggccggcgggaagattatcagcaatacaggtagtcagattacgctgcagttacctgcctggtcatctgaccgccagggcatcacgctctccggcagggcacgggatagccgtggcaacctctctgatatcgctcgtacctgtattctggtttccccggctgtacagcagcaactggcggtcagcacggataaaaccacggctaccgcagatggtacggatagtgtgcgatataccctgaccgtcacggggatggacggaaaaccggtaagaggacaggctgtaaactgggaacattctggcggcatcctgaacggtgagaacaccacgaacactgacggtgtggccactgccactctgaccagccagatgtccggggttattcgggtttccgccatcacccgtaatcagacggcaaaagcggctgatgtgacttttgttgccgccatgcagggagaactgctggctgaccgtacacaggcactggccgatgatcaggaggctgtcagttacactctgatgctgaaaaacacggatggaaagcccctttcagggaaatacgtcacattcaccactactgtcggtcaactgagcctgacacagggcaccaccgaccggaatggtcagttgaccgtgcaactgaccagcagccgtgccggacaggctgtggttaatgccaccgtggacggcaccactatcagtgccgccccggtgacctttgaaaccaccctggactcctccattgtgctgaacaaaaccactgccgttgcagacgggcaggatggtatcacgctgaccgctgttatccgggatgctgccggtgtgccggttgcagggcaggccgttacctggcatacggacaaggggcagttcacacagcaggatgcagtgactaacgctgccggggcagcctctgctaccctggtcagtacacaggccggctatgcacagctgtacctttccctgaaaggtacagccaccactgtgaatgcaccccgcatcagttttactccggttttgatcgccggcctctggcctgataaaacaacagcacaggctgacggagctgacgttgtcacgtacacacttgtgctgaaggacggtgcggggcaacccgttgccggcagcgatatcgtctggaaaagtgataccggtcagttgtcagcgatgcagggcgttacgaatgcacagggcgaggcaagggtgcagcttcgtagcgttcagtacgggaatattattgtcactgcaactgttggtgaccgggaggtgacggcccggggagtggatttcacgcgtgtgattcacggtcagttgactgcagcccggaaaacagttcatcagaaccagacagtccgtctggatctacagctgacggatgccgccggggtacccgttgccggtgagcaggttgtatggcgaagcagccttaacggcaccggctttttaccggcaatggggacaacggacagcgcaggacgaatgatgacaactgcaactttcagtaatacaggaacggcagacattacggcagaagctgcacacctgtcttttacctctccctctctgacggtatcacctgggcttgcggtatcagaagtatacggcctgaaggctgatggttccgacgggcggaattttgggaatggtgtgtcatatttcacctggcccggggtggagttccgcctggtaacccgcaatcaggaagggactgtaacgtggcacgcctcaacggacgctgtttctgttgccggggataaagttacggtacacaaaaacccgtcaggaactgttctgaaagggacggacagcgccgggcaggaggttatgttgtccatgaagcctggctggtttgcacagagtgcggttatgaccaccccctttctggacaatcaggctgtgcagcagtgccgctccctgggggcgcaggttgccacccgggacaatatcagggcactggtggctgaatggggcaccgggctgccggaatacccgggctggacgaacgttgccaggtcgcagttaatgaccagtacgctggtcactgaaaatggctggacgtatgtcattggcatttcttttggcaatggacagatgacagaacagcagctgccgggcagctggaattttggctggtatgcctgttactga

SEQ ID NO: 391692 - DNA, 657 bp, Salmonella enterica
atgagtatttgttttaactttttcagattacgttcaatatattcatatgcatgggtaaataaagaacccacaattgctttcgagacatgtattggtcgaggccattttgtatttatgatcttttttgcaccagaagataaaaatatatctggagacagtttgtttatttatctccgtaatgttaatgttttattgcgactaaaattgtatggaagtcgaaaaaacggtgtttttaacgtgtatataacgccctcgcagcagcaaatcttgttagatgaattacagttgacacctggcggcagtcgtttttcatttaataactttctgaatgaattaaatgacgcaattccgcagacgctttcctttaaaagaaaaatagagactatcagaactgtatggccgaaagtatgtaactcattaactgaggttattgatgatgctcataaaactatattaataggcatcaagaaactccccgaagatcaacatcccagggaaaaaacgctacgaaaattgtttacctgtacaaacagcccggcaaatgatgtccaacactttattgatatcttgaaaaaacataactacacactgatgtggaccagtgatcagagccggataccaaaatcttttgcagagttaattaataaaattgtataa

SEQ ID NO: 391693 - DNA, 699 bp, Salmonella enterica
atgaaagccgtattcaatgtgatgaatggttttgataggatttttctgccattggagttttctggttttcacgggcggaatgggtactgttatttaagagttcagattaagcatggctttattgttttctcatgtgctcaactattgaactattatcgtacgtcagtaacaaatgcaattgagcaggtcagagaggctgcagttaatgctctcttaagagagggggggctgtcatatacgcaacaaaaagaatttctggatgtattaaagacatcacaacgagtaagcaaagaaattgattcgcagttatgggattacataaatgccaattcgatctggtttgaatactataatcatagtgaatcattatttctgaatgatcattttcatattgcttcttttgaggggaacaaaaatcctgtgtggagaaaaacttcactggcagatttagagaaaatatatcctgaatttgattttattattcataaacaccatcttgaaaaatggatgaatggaggccttaccgctgaaaatgtaaaaaaaattctcaaagaaaaaggctggaataacaaaatgttggctgcgcgttggggatgttcggaagtttgggtgagtaaaattattaatgatgaaaaccgaaaggttcagtggaatgatgctatcaatgggcttcctgctataagtgacaatatggtttga

SEQ ID NO: 391694 - DNA, 708 bp, Salmonella enterica
atgttatcctttagagaaaaatcaaaaattttacatgttgactttaaagcatttgattcaagaaataaaaataacaatttatccaatgcaggttttattcgacaagtaattcaagaaagaatacatcacagcggtgcgacaactgcttatgttgctgcactcggcagtgtaccgtatctttatatgattggtagctttatgactgatggacacttgacattaaagttatttgactttgaccgtaataaaaaaatctttcatcctcttgatgctcctccaaccaatgcaaatatagttaaattatataataatcagataattaatgatagcaagtgcgtgccatcaaataatgaaggagttattggtctcgcaatttcatttacgatggagatattagaacgagatcttccaactgagtttgttgggcatacattacatgttcaactaaatacagggtttcgatttgataatcttcctgaggaagaagaacaagaaaaaatcgtgaaaaaaattagttatattattgctgaattaaaaaaacaggcggatgaagtgcatcttttcatttcggcacaggcgtcagtaattgttcggcttggttctctataccaagaggggctacatggtgcaattaatgtttggcactggaattctatagctaactgttatgagtggtacttaaagatcactagtaaagatttatattag

SEQ ID NO: 391695 - DNA, 456 bp, Salmonella enterica
gtgctaattatcgatacagaacattttaatctctgcatttcaaagaaagtgaatgatatctggcaggagtatcgacagctcaaaccaatggattctgaggcatgtggagtactcattggtgacaaagattttgagattgagcgttactgtttggttgaaattacagtgccgcagaaaaaggacctatgcacaagaatgagttttactctcagggatcccgagcaccagaattcagttgatcgactatataagaattccagggggcacttggcttaccttggtacatggcatacgcatcctgaaaaaaatccttatgcttcatacatcgatattagagactggaaaaattgtaagctacgaaatccagggcagatgcttttttttataataattggtacgaaaaaaaacgcgctttactatttttacaatgaaaatctcctgcggcaagaattctga

SEQ ID NO: 391696 - DNA, 1740 bp, Salmonella enterica
atgaattattcagccattttgattcatttaaacaaatgcggatacaaagtatccgcaattccatcgaagacggcagaggtcggatttttaaccgtcgaactggagatcaacggtatacaagttactcttttgcatgccgctgttcctgaactctcgaaattgccaagtttcctcttggtcaatccatcaacattgcccagacttgcacacaccatgttctatcctgatggcctatttgcaagtatttgtgtgaatgaccctgatgcagtatccgtgaattttgagtgtcctgagttggccttcgaggagtcgcttaaaagacatatatctttgttgagccgagctttaactgatagcgaatggaatactcaggaattacttcgggaatttgaagctggatggttaaatatagttgagccggatacatctccttttctttgtttaactgaaagtgcaacaccagaagagttgtgcgttcttaagccacgaaaagattacataggtctggctaaatattacttaggctatgtagagggggctatccccaagaatattttttcacctatcaatagggtaataaaagaacggcaggccgcaaatggtaacggatttgttataccgttgaacgtgataaaacctgctccatggaaaaaggatgaacttactgactggtatcttgagctgctgtcaggtctatcggcggatgttaagatcaaattaatgcaacagtttgctcataagcgttcgcatgagttttggttagtttttaatgcccaaactccttcaggaattacatggtttggaatccatttcacccaaaagaattctggtaaaggacgaaaaactttgcccttcaaacattcacatctggccgaatggaagcttgaacccgtcaaggtattaacctttaataaagaaaggattatgccaagaagtggcgcgaaacaatcccttactagcaagaaagttatgcttgtcgggtgtggttctgtaggaggtgatgttgcagataaactcgcagcttctggtgttggccatatagatttatatgatccagataccctttcgttgaataatctttatcggcatattctaccaccgcaatatgcttcacttcataaatcaagagcattgttgcatagccttacaagcaagtatccatggctcgagattagaagttacactagtaaactacttgatttgaggcatcgtgacttactaatgaagtatgatcttattatcgtagcaataggagcaccgactcaggaacgattgtttcatgattatttgattagagaaaaaattaatgtaccggttattaacacatgggttgaagggtatggtataggtgggcatgctgttctggcgattccgggaacaaaaggttgcttacgttgtgcatatgttgaccctgtagatttttcaagaggattagtttccaacttgaacttccttgctccaaatcaggatttaactaaaaaccatgctgggtgtggtgatgcgttcctgccttattcatacatagcttcaactcaaacagctctcattaccgctgatctcggagtcaaatatcttcttgataagattcgacaatcatccagagtgagctggaaggggagctctgaggatgctatagcaaatggatttaaattgagcgggaggtaccacacattcacccgtatattagaagttctgcccttgttcaataacgagtgtgatatctgcaatggagaattttga

SEQ ID NO: 391697 - DNA, 1044 bp, Salmonella enterica
atgagtcttcagaataaatttaagaattttcatgatgctatcaagttaggaaggaaggaccttgagtacacgacggctcgtcttaaggacgatagcattactgctgatattgttgaacgattcaaagaggatggatatccggtcattgaggatttcattcagggatctttggcgacttccactggtatccgggaaaaggggctggattacgatattgaccgtgcgattgtaattgaagcaaaactggctccagaaaacccgataacaccgaaacttgcagttcttgaagtgttggaaaaacgaggttttaaaaatgctaagattaaaaaaccttgtgtgactgctgattacaaggctgatgatcttcatatcgatgttcctatttaccgtaagtatgataacggtcagtacgaattggccgttggaaagagatattcagacgagaatactcgtgagtgggccagagctgcgccacgtgaacttattgattgggtgaataattacgacgctaatgaagcttatggctcgaataagcatgaccaataccggcgtattgtcaggtaccttaaacgttggagaaatttcacatttggcgatgatgtacgtcgtaaaatttactccatcggtattgcggttatggttaaggaatccttcttctcttcaatcaacgatgaagggtttcctgatgatctctctgcgctgagaaagacaataaattatattctcaatcatcagatctatttcaccctagttgaggatggtaaatacagaatcaaagttacgcttcctgtaagcccttacagagatatttttcatggtagcagtatcgtgacaggtactcagtttcgcaataagctaagtgcgctgttgaaaaccttggataaggttgcagacgaagatcaagagtcctggcagtgtgaattgctgcgaagtgtatttggtgaagatttccctgagtgtgcagcaacgtcatctacttcgtcatccactgtaaaaacggtttttgcatctgctggagtagttgggacatcgcaaggcgcatga

SEQ ID NO: 391698 - DNA, 276 bp, Salmonella enterica
atgggaaacgaaaagagcttagcgcacatccgatggaactgtaactatcacatagtttttgcgccaaaataccgtagacaggtgttctacagagagaagagtagagcaacaggcagtattttgagaaagctgcgtgtgtcgaaaagcgtacagattctggaagtagaatactgcgcagatcatatccatatgcttgtggagctcccgcccaaaatgagcgtatccggctttatgggatatctgaaagggaaaagcattctgatgctttacgagtag

SEQ ID NO: 391699 - DNA, 240 bp, Salmonella enterica
atgagcaagtctgatcataagtttgttaataccagtagagagcaagaacatgagctgaaagactggctgtatcgtaatggtttctcaaagaaacaagataatattgatgctttgaaggtgatcatcaatgagaaagtaaaagccggaatgactacaaaaaacattacgtgggacgagcttgatgatgctcttaagaagcatccggactggttttcttctctggttctgattgggcaataa

SEQ ID NO: 391700 - DNA, 384 bp, Salmonella enterica
atgataaatgctggagcaataacaggttctgtattgtctgttgtggctttaggtgtcttgtatttcagagatgaaatagatctggaggatttttcaagagttgccttgattatacttcttggcatcggtgctttcggcctgaacacatacctgagtgttcagatacctcaggatattattagtatttcgaagaaaagcgactcttttattgagtttttgaaagcagttcacagggattctcacaataattatatgaattatgtggtttcaagtttacttatctgtgttttggttgttggtttatgtttctcagccttcagagaattatcatattcactggccagtaaatatcaaactgggctgtggtttttttgtataaattaa

SEQ ID NO: 391701 - DNA, 213 bp, Salmonella enterica
atgagaaggtttattgaactcaatgataaaaggaaatctgctaatgctgaagtgtctcaaagcaatagtggcggatataatgtacagaatacacacattttaaataatgtggttaataaaaattacaatggcacaaatgaaaataatgatgcttttatatatctgctgggaggcgtaatcgtattctttacactggtgtggatttttttttag

SEQ ID NO: 391702 - DNA, 555 bp, Salmonella enterica
atgggggctgtgtgggttgccggatgcagcagttatgaaacaaccagcgtaatacatctgttaaaggagtgtggtatcagtgccgggcttttccggccgggagagcggctccggaccagagacacgctgatactctgtttcagcagtgcacctttgctggggtggtggcggtatctgaagataacacaatgggtgatgcagcgttatgaaatccggctgattgttctgtgtcctgatgaggtacaccgggctggtattgtatgtggcagaaatacagtggcagtgaacggagaacgcagttgtatttatttgtcccggtcattacagcaggcagtacagcgttgtctgccggaggcgatactggctccttatcgggaatgtgtcagggtattttttctggaaagggctgttcaggctctgcggattcatcccgccggggagtctgactgcccggcggcacgaagagaatactaccggcgtgagcgaatggttcagcgcctggggtttacgtcgctgatgaagctgaaagtatttatggccggttttgtcgggtaa

SEQ ID NO: 391703 - DNA, 1023 bp, Salmonella enterica
atggttgttataagaaaaatcatcccatttttatttgttggctctttttctgtgagtgctactgaactacaacagtttttattttatccacaaaatccatctttagtgccaatagggggaaatttaacaatagatgataagggagagtcctcaatttctcttgatataaatcctttctatccggggattactgtagcgtcatattgtacagccgaaaaaatggatattccaattaaggggaatgttcgatggtggttgttagctccaaagggggtaattagagatgctagcggtcttcgctatgaaatttcagactcaagctgggagttaccttcttcgaatgtagataaagtgcccggttatgaaacatatgtttctccaaacacaattacggaatggaatgatccaacgcaaacacagcattattgttggaaagtagggagtgtgcagggggctgcggggggatatcaacaatggaaggctaaaattagagttgaacgtgcgacagcaatacctggtaactataatttaaatattccagtaagattagggtgggaagaaaataaaggtctaggggttattgaaggtagtggttggttgaaattcccatcagtattatatcagcaacctccagttaatattcgtgttgatttgacgattacctcgaaatgtaactttaatacatcaccaataaatttatcccacggtacaatgatcggacggaatgctgatggcaatcagacaaaaccttacaacctcaatgtgacctgtacgccgggaacgtcgttgtcagttaagcttcttggcacacaaaaagtatcgggcaaaacagataactatacacaatgtggaaccggtggaatgtgtgagctgacatttgataatggtaaatatgatgaaaccatgacagttgatagcagcaagacgctatccattaaatccacttatcgcctgaatgatattgctaaaccggtggcagagtcttttgaaggaggtggcgtgttgcaggtgctggtaaattaa

SEQ ID NO: 391704 - DNA, 528 bp, Salmonella enterica
atgaaaatgattaaaactgttatggctggcgcagttgcaatggctctggtttcttttggtgctaatgctgcaaatcagggacagggcgttgttaacttcaaaggtactgtaattgatgcaccgtgtggcattgcgccggagtctgctgatcagtctattgattttggtcagatctcaaaagcgcatctgaataacaacggtcagtcaattcagaaacctgttgaaatcaagctggtaaactgtgatttgggcggagcttctaaaacagtagaagttcagtttactggtaccactgaggctggtggggcgaatacagatcttggcctttctaagaccaatgccattattcgtatggcagctcaggatggtactttagttgcatttgatggttcaaacaaaacgaatgctactaaattaatggatggcgataacaccctgcattaccaggcatgggttcagaaaggtactaaagatgttgaggaaggcgaattctctgctgttgctcaatttaatctgtcctatcagtaa

SEQ ID NO: 391705 - DNA, 567 bp, Salmonella enterica
gtgactaattccggtggtttatctcaggctgccaacgggctgctgatgcagctggtgatggatctgaaaagtggctatctccgtcgctgtgagtcgctggggatcaagcgagaagagatgcagatgttgcagggactctcccttgaggagctgcattatctcgcgaacagcgaagtttctgtggtcagcgtcagcatcgatcacagcaatctggtcagcatgctgcaacgggccagaatggagcaaaagcgcatgcaacgcatcgaccgggcgctggcgctgggcagttcgatagagctgatgcagacatttttcgggctttccagtacagatgtggcggcctgtcgcaggatcgccggtatcgaagcccgatccggacggggcaatacgctcggggatgaagacaatgcagaaatctggcggctgtggcagaaatcaggcgttgaagaagtggaaagcccggacgggcttgacgtcatgatgctggccgcagagcaactgaatatccctcttacctctgtctggcatgctgtgaaaggatggcacagatgcaactggggaatgtga

SEQ ID NO: 391706 - DNA, 1128 bp, Salmonella enterica
atgagtaatgacaaactccaggagcggctggtcagtctggtcaggaaactgctggaactgagccgaagcaacagcaatgcgcatgaagccggactggcgctttcaagggcgcagcgcctgatggaaaaatatggtatcagcgagctggacgccacgctttcgtcagttcgtgacgttgcctctcagagcgcgccatcagaggccgaaaaggtgcctgagtggatgacccgtctggcatgggcggttggtcatgcctttggctgtcggccttacttctcatggtgcaatacatcatcgggcgactgtcgacgaaccgtaacattttatggtttcagtgaacggcctgccgtggcggcttatgcttttgatgtgctgacccgccagttgaaagatgccactgcggtatacctgaaaacccagagtaaaaagctgaagctgtcgacccgccgaaaccgggcagagctttttcgtgccgggtgggttgacggcatgcgtcgcgtcatcacggttttccgggttacagaacgggaaacgcaactgatgacccgctggatggataaccagaatatgaaggcggcgaccatccgggaactgaaaagctgccgcggaggcgatattgcccgctaccggggttatgaggcgggtaagaacgccaggttgcatcaatacggccgccattggtcaccgggaggaacgtacgtcatgacgaagcatcaacgggtgttgctgtcgggtacctcccattgtctgtggtgcggtgtggtactggggctgctggccgcagatatgtatcccggtgtcgttccggcattttccggggccgttttacgggggctggctgttgccagcttcatttctgtcctgctgtggatgatggtgagttacctggaggacatttcctggacgtatatctggggggcgatgttcctgcctccgctggccgcattactcctctgtcatgtgggctggctgggttacagctttattttctggaaatgggactatgattttgctctcttcatccgggaggcggttctgccagttgttttccttgtgtggggagcatgtaacttcttaatagtcccctttatctttttgtttatcttgtctcccggaggtgttgagtga

SEQ ID NO: 391707 - DNA, 1074 bp, Salmonella enterica
atgccggacctccttgaatccgggcttggcgctccacaaatcaggctattgcttgccttgcgccaggatgcggagaaagtctgggatcagttttgccttctgtctgaacgaagcgataaatgctttaccgatgtatttggtgaatgttgccgcaagtttaattcccccgaactgtggtcaccggaaatgttccgcgatgaatttattggtgatctgctgctggcgctaccgaatccggatctgaattatgaccgctgggtgatggaactggatcctggcgagcgtaaccggcgctatcactttggcgaaccagaagaggctacccgtcttcagggagtggtgccatcaccgttcactgacggcattcaggatactgcacccgagccagattttgccctgccgaaagcactaactgagtcgccgcctgccacgccagcggttacggaggaatggccgcagcaagatgaaaatttacgggtatcgccagaggacaataaagaggcacctttgtctcttccgtgcacagaggtacagcccgatatgtacggtggttccccggttatttcgggtgacggcatggggccggggctttctccggacaatgatgagacgcttatctccatgctggcgccggggctggaggatgagggagaggtcctgcatccggcctgtcacattgccggagatgcgatctggtctgttccggcttatcaggatgatatcgaacatctgcagaatatggccttcatcatggcgtgggaactgggggaaaagctggggtgtgaagatgaaatcctgccagaccgcgccagtagtctgtcgccaggctattgcgctgcgggtgacagctgcagcgcaccggccgccttccttttgtcccttgcggggtgttgtccggcacagtgtccgacaaccgggatggatgttgtgctgatcggcggttctgcacagcaggatgtgccagttcttgatgatgaaaatgccataaaactgctgaggctgatgcgtgtcatgcgccgcctgcgggagctgcagcgtggcgtaacggcggtagaggaggagcatgatgagtaa

SEQ ID NO: 391708 - DNA, 570 bp, Salmonella enterica
atgagccgtaaccgcacgaatatcggggcgtccatgctccagccgggccgcagggcctcagggagcgttgagagtacaccggtggttgaaatgccgatggtactgacgattgaacagctggcgccgaacccggataacccgcgaacatcgcgtaatccacgttatgacgagataaaagcgtcaattaaagcccgcgggctggacacggtaccaaaagtcacccgcgatccggatggcgatccgaataaatacattttcagtgatggcggttacacccgttatcagatactgacggaactgtggcaggaaacgggggaagagcggtttttccgcatccatgtgctcgtgaaaccctggcccggacggctccagtgtgtgattggtcatcttgctgagaatgaagtccgtggcgatttgtcctttattgaaaaggccagggggatccataaggcgcggattatctatgaagaacaactgggaaaatcagtttctctgcgcgaattatccactttgttaaccagtgaaggcctgcctgttcataattcgacaatcagccggatggagccctga

SEQ ID NO: 391709 - DNA, 882 bp, Salmonella enterica
atggacaagctggtcagccgacttgaagccatgatggcgctggacggcctgaccggtacaccaaccggtttcagccaacttgacgagataacctgcggccttcagccgggcgatctggttttgctggccgcacgtccatcgatggggaaaaccgctctggcgctggctacatgtgccgccgctgttcggggaaaaccggatgattacgtttttgtctacagcatggaaatgccggaagaacagctctccatgcgcctgatgtctatggaagggcgggttgaactcagcaggcttcgtagtgcatcactgggtgatgaagaatgggcccgtctttcacaggctatgaaggagattattcagtggaacaatcgtctgattattgatgacacaagctatcagacaccggcaaccttacgcgcccgtacccgccgctatgtccgtaagtacggtaatcccgccctcattatggtcgactacctgcaactgatccgctcccccgaacaggaaaaccggacgcaggaaattgccgaaatatcgcgctccctgaaggcgataggcaaggagttcgggtgtcccgtgctggcgctttctcagctcaatcgtcaggtggagctgcgggcggataaacgtcccaataacggcgatttgcgcgattcgggggcactggaacaggatgccgacctcattatgtttatctaccgggatgaggtgtataacccgggcacaatgacgccgggtgtggcagaaatcattatcggtaagcagcgtcaggggccaaccggaacggtgaaagtgcagtttgacggccgctatacgcttttttccgaatatcaggaagggggatatgacctcgggtaccacaggacaggaggtcgggcatga

SEQ ID NO: 391710 - DNA, 459 bp, Salmonella enterica
atggctgatattcatattccccactcggcagaagcagagcaggccgttctgggcggattaatgctggataacgaccgctgggatgaagtggtgttattgctggcaccggatgatttctttgtcggctggcaccgcgccatttaccgggcaatggctgagctggtcggtgaaagtctgccgctggatctgattacgctttctgaccggatggaaaatgctggtttgctggaacgggttggaggttttgcttatctggctgagttgagtaagaacacgccatcggccgctaatattctggcatatgcaggagtagtggcggaaaaaagccggctacgcaaactgcagagcgtcggcaatatgctggttgctgacgtgcaggcgttgaatgcgcgctcttctgacgttctggaggtagctgagaaccagctgttctgcattgctgagcagggcatgttgtag

SEQ ID NO: 391711 - DNA, 135 bp, Salmonella enterica
atgcagttgccatggttattatccctgaaactggcagcacagtttctgaccatgatgtttggcgactctggtcagaaggcgctggcagtacatttatattcattaaacacaaggaaaaaatatgaataccaatag

SEQ ID NO: 391712 - DNA, 435 bp, Salmonella enterica
atgaataccaatagtgaactgctgcctggcgaatttaagggtaaaactgatgatgggtctgacaacatcagccacatttccggcggagcgggaatgcagagaaaatacacgctgcagttccggctctggcaggatggaaaagtcatcactggccagaaacccgcaaatccgtttcccgaggattttatcgaatcgacgcatccctttactcctcttcagcagggtcagtgggtcgagctggatacgactggtccttatggtccggagccccggctgtttctggtccgctttgtttttcaccgactgaaacgccagggagagacccgggagtacggcagggaacttgctcactggcatacggatgtggttgtgcagatgatgcccctgccggaagagctgatatcgtggtacccgactggcgatgaaagcaggtaa

SEQ ID NO: 391713 - DNA, 873 bp, Salmonella enterica
atgaaaattttacccgttatttccccaaaaggcggtgaaggtaaatcgactttcgcggcttatctcgccggttttcttgccgatgctggtgtgaagacacttcttattgatgcagactggactcagccgacggccagcagcattttcgctcttaataaagaagcaccgttcgggctgtatgagcttctcatgcagacgatccccgacccacttcaggctatctctcagacatcaattgataatctggatcttatttactcaaacgatccggacgagctcctgccgacagcgatgctacacgcggcagatggtcgtatccgcttaagaaatattcttcagaatccggcctttgcccgctacggggcaattattcttgactccaaaggtgccaccggggtgatgactgagttgtccatacttgcgtcaaccggccgtgtcatgggcgttgtgaaacccatacttcctgacgttcgagagtttattcgcggttccctgcatatgttttcccgcctcaaaacctacgaaaattacggtatccacctgcccgatatctctattcttgtgaactgtttcgaaaatacgcttcttgaccgggaggcaatggacggtctctcaaaaattgtcagcgagaagctgtatgacagcagcgtgttgggagaacgaaatatgttcagtctgctcgatacctgtatcgagcagctggatatcttcaaattgggccacgttaaatcacagcccgttcatcggcttgaatataaaacccggcgtaaggggcctgcggcggcagataccatgcacagccttgcctgcgagttgtttccggagtggaaagaacgatttgacgatgttctctccagggaggttcgcgtatga

SEQ ID NO: 391714 - DNA, 4890 bp, Salmonella enterica
atgagtatgacagccactttatctctcaaaaagttagaggagcattttggaatacaggaccagttatcccttgaggggtactattctattttcgatattatccacaaaactaaaacagaatttattaagcaacatagtggacgctggggcgctaaggctaaaaatatttatgatgtcgcagccagttacgccacacaaattatgcttttgtcacgtaagaataaaatcactcagtcctttgaaaaatctatggacctactgtccgtagatgcatcactaacatcattatactcaaacagttcccctactatttcacctaaaaatggtccaacctggcagacattatttgttgaaaactggagtgaatactgccaaactagcgcaccagaagctaatgactcgcccgtttcctatctatcctggctgtacaatcaagcactcagttatgaaaaacaaatgggtgaaaatgatattatttcactctcgaccagacgcccggatttagctgaattaatgctggataacgatgctgttaatcaagttgtaccctcactgcaattggtaaatgaaattctggagcaatctgtcacgccttatgtaagcatgattaattctaaaagcactgtaagtgaagtactggcaactacgcgctatccaacgcagttaccttatcattatcctcaccagcaagctttgttatctttaaaagatagcgatgaatcattgcaggctgtaataaaaaaagcagataccacatggccctattttgtaaaggaaaatctaattactggcaatgcagaaaacgtattgttactgggtagtgacttagcgccagaacaactttccattattaccgaaaaagcaaatataaatgctgatttttacaaagaaaactttggtgtggaatgtaataattattctattttcaaagaccctgccatcttgtgtcaccagctaaatataactaaacaacaactggagaaggtgatttcatgcactgaaggcggtagttcagttgttgtatcaaaaaattatcctgacggcgtaccctcgccagtggaatatggtgccaaatatattaaccaaaacgatagcaataccgttgaaattataaaagatgctggatacgatacgatttccaatagcacatctatggtattaacgaatacaactatcatcacaggtaaatttggtgatggtattaatgttgatgcgactaaaaatgctgaagcttacatcaccgatgatttcagtgtaaacaataacagctctgctgatttctgtctgacattttggtgtaaattaccagccgacgtaaaagatggtgcaacaattgtcacgaacaaaacaggggaatatactggaaatgccaagggcatttcgctactggtctctaacgaaaataatcaggtaaaattttctttaggcattaatgatggttccaaatcattgagcgttagcgctgatattgttgttgatacatggatatttttttgtatcgctcaggatgtaacgggtaaaaaattaacctgttattacagtatcaataacattgacatgaataatagtagtatcgactgttccacgctctcctctaccgccctctctgatagctattggggttttaatagcaataaaggcaatcaacattataaaagttacccaggacaagctggtattatgagtttcgatgatattaccgtctggaataggttattaacagatgatgaaattaatttattcatcacatcaaattttcctgctgcagaatacactaacatgctgcattattaccctcttgaaaattatcatttgaataatctttctgatagtcggctgaataacattcaacaaatggtacgtttacagcgctggacagatctaccttatgatcaaattgatacgcttatgagcacagctcctgtaattaatacagaatattcctctatggtattaaaaaatatctacattcggtctggaaaatttggcgacggaattagagtggatgccaccgttggcgctgaggcatatttccctgatgatgttagtgtcgttaaaggcgactctgctgatttcagcctagctttttggtgtaaattacctgctgacgtaaaagatggagcgacaattatcactaataaaatgggagaatatagtggaaatgcaaagggtatttcattactggtcaagtatactaactctatacttcagtttactttaaataccagtgatggctcaacggtattaagccaaagcgtaaatatgccgacagatgcatgggtatttttctgcctttgccaggatgttaccgccaaaaaagtatattgttattacagtacggatggtgccactttacttaatgtttgcaacgattactctacgctatcatcgattgcactcagtaatacttattggggatttaatagtaataaagataatacacattataaaagttatcctgaacaggaaagcataatagatttcgatgatattaccgtctggaacagaaaactctctgagagtgaaattaccaaatttattacatcaaacaaacccgcagctgggtatgtcacgatgatacataatttctcttttgaaaatatacaaaattcatcagaactggttatggaccctcgtaaacttaccactttcaatcattatcagaaaaagtataatgtaaacagccagcaattctctgctgttctggatgttatttcaccttatgccattacccccgacgtaccatttctggatcaggtatttaattcatcatcactgtttgatgagccgttaaaaattaataatacgtcttttaattatacagtactggataaccatgatggtcagatagttaaacaaatttgtgcaggacttggtattacccatactcaatttttattgctggcaaatcaggtgaacatagcacaaaaaatggcgaagaataccctcacctgttcccttcctgttatctctgctttgtatcgactggtcatggtaccacgctggctggggttatcctttgccgaagggttatcactactaatgctagtagaaaatggtaatgccttaaataaactggcctccgttcccttttatactgtaccaaacaataatggacagtgtaactcaagcgatctccttaatacgttgatggccctctctgatgcagcgcaatggcttgctgataataacctgacggcgacctgggcgcttgccatgttacaggacggtgaaaaggttcttccggctacaacggctgaactgaattttgtgaccgatattaatcagcaactctcagcctccctcgtgactgagaccagttttaatggtattgcatcccctcagcttagcccactttctttttcaagttattcagttgtaaccgacagcccgacgggtaacggtttccaattggattcaacgcaaaatcagtatgcgcaaataaatggagatattaaccaggccattgacgggctggaaaattacacgattggcgtctgggtaaatatccctcaaaaactcaacgatataacacctttattagtaaatgccactataaaagacacagaccacctgacaaatgatattggtatttatctgttagccaaatcgtctaataatatcacaccaggcatacatgatcttaatcaggacggaaatagtggagatatttcatttacgccaggcacatggttttatctcgctgcggttatgaatactgaaaataaaaaattcaccgtttatattgttgaccacgacactcagcagttaaggagtaaacaactcaatatatcgtcagtaacaagtgtgacgtcaggaaatagatgggcaatgaaccaggatggcgccctgcaatattataacatctatccaaaccgtgccggcacaattcagtatgacaatctcaccgtgtggaatgaatcactcacagaggacgatattaaagaaattagtgcttcttctgaagttgcagggggtagaaacgattatatcgcgacaacaaccctggcaggtaattttacctggacaaaatgttttgacgatttgcttgatgctaatggccttgtttatccggtaacgccagcatcaggtgaaagcgtcaactcgcacattgaaaaacaggtcctggtggatattcaacgctggcacttgccgcaaactccgctgacacatgaacagattgcagagtctgctgcaacgattatcgcgtcagcgaagcaaagccaggatggtattgccgatagtgcgctggcaaaagcgtttaatattgatcactcatatccgccatacctgctcgcctgggccgcatcctctgaatacgatctgctcagccagagcctggcgttaaatggtatcacgacgccagatacaatcccggatgagtaccaacaatatctgtatcagattgcccgccgcgcagggttatgtaatacctttaacctgacgccagccatgctttcgacgttgctggcccacccagcctggttcggcgtagccgatactacaattgattttaacttgttgtatctgttcagccgctatagcgactggatgaaactggccgataaagaggacgccatgctggcttacctgcgcagggtaaacggcacgccatcgcctaccccagaacaggccgcctcttgtctggcgttgctaaccgactgggaaagcgatgaagtcttacaggccgccgcgcacgccgacccagccacaggggtcgccacaacactagcgcacattgacgttgtgatgcgcctgaaaacgttgtgtacccataccggtacatccgttgaaaccatgctgaataccggcgacctgaccaccacctccacttatcaggagtggcaatctgtcggagagtcattagtcgccgcgcaaagtaatcactaa

SEQ ID NO: 391715 - DNA, 4395 bp, Salmonella enterica
atggctaattatatcaacgtaaaccgacgtttctataaatccagtaatccgcaggaagaaattcccgcacagatttatgctgactggtttgaagatagtaatactatcggctgggatgaattgctgaaatattcgcgcatcattattctggcggaagcaggggcaggaaaaacgcgagagatgaaggagcaatcgacaaagttaaatcagtcaggtcagttttcgttctttattccgacagaagcactggcggaagacctcattgtagatatactccacccttatgaaagggtcaggtttaaacaatgggaaaatagctctgattgcgcctatttatttctggatgccgtcgatgaattaaaactaaaaggtgatgagttcaatagagtattgcgaaaacttcatcagcaattagaaaaacacctttccagagtcagaattgttatgtcatgtcgccacagtgactggaatagctacgattctaccatccttgaagaatggttacccgacaatcaactttcagaagaaaatataacacccatttcacaaaaatctggccgtgagttctttaaagatatggtttccgactggtttaatcagcccgccttcagtaatcctctggaagaactggaaaaggaaaccgaacagcagtctgatgattatcatcggcttcactgtttttacatgcgaccaatgacgaacaagcaaataagaaaatttacttgtgaatctgctgtatctgatccggaacgttttctgcaacagctttatactctagatgccgaagtctttgccagtcggccacaggacttgctctcactgatcacatactggaacacacaccagaaatttgattcggcattaatactacatgaatcagatattcaacacaggctgacagaaaattatagccgatgtgaaaaggtcctaaaatctccgcaagagataaggaataccgtagaaaaattagctctagcaatgagcctgacacgtaaactcacaatcggtatttctgaatcgttcaaatcagataaccattcattaaatccccaaaaaatattaactgactggttaccaaaagatattaacacactcctgaggctggccatttttgagcctgcgacctatgaacgggtccgttttcatcaccgctcagtactggaatatctggccgctcgtcggttgcagcatttaattaagaagggaatgcccatcagcgcatgtttcaatttgttattttcagaacgttgtaatttccctgtcgttattccttcaatgcgttctgttactgcatggctgtctctatgggatccatatgtttgcaaagaactgatgaatagagcaccagaaatattgctttctgggggtgatcctgggtccttgccaatcgaagtccgctcggaactactgaaaaatttcgtcttgcattataagtatggaacatcaagaggcatcaacattccgctagtgcaagtaacacggttttcgcatccagagcttcagccagtaatcaaaaaattatgggctgagggataccagaacgatgacgtcagagagttattactagagattatctggacaggaaaatttcaggattgtaatgcgttactggaacaggccgtgtacgatccgggtattgaaataaccgatcggctcagggcaataaaagctatcgcaacaaccgatgattctgtacttcaacaaaaaatagtatatgacgttataaactcgcctgagttatggcctgaaaaattcatttttcatttcgccgaagagttgttccctcagttgctctctgtagataatttattgattctgataaagagaacaacggaaccaaaaagctcaaccagtggatttaaatggacattatataatgtggcaacagaaatagcgcctgaatctgatgctgctattgcatttcgggaacaggtaacgaaactcatcctcgataataacactcaggaaaccagacattatcaccctacaagtcgctatggttatttaacatgtgcactggctaagatctgcgccagacaattggtcagtggatttcacaccgaaaatgaaagtctgattttttcatgtctggtttgccatttttttaacgaagtcgatttcagttatgttaatgatgacttatcggtgatcaaagacgccctaaataatataacaatcacaacaatccgaaaattcattttcataacagaatttaatttattatctcaaatcgtcaaacatgatattgatgcttttcttcttcaggaacgtattattatatctacctttaataaaaatgacttaccttggttaattacactgcttttcgataagtcatcccctgagctacgttctgtattactggaattcttattccgtttcactccgctagtcgataatattccagaatttcacgattcattaatcaatgcggttagtgatgatgaaacattattatcctcagtacatcaatggttaagaccaaaaccaatcgacatagaatctattcgcaggcaagaggttcgtaaggaaaaagaaaaaaatagacaggaagctgaaaaagctcagcaggatgaagaaataaacaagtggttaatctggtacgataaaaccacaacagacagtacatggatgctttctgatgacacccagttttctgtgctaaatcatgtcgctgttatgttgcaaaaaacacatcgacgctattcacctgaagaattctggagcagagatatactaaaaaagacttttagcgatgataatatagaacggattgaaacagcccttcgggaatattggcgtaaaagccctattcagcttcaatttgagcaagaacggataaatagaagttcaccagagcggagtgaaatcattgcgataatgggattacttgccgaaagtgattctcagggatggcaaaagaggctcaatcacagtgaagtagcactggctataaaatatgctacactcctgcaaaataactttacacctttcattaatgagttagccataacctttccagatatagttaaagagatcattggttcagaacttcagtatgccattcatcatataaataatggtaatcattgcccgataatcggtcaagttgccagtgctgacatcaccttacgtaaattattatcggatggcatcttcaacgccgctaatagctatcttttggccgtaaataaagcgacgattaacagcggtggctcccctgttaaaaatattttaatgtcactgattgatgtaatctctgatgataaaaagaaaattattgcccagaactgtgtgtttgcttataaaatcgcaccttataaccccgaatattatgcgtttctgagatacgcattcattttttcaccagaagttggcatggaaacttttcaacatgtgttcagaaaatgcccagagaaagattcatatattgcaggcctctatgcaaccctgttttcacatcaggcatctagaagacatcagtccatattttacaatagtgacatttctcaacagatttctatgaccggaaaactactggatattgcataccagtttattagacgtgaagacgatcgggagcatgacgatgtttttactcctgacctcagggacagagcagaagaagcacgcggtgcgctgctcgacagactcctgaatattagtaacgacaagacagtcaccgaaattatacgactcgctaaacaaccacatttttatttatcaaaggcgcgctttgaatatttagccagagaaagagcagcgctgaactcagataatttctcgctgacagaagaagatgcactaagactcgatggctatttagaacaaccgccacatcatcaggaagcgctgtatcagataatgattaaccgattgcaagatttgcagtatgcattatctcatagtgatttcaccgatcgggatattcttcgcaccgtaacactcgaagcacaaatgcaacccacgctggcgtggcgtttagaagctgtcgccaaatcggcttactctgtagttcgagaaagtgaggttgccgatggtaaaaagaccgatattcgtctcctaagcccatgtggaaagcataaagccgtaattgaagtaaaactggcagataaaagatggaacatcgctgattttgagcgggcgctggaacatcaactggttgggcaatacttaagatatgacggttgtaaaactggctgtttattactcacctataatggtgataaaaaatactggcaaaaccccatcaccagaaagcgactatattttaaggatttgcttgagtatcttaacgttaaagcaaataaaataatgtctgaaaatagctcactgaagttaattgttgtcggccttgatttgacttctccttatcttgttccagcacacaaatag

SEQ ID NO: 391716 - DNA, 186 bp, Salmonella enterica
atggcctgtagcacactggtggagtctgaactctggttgcgggatgccgtggagcggcagatgaatcatcaggaacgcaacagcgtgcgggcggcgtatatccatcgcgccgagcatcttgacgcccgtaaagacatgatgcagtggtggtcggactatctggacgtgagccgcgaggggtactaa

SEQ ID NO: 391717 - DNA, 1518 bp, Salmonella enterica
atgagtaatgcattattgccaatggacacccgtcgccagctgttacgggcgctgaaaacacgctatcaggcagccagtaaagccgagaaaacccggatactcgaagagttcatactgatcagcggataccatcgtaaatcagcaatccggttgctgaacggtgctgtaaccagcaattgccaacagcgtcgctcagccgccccggctcgctcggtttatggcgcagctgttcagcaggctcttattgtcctctgggaagcttcagatcggctgtgcggcaagcgtctcagggcattactgccccagctcattccggcgatggagaaacacgggcatctcagcctgaatccgacactccgcgagcaacttctgaaagtcagtgcatcgtccatcgatcgtttgttgaaagaagcacatacgactgccagtaaaaagcgtaaccgggcggttaatcgcgtcagtaaaagcatcccggtcagagtgttcaccgagcatgagcggcattcaccgggatttatggagatggaccttgtggcacactgtggccgacatctctccggtacctttttgtggacgctgtcgctgactgatatcgccagcggatggactgaatgtgtggcgctgccggcacgtaacgctgagttgataatccgggccgtcgataaagttcaaaagagcctgccattcccgcttctcggccttgatgttgataatggagccgaatttattaacgaagccttatttgaatactgctctgccagatgtatcgcactgacacgttcccggccataccggaaaaacgatcaggcctggatagagcaaaaaaatggttctgtggtcagaaaactggcgggatacggtcgtcttgacggtgaacccgcggtaaaagcgatgaaccagatgtacatggctaatcggttatttattaacttttttcagccatcgttcaaacttctggaaacacaacgtattggcgggaaaacagttcgcaggcatgatgctcctaaaacgccctataaccgcctgatagagctgcataccctgcgttctgaactccgtggccattttgacgatataatccacgcaatcgaccctctgaagttgctggaaaccattcgactctatcagcaccagctggcgcgaatagctgtcggggatcccgtcggagacaaaaacagtgatttaaccgcgtttttgcagggactctccgtagcctggcaggagggcgctgtgaatcctttgcatcatccggcaccatcaaaaccccgccactggcgaacccgggcagatccctttgcagatgtctggaacgaaatagaatgctggctgaaagatgagccgcaactgggcagtaccgaattacttctcaagcttgaagacacacatccgggtaaattcactgaaggccatcgcagaacactgcaacgcaggttacaggaatggcgggtcagagtggtaagagaactggtctacggaacccgtgctgatggtaacattttagctgaagcaagaaagtaa

SEQ ID NO: 391718 - DNA, 954 bp, Salmonella enterica
atggactcaagcaaaatactaaccgccggtatactagctgccaccctccacgcgactagtgccacagcacaatgcctcgttgatgtgacaagtgggctgatgtactacaaccgagatacaatgaactacgtacgcctcccgtctgcaaatggccaagacatgtatgtggagatgggcacgtggagcccgaacgtaaccgtgaatgggtcgtatgatcttaacgcacgggaactgtttgaatacgccgttgcacgcgtcgcgccaccgccggtgtataaaggtgacatacgaatcagtcccgctggctacggcaaaatcagctacgacgtcggtccgcatatgtccactggtaagtctgtcgtgtacgtgacggacctaacacatcctgacaacaacacacatggctattttaacttcagacacccacccgatacgctactatcaggatcgtcggttcgcacgcgccttgttatccccgaccctgctctctgtgcgttgctgcccgacggtaaggcgacctcggtccgccgaagcttgggtgggggccgggcaacatttccgtacgctaacacatcgtatacaaattttttagtaagtatgcaagtcgaactgatgatgacgcggcatggaacgacatgggggatgcgcgtgacgcctacataccgtgacttgggcaaaggcaaggttgggtatcctttgtccgcgccgatccgcgtaggattcactagcgaccgacccgcgtcgattagatatacattaacatacgcaagccaaacacaaggcactgaagtcgtcttaattgatggggagcctgttcctacgactcgtaccgccaaactcgaagcaccgacaggtgctggtcaatatgacatgcgcgagcacatggtttctgtaaccacgcaacaggcgggccgggttagcggtaatcttacgattaatgctgagatactatga

SEQ ID NO: 391719 - DNA, 372 bp, Salmonella enterica
ttgtgttttttgttgttcccggtgaaactactggatttcatttcttgccatgaaggaaccggaggaagtgtgaaaaataaaatgaataaggtttcgtatatatacgataaaaaaccaggacatcttaggcctggtgaggttcatcctgagcatttccggatgctgattgaagcttccagtatacatagccctaaagttattcttgctatggaggattttcttgtcaggggaatccccagaaaggtttcttgtgaaattcatcgcgtatcagcaggatatatatctattgcactaaagagacttcagagcctgagttacactgtggtaatgatgtatccgtattatgctgaagaacaataccgggcagaataa

SEQ ID NO: 391720 - DNA, 1482 bp, Salmonella enterica
atgattgacagattagagcttacaaaaaacgtccagttctatgaccttaaaattcctctcgataatgaggaaagacaaatcacaaataacgaaattctgagcattatgaattctgccgatgataacattgaaccagaatctgattatctgataaatgatttcagggtggaaaggaatttgattgatgctgatgttaattttatttattctcttcgcgccttccctacactaaggcctgtctattttatgggggaacttgaaggtggtgagaatttttacgatacaatatatgcgttcatattgattctggaatttgataacagtatagccataataaaaaagagctgtgcaaatatatctgataagttagagaaggattttaatttaatcacaagccactcattggcagggacatttaatgattctgatgtttcatttcagaaaatatccacgcgaagcatgacgaattcggataaagctatcaggagtcgttcatttgaatcatcagatcttaagggggctttttctacacatgccgctggcagatctataccttactatttgaaacttcgacaaggtccaacaattaagacaatttcaggcagtggcagattagttgaagcatcacaaagaattggtttcgatgatattgcttcatggtcttataatcaattatgccttatcagacaaggtggtggtgtcaaagattttttaaattactttgcacaacagaaagaattaaatgaagtaatggcattaactcagccgaatgcactccttattgaaagtacagctttgtatgaaaaaatagagtctgagggactaaggattaaatataaacttccagacggtgaggattgttatttatctgagaagaaactaaataagctttttcaaaaactcgagaaagtttatgagattagagatgatctgacgattgattcagctattggtagtgcaaaaataaaaagaaataataaaacgcttacaatagagtcaactatccttagacggttaaaagttatatcaaatggcaaagaggctacgctccagagttttatctttaaaaatggattctatagcataacattccaggatcctcgttatatgtattttatggggaattgtttcgaggatgcgtctggaatttcagaaataaacagcattttggacattcttatgcctgttgaaaatatggataaggtattaagtgaaaaaggcacgtttacaaaactgagtactaagttctctgtggaatcaatgtttgatttggttgaagaaattcataagaatgatgactatatattttgcgacgatctggggaacgaatgggctgaccacataacgtttaataaacaagattcctgcatcagtttcattcattcaaaacatggctcgaagacgacgtcagcaagcaagttacatgatgttgttgggcaggcaattaaaaatctggggtatatgtatctatgtaaacaataa

SEQ ID NO: 391721 - DNA, 9801 bp, Salmonella enterica
gtgacggtggaagataaagccgggaacgtcagccattccgccccgctgacggtgacggtggacacgcagacagccattaacagtattgagctggttaacgacaccggcattccggacgacaacctgaccaatgcggtgcgcccgcacttccgggtgacggtgccggatgatgtgaacgcggtacgcctgagtatcgacggcggcaagacgtgggtggatgcgaagagaacctctgccggcgtctgggactacagctggctgacggatgtgaccgaaggggtgcacacgctgacggtggaggccaccgatgtggcgggcaacacggtaaaagagacgatgagcttcaccgtcgacaccacgctgtcagtaccgctcattgcgctggacagcgcggatgacagcggcgtcaggggggatgaactgacccgggtgaacaggccgacgttcttactggacaacattgataacgatgcgcgtcatgtcacggtggaagttcagtatggcagcaccagggaggtgctgaaggcgacgcagggtgcgaacggacgctggagtttcaccccggcgggcgactgggcggacggtcagtacacgctgacggtaaaagtggaagacgaggcggggaacattcgccagtctgcgccgctgacggtaacggtggacacgcagacggccattgatggcatcgagctggtgaacgaccacggaatttccggcgataacctgaccaacgccctgcgcccggagttccgggtgacgacaccgggggatgtgaatacggttcgtctgagtctggacggcgatacgaactgggtgaacgcgacgaagaatgccgccggggtctgggaatacaactggccgggcgacgtgggcgagggtaaacacacgctgacggtggaggcgacggatgcggcgggcaacacggcgacgcggacgctggagtttaccattgacaccaccctgtcggtgccggtcatcacgctggacagtgcggatgacagcggcaacaggggagataacgtcaccagcgtcaggtcgccgggctttaccatcgaaaatatcgatcctgatgcgaaccgggtgacggtacagatcgcgcatgacggcagcagccgggaggtggagctgacccagaccggtggccggtggcactttacgccggacagcgcgtggacggacgggagctacacgctgacggtgaaagtggaggacaatgcgggaaatatccgttattccacgccgctggacgtgaaggtggacacacatacgtcaattaatcatattgagctggtcaatgacaacggcgtcccggatgacaacctgaccaacgagatgcgcccgcagttccgggtgacggtgccggaggatgtgaccgtggtacgcctgagcctggacggcagcggcgactgggtgaacgcgacggcgggagcaacgaaaggggaatggaactacagctggccgtcagacgtgggcgagggtaagcacgtgctgacggtggaggtgaccgatgcggcgggcaacacggcgacgaagaccctggacttcaggattgacacgaggctgtcggagccggtcatcacgctgaacagcgcggatgacacgggcgtgccgggagacggtctgaccagccgcgcgcagccgtcgttcacgctgcaggatatcgatgccgatgtggtgagagtgacagtgagcgtggagcacggaggaaggaccgagacgtttgacgtgttacagggcgcgggcggatggatcttcacgccggcggcggcatggacggacgggagctacacgctgaaggtgacggtggaggatgaagcgggcaatatccgtcattcagcgcctctggacgtgaaggtggacacacagacggcgattgaccgtattgagctggtgaatgacagcggtgagccggcagataacctgaccaacgatgtgcgaccggagttccgggtgacggtgccggaggatgtgaacagggtgcgggtgagcctggacgggggtaagacgtggatggatgcgacgaaggcatcggcaggcgtctggagttatacctggtcgtccgatgtgaccgaaggcgcgcacgtgctgacggtggaggcgaccgatattgcgggcaatacggcgacgcggacgctgggcttcaccatcgacaccacgctgtcaacgccaaccattgaattagcgccagatcaggataccgggcaaagtaagaatgataatctgaccagtttaactcagccggtttttgttttgggtcatatcgataatgatgtccaaagagttgaattacagattgagcataacggtacatttaaaaacattattttaaccgaatcggctgatggatggcgttatcgacctgacgcggcattaaacgatggtagttataaattgaccgtgacggtaactgatacggcgggtaacaaaacgacatccgctcctttaacggtaacgatagatagtacgttgagtaccccggtaattgcgttggctaatggcgaagacagcggcgtggttggcgatcagcttactaaccacgatcatccggtatttgacttgagccatattgattctgatgccttgcacgttatggtcagggttactcataacggtagctctcatgaggaagcggcggtatttaacaatggtaaatggagtttcagtccttctgtgagttgggcggatggcttatatcaattagctgttgttgtagaagatcgggcggggaatgtaaaagaatctgcgcaattagatgtccgtattgatactacgaccactatcaacaatatcgtgttgcttaatgacactggcgttctcggtgatcaattaacgaataacgctaaaccatcattcagagttgaggttcctgcggatgttgcccagatgcgcgctactcttgatggcggcacaacctggattccgatacggcgaaatgcggatggacagtggatttttgcaagcacaaataatctgactgatgggcaacatacgcttcgtatcgaggctacagatacagcaggtaacgttgcgagcaaagatttagtctttaatatcgatactcacttacagattccgacaattgctttgggggccggacaggatactggagcgaatacttccgaccatattacgaatatttcacggcccacttttgttattggcaatgttgatgccgatgttattaaggtaatggtaactattggtaccaatacttataacgctactaaagtgggggggacatgggagttcagaccggataatgcgattcctgatggttcttataatgtgagcgttactattgaggataaagcagggaatatagcgacatctcaaccgttatctataatggtagatacgagagccgaaattaatagcgtaacgctattaacagatagcggtgatagctcttcagataatataaccaacgtaaacaagccgcagtttgaaattgtggctgccaatgatactgtacaggtacgcgttaaaatcgataatacgggtaattggattgatttagcgcagagtgttgaaggacactgggaatttaatgtaggaactgcattacctgatggtcaacattcactattagtggaagttgtcgatgttgccggtaacgttgcacaacaaacgcttaattttacggttgataccacgctgcgtgagccaaatattgtgcttgaccctacgcaggatactggcgatgacagtaatgacaatattactaatattaataagccgacatttattattggcaatgtggataatgatgtgtcacatatcgttattcatcttgatggtcgggattatatcatcgaaaataatggcgctaaattaacatttacaccagataagccgctgacagatggtcatcatacgcttactgttacagtgacagatattgcgggtaatacaaaaacatcagctgaactgcaggttgaaatagatacccaggtacaaattgacagggtttcattaacaaccgatagtggtgttaatgatagcgatagaatcactaatgttgctcgtccatcgtttaatattgtaacacctgatgatgtgaccaaagtattggtttctttcgacggtgttaactggagcccggcaagtaagaatgcagccggacagtgggactttacggcgggtagcgctctattagaaggtcattatgtactccatgtgcaggcaacggatcgggcaggaaatacggctaattccagtcttgcatttacggtggatacacatgttgatggccttaacattaccatgctggatgatacagggaatgacgcggcagaccgtataaccaatattacatcgccgcgttttgaaatctcagccagagaatcgctacaggttgtaacggtgacgttaaatgggaacgtcacgactctcaacaaagggatgggtaataagtggatatacactcccgaaataccattacttgatggacattataaactagaggtcactgctgaagatattgctggcaatactattaaccaggagatatcgttcactatagatacgactgtacctgtgcctgatgtcgatttgttggatgccgatgactccggtgaaagcgctgtagataatattaccaatgtcactaaaccacgtttcattattagtgatattcctaccgatattgacactgttacgataaaaattaacggtgtctcttatcctattactctggatggcagtaacaccgggacattccaggttcctgtggcgctaaaagatggtgtctacgaagcggttgtcgtcttcagagatcttgcaggtaatatatccgagacgaaactaccatttaccattgatacggcaacaagtgttagtgttcgaatggatcccacatcagatacgggaagttctaatagtgataatctcactaacagaaaaagtcctaaattcggcggtactgcggaaccggatgcaaagcttgttattaccattatcgatgatacatcaggtcatgaggtgctgaaaaaactggtcacggttggtgttgatggtaactggagtatgacgccagatgccctggcagatggtatctacacaattaaagttgtctcaacagacgttgcaggaaatacggcggaggcgcaagatagatttactatcgatacggtaacgcccgatccaacaattcagcttacggattcatcaattgatgatatgcatgaagctaccagcctgcgacctgagttcaagggtatcgcagaagcattttcaactattatgatccagtgggatggcaaagttatcggctcagccaatgcgaattcgaatggcgaatggagttggactcccccatcaatattaacaccaggttcttatgtcattagtatcgttgccaaagataaagcgggtaatgaatcgtcacaagtcgactttccagtcgtaatacctgttattgatgtaacccctcctacgattaagctaagtgatgatagtgatagcggggcattgggggattttattactaacgataaaacgccgactcttattgggagcacattacccaatactattgtcagcatttatatcgacggtaagaaagttggcgaggcaacatcggataccgcaggtcgatatgccttccagatgcaggaacagcctgacgggacgtacgttgtggaagttggtatattaaatccacgcgtcaatgaagaaattcgctcagcagccgttagcctcgttattgatactcaggtcgctgaccttgaatggcatatatctgggatacatgaagacaaatatattaatactgtaacgccggaaattagtggcacaagcgaaccaaacagtaaaattacggtttttgttaatgggattgaaaaggctgctgcttatactactgcaggcgggcattggggcgttatattacctactttagggaatgatggtaattacgtattaacgttcaaagttgaagacattgcaggaaatgttaaagagtttggccctcaagaaataacgttagatacggtaattgctccgttgacagttacactgcgagaagttgatgattcgggtaaactgggagactggatcaccaataaatcacatgtaaatatagatggtactgcggaggcaggaagtaccttaactattaaaactcagggaggagtcgttgttactacttttgaagtaggaagtgatgggcattggagtgcagagttagatctgagtaacggtaataacatctttgttgttgagtcagtagataaagcgggcaatagtcaacaaaaagaacttttagtagaatatgacactcagatcgaaatcagtgctatttctttaagccgagatagtaatagtggtgataaatatgatctcattaccaacgataaatcgccagagctagtcgcaatgaccgaacctggagcaacagtacaggtttatattaatgatgtattgcaagctacggtagaagctaattctgcaggtaatgttagttataccatgccagcgaatagcgccgatggtaactatcatgtgcaatttgttgctaccgatatagccggcaaccgaactgaatctgctgttgcgacagtgacgatcgattctgaaattgctgtgtttactattgatgaaggttcattaccgactatatcaaatagtcgggcattgtcagtcgctgggcaaggtgaggcaggcgctcaggtaagcatctttgtcgataataagctggtcaatgtggtcatggttgaggctgatggttcctggcgtgctccgatattgctgcaagatgatggtacgtttaagattcatttcagcattactgacattgctggcaacacccaggcgagtaaaaatttcagtgtcgatgtcgattcatcaaccgaatttccaacaataacccttgaagattcgagtaactcaggtttggttgacgatctgattactaatcataatacgccatcctttgttggtactgcggaagcgggtgctacaatccatttttatgttgatgaaaaaattgtggcaaatatcctcgttcaagatgatggaagatggtcatatcaatttgataattctctgaaagatggtgaatactccattcgtgttgttgcggaagataccgctggtaacagggcggaatcacctcgcttaattgttacgatagataccagtacatacattgaacctcctacgctgacagcaggatctgataatggtatgtatattaacgacggcgtaacaagtcaaaccagacctcagtttagtatcaacggtgagtttaaccagagtgtccaaatttacattgatggcaagctagtcgatacggtcactgtgacagacagaaaccaggtttatcaacctgtggctccattgggtgacggttctcatagtatttattatgtcattaccgataaggcaggtaacactgcaacatctaaaacactagatttttcaatagatacatcgaataaaactccagtggtgatagaggccattgatggacatacactagcggagatgaccggcagtgatggtaaaatatatataacagatactactcataatataatttttcgcggaagtgcggagcctgatagtttaatggatttaactatcaatgggctaaacgtaggccaggtttgggttagtcagacaggagagtggcagatgccagtcaactctgtttatctctctcaaggtcttctggagataaaaataaaatctacagaccgtggcggtaatgtaaacgagaaaagttattctatctgggtggatacgatgattgaggactttaccagtgaacttgatgacaataaatcatcgtcgcaaaatgactggtggagtaataatacccttatcactatgagaggtctgggggaggctggcgcgacagtatcactagtgctggcaggtgtcacattggcaacgacagtcgttgcggctaatggccaatgggcattatcgaccgatcagcttccggaaggaaaatacgatatcactttgagtattgaggacaacgctggaaacaggaaggaagagatccgtgaaatattcatcgatcgcgctgcaccggtagcacctgctataacatattcggacattgtcgatgatctcgtcattatgaaagggacgggcgaagcaaaatcaaaattaacgataactgatagcgagggtaatatatatacattaaccgttcctgataacgggaactggagtatggctattccctatccatcagaagggaaatttactatatcgagtacagatcgaattggtaacaccagtgatgttgtctcagtcgatttaataaaagagatacccactatttcgttagcggtagattcgaacagtggatctaaagatgacaatattacgcatgataaacaacctacctttattatcggaaatttagaaagtgatatcgttaacgttcaaatagatattaacgggatggcatataatgctgaaaaaagagcggatggcgtctggttctttacgccagataccgctttagctgatggcacctatacgatatcggtaactgcgaatgacgcggcgggtaatcagaaaaactcgttaccgattactgtcacgatcgacactacgctgaaggtgccggagatcgcgctggcggcaggcgaggacaccggcgcgtcaggcagcgataacgtgacaaatcacacccagccgaagttcactctgcagcatattgacgcggatgtgaccggagtgaccgtcagcgtggcgcataacggaaccaccgacacctatccggtcacgaagggggatgatggctggagcttcagtccgtcagcagcctggagtgatggtagctacacgctgagtgtgacagtggtggacggtgcggggaacacgcagcagtcatcatcgctgacggtgacggttgacagtacgctgaaggtgccggagatcgcgctggcggcaggcgaggacaccggcacgtcagacagcgataatgtgacaaatcacacccagccgaagttcactctgcagcatattgacgcggatgtgaccggagtgaccgtcagcgtggcgcataacggaaccaccgacacctatccggccacgaagggggatgatggctggagcttcagtccgtcagcagcctggagtgatggtagctacacgctgagtgtgacagtggtggacggtgcggggaacacgcagcagtcatcatcgctgacggtgacggttgattctactataacagcgacagcgcctgttgaggctggtgatgttagtgagttcgccatggcaaccgatgtagctcaaccggaatctgaaagggtcagcattgaaagtgaaaaaaatcatagcccagctatgttttcaatgatgtctgcggttggagaagtggctgcgcaggaggatgcctataacatcgtattattaaataccgagtctggtgatgtaactgaacgttctattagtcagacaccatcttttgcaatatcagtacctgataatattgtgaatgttagtgttatgttcgaaggagaagagattgatttgccgattaataatcagaaggcaatatttgaggtgccagtacctttgaatgatggtgagtatactatagatgtgaaattcatcgataaagatgctgattatctgattaaggaaaaaacattctcagttgatcattcttcggcagatatagttaattccatgagtgaaagaggcaacaccgaggatgaagttaacgtctcagccccagaaagtgctgtaacacaccataataatggtgctgttgagatattcactattagtgaagtaagtctccctgtagataatcaagaagaacacgcataa

SEQ ID NO: 391722 - DNA, 450 bp, Salmonella enterica
atgcattatccgggccagacaaaccatgatgcctgttttattccggaatgtgttcgccagtacaacggagaacctctttatattcttgttgcgcactggtgcctgcaacagaaggactgggttcagcgaagccagatatcagaggcctttcgtatcaccccgaggcgggccagctacctgatttcttacctgaggaataaagcgtcccgggtggtctgtgtctgccgccgccagacattgtccaataaagcgcagcgctgtgagatttttgtcgtgcgtgttcaaaacccggaacctgcccggcgtgaacggacggtaacgccaccggtctcacggcgacgggtggggaacggagacagggtacaggcgaatgaactgtggaacaggctgtgcagtaacaggaacgcgggaaaaatcctggaaaaggaggatgaggatggcggagtataa

SEQ ID NO: 391723 - DNA, 498 bp, Salmonella enterica
atgaagagtcttttaacgctggcgaaggacttggagcagcaatcgaaggcgcagcagcagagtaccggcgagatgctgaaagccgcattcagcgagcacgagcagtctgtcaaagcggaactgaacgcaagcgcgaagagaatcagcgacgccatcaacgcccacgagaaggatatgaaagcggtcatgcagtcgaaccggcagaacgtgctgcgtatggtcggccggacgtggctcaccatcacgatggtgacggtgctgcttaccggaacgagcgggagcgtgctgtggtggcaggggaagaaaatcctctcgaatacggaaaccatcagtcagcagaaagagagcctggagagactgaacgcgcgcacatggggagtgacttaccggagcgacgaacacggccggtttctggttctgccggagggcatgaaggcagacacgaactggacggtgaacgaagggaaacagaatgcagtgagacttgtacgggagtga

SEQ ID NO: 391724 - DNA, 216 bp, Salmonella enterica
atgacggagctggagaaaagcttattgctcgcgttagagcagctacagcaggactactcgaaaaggctggacgaatgggagagcgccttcgcggaatggcggaagctgtccggtcttatgcaacgggagaacgcggtgctgaacgagcgcgtcacgagcttgagcaggcaggtgcagagtttgagcgggcagcttcgccggttgtcgaatggctga

SEQ ID NO: 391725 - DNA, 498 bp, Salmonella enterica
atgatctgggcattcgtcaaagcatactggaaacagttgcttatcgtggcgatgcttgctgctctggttgtcaccgcggtggtttcctggaatgttcatggcagccgccagtacgacgccgggtatgcgcaggcaaaggaagatcaaaaagaggctgatgataaggccaggtcaaaacgtgatcaggagaaaacacaaattgaacgtgaagcacaatcccgtatcgatgtggcgcgtgctgatgctgagcatgctaatattgctgctgacggcctgcgcgccgagcttgacaaaaccaagcgactcgccgaacactataccggatctttccccactggcacgccagccagcaaggtcatcggtgtgctctccgacatgcttgaagaaagcaaccgagtttacaacgcaacagcagttgaggctgaaaagtatcggattgcaggagaatcctgcgagcagcaatacgactcgctgaagaagcaaaaatcgggacactga

SEQ ID NO: 391726 - DNA, 708 bp, Salmonella enterica; identical to SEQ ID NO: 12498

SEQ ID NO: 391727 - DNA, 1971 bp, Salmonella enterica
atgttgattgaatcagtgaaactgaccaattttcgtagttttggcccggaaggccaaaaaattgcgctcgatcacatgttaactacattaattggtgcaaatggtacgggcaaaacggcagtgctacaagcactacaacggctgttcggcgtgacgagtgaacagaggataatctctcgtcaagacttccatatccccacttcagaaatccatgcaccagacattcgtaccttatccttagaagctatcattgctttcccggaactggatgatgaccaaggagaccattcggccataccggagtttttcagaagtatgagcattgcagatgagaatggaaggcttaaatgtcgcttacggttagatgctcaatgggatgatgatggaaccattgacggttatgtaaccggtcagtttcatgccataacgtgttggggtaatgatgaacctgatgattcggatttccacaaggtgcgacctggcgatcgcgcaaaaatccagcttatttatatcccagccacccgttcggcaactgcgcaggtctcctcgtttcttaaaggacggttatggaaggctattaactggtcatcacaagttcgagcatcattcgctgaaaaagcgcatgagcttaacagtgctttcgaaggtgagtcagcaattgatgctatcacgggaaagttgacacaacgctggcaacagcttcattccgccggtaccgacagcacacctaaatttcgaccagttgacgtccgttttgaggagtttgtcaggaaagtagatgttctgttacatcctgatgagagcggcagagatcgcagcgtcgaagagttaagcgacgggcaaagttctctttttcatatcgccatgacctcggcaacgctcgatgtcgaaagagaaatccggctagattcaagacgctctgcgtttctctacgatgatctgccattaccctcactcactttattggcgcttgaggaacctgaaaataatctttcaccacattatttatcccgcatcgtcagtcaacttaatgagctgacaggaaatattcatgcgcaagccattatctcaagccattcatccagtattctggctcgtatagatccgacccaaataaggcatttccggttagatgcagcttcaaagaacactattgtaaaagcgctaacattacccaaagaggataatgatgccgcaaaatatattcagcaggcggtgcgcgcctggcctgaactctattttgctaaagtggtagttttgggtgaaggcgcttcagaggaggttatcctgccagcagtggcgggagcgatggggatccctattgaccgatcttttgtcgcgatggttccactcggcgggcggcatgtcaaccatatgtggcgattgctttatgatttgcaaattccttttatcacgttgcttgatctggattggggacgacacggtggtagctggggaaggattaaaaatattattgctcaaatgattaactttggagttgcacctcaaaatatatttaaggaagttaacccgagtggatatgagcaaaatttattagcatttgatacttttcctcacgacaacagaacacatatcgatagttgggtcgattttctgagacgctttaatatattcttttcaagcccattagatatcgattactcaatgctaaaagcattttctggttactatcaagtaccgccagaagaaaacgctagtgggccttcactgactggagatcctagagatgctgtcttaggaagtgatggaatccatgcactttacgccgatgatattcatattctccgctggtatcgctatttatttctggggcgaggaaagcctagtacacacattagggtattaagccagattccatcggatcaactcgcacaaaatgcgcctgatgagctaaaagctcttgtacaaactcttcaacaccacttagaaaatcagggcagccagcaatga

SEQ ID NO: 391728 - DNA, 1902 bp, Salmonella enterica
atgaaattcatttcccccgagcaatggcgtccgaaagagatcgaagatctggaacccagcgcatggaatgctttaagaacaccagattctgtaagcgttatcgctggtcctggtgcgggaaaaacagaatttctggcccaaaaagcagcctatctactggaaaccgggatttgcccaccaaaccaacaaattttggctatttcttttaaaactgacgcagcaaaaaatctcgctgaccgggttaagttacgttgctcagaggaactgagtcaccgcctggtttcgatgacattcgatgctttcaccaaaagtctggttgatcgtttcagattagctcttccacaagaatggagaccatcaaagaagtacagcatcagttatcccaataagaaagacgttgcccaattctgggcgcgacgacagcattgcgtatcttccagtgatgccagagctattgaatacgaaacccgccgtatggacaccgcttcatttgagtctcatgttgttggttcatatcgaatttcggaaaatacgtctccaccacaatcaatcaaacattatctggtgtactggtggcttcgtgagcaaataaaaaatgggaatgaagaagaatcaacactgtcatttatgactatcaatcggttagctgagtatattgttcgctctaatatccacattctacgggcgctaagggctacttatccttttgtttttatcgacgaatttcaggatacaacatatggccagtacgatttcctgctgtctgcttttggtcagacagagaccactataaccactgttggggactataaacagcggatcatggggtgggcaggtgccaaaacagatgcatttcatcaatttgagtatgatttttctgctacccgatatcagttacagttaaaccatcgctcatcgccagaattagtcagactccagcatattgttgcaagagaaattgaacacggcgtatgtatggcccaaacaaaagttccccaaaagatagataaaggatgcactttcattctgaacagtcgctccgttacctcagaggtgaattatattgctaaatggataagtcgaaatatgcagtccagaggattaaggcctcgtgactatgctattttagcacgacaaaaaccagaaaattattacgaccaactaaatcaatcgttgattagttatcatttaaaattaagaaatgaaagcgtcaaaattggtaacacaacactccaggatttgctggcagaagaattcactattctcttttcaaatttacttaggtttgtaatcgggaaaaaagaaccacaaatctggagtcagctatactcaagcattgaacaattaagaggcatttcaccggatgatatccgtgcgcacaaggcagttgaaaatcagctggttaatttaaaacattctatccaaacacttcttgagcagccttacagtactactactgcccagcccatcatggagcgcattatttcatttatatctccttccgatatgcgtaaagcgtttagccgatataatgctggcgatcttttgaatattacactagaagcgttggaaatttattttctacaatgtgtcagcaataccagtaactggcaagacgctgtggatgagtttgatggagtagaacatataccgctcatgactattcataaaagtaaagggcttgaattcgataccgttatttttattggactggatgacaatgcgtggtggtctcaccaaccgggtaattcagaaagtatgtcaacattttttgtcgctttatcccgtgcaaaacaaagggctgtgttctctttttgttctgagcgaggtgaacgccaaaaactatcagatatttatgctttattggaaaaatcaggagtcaaagagtataatatcaattaa

SEQ ID NO: 391729 - DNA, 489 bp, Salmonella enterica
atgtcagaaaataaaaatgtgcaagatacacatatttccgagcagatgaagacgctgcacggtgcgttgattcgcattgtgagcgctcttaatcggcctcgtaatgatgagaagttgattgcagacgcggggattcaacttgatcgtgcgctattttcgatccttatcagtatcgaacgattagggcctattggcgtggttgagttagccgaatgtgccggtcgtgattatacgacggtaagccgacaggttgccaaactggaaaagttggggttggtaatacggcagcataatgtcatcgatcgccgtatacgcgaggccgttatttccccgacaggcaaggcgatgacagagcgtatagatgcggcgcgagagcaaatgggcaatgctgtttttaaagactggtctcaggatgaacttgatatctttgttcggttaatgcagaagtttgccaatgcaatggataatgatgtctcaacgcaggaataa

SEQ ID NO: 391730 - DNA, 738 bp, Salmonella enterica
ttggttgataatactaatgtttctattgtgatagagcaggagtttagcgaagagaatcagtaccaggccgtcgtagaaaatcatgatgccttaatttactatttagtcagtcatggtgagcgccttgatgagtatgtggactccagctttttttataaatatccagatgcttaccgctccgttttttctaaaaaatatggttctttggaaataccttctgctggcattcattttacatgggaccttatccaaaaaatcaaagataaaggtggattaatagccttcatcactttacatgttgcatcaacagaaatcttgaccaacaggaaaatacaaacaaaatgcgtagaagatgtcactatcaacgaagaatactacgatgttccgcaagcaacagcagatgccattaatactgcgaagaaaaatggcggacgtatttttgccgtaggaactaccgttacacgatgtctggaatccgcgtattcgagggagcacaattgcctcaaagcaagttctggttggacagcgctttatatacatccaggctaccaactgaaagtggttgactgtctgctaacgaacttacatcagccaaaaacgacgcatatggtgttaaccggccagtttgctggagttgatttactaatgaaggcctatgcgtcagaagagatccagtcatgccagttcgatatgtttggtgattgcatgttaatcatacaggatgaagggcagggatga

SEQ ID NO: 391731 - DNA, 1128 bp, Salmonella enterica
atgtcactttcattaagagaccaagaaaagctaaatgaattttacaatttttgcaaagaaaataaatatcatgtgattgcataccctgatgctgcagatttggatgtaagtgatctcgaccgttttaatgagtttgtatttaataattacggtgactgggctgaatggtcaaattacattctgaatacttttcagtttgagaaggaagtcattgaatggtttgctaaactccttcgaatcaattttgaagattgctggggatatgttactaacggtggtaccgaaggtaacatgtatgggtgtcttttaggacgggaatgttttcctaatggaaaattgtattattctaaacaaacccattattcggttgctaaaattgtaagtatgctccgtattgatggtagagtggttcaggatcaagagaatggagagatagactatgatgaccttattgaaaagataaaagaaaataatgatccacatccaattattttcgccaatataggtactactgttactgctgcagtcgatgatataactataattcagaaaaaaatgtcagaagcaggatattctcgtgaagactattatatacattctgatgcggcgctaagtggaatgattattccattttgtgatgaaccacaaagctttgattttgctgatggcgctgattccgttgcgatatcaggtcataaagttattggtacaaaaataccaagtggcgttgtattagcaaaaaaagaaaatgtcgcaatgattacccatgaaatagaatatattgcggcgcatgataagacaattactggttcaaggaacggtcatactccgttaatgttctggaaaggaatcaaacaatacagcatggatgaacataaagaacggatacaacgttgtcttcactatgctcagtatgcagtcgataaatttaataactatggtattaaagcatggcggaataaaaactcaaccaccgttgtatttccaaaaccttcattagatgttataaaaaaatggtatttatgcactcagggtccatgggctcatcttgttatttgcggtcatcacaaggatacaatgcaaattgatgctgtgataagagatgtggtagctgatacaaaaaaataa

SEQ ID NO: 391732 - DNA, 816 bp, Salmonella enterica
atggcggagtataatctgacaccggcccggcaggttattattctcggtgactgctggccggtggtgagcgcagtacagttcgtggtaaaggcaatgcgtcctgagtgtcgttgtgatgtggcagactccctgccatgcctgcttcagagtctgacaggaacaccggaagcggtattaatactgtgtctccggccacgcgaacatatttaccttttctacgctctgaaaaatctgcttctggaccatccggttctggttatcagcgatgagctgttgttcagtgaccgattggttttgcactgctggggggatatttcctgcgcattgtacggtgaaattcagtctgttatatcgggtctgcagaagtccggtcactgtccttaccctctgaaaggaaaactggctaaatttttatctgcccctgaatgcgtgacgggattttttgaagtcccgatgatttttaataacccgaaacgtctgatgaggtacatgtcattactgatgcacagggcgacaacgagctgtggtgtgacttcttcacagcaaaaactattgtgggcactctacaaaggtcattattcgttgtcaggacttacaaatatactgaacaaaaacgagaaacaaatctggcaggacaaaaacagactactggtaaagctgggcatgaaaaaccgactttatgaacttctttatggtacgcgtttctgcccggatatgcagcggacggcgtttatttctccatctgacgccaaaaagctttgtggcgcagaagcgtcagcagaatatgaaaatacgagggcttcattgagggattaa

SEQ ID NO: 391733 - DNA, 612 bp, Salmonella enterica
atgcgtaataaaataatacttgccatgacggctgccggtatgatgtgcgccacttcggcttttgctgctgctattgccaccactgacgctggcggagggacaatgaccttcagtggctcagtcattgatgcgccgtgcagcattgtgccggacagccagaacatcaaagtggacctgggtcaggtcagtatgaaatcactatcagcagcagacaagtactccagttcggttcctgttaccataagtctgaccggatgttcatttgaggcaacccctgacacgccaccgacagatggcacgacaggtaactattcaaaagtggccgtaacattccctggtgttatgcccccaccgggcggcgatttgactaaaggagaaatagcaaataccgcaaactcccctgccgctaatgtagctattcagctcctgaaaggtgatggcgttaatcctgtggacctgagcaagacgacacctacaacaggtgatattacactggatacctcttcggcaaccaataagctgaatttctttgcccgtatgataaccgttggcggagcagcctcccagggcgctgtcagcgccacagtcacctataaactgaaatatttctga

SEQ ID NO: 391734 - DNA, 978 bp, Salmonella enterica
atgacaaaggacaggaaattttcgggagagtttattgcgtttgatgaaatcaggcgcaagaaaagccattgtgaaacaatcattgaagttaataacaaatgggcggttgagcatcctgacgaatgtgatcctctaaagcttgaacgggagaacgagcaagcatctgctgagataactcagttggacgcaatcctggcaactgagccgccaccgccagagctaccacctcgccagcttctgtttaaagtcagtggtgtgttggaagagttcaacgtacagaaagtgattggctatttcaccgatcgtgaatacgaccctgaaggatttgccagacaagaagccagtgaccaggtaggaagtctcttgcttgctgttacggggaatgcggttggttctgccgtcacggggcaaagtaaaattcgtaagaatgacgcctgcgattttgttcgaggaaagatcaacggtattccttttcatggatggctgggaaaaacaaatgctcaacccggtgacttcgttgaaatggctgtgatggggcaaggggatcactatgtaacttacgcattaatgattcctgaaattcagactatttctatgacacctcgttgtggggctggaagggaagctgaaatcagtttcggcaaatatgcggtcatggggataggaagcatttttctggttattttaacatatcttcgtattcgtggcgttgactgggaaggtatagccttttgtgctggtgttttcgctttcatgttagcgatggcctattttttcgccatgcgcagtatcagaaagaaccccggtcccgttattttgttgtctgaatctattttttccgcactggggttttctgatcctcaatgggttaatttgccggaaaaaacaaaaaaaaggttaaaaagcgaacctccgctaaaaggttccaggccaatgccggatcgtaatgcctggcgagactacttctattactactga

SEQ ID NO: 391735 - DNA, 309 bp, Salmonella enterica
atggtcgccctgagccagcagcataaggctgtagccgagctgggggaagcgacggtcattccacccgcatcaccggttcagcagtatctgcctcactggctgggcgagatgaaagacggtgaaacatggtttgcggtcacgcaggcaatacagatggcagaacatacccgtgaaacgcaggtgctggcactggctaagggaaatgacaaactgaagagcacctggcaactgggccccaaaaagcctcgtgacaaggagtatgacaaccagcaggaagaatatcaaaaagcactgggggctgcgttatga

SEQ ID NO: 391736 - DNA, 852 bp, Salmonella enterica
atgaaggataacgatgggcgtgttacagaatggcttgacctggcatatccacacaagtcatttaacgttgtagcgcttatgtataaaaataatcctatgctaaagttatatcatcgaatctttacgcaagaaacaaagaaaatacttgacgaagctgaaataaatgaatccagccttaaaaaactaaaacctaataaaagacaaaaaacatcgagagacatgaaatatactaaaacaaaattaaagaactatgcagcacatgccggatttttaaatgtacccagcggcagcggtgaaactccgagatttaaatctggatttgtaaatttacccggaagcctgagcaataaaaacacattcccgggagtccgtctgatagatgaaaaaatcaaaagaaggtttaaggattactctccagaaaagctaaaagaatcaacaaaatggagacctgaaacgagccttggttattatcgtgtggaaaatgttgacattttcatttctgaaatcaagaaattatatgcagcgtcaggttcggagcttcatgaggttgttgaacgtaggatcagaaatcatctggcgagcaataataatatattaccaagaatggctgggattgcagggcttcacgctgaggtacaggcgctgaaccatatcatatccatgactgatactgaggctagtgtagctagtaaactcagttccagttacatatatacccaacgtctggttggagccagaaatgaggatttccctgcatgccataactgctcaggaattattaatgggcttgaaaacatcatgacagggagagttgaaggtcacacaagattaataagaaggaaatccatctga

SEQ ID NO: 391737 - DNA, 258 bp, Salmonella enterica
atggacaaacaagcttggaaacaaaaggcgtatgaagttgtagtaaacgtagccaagacaaatcaagagtttacacctgacgaagtctgggcggctggcctcgaaaaacctgaggaagccagagccttaggtggagtaatggcccgcgctagaaaagaaggattaattgaaaaaacaggtcgtgtcagaccgaccactcagcctgagagtcatgcaactgatgtaactatctggcaatcaaatatttttgaaggttaa

SEQ ID NO: 391738 - DNA, 429 bp, Salmonella enterica
  misc_feature (366)..(375): n is a, c, g, or t
gtgggtatagaggatgatgcgattgctcgtcggagagaagcacaggagagaggggagaaggttgttcctgattcttatcaaggcgtcacgaaacaacgagtaaggaatgtactggcggtaatagaccgatgcacagaaaacatgattgatgttgtctacgcgcttctgtgtgatgaaccaagttggtataaaaaagctgcaaaaaatgggtatagattttgcgatggtgggtcggtcgcgcatataggtacacatgttggaatccttcaacgtggtggaaacttgaagctggaccgtgaaggacgggattattggctgaagccactatgggaaattggtgcgatagagaaagtatacctcgattcnnnnnnnnnngaaggcactcagggggcggtggcctggttgttatctcatccggacatcctatag

SEQ ID NO: 391739 - DNA, 129 bp, Salmonella enterica
atgcttggaattaaaaatcatcagtcagatctggcgatatccatcataaaactaattatttttatcaggatgatgtctgaatcagacaatgaactacaagatatgtgtatggtcatactgaaagattag

SEQ ID NO: 391740 - DNA, 354 bp, Salmonella enterica; identical to SEQ ID NO: 391511

SEQ ID NO: 391741 - DNA, 762 bp, Salmonella enterica
atgttatacaaaaaattcatcttatcaatgatagtgttgggaataatgtcatcttcagcttttgctgatagcgtcgttgaagggaaaacactcaacgtcgcagtatcaccggcttctccccccatgttatttaaaaacgctgatggcaaattacaggggatagatctggagcttttttcgtcttactgtcagtcacggcattgtaagctaaacatcaccgaatatgcctgggatggaatgcttggcgcagtagcaagtggtcaggcagatgtagcattttcgggaatttcaatcactgataaacgaaagaaagttattgatttttctgatccttattacatcaactctttttatctggtcagtatggccaatcataaaataaccctcaataacttgcatgaattaaataagtattctattggataccctcgcggaatggcttactccgacattatcaaaaacgatctggagcccaaaggatactactcgttaagtaaagtaaaattgtatccaacatataatgagacggtggctgatttaaaaaatggtaatcttgatctggcattcatagaggagccggtttattttaccctcaaaaacaagcaaaagatgccgatagaaagtcgttatgttttcaagaatgttgatcaacttggcattgcctttaagaaaggttctccagtacgcgatgattttaacttatggcttaaagaacaggggccacaaaaaatatctggcattgtcgacaaatggatgaaatag

SEQ ID NO: 391742 - DNA, 219 bp, Salmonella enterica
gtgatttccgcctcttccaccatgattatcgacggtatcaaagctgcattacttaacgacctggtgtcctgcccgattgaagggcatggcgttaatcgcattgtggggacatcaccggaatggcagtcagacagtgaacaggctgcttttgatggtgcgcagtgccagtgcggctgcacggtgatcgccagcgccaccggcggtattctggggagctga

SEQ ID NO: 391743 - DNA, 540 bp, Salmonella enterica
atggatggagatgatctttgtactattgaccgtctacaaaaacagtatgatatcattaaaaataataagtcactgtctttgctaggaaccgcttgtaattttattgggccaaatgatgaagaaatattgagtaaaaattttaaaatattgacggataatggagcaatcaggcgagcgttaccatatagaaatcctataatacacgcttctattatttgtagaaaagatgtattgctgtctgctggtggatatagatacggacatatgtctgaggatcatgaactttttattagactcgcccgagataaaaatgttatctttatgaatacgattgaaccactgtattcatatcgtcggcatcatatgcaggttacagacttatctaaatctaaggaaagttatgcacaaattagtgcttttcttttttcagagtttcttttaacgcataactataaatatataattggcattttgcgtgtccatccgtatataaggaaaatgcataacttttttaaaaggaagtttcataatgcaaaataa

SEQ ID NO: 391744 - DNA, 504 bp, Salmonella enterica
atgaatataggcggcacggacgctgtttctttcctggtgactcatttgcttttcaatcgcttctttgctccaccgtcccgactcactcagcgcactgcacgccatcgcccggaagccgtgaccgcagatctcttttctggtgtcgtagcccatcacgcgcaatgctttgttgatggtgttgtcgctcatgcacttgtcctggtcgtattcgccggggaaaataaacgccagatgcccggagagcgcttcagtttgtttcaggatcgccatcgcctgctcagacaatggaacaatgtgctgcgttttcatctttgtaccacgatgagagaagcgcacgttttcgatctgctcccgttctaccgggattatccagagcttctgctgccagtcgatctcactccagcgggcaaagcgcagttcgctggagcgcacaaagaacagcagcgacagcttaagcgcataccgtgtcagcagcctgccggagtagttatccgtccgggataa

SEQ ID NO: 391745 - DNA, 162 bp, Salmonella enterica
atggggataatatacgcgacggaagtgatggtggtgggggaaggattattcgtcgctccgctcctcacccttcgggtcgttgcctgcggcaacgctttctcgctgcgctcgaatcgaaccttagtcgaagcttctcatccttccccgtacggagagatatga

SEQ ID NO: 391746 - DNA, 309 bp, Salmonella enterica
atggtggtgggggaaggattattcgtcgctccgctcctcacccttcgggtcgttgcctgcggcaacgctttctcgctgcgctcgaatcgaaccttagtcaaagcttcttatccttcccgtacggagagatatgaggcagtgtgcttaacggggataatctacgcgacggaagtgatggtggtgggggaaggattattcgtcgctccgctcctcacccttcgggtcgttgcctgcggcaacgttttctcgctgcgctcgaatcgaaccttagtcgaagcttctcatccttccccgtacggagagatatga

SEQ ID NO: 391747 - DNA, 279 bp, Salmonella enterica
atgcataaacaactttttgctcgttttatagaactggagaggctgaccatccaggatcctgaggttctgtgtcaggaagaaactcagttccattctgtctataagacagaagtgttactgtgtacagtacacatctgctccgaaaaaagagtgaaacacgtcagtacgaaagtgttcacttcggtgtccaacaggaagagtcgcaccggatgttgttcagagtttcctcaaaaagttcatcagagggatggcaactacaaaacagaattcagtaagtga

SEQ ID NO: 391748 - DNA, 261 bp, Salmonella enterica
atggttgggtttgagaataaaacaaactatttacatgctaaagggaaaccattggatttcgatatagctaaaggtctttgggtgtatttaaatagcaacttggttgatcagtatttccgccagttcaatgggcatactcaagttaatgccgcagatctttacactattagatatccaaaccgtgagcaattgattaatatgggaaaacaggcatgcgaatttaatcaagatagttttgataaatttgcaaaagctctatga

SEQ ID NO: 391749 - DNA, 786 bp, Salmonella enterica
atgctgctgagctggcatcccggcgaaagctggctgcacaccgcgcagtcactacagcagcggctgagccagaacctcaaccaccgcgatgtgtcagccatccgcgtgatgcgtcaactggcgcaacggcaaaacgtgccagccattccgatgcccgtcgtctttaccagcgcgctgggctttgagcaggataacttcctcgcccggtgtaatctgctcaaaccggtctggggcatctcccagacgccgcaggtctggctcgatcaccaggtttatgaatccgaaggcgaactgcgctttaactgggattttgtcgccgcgctgtttcctgccgggcaggtggagcgccagtttgaacagtattgcgcattgctaaaccgaatggccgaggatgaaagcggctggcaactgccgctcgccgcgctggtgcctcccgttaaatacgcagggcaatgcgcagatcgctcaccgcgcgtatgccctgagcactctcagccacacattgcggcggacgagagcaccgtcagcctgatttgcgacgccttccgcgaggtggttggcgagtctgtcacgcccgcagaaaacttctttgaggcgggcgcaacgtcactgaatctggtgcaactacacgttttgttacaacgtcacgaattttccaccctgacgttgcttgacctcttcacccacccttctcctgccgccctggccgattatctggccggcgtcgccacggtggaaaaaacaaaacatcctcgccctgttcgccgtcgtcagcggcggatatag

SEQ ID NO: 391750 - DNA, 423 bp, Salmonella enterica
atgaatggtatgaaagaagaaaaccaaaacttcgcttatcggattcaattgatcctgaaactaaccggctggaatttatctgagctggcgcgcagggttacagttagtcctcaagcaactcaccaatggtctcgcggagacacaactgccagaggggagcgccttaaacggctttctgctgccacaggcaaacctagccactggttctttctaccacccggcgaagaaccgagtgaggaggaattgcaggaattagccagaacaactccccttgatgataaagaacaggctttactggctttgtttaatcaaatgccggaagctgagaaaaatagacttatcgtccacgcaaagggggttttgaaagagcttgatctacttaaaggtgacgtcgctgacatcataaaaaacatatcaaactag

SEQ ID NO: 391751 - DNA, 228 bp, Salmonella enterica
atgacccctgaattaaagcgtcagatctgtgcgctcgtgacacaaacggaaattgctaaacagcttgggacaacatcccaggcagtgagtctttggctgaatcatgaagtgccagctcatagggttatccctatttgccgaattcttatgtggaaagtcactccacatgaaattcgtagtgacatttacccaaaccccaccgacgggttgccggaccaacaggattaa

SEQ ID NO: 391752 - DNA, 207 bp, Salmonella enterica; identical to SEQ ID NO: 375796

SEQ ID NO: 391753 - DNA, 2043 bp, Salmonella enterica
atggcggctaaatccattgtcgaaattgatgttcaggacgagaaatttcagtcgttcctggaaaaattcaatgaataccagaaagcactcggcgaattacctgaacaatggcggggggcggttcacggactcggcgaggccgcaaaggagacagaacgtgtccgggatggtacggaggggattacaaaagcgttcgctgatggcgttgcggcgttagcatctgttaatgacggcctcgatcgactcaacggtaatctggagaaggccacaaaaacccagacggagtttaacaagaagtccggcggtgcgcgcaatttcctgaataaagccagcaaggatgcgaaatcgctggcaggtcatatcaaagatgccacaaccagcctgctttcatggggaaccgttctggggcttttttccgggctggctggtgcgggcggtctgtgggggcttaaccacctggccggcaatgcctccgcacaacggtttactgcgatggggctggggacgacggcaggtggacttaattcgactgctgtcgattttcagaaagcgctgggtaatcctgtcggaacgctgggcgccatacgtgatgcgcagcttgatttgagtaaacgctggcagttccgggcaatgggagtcgataacccggacagggatcctgctgagcttttacctgaaatgataaaagcggcgcgtgatatttttgtgcgtaacggcagcacgcagcagggggctgaagcctacgggctgacgaactatttcacccttgacgatctgaaccgcttcaaaaaaatgagcgatgaagaaatcgatgcgatggcgaaacaggcacagcaggacacccgccgccttcagttgacggaccagcaacttcgccagtggcaggatttcaacattcagctcgaccgcagtaaggtcagtattggtaatacgtttatccgggggctggcgccgctggcgccggagctgggaaaactttcggattcagcttcaaaggctattgaggcgtttcttggtagtccgctggttaaagagtttattgatgatcttgtcgtaggtttgagagatttttcgtattacctcaagtctcctgattttaaaaatgacgtcagagactttatgactggtgtcagggatatgtattcctccatcaagagtttcacagggggtattgatggactaattgagaaaacaaaatggttaacaggggatggtcccggtaatgccgctgccgaaaaaataaaagagaaaacaggatgggatccgcgtaaggttggagaatttattaaaagtcatactcctgaggcgataaaagactttttaagttatgaccttagcgagggaattattccatctgcatcagcaacagaaataacgccttcattatctgagcaaaaacacgatacctccccgtactcgtcgcagcatagtgcttattttgaaaacaggaataataaatacgagagccccggtcaagtaaatcaaatatttgaacggtcatctaaatatgacacctattttgaagaggccgcgaaaaaatataatttagattcgcaattgcttaaagctgtgactggggctgaatcttcatggaatcaatatgccgtgagcaaagctggcgctcagggactgatgcaggtaatgcctgcaaattttcagccgggagaaaatccgtttgatccgcacgataacattatggccggggctcgtgtcatggcatgggcgaaaaaacagtctggtggcgatattgaggaaatgctgcgttattacaatggtggtattcgtcggggtagtaaagaaaaccgcgagtatcctggtaaagttaacgcggaatataaaaaaatctatgggacggatatgccaggagtcagtcagaattccctgacaataccgcctgctcagcaaaattcggggaaaactgaccagatactgcaacaaattctggataaccagaagcgtggccatgctcagggacttgttgtttataacaatactggcggtaatgcagttgtatccagtacgcaacttggagggttcggttaa

SEQ ID NO: 391754 - DNA, 1779 bp, Salmonella enterica
atgattattggattcggaaataatgtcgtttcctcgctggcggctgatattaccgccagccagacgaccattcaggtgatgcctggtgcgggcgcgatgtttgctaatttgctgaccagcgattatgcgaacagttcaaaccctcttaaaacttacgccaaaattacgctgacagacgcaaaagaaacaatttttgaggtatgtcatctgacggcagttaaccatgacatgctgacggttattcgcggtcaggaaggtacaacagcgaagggatggtcactgaatgacgtaatagcgaattttgcgacgcgaggatctgaaaatcagtttgtacaaattgaagagctccagagtgggcattatgtcgctggcgtggccggaggtacagaaaataatctgacgctggagttaccagcaacttatttcgtcaatggtggagttgactggacattgcgcactccacttgtggttattccggcgctaaacaataccggagccagcactctgcaactgacgatgggggggcgtgtgcttggcatattcccaatatacaaggggaataaaacagagttatcggccaatgatattattaaagatgttcctgtcttatgcgttctggataatacaaaaacctatttttctgcgctcaatcccttggagatttatttgggatcacggtatttgcagaaggaccagaacctggccgacgtccccgataaagcgctggcccgtcagtccctccagctcggcgacagcgctacccgcaatgttggcaccacgccaggaacagtggccgcaggagacgacagccgcatcactggcgcaatgcaaaaagaccagaacggcgcagatatcccggacaaaccaggctttatcaaaaacgtcggtttagcggaaaccctcaatccgacaaaacgcgtcagtatcggaagtgtcggaaccggcgcttttgacggtagtacaccgtgtataaacatcggcgacagtgacagcggatttatcggcagtgcggatggtgttatcgatatttactgtaataacgccaaagtgggctatatcgataacgccgggctgcacatgctcgcgggcattgctactaacggtaacgttgtcctgcaaaacgacgcacgggaacacatcattatccagaatgcagacggaactccccgtatgtttatctacaaggataaaggcggtgatggtgttcatctcaacaatggtaatgacgcctccacagaataccttttccacaacgacggcagtttttatgcaccattagcagttcgtgcaggtggtagcaaaaagcttgctgttcggtccgataataattcggcactgagtgctcactttaatttatggggcgacgctaacaggcccacagtggttgaactggacgatgaccaggggtggcatttattcagccagcgaaatactgatggttcaatcttgtttgaggtcaatggcaggatcatggcccacactgcgcttcattctggtgatgctactgtcgccactgacggcaatatttacggttcgctctggggtggctggctgaatgactggattaataacactattaccaatcgtttcgtccgggacgtgcgagcgggaaacgtagaaagcgctcaggtatggcgtgtatacggttataatgaccaggccccttacgttattacaggtgttattaatggtaacacggacgacttaattgataatctgactcgtcgtccgcttcagaaaaacatcggcggtgtctggtacaacattgactttatttaa

SEQ ID NO: 391755 - DNA, 561 bp, Salmonella enterica
  misc_feature (10)..(19): n is a, c, g, or t
gtggtgctannnnnnnnnngtggtgctatacgcgtagggcctgcggttactgagtttaatgtccgccaggacttaaatattagtgaaaaagtgaaaattgccaaaaaggcgatacatttaatcaaagaaaatagtgttattttaattgatggagggacaacgaattacgaattggtaaaattaattccgaaagatttaaaatgcaccgtaatttctaacaatattcctattctacacttactcagtgattatcagaatatagaagttatgggattaggtggcagactctacaaaaattctttggtattaattggtgccgagacaattcgtgaactggaatcaatccgcccagacatttattttatgggcgttgcacatgttgatagtgaagtcggtgtaacgcttcctggtctggatgaatgttataccaaacaaaaaatggccgaggtctcaaatgaggttgccattcttgttacggaagaaaaactcgagaccaggtctaatttcgtcgtgtcctctctcaaggatataaattatatattcacgagcaaggacgcataa

SEQ ID NO: 391756 - DNA, 1446 bp, Salmonella enterica
atgacagaaaaaacgtttaaattcactaaagtaaaaatagagtcactaccgccagcgccaaagggcgggcgtacagaataccgggatagtgaagtatccgggttgctggtgcgcgtcactgccggaggggtgaaaacgttcagcgtttcccgtaagaagcacggcgagcatttcagagtaacgcttggccgctttcccgatctttccgttgagtctgccagaacgcaggcaatcaaggcgctaaacgatattgccaggacgcagcaaaaccccaacgagctacgccgccagaacgaaaaaaaggcggtaacgttgatagaagcattcgaggaacggctaagggtaagggagcacaagataaaagagaacactatcacgcgctacaggtcgctactggataactactgccgtgactggttcaatttgccgttgaaaaacattactcgcagcatggtagaaaaacggcacaaagatataaccgagggtgttgcgtggttcgggaatgacaagagcacttacagggcaggcgtgggaactggtagtagagcgcaggctgatggatgggccagggtgttacgttcagttttccgttttgcatgggatcactaccgggacgcggaaggacatagcctgttaccggaaccgcctacaatggtactgagcaccaaaagcctttggcacgggctggaaaggaagaacgagcgtgtaaggaacagtgatttagggcgctggttatcggccattgaacgggtgagaaaaaaagccgaagaagagcgggacgatttcgcgcagtctgtttgtgattccgtatttctggcgatgttcaccgggctacgtaaatcagaaatattaaatctcacatgggacagggtaaatcttggcggtcgctacttctggataagcaaaacgaagaacggagatccgctggaactgcctgtaacgaaaacgctgttaaatttattcaggcgcaggcttaccctacgtgaagaaaacgaatcattggtatttcctggacagtctggcggaatcattagtgagccgcgccgggtaataagcaatatagtagccgcgaccattccagaccctaacccggatgatttaccgcaggttaattttaaatttcatgacgcacgcagaacgtacggatcggcggcggcactggctggccttgatggttacatcatcaagcgactgatgaatcacaggacggccagaagcgcagacgttacgcagggctatttgcattttggcgctgatgaattacaggaatcagccgaaaaagtagagcgctttatccttgagaaagcgggattgatagagagtcgcaaggggcttgattctcagctatacgcagcgcttgagagtcttaatgatgaagaaaagagaaagtttatttttgaaatattaaataaagattacggggattgtaaaaatgaaagtatttga

SEQ ID NO: 391757 - DNA, 180 bp, Salmonella enterica
atgaaagtatttgatgaagaattcattaaaattgcaactgagattatacgtgaaagcatggaagaaacaaaatcagttattccatttgaaaaaatagatggttacgcaaaagatatagatagctataccgaggatgagaagataaaattaataaaactattaaaagtaatgaggttatag

SEQ ID NO: 391758 - DNA, 336 bp, Salmonella enterica
atgcttattggaatgatgataaaatatctttcaatggaagatataacacgtaaattagttgtcgcgtcgaacaggcatgaaaagagtaaagctaaaaaaggaaaaactaaccgtcaccatgatagcgcattaaaaatcgctatggatacttggggggaatatccaaacgctagccttgccggaatgacggaggaaatacacgcacacctgcgtagtaaatggaatgacacaccaacagcagaaacaataaaatcatggcttaaaaaatcaaatttataccctgatgcaaaaccaaaaaacagggattttaaacttatcattaacgaagaggggtaa

SEQ ID NO: 391759 - DNA, 207 bp, Salmonella enterica
atgcgtttatctactgcaattgaacttaaaagattctcacgccgtgaagccgctgcctacatcggcgtaaccgcgcaaaccctggctaattgggcgcataccggaagggaacagatccctttctacaaatcagggagaaaagttgtttatcacaaggcggatcttgatgcctatatcgactcaacccgtagaacgcagacaaagtaa

SEQ ID NO: 391760 - DNA, 843 bp, Salmonella enterica
atgtcacataaaacaaaggcgaccccgaaggatcgccagtgcggtaacactaaacccgtacaggataaccgcaagagcgctatttctgcaatgtgtgcaggtgaagaaaaagcgttgatcttaacgatctgcaatcagtacgttgggtatacggcgtggcgaacatcaattgcggtttacgaccatttttccgcaatatccaggatgcgccacgccgcccacaatggcgcggtgttctttgatggtgtcggtctggctcctacccacacaagcaccgatgaaacatcgcgccgcccctcaatggtgttgctggtgggggagcgttcgcgctcgctggctaacctgcttgccggtcttcccatccctgccagtgacgccaccagcacggcagtaaaaaaatgcttgcgcacttataacggcttgggttacgtttaccccgcacctcataaaacgggtgtcgggcgtggaaacccgtgtaagctaaaggcgacatcagacgccgcaagcgtcttttttgttgtccgttatacgcgccattcgatggcgtggtgtgttatcaggcagcgcagctataatcgccgctacgttgccctcctcgcataccatgccgcccacaatggcacgatatgtggttgttgtgtcaggttaaggcctgttatcgacgcacaaaaccgcatatcgcgccgccccataatggtgacgttggcggggcagccgcaaggctggccggttccctttagcgccggtatttccacccccgtcaacgtcaccgcccctattgagcgtggaaactctagcggtgactccttaatcaagctaaaggaggccgtttatcatggctaa

SEQ ID NO: 391761 - DNA, 225 bp, Salmonella enterica
atggctaaatccgcacaatctcaaatcgtcattttgccgtatgtatccgccgttgatccgtctgatggcgagtttcaccagatgatttccggcatcgagcaaaagcttcttgaccgcgtaaaagccgcgcttgatgaagctggcgtagagtggattgatacgcgtaccaaagagcgcagcaaacccgccacaaccgacagtgtggagggttcagacaatgcgtaa

SEQ ID NO: 391762 - DNA, 255 bp, Salmonella enterica
atgtctaagaacacttaccccgatcacagggacgcggtaatagtcgcgcttatagatatcctggtagatgtttcttgtatagcagaagcggcacacaaacacgcctgtagcgaatcagattacgccggatcatttaccccgcattcactggcagtgattcagaacagcgcggaacgggctttacaggatatcggctacatcatggcaaaggatacaggggaaaccgaaatcaataagggggttgatcatgcgtag

SEQ ID NO: 391763 - DNA, 186 bp, Salmonella enterica
atgcgtagaacattccgcatcaatggccggggagttaataagcgcggcctcacagttggcattaactacgatgtgacggccaccagcgacaaagacgccgtagcagaggccagccgactggcaaccattaacggacttaaacacattcggatcgtatatgtacatgagggggtgagccgtgactaa

SEQ ID NO: 391764 - DNA, 204 bp, Salmonella enterica
gtgactaatatgaccatgcaaaccgcagtagttaaagcctgtcagttatcatcaatcattgcggttatagctgaaaaaggttctggaaatcctgacagtaccaaccttatttcgcttgcggaagagatatctggcaatcttgctacatttcttttagagaaagaatacgaggcgaacacagaacaagggggcaataatgaataa

SEQ ID NO: 391765 - DNA, 2151 bp, Salmonella enterica
gtgaagaacgcaccgaactataaacatcttcccgccgacaaagcgacagaggcgatcatctttgtcggtgctgatgcgtattcacacgtacagcactggatcgagagcgaaggtaaaaaacacggcgacaacgtgccgcctgtttatctgggcaaaaagcagctcgcagacctggctaatatccgcatcgtcgataaagggagagaacgggcgcgggtttatctcgccgccgttccgggaacgataaacgagataagccaggcgacgatcagcgccattgttgaaaagctggcagtagctggcgtgcgtgaagtgaaaatatttaagggaatccccgacagggagccggaaacgcttcaccgcgaccgcatggacgccataagggagagagcggagagcggcgacagcattttcaccagcggcattcttacgccgccgatggagcagccggacgagcttaaaccgcgggtagaaaagcgtgccgatggtgtgtactggatagccccgaaggtggacagggaaagcggggaaatcatcaataacgaaacgtggctaagttcccccctggcggtaatcggaacgggcagcgacgacgccgggcaatattactttgtgttgcgctggaaagcaccaaacaggaaagagaaaacgatccgcgcattaccagccggggatattggcgagcgtgacggctggcgcaccctgaaaagtggcggggtaaaggttgtcgccagtcccggttacaggggtcttctttccgactggctacagcagacagccccggcgaaggaatggggaataagtcatcgtgcgggatggttcagaggcgcgtacatcatgcctgatggtgaagttattggagagcctgaaaaccccgtcatgtttaacggcggcagcgcggcggcttccggttatacggtatcaggtacgccggagagctggcgggattctgtagcccgtcttgctggtggcaatccgatgatgatgcttggcgttgccgcatcgctggccgcgccattgattggcctggtcaatgctgacggatttggggtgcatttgtttgataactccacggcaggcaaaaccacgaccgcagacattgccgccagtgtgtggggttaccctgatttgttgcgccttacctggtacggaacggcattaggcatagccaacgaagcggaggcgcacaacgacagcctgttaccgatggatgagataggccagggaacaagcgcaaaggacgtcgctacatcggcctacacgctgtttaacggcgcaggaaagctacagggggcgaaggaaggaggaaaccgcgagttacgacgctggcgaacggtggcaatcagtaccggagaaaaggacgtagagacctttctggcagaggaagggatcagggctaaggcggggcaactggtacgcctgcttaatatcccgatggaaaaatccacggttcaccatgagcaccgggacggcgagcaccatgctaaagcgttaaaggccgcgtatacggaaaactacggggctacagggcgcgagtgggttaaatggcttgccagccaccagcaggaagcaaaagacgctgtaaaggccgctcgtgaacgctgggacggtcttataccggagaactacggcgaccaggtaaaacgcgtggccgacaggttcgccattctggaggcggcgcttattgcgggacagtaccttaccggatggagcgagcaggcaagccgtgacgcagtgcaacattgctttaatgcgtgggtgggcgagttcggcacagggagcaaggaacaccagcagatcattgcgcagtgtgaatcgtttttaaaccggttcggctttagtcgctatctgccttatccggatactgatccgcgtgatttgccgattaaagatctggcgggttacagggtggacggtaaacgggaggatgacctttcaaagttctacacctacccggcgatattcgaagaagagatctcggcaggatttaaccctgtagcgtttggtaaggcgcttgctatcgccgggatgcttgagagaggcggcgacaggctgaaaaagaaagcgctcaggaagataggcggcaagcagcatgccttttacgtgctgatgtactcaccagatgaagacgaggatgagcaaaaaaaataa

SEQ ID NO: 391766 - DNA, 456 bp, Salmonella enterica
atgacagcacaaattgcagcttacgggcggctggtggacgacccacagacaaagaccaccagcaaggggactaacatgacgatggcacgcatggcggtatctttaccatgcagcgccgcacaggacggacaggctacgctatggcttggtgtactggcgtttggtagacaggccgacgcgctggcgaagcataccaaaggcgaccttgtgagcgtggcgggtattatgcagatcaaccagtggacggggcaggacggcagcacccaaagcgggtacacagttatagccgacagtgtggtaagcgccagaacagccagaccgggcggcaaacgtggacagcagggacaggcaacgcaggcgctacagcacgcgaaacagcagacagccacatcacaatcagcgccaccgccagctaatgacattccagactttgaagatgacgacataccgttctga

SEQ ID NO: 391767 - DNA, 600 bp, Salmonella enterica
atgacgacagctaacaccaaccggaaaccagcacccccacaggccagcacatggcaggaaacgctacaggactataaagaccagatgacgaaacagcagcagacgcaacaggacgcaccagaaagcgataaaaccatatcggcgcacaaggtgaagtccaccagcaggaaagcgccacagaagcccaccagcgagccgcagcaggcgaaacagcagccagcacaggaacgggtaaggccggaagggatgaatcgcaggcagtggaagaactttaagcacatgcgccgggtgttggcgttatggccggaactgtttaacctggacaacccgaagccgctcaaagtaggcgtactcaatgacctgatgcaggatatcagcgccagaaacctgactattggcgctggtgtgttaaaggccgctatagccagctatacgcgccgcatacggtatcaaaaagcccttgccgctggtggcgctcgttacgacctgaacgggcagccatgcggagagataacgccggaacagcagcaggaggccgccgacgcactcaaaaaggcaaaggataagccggaagcggagagcgcgacagatggcagatga

SEQ ID NO: 391768 - DNA, 213 bp, Salmonella enterica
atggcagatgaagcggatattgccagcgagagcgagcagctacggacagatgcggcattatcaggacgtgaacgccatgcgctaccagaaacggggcattgccataactgcgacgagataatcagcgccgggttattttgtgatgctgattgccgggatgattatgagaagcgggaaaggttcagcgccatgaggccgcgcaatagcgaataa

SEQ ID NO: 391769 - DNA, 297 bp, Salmonella enterica
atgattgacataaaaacaacaccagaggccgagaagtggctaaagggattgaaagaccgggtagcgaaatcaaagatattaatcagaatcgacagaatgagaacggggaactttggtgatgttgagccagtaggcggcgggttatctgaattgcgtatacatcacggcaaaggttatcgggtttattttgggaataaaaacaacgaaataatattaattctttgtggcggggataaaagcacacagcaggatgatatacagaaagcgaaacagatagccaaaaaatgggggttttaa

SEQ ID NO: 391770 - DNA, 276 bp, Salmonella enterica
atgaaacaggtattaaaagattttgacgtcgcagactatttagaggacgaggatgatgttatcgcttatctaaatgccgttattgccgagggtgacaataaacaacttttcattgcgctgggcaacattgcaagagcaagaaatataagccgtatttcaaaagaaaccggaatcagcagggagggaatttataaagcactttcaggcgatggaaatccatcatttaacaccctttctaaaataactaaagcgatggggttagatcttcacttttaa

SEQ ID NO: 391771 - DNA, 321 bp, Salmonella enterica
atgacctatcgcgaagatattcggttggtggagtatctgatagagcacgagccggatagcccgctgattgacatgctcacagcaaaaattgaccgttacgaagatgaagcgccggagctggcagagtttaacgccaatatagccagcacgccgggcggcgtggcaatgttgcgcgtacttatggatcaataccatcttgcacaaggtaactttgaaaacgagataggcaagcgctcgctggtatgtcggatacttaacgggcagcgcaggctaacccttgatcatgcgcgtgcgtggccagaaggtttaatctgcctgtaa

SEQ ID NO: 391772 - DNA, 192 bp, Salmonella enterica
atgaagataccggaacgatggccgctctatgctaaatggtttgttgtctggctggtgatcctgccaatgatccttcatcgggttagttctggtttgtttggtctgctggtggttgctcttgctgtagggttggcggctcaccttgtggatcgcatattctcttttctctgcgattgtgtgaagcgccattag

SEQ ID NO: 391773 - DNA, 345 bp, Salmonella enterica
atggccgcacagataacagcctacgggcttctggttgaagaaccgcagacaaagaccgcgaggaacggggctaaaatggctgtatcacgccttgcggtgtatctgccgtgtgattcatcacgtaacggacagacgacgctatggttaagcctggttgcgtttggtgagcaggccgacacgctaaccggtcacaggaaaggcgatgtaatcatcgtatcgggcggtatgaggtcagccaggcgcagagggaagaacgggaaagtaatcaggggctatcaggtaagcgccgacatcatcgagccataccgcgcgacagggacgcaggaagcgacagcgcaggcataa

SEQ ID NO: 391774 - DNA, 390 bp, Salmonella enterica
atggggcgtaattcatccggcctacatttgaaggttgccgaatggatattagaacggggtgaagccgcctgcgtttacgatgtggtgaagcaattcggcgtgaccgttcgccaggctatagggttactctcttctgtcgtgacggatagcgctatagaaacacaaacggggcttgtcattcccgatcgtcccagcggtcgctataacggtaaacacgttagatcggtgtctgttctctctattgaccatgaaacaatatcccgtcgcaaaaaagcgcaccaatgccacaactaccacgccgaaagccaccagccggaaacaggctgcgaaatgtcccgcgctgagaggtggaaatgggtgatcaggaatgccagacgacgaaaaagatga

SEQ ID NO: 391775 - DNA, 144 bp, Salmonella enterica
atgcaaaatcagtccgggtatatccccccgttttctgatgaaaaatattcattgccggaaggggttatggcaaaagccacgattcagtggacggtggtgggtgattatggtgagcaaaaagaaaaaacagtcatggtgaaatga

SEQ ID NO: 391776 - DNA, 585 bp, Salmonella enterica
ttgaaatattccgtactggcttttgaaggtttgcagttgcccggcacttataacgtcaccgttacggtgagcggtaataccgtggacagcgatgtggctgtgccgtttcgcctgtccggcgaaggaaagcaacgtaccctgcatccctgtctgacggcggaacaactgacccgttacggggtggatatcagcggatatccggcgctgtctgcggatgcgcagtgtgctgacccggaagtcatcccgcagtccacggctgattttgattttaaccggcagcagctttccctggtatttcctccacaggcgatgctgccggtgctgaagggtatcgcaccggaaacgctgtgggatgacggacgggataggggatttattatgcgcgatatatggatgcctttctcattcttacgcagacacgctggcagttacgccggtgtattgcacagtttaacgactcgccggatgtcagtggctttgagtaacatccggacaaaacatacatcggccggattacgcgtgggtttgactggccaggtgcctggtctgaaccggggtccgccggactggccccccggtcactga

SEQ ID NO: 391777 - DNA, 480 bp, Salmonella enterica
atgaacaagactataatcggactcgcatcgctcgtggcaagctcagtaaccgtccacgccggagggacgccacgcccaggacacacggactactacgcaaaccaggtgtcaaaaactgtcgtggccgggtccgtgacgacaactgtgaaatccactccgctgcaaatttttttcgaaccgaaggtgctggaggataagtccgtcgagcaggttgctgcgatcataacagtcagggggagcactagcgaccatgagtacgtcctcgacgaattaaccgcagtcggccccgactcatacgggtacggacgcacgctctcatcaatcgggataactgacaccatcgacgcaggcactgccgtgacgaacaaagcgatcacgtcggacggcaccgatttttatataaaaatagtccacaaggcggtacaaccacgaccaggcacgacggttctaaactttcctttaatcgaatacgcccgttaa

SEQ ID NO: 391778 - DNA, 150 bp, Salmonella enterica
atggcaagactaacagagatatacaaccgccttgacatcatagatggccttatagcggcacggaacccccacttttctcacgggcagattatcagcaaccaggtgacggcgctgataagctatgtggagcacgtaactgccgtaatatga

SEQ ID NO: 391779 - DNA, 393 bp, Salmonella enterica
atggggcgtaattcatccggcctacatttgaaggttgccgaatggatattagaacggggtgaagccgcctgcgtttacgatgtggtgaagcaattcggcgtgaccgttcgccaggctatagggttactctcttctgtcgtgacggataacgctatagaaacacaaaccggacttatcattcccgatcgtcccaacggtcgctataacggtaagcacgttagatcggtgtccgttctctctattgaccatgaaacaatatcccgtcgcagaaaaacgcaccaatgccacaactactaccgcgccgaaagccaccagccggaaacgtgctgcgaaatgtcacgcgctgagaaatgggaatgggtgatcagaaatgccagacggcggaaaagatga

SEQ ID NO: 391780 - DNA, 183 bp, Salmonella enterica
atgacaggactcattgaaatctattcccggcctgaggctattgacggatttttagcgctaatgctgcaacagcccgacagctaccgcgaacgaatgttaagcgaacgcatcaccgaactggtggaatacattgagcacgttaacgccgtgatatgggcgcagcaggaacggggcaggctttag

SEQ ID NO: 391781 - DNA, 1404 bp, Salmonella enterica
ttgaaatattccgtactggctttatttgtcagcgctgcgttattgccgctgtcagcatctgcacgccattacacctttaattcagccctgattgatggcggtaaagggaatgtggatgtgtccctttttaatgaaggtctgcagttacccggcacttataacgtcactgttacggtgaacggtaataccgtggacagcgatgtggctgtaccgtttcgcctgtccggcgaaggaaagcaacgtaccctgcatccctgtctgacggcggaacaactgacccgttacggggtggatatcagcggatatccggcgctgtctgcggatgcgcagtgtgctgacccggaagtcatcccgcagtccacggctgattttgattttaaccggcagcagctttccctggtatttcctccacaggcgatgctgccggtgctgaagggtatcgcaccggaaacgctgtgggatgacgggatacccgccctgatgctgggctgggatgcgagtacgcagcacagcgagtaccgggggccgtggacttaccgttcagactccagttatgtccgtcttcagcctggtcttaacctcggcccgtggcggctgcgtaacgcctccacctggcagaaaaacagcagccagccgggaaaatggcagagtgcctggacgtatgccgaacggggcattaacagcctgaagagccgcctgacgctgggggaaagttacaccaccggtaatgtgtttgacagtgtgccgttccggggcgtgatgctggcttcagacgaaaacatggtgccttccgaccagcgggatttcgcgccggtggtgaggggtatcgccaggactcaggcgcgggtggaagtgaaacagaacggttacacaatgaccagcaccaccgtcccggccggtccctttgagattaacgacctgccttcagtgggctcgaacggtgacctgcaggtgacggtactggagagcgatggctcccgtcaggagtttaccgtgccgtataacgttcctgcggtggcgttgcgacggggttatctgaagtacagcgtggcgggtggtcagtaccgttcttcactggacaatgtggagacggctccggtgatgtctgctgaactggcatacggtctgccgtggaaccttaccggttacggcggtgtacagacggcagaacattatcaggcggggtcggctggactcggcatcatgctgggtgcatggggagcggtatcggtggatatgacgcaggcccgctcacagcggtatgcgcaggactggcagaacggacagcgctggcgtctgcgttacagtaacacgctggatacgggaacctccctgagcatggccagtgaggaatatgccactgagggttacggcgggctgtcagacgctggatacctggtgtga

SEQ ID NO: 391782 - DNA, 1158 bp, Salmonella enterica
atgccactgagggttacggcgggctgtcagacgctggatacctggtgtgacagccacagcgggtgtgaccgctacggctcatacagcagcctgcggcagcggaacagaaccagcgtctatatcagccagccgctgggcgggatgggctcgttaagtctgaacggctcccggcagacgtaccacagcgaccggaccagcaacagctcatggggagccagttacagcacgtcattgtgggggcgggccttcctgagtctgaactggtcgcgtaaccagcggacggacagaaatggtcgtcagtatgatgacagcctgaccagcctgtacctgagcctgccgctgaacggctggtcatcagagaacccggtgtatgcgacataccagatgaacaaccgggtgcacggggatgcgtctcatgagctgggaatgtacggcgacacgctgaaccgccgcctgcactgggatgtgcgtgagcgctaccgtgacggggctgccggaggtgataaggccagcagcgcattatatctggattaccggggagcttacggcgaaatgaccggtaactataactacagcagccaccagcaactgtcgggagccggtctgaaaggccagatgctggtcaccggagacggggtgacatcgggtcagccacagggcgataccctggcgctggttgaagcgccgggcgtgtctggcgtaccggtgggaggctggccgggagtgagaacagacttccggggatacacgacgctgggttacctgtcgccgtaccagaagaacgacatcagtattgacccggcacaactgccggatgatgcggcggtgtcacagacgtcggtgtcggtggtgccgacgaaaggggcggtggtcagggcacccttcagtacgtcggtgggtaaacgcgtgctgctgacgctgatgcgtgaagacggaaaaccggtgccgtttggttcggtggttacggtggaagggagtgagaacagtaccggtataaccggagacggtggcgtggtgtatctgacgggtgtcccggaggacgggaaagtgacggttcgctggggccggggacagtcactgcactgtagcgccgggatacagataccggagaagcccggtccggcaggactgtatgtgtcacaggcacagtgtcgttag

SEQ ID NO: 391783 - DNA, 975 bp, Salmonella enterica
atgtatccggaaaacacactgcaggatgcacagtggtatgaagctcagcggtggttatggcatcagcgacggcatgcccggcctggtgcagacatctggcatctccgttttcactggcagacggaaaatgaacgtctgtggcggctggttcaggaaggcgcgtaccgtttaaccccgatgaaaatataccgtcgggctgacggagagggactcgctcagtggacctcaccggatgcgctggtactgaaatggtgcgcgctgcacatcgataaccggttgccggttcatgaacgatgtgaacatcgccggggaaatggtggatacgtggcttcagtcagaaaggtgcgggaagccctggcgacagaagcataccggtacgtattcagaacggatatccgggggtattaccggcatatcaggaaaaaacagttatggcttcaggtgagccggtttgtcagcgacagacgactgttaccactcctggagcagtacctgtggtacagcgtggaggatggcggtgaattcaggacgccggagaagggcataccgaagggctgttcgctcagcccgttgatgggcgcgagcctgctttatcacattgactgcggtttcagtgaccgcgagggaatttattatgcacgttatatggatgactttctcattcttacgcagacacgctggcagttacgccggtgtattgcacagctcaatgaatcgctggatgtcagtggctttgagcagcatcccgacaagacgttcatcggccggattacgcgtgggtttgactggctgggtgcctggtctgaaccgggggccgccggactggccccccggtcactgagactccaccgtgagcggtgtctgcggctttatgagcaggcctgtcgtcagggattaacacatgaagaatccatgacacgggtgcatgactaccgtaaacgatggcttatacatgcgggaaagttactgccgtaa

SEQ ID NO: 391784 - DNA, 459 bp, Salmonella enterica
atgaaaaagatcctcgcaatcgccgctcttactgctgccagcgtctcgagtgcacacgcgacagtcaccccggcgtcaagcagtgacatcaacaccaacccggtagtaaatacatataccttccaatactccgcgcaggaaccaacggtggctccacagttcgtcactgccgtcagaagcttggaccccatcaacgctcaacccggtactgtcttggctgatacctcttttacgacagacctagtaagcactgtgtacaaagtcgaagcaagctatgacggcgacaacggaaccgcctattctgctgcgttctccaaagacggaggtaacggcgacccggctaatgtttacgcgactgtgggccacagtgacgttgcgcatatcgttctgatcaagacgggcgaagtagcggctgggactacaaccgtaacgtacacggtaaccgggtaccattcgtaa

SEQ ID NO: 391785 - DNA, 342 bp, Salmonella enterica
atgacaagactaaataaaatacattcccttattctggatatacaaagaactaagccgggaagaggcaagaaagaaaaaataatctcgcttattaattatgtggaacaaattaacgaagacataaaagagatgcgcgaaaatcttaaacatccttacatgaatgaaaataaagtcattcacgcattacttgagattcagatacaggcaaggctaatgcagattggggagactaagagttttcacgaaatggcggtgtatcttttcaatatccgtgtactgatagacaacgccagaaattcacgaggagcacccagggcaatgctcaccccgcaacagccatag

SEQ ID NO: 391786 - DNA, 348 bp, Salmonella enterica
atgttgtacgatacaacatattacaacatacaaatcttattccctctggatctccggctgctggtgggcttcctttcccgtagtagcccaaccacaacggaaatcgtgccagttaccatcggtggccatagcgccctgctgtctggctgctgtgctgctggcgggcaattctaccgtatgacgccacatagccgcgcctgtgtgcgtttctgtctggctggtggggttgagccgctgaggtacggctatggctgttgcggggtgagcattgccctgggtgctcctcgtgaatttctggcgttgtctatcagtacacggatattgaaaagatacaccgccatttcgtga

SEQ ID NO: 391787 - DNA, 153 bp, Salmonella enterica
atggagccacaaaagctagcgctactggcgctaatcgttgttggtgcggtgtgcttaggtgcgctgttactcagcaataaaaatctttgtgatgtcagctttcgcagtggcaaaaccgagatagtggctcacatggcctacgaatccaggtaa

SEQ ID NO: 391788 - DNA, 129 bp, Salmonella enterica
atgtttgtggcaaggtgttacttagccaatctcaacaaattcgacgccacgcctaagccaacccaactgatattaaaagagcctatcggctctttttttgtatctaaaacatatttattatctatataa

SEQ ID NO: 391789 - DNA, 237 bp, Salmonella enterica
atgattttacaacaaaacattgtacacagggatgtgtcaattccattgccagcgttgaatatcgaattatttatctcaccagatttcaccgggcgcgtggttctttatatcgaaaaaggtcgtgtgacatgcgatcgccggctgctcgacgacgaacatatttgcgcactggacacttttatcgaaatggctcgcgaaatggagctacgccttgaggagatatcaaatgttggataa

SEQ ID NO: 391790 - DNA, 849 bp, Salmonella enterica
atggctatgaaaactgaattagcaacggtggcggcgcgtgatttacagatcattgagtatcgcggccaacgcgtagtgacgaacgaacaacttgcagcaggatacggtactgatgtcgccaacatcaaaatgaactattcgcgcaacgccgatcgctttgtagaaggaaaacacttcttcaaagttaccggcgaaaagttagcaaatttgcgagtaacttttagttacctgcaaatttccagcaaaacccgctctcttatgttgtggacagaacgcggcgcggcgaaccacgcaaagatgctggaaaccgatcaggcgtggagctaccacgaagacctggtggaattctacttcactcagcgtaatgcgaccgccctgccagttagtcgcaaggaactggcccttatggtcatcgaggctgaagaacgcgccgaagctgcagcgttagaaaacaaaactctcagcgccaccgttgagagtctggagaaacactttaccaaaggtatgacaatcccggcattctgcaaggcgctgaacggcgtcaacatcaacaaaatgatgtggtgggtcttcgagcgtaactgggtgttcaacgagcaacgagatcctgagaaagatccgcgctggcgcgtagcttcctatgcccgagataagtatctgactgaagaccagacgcagatcactccacacggtaaagatgcttttacgaagtttactccggtactgctggagaaaggctgtcaccgcctttaccagttgtatatgaaaggcgatctgccaatgaaaaagacctggaacggcgaatacagccacgacaaagccatttatacgccggaggataaagcatga

SEQ ID NO: 391791 - DNA, 1080 bp, Salmonella enterica
atgagtcaaaaaaggtacgatgctaacctgccaaaaaacctgacctatcgtaaaaatgacaaagcgttttactggcgtaatccactgactaaaaaagaaatcgcattgggacaaatttcccgcagggatgctattgcacaagcgatcgaggctaacaattttatagcgcagaaccacactcctgttgcactgattgaaaaacttaaaggcatggattcgcttactgtcgcaaagtggattgagcgctatgaggtactgttacaacgtcgtaatctgtcggcgaacacatacaaaatccgaggaaaccagttaacgactatacgggaaaaaatgggtggaatgctcctggcagaagtgaccacaaagcatattgctatgtttctagaaacgtggattgaaggaggaaaaaatactatggcgggagcaatgcgatctgtcttatcagatatgttcagggaggcggttgttgaggggaatataacacagaatccggttgagccaacccgcgccccaaaaatcgaggttgcgcgtgctcgtctgagactggacgtatatagaaaaattcgtgaggcagcagaaaaactgccgacatggtttcctcttgctatggatctcgcgttgatcactggtcagcgtcgtgaagatgtttcctgcatgcgattcagtaacattattgatgaccgtctatatgtaaaacagatcaaaacagggatgaaaatagctctaccgttgtcgctcagtctcccatccgtcggcctgcgtcttggaacagtggtcgatcgctgccgacttgtgagcagaactgactatctgatcagcgccggggtcaggaagaacagcccggacgggagcattcaccctgacagcctgacgaaaaagtttgtcgctgcgaggaaattaactgatattgagtttagcgaaaacccaccgccgtttcatgaaatccgcagcttgtccgggcgtctgtacaaagatgcttatggtgaagatttcgcccaaaaactcttgggacatacatcagagaatacaacaaaaatgtatctcgatgagcgtgatgaaaaggcgtatataatgatctga

SEQ ID NO: 391792 - DNA, 273 bp, Salmonella enterica
atgagtttagtgacgcttaaaacctggggaaagataacttaccccgacaatccaccacctcttacaacacttagaaaatgggcgcgaaacgggaatatttatccaccacctgagattcatggtcgtgaataccgtgttaacccagaagcgttttatatcaaacccaacaaagtagggaaagggttgcaacaacaccatcctaatggacgcaccgggaaaatgagcccattgctggagaaattaataaatgagtcaaaaaaggtacgatgctaa

SEQ ID NO: 391793 - DNA, 417 bp, Salmonella enterica
atgaagaagcctgtctgtatgttctgcggcgctccggccaccctgctttgtgatggaatcatcggctgggatgccgatgaggacgaacacggacacatgaccagatgtcggggcatgttcacctgcgacgcgccgatgtgccgggactgcgctacatggcatggcaacatcttcatcgatgggaagatccggatgatggatacacgcgacctttgccccctgtgccagaagttacacgaagctggcgaacacatacgcgttgcagaacacagaaagcattctgcattaccgcaaccctgcctgaccaaagagcaggccgcgattattcgtgcagcacattgggctgggttcgctaacagctataccagaagcatagaaatactgaaaggtggcgggcagcaaacctttgatttttga

SEQ ID NO: 391794 - DNA, 714 bp, Salmonella enterica
atgagcactattaccaataacaaactaacagacgaaacgctaaaagcctggaaaattgaggcgatgatttcgctgggggaaacaccgaaagattgccgtgaatactctcaccacgaagcaatattcgcgttagtaacagagctacaggaacgccgcaagactgaggccgagccaattggctatatgaatcgctttacagggcgcgtgttcagtcttgacgaacaaccaggcgctgacactgacactgctgtttatctgccagtttacaccgccccgccagagccggtagtgccggaagtgcttgagcgtttgcgctctattgttgctgacccgcgtgcattacctcgccgtaaagagtggattagcggccagcaatacagctatgttctgctggaaaacgtcgaggctatggtagatgaagcctgccgtgctgccatgcttcagagtaaatatcgcgatctgtcacaaccagcagatcctcagatttccgaatacgagaaaataatgcttcaggctggcaactctccagtaattccggatggttacacacttgtccccgtcgaaccaacggatgaaatgattgttgccgcaatggacagcgatgatgtgacctataacgaaagtgacgatactgttttttatgttcaccattgcgagatatacaaagccatgctcgcagcagcaccgcagccggaggcttcagatggaaagtga

SEQ ID NO: 391795 - DNA, 219 bp, Salmonella enterica
atgacaaaaatattccgtaagaattacccacgccaaagccgggttaaagaggctctatttttccttctctttcttattttaatgattccgatatcaccgatagtcatcctcttgttagcaggagaacaggcagaaaaaatagctgagtggtatagctccatcgtatgggggccatttaacaaactgcacaacaaattaaatccgtacagggaggactaa

SEQ ID NO: 391796 - DNA, 276 bp, Salmonella enterica
atgagcaacatcgaaatctacaacctcgaaagcatctacgacgagcaaattagtccgctaatgcagcagatcatcgctatttgcaaggagcacaacatgccaatggttgcttcattcgcttatgagaattgcgaggaaaaaggacttggttgctgcactacgacgctgacctttgaagggcgcagcattaaagaatttgctgacgcgacttcggtcattcgcgggaatcctcttttttctgcattcacaattatgtcgggagtaaagggccaatga

SEQ ID NO: 391797 - DNA, 609 bp, Salmonella enterica
atgggcaagctgacaactgatggtttaacgatgaatcaactggctgaatgtaacgctgagtatgtgatgactatcgctgagctggaagaaaaatgcgcggcgatgactgcaaagctgagcatgattaacgaccttatggaagccgccgaacaagtaaacaaactggcgcaggaagcagcggaaaagctggttcaggagtgtaatgcgctggctgcggagaatgcggcgctgatggcggcaaaagaaattattcgacatctgaacgttaatcgggaagaagccaatttttgcggtattgatgattgctacatagacgatgcggtggccgcgatgattaccccagccaccgacgctttcctggctgaggtgcaggctagtgctcgtaacgagggcataaactatgccgccagccgtctcgctgccgcattcaatcacggattcctcgataaacctgtatcagaagttctcgacgtgacacgcatgattttatcggcgaaagaggatttaaccaatgacccactactaacggctgatggcctatccggtgagtatgcggagaaggcgatcgaagaatgggccgcccagcttcgcaaaggagccgcgctatga

SEQ ID NO: 391798 - DNA, 321 bp, Salmonella enterica
atgagtattgttaaattaactgtccgccctgtagacgaagaaaaccatcgcgatatatccgttgtcagtatggacaatgaagttatcggttatatctgtcccaactatgaccgtaatcacggagttaagccatacagcgctgtttattgttcaggaaaaactatcggtgacttttccactcacggagaagcagtggtgattacctttaaataccacattgatttccagaattttttaaacacccgaaaaggtttatttgattttcttgatttagttgaaggcttatcaggcgacaccagccagaccgcttctgttcattaa

SEQ ID NO: 391799 - DNA, 276 bp, Salmonella enterica
atgaaagttgattttgaagttaccgcatccagtgtgaccgtgaaggggagtcacgataaaaaacttcgtgttgacgttgaaggtgccgatttaaaagaactcattgagtacgttggtgagcaagatattcttaccggagttggtgaggctaatatagctttctggctttttaatagtggcgcactggacacaaaaaaattccttgataattgcagtcgcgaaaaactggctgaatacctggaaagcaatggctggaaagttgagaggtgtgaataa

SEQ ID NO: 391800 - DNA, 402 bp, Salmonella enterica
atgagagtatttatatcgcttccgtttattatagccttaacaggatgtgtgcaaaaacatgagatattcgagccgttatcaataacctgtctaccctctaacagagtttctgtccgctactatgataatcctgacagaaatatggatgaggcagcttatagagcgaaaatcaaccagattatttcatcaaaaatatacaatccatcgttatataaaggtcagcaatgtacagcaatacttaatgccagtaataagattgcatcgctagaaagtggtgatgtgagaatttgttctgctttgttatacgcaatagcctcttcatcgtttccctccgtacctgccgggattcatgaacaggatacaaatgctttaatgaatatacctgttattgtaaagttttaa

SEQ ID NO: 391801 - DNA, 273 bp, Salmonella enterica
atgaaaattgagtaccaggacggcggcgaaaaatcccggctgattatcaccagcagttttattgggtggagaaaacatatccggctggtggatgaaattctactgcgtgtaccggagctgcgggccgtgagtgagggcttttttatcgtgacaacgactgtcagtggatttgcagccgatgtgctacgggcggaaatgattgttgaaggactgggttacaaagtaactaacaccggaatgatgcataacagttgcgtggaggctgacaaatag

SEQ ID NO: 391802 - DNA, 345 bp, Salmonella enterica
atgaaggatatcaatacaccgccagaggttgtcgagaaaatcaaagcgctcattgaggagcttcacgacgtatgtattaaaaacggcgtaccactggttaccgccgcattagttgggcgtagagcgacaaccagaggggaactgattgacaggttgttctcggttcatctggacatccccgccgacgttacagattcgtccatccttgctgccagtgaggttttacgcatgagagcagtcccggaagcatttattaccgagctggagatgatcaggaaaaagatggaatctgctgaaacctgcaactgccctgaatgccaggctgatcgggcgcgaaaacactga

SEQ ID NO: 391803 - DNA, 276 bp, Salmonella enterica
atgactacatacatcgttcgtattgagcttcgtaactcagaaaacgctgattatgatgaacttcataaaaagttaagatctcacaaattttataactttcacgcttttcctgacgtattgtggttaccaagtgccgaatacataatttcctctactgaaaatattaaacagataggtcatctggctaaatctgtggctgaacaaataaaacccaacccaaggattctggtaaccgaagtaaaaaacttatttcaactcggcctggataaatgctaa

SEQ ID NO: 391804 - DNA, 273 bp, Salmonella enterica
atgaacaacgaactgaaacacgttatcgcccttttgctggaagacgccagacgcctccagcaaattgaaccaaatgccagcacaaaagctcacatatggctggggatgaaagcctttgagtccggcggagaaccaggggcttacagcgatatcacacctttcctttctcgtttgaaaaagcttattggtgaaattgaaaccaccccgacaagcgaggacagtgtggctcgtttcactgctgaattagcatttatccaggccgagttgaaataa

SEQ ID NO: 391805 - DNA, 228 bp, Salmonella enterica
atgcgagtagatgaaatcatcagcttctttgggacggctcaaaaaaccgcggacttttacggaataaccagagaggctgtttatacctggcgtaaacgtccaggtgagcttatcccaagaggaagagccgcagaagctgctgctttttctcatggaaagcttgtttttaattcaaacctttacccaaagcataaaacaaaaaaaacaaaagaggttgaacaacgatga

SEQ ID NO: 391806 - DNA, 651 bp, Salmonella enterica
atggagagcctcggtgtacgtctgaagaaaatcagaaaacagaaggggtttacgcaagtagggcttggaaaactcgttggtgtctctggagtttcagtaggttactgggagaaagacattaacgtaccaggtagcatggtgctaagtaaacttgctaaagttttgggaactacggattcatatctgttacatggaatcaaacaaacgtatgatgtaaaaaacgtaagagtagggaatgaaattccattactttcttgggatgaggccatctccttcttaaatattataggaggagatactgctatggttaaccacaaagaaacaataacgactttcattgaagttaaggaaggtgattttgctgtaaggatgcctgatgatacgatgcttaatccatcaggtgctggggctagtattcccattgggtcaacggtaattttaagacctggagagcattatgataatgggagtattgttgcggtaattgttcctgatcctttatacaaaaaaccatcactaactattaaaaagctagttatcgatgggcagaacatttatctaacacctctaaatccccgttacagttcatctccgttaacatcagattgtaaaattgtagcagtagcaaaaggcgttcagtatagcctatag

SEQ ID NO: 391807 - DNA, 612 bp, Salmonella enterica
atgagaaattattttttattaacggctttttttataccttcagtttttgctgatactacagaattaactgatataaccgccccgcttggtctaaattggggagaaaatgccagcgagctaataaaagataatgaagcatctcaggtttatgaatctggaagaatgaaagtttatgcgttaaaaaacacgccgattaaacttcccggatttgatacagaggttattgttgatgataaatatggtctggtaaaagttattctttctaaggatgtatcagatgatatgactggagctgaagggcttaatatatataaagaatataagaaagttttgagtgaaaagtatggaaagcccgtttcttacgagtatatcgggagaaaactatacacagaatctgatgagttttatcagtgtctaagatatcaaggttgtggatcttatgtctcattttattcaccgattaaagggagtgatgcgggtatatctgtatctttgcaaggaataaaaagagggaacggaaacttaaatattgtttatgaatcaatggggtttgtaaaataccgggacgaacagaaacaggctgaaaagttagatatgcaaaaaggtttgtaa

SEQ ID NO: 391808 - DNA, 258 bp, Salmonella enterica; identical to SEQ ID NO: 391521

SEQ ID NO: 391809 - DNA, 204 bp, Salmonella enterica
atgaatgaaagaaaaagatttatccgtttacctgaagtaataaatagaactggcctttgtaaggcttggatttatcgtctgattagtcgtaatgaatttccggcccaagtaaaacttggtgaaagagcaatagcattcttagagagtgatattgataagtggattgatgaaaagattcatttgtcacgtaataatatcgcttaa

SEQ ID NO: 391810 - DNA, 297 bp, Salmonella enterica
gtgccgtactcgtggtccttagtaaatatcaccagacgacaacagacacaaaaaaagccgcagggcccggttgagtttcaggtcgccgtcaataccctggatggcgcgggtagggttgcgtttgtccagtggtctgactcgtccccgcaccaggttctcctgtacccgctgaaacgtggtccacggaggtattttcttatcctcccggcggcgggcgatcagggcctgcgctttggtaatcggcttgtggccatcaccaaagcggagtcattattccggcccagccagcttgcctga

SEQ ID NO: 391811 - DNA, 408 bp, Salmonella enterica
atggtaactaaagccaagaatcttgatgattttatgaatgagcaaagcattagtgcatcgtattatgttgtatctccaagtaacgtattatctgaggtttttgtatacccatatagtactaacataggacttatgagtgagctcaaaattagtatccctaaagacgctatttcagcagttaccccattgggaataactacagaaattgacttaaaacattatcaagttgttacaataaaattcacgggtgataatgggattatctatgaaaacatttttgaagatttgattaacaatgccacacaaaaaaaacagattgatctcaaaaccaagaatgtatctctagggctacaagacgaatataaaccaatgcgcgattggtgcgggtggcattggccgactagataa

SEQ ID NO: 391812 - DNA, 315 bp, Salmonella enterica
atgaaaagcttttttatttcgttctttattatattatcaggtatatgttctgcccttgcttcccccctcaccgagcgcgaagagctaaccctgtccctcaaccagcttagccaaatcgaagcctcgctccaccgcgcccagcagagcgccagaaccggtatcaacgagcgctactacttcgactatccgcgcatccacagcgatatcaccaccctgcgcagcgggattgaaaattacctcacccccgcccgcgcccagccgcgagatacagcaacgctggtcgggcaatacagtgaggagaaaaccgcgccatga

SEQ ID NO: 391813 - DNA, 954 bp, Salmonella enterica
atgaacgactattcactgcttattggtaacggcatcaataatctctcccacgggcactcttggaatgatgtactagagagtctcaatgataaattttcgataaatgttaatacacaaaacaaaccttttcctctagcatatgaagaaatttactttaacattctcaaaggtaacggtaaaaacaatacagaaagtagagttaaagaatttattgctgaaaagattgcaaaaataaaacctaatgctattcatcaggcgatcaccaacctcgagtgccaaaatataatgacaacaaattacgatcttgcatttgaggattccataattcagaaaacaggatcaacgctgcttcgcaatgcaggaatcatcaaggagcagcgctacaacgtattcaggcatcatatattgggtagcaaaaaaatctggcatatccacggtgacattactgtccctaactcaatcactcttggttatgagcactacagtggtcacctacaaagtatgaggaactatacaatcaccgggagccattataagaaggaagattatgaccaaaagccattaaccagcagactcaagaaaaaaaccatcacaacggaatacagctggatagataattttttcctcagagatatctatatcatcgggttaactttggattttatggaaatagatctttggtggttgttaacttccagagaaagaaatagatttctaaaaaaatcagaaataagcataaataataacatcacttattacttacctgcctgttttctcgactcatctcaatgcccagaggaaaatatcaaacgcctccttgtcaaggtagaactcctcgaaagcgttggtgtacatatcaattcgaattttggtagtgatttcacacaatccaaagagaaggaggaagcattttacctgtcagtgatagcggatattcatagcagacatccataa

SEQ ID NO: 391814 - DNA, 888 bp, Salmonella enterica
atgaacaatcttgatccaaacaatattgaccgactacaagcattaattagccttaaaagaagatgcttatattgggaggaaatgtctaaacatcataccattggtacttttttttctgattttagcgatgaaatcgacttaccattgttattcattatgaatgatgaacttactaattcaaatcacaggattggcataaccgaactcataaacagctgcgtaaaaaataataaatactaccactacttagaattgaaacatggtgataacagcacagcattaattgagaaagatttaaatgacatatacgtctggcaagctgacaaattaatccatatgcttctaacaagattttttataaatattttctccgtatttgaatactgggcatgcaaagcatacgatgcaataaagaacaaacatgcaagcaagaatacaaaactaaaaaaactagaagaacgacttttgagatatgtagaactaacgcaaactggaaacactgatgctcttgacgagttaaaaatggaaattttcacaaagacaaattcctatgtatcatcaagagaaaaaattgatttcattctatccaaaataacttatacgggcctttcagataaaacccaaagaagtaaagctacagagcttgttcatttcttattttcacttagaaacacaatccacaacataggtataaataaatccggcaatgattattcaattgaaatcaacaacacaaaggttgagttaaaaaacaattgcggccccaagttttataattatgcaaagttcatagactcgctacacttactaatagatttatactgtgatttatttatgtatcttggtgatgaatgtccggagtttcaccaggttgtgaacgagttttaa

SEQ ID NO: 391815 - DNA, 684 bp, Salmonella enterica
atgcccgaccatgcgccaccaggcaccgtgcgtcgccccggactgctcggctggatagcattacttcccggcgtgctggctggcttttgcctcggcgcatggatgctggcgatagcgctggagtggttgggtgaggcgtttttctggcagaacacctgcgccagccacagtgaacaggtattgcaggcgacatggcactggtggcagggttccgctggcgcaccagtgtggttagtagaagacctcgtgagtgtcagcgatacgttgcagaaagggagcgcggcgttaattacctcgctcaacggtcaaagcggattgttctggacagaggctgtcgccaaggtgatccgctgcacattactgtctgcgggtaatgttaccctcacctttcttctgcggctggcgattctgttgcaggtgctgccgctgtttgtgctgaccattaccatcggccttgttgacgggttggtacgccgcgacttacggcgattcggcgcaggccatgagtccgggtttgtttatcaccacgccaggcgtatgatcgggtctagcttggcagcgacggtactggtgtggttagcggtaccaattttccttgagccggagtatgtgctgataccaggagctttgggaattgggctggcgttatcagcgactctaggggcgtttaaaaagcatttataa

SEQ ID NO: 391816 - DNA, 609 bp, Salmonella enterica
atgcttaaacgtctggcttacctgatagcaggcagcgccctccttctgctggtagtggcgatgttctggggcttcaaccgcctgaatgccatgacactggctcagcaacagatacaacgccagataacacagtggcgcgaccagccgcagccggacagcgattatcgcgagctggaagctgccgtaaaaaacatcaccaatcgcacggaagcccttgccagacagcttaacgatgccaccagcgctcaggatgcacgacttaaccccatcaatgaacagctcaaagaactgaagggacaaacccaggccctaagcgccagttatcaacacctgcaacaacaaaccgccacgcgcagccgcgcaaaggcaaaacgccccatcccatctccgctttgggccgcaaaggcccctttttctcttattggcagcgagtttcgcgccgggcggcagttcgccatcatcgcgccatccggttatcgctcgctctcacagcttcagcttgtggcctccggcgacagcgtacagggctggcaactgctgcaactggacggcagtcacgccactttccgtaaaggcgggcagcggctgacgctgaacgccggaggataa

SEQ ID NO: 391817 - DNA, 2700 bp, Salmonella enterica
atgataaagggtcccccggtgaaaggttcagaatggaataaatgggatttgcacattcatagtccgatgacgtggcaggccaatggttactccggacagtgtgatatcgaacggtatgtacgccttctcggagaacagcaactatctctcatagctgtgacaaactatttttatttccagcaaaatgagctggaaattatacgggaagaaattgcccgtcaggatctgaatataactgttctgggaaacgttgagttccgtcttgatcagcagaacagggccggtgattttattaatattcatatcctcttttcagataaaatcagcactgagcgtattaatgaagccctgtcccgccttcctctcaggttaactgatggagacagaaaggctatttactgttgcgaaaggagtgtcgctgaaagcggtcatggtgtggatactattgtggtggcattcagtgcactgcttgaacatctcaattcagaactccgaccattcagggattacttggtggcagtatgtcctaatggttatggtggctacagacccgatgctaatggtcgttctgcggctatcgcaactgaaatcgaccgccagggacagattatcttcggcggtaatggcgatcgcgaattctttctgagaacggatcgttatgagggcgcaagcgtcaaaccagtttttctctgctccgatgctcaccaggccgaccatatcggcagtcgttacacttgggtaaaggcactaccgaccttcgaggggcttcgtcaagcgttactggaacctgaagctcgcctcagaataggggacgactggctgacagatctcacgccaaaagcgcatttcagtcagatcgatgttgaaggtactatttttgacggtcaagagatcagcttcaggaaactgtctattcccctcagtcaggatatggtggccatcatcggtggtcggggaaccggtaaaagcctgctgcttgatgccctccgctcccgctttgccggtgcggcagcacggggaagtgagcagcgggaagtgaatgttcagcatctgtcagttgagctggataaggccaatggcgagaaagtgcggtttgatgctcgctcagaagggtatgaatatctgcatgtgtctcagggtgagataaaaaaactctgtcaggagccagggcttatcagtgatgagataaagaaaatgctgagactgacacctgatcatgaggcaggcaatacgggtattcaactggcagaaaacctcagtgcttggcgcgcatatcgccaatttaaccagtaccgaaatgaacatgcggaactggttaatacgcgtgagtttcaggagcatgttgttagggccgctcaggagaagattgaggttctcacaagcgaccgtaataaaacattaattgagacatttcgcgaaaatagagggcgtcagacgttactggttcaggccaaaaataatctaactggcgtgcgtgcgaacattgacaccgcagtgcaggatttgaataccaaaattgatgctatcaattcggataattccacacatgaactaatcccgcacgtggatctgtcagcccagattgatgtcattgtacgcagaattcaggcagtacaggagcagatggcacaacttgagcatgataacgaacagattatcgtctctttccgagagcaggggctgggacaggatatatcggggttgctggaaaaagttcatgaatatcagagacaaacagaactggcggaaaatcaactgcaggaaatagatcgtcaggagtcgcagtaccgcgacgggctggagcaacgaactaggctggttgctgaatttattgatggattactgtcccgacagggcattatcgatacggcttttgcttcccttaccacaaaacctcatctgacatcggaacagcaggcactgatacaggatattctgacagatatccggatttatggtcagcctcactttgatataaccgccttttacaacggaatgctcaattgcctgaatcggggaagattcagagcgtccggtgagcagacttcagttgacaggttgcgtgatgtgttcagagttagcagcatcgatgagctcagggcgttacaggcaaatgaagctatgctgattcttccggaatgtccggacagaaaactcactttggaggagtttttctggcgtgacgaatactttaacagtcaggggccatatgcactcctcagttatctatacagcccggagtatatccagcactatctaaacgtcagggctgagtttgaatataaaggtaaaaccgtcgaaaaactgtcggccggtcagaggggaaccttctatgtttgccttaaactggcgacggacgccttcgggtcgccgtttgtttttgatcagccagaagatgacctggacaatgatttcatcatgcacaatctggtacctctgttcagaaaaattaagcagtatcgacaggtcattatagtgactcataacgctaacctagtggttaactgtgatgctgagcaggtcatcattgccacgaacaatgatgaagttatcagttaccggagtggggcattggaatatggtgatcatggtgcagcaaacagcatgcgcaaagctatatgcgacgtgcttgaaggtggtcgtcatgcgttcgaagcacgtgagcaaaaatatggcatgttgtggctgaacaccatataa

SEQ ID NO: 391818 - DNA, 297 bp, Salmonella enterica
atgaacactgtttatccgttgaaaaccttgaatcagttacgtccattgttggttggctttcgcaaagctaatggactaacacaaaaagaggtttctgaaaggttgggggttacacagcaaacctatgcccgactggaagcgaatcctgccagcgccagtattgaacggttgttcaaggtatttaccgtgctgggcgttgaaatggtgctctcttctggaccagcttcaataatcataaagccgacggaagtaccagataatcaggtaaattcacctgccagacgggaaaaatggtga

SEQ ID NO: 391819 - DNA, 150 bp, Salmonella enterica
atgcggctaaaaataaaagagcacattacgctctggagaaatgaaggtttaattgcttatgtcatcctgggatttctatgtactttttttatggaggtcaagccctattaccatactatcttcagcaaagtatatttttcgaaacgctga

SEQ ID NO: 391820 - DNA, 1458 bp, Salmonella enterica
atgagtgcggggaaattgccagaggggtgggtacaagccgttcttggcgactatctatatcttaaaaatggttttgcatttaaaagtactgaatatgtcactcctggggcccattcatacccagtaattagaatttctgacttagacggtacatgtgccactgatagttctgcggtccatgttcttcagggcgctgaaggtttcactatcgaaaagggcgatttgcttatcgccatgtcaggggccacaacaggaaaaataggaatatacgcaggtaatattcctgcatatcaaaaccaacgcgttgggaatattaaattacgttcatctaaatatggcgatgaaaaatatagaaactatttaattacatccgcatcaaaaacaattctagatgaagcttacggcggagcacaacccaacatatccggaaaaagtatagaagcgttatccttccatctcgcgcctcttgccgaacaaaaaatcatcgctgaaaaactcgatacgctgctggcacaggtagacagcaccaaagcccgtcttaagcaaatcccgcaaatcctgaaacgttttcgtcaggcggttttagctgcggcagcaagtggacgcttaacaaataaatggagagagaactatactccaaaagaagaaataaatttaatagcaagtaaatataagccgaccgatagcctttttaaacaagctaaactctctcttccagaaatacctcaaagctggtacgtagttccatctgcccatttaatagactatgtcaccagtggttcaagaggttgggcaaattattattctaccgaaggcgctctctttcttcgaatgagtaatgttcgttacaacacgacaagactagatctacaagatttgcaatttgtaaatcttcctggtcatgtagaaggtaagcgctcacttgtcaaaattgatgacttgattatatctcttaccgcggatgttgggcgcgttgccagaatagataaagacttaggggaggcatatattaatcaacatcttgcattattaagaccaactaataatattaactccgaatactttgccttgtgtattgcggcacagaatataggtgtaaaacagattcaatcacttaaaagaggggcaaccaaagttggtcttggcctagacgatatacgcagtttagcaattccacttcccccattccctgaacaactcgaaatcgtccgccgtgtcgaacaactcttcgcctgggccgacaccattgaaaagcaggtcaacaacgccctgacccgcgtcaacaacctcacccagtcgatcctggcgaaggccttccgcggcgagctgaccgcccagtggcgttcggaaaacccggatctgatcagcggtgaaaacagcgctgccgcgctgctggaaaaaatcaaggccgaacgcgccaccagcgacggtaaaaaaacctcgcgtaaaaagtcctga

SEQ ID NO: 391821 - DNA, 123 bp, Salmonella enterica
atgagcgagcaagatgtctatttaattaaaaacgaatccggtgccgataaatgcccatcaggcaaactggcactttataccaatgtcgattttaacgggggggggaaatgggtgacatcttaa

SEQ ID NO: 391822 - DNA, 384 bp, Salmonella enterica
atgggtgacatcttaattatctcaccgaatgttgctcttactaaacaagacctggaaggttatggttttatcgtgggtgaacatgatggtgtttcttccgttgttaataatatggatcaagacgccacgctggtttccggtttgtaccttgacggagctactttgaccgtttcgccggggctccgcatatcctctcttattgattttcctttggcgacaggaaactggaacgatgaggtgaactccgttgtttccgcaggcacccgcaacgttgatttaagcatgagtatcgaaagtgaaattgttctggaggagggagaagaatattctgcactactgcaaatccataacaataccagtgaagctgtggaaggagtgacttga

SEQ ID NO: 391823 - DNA, 231 bp, Salmonella enterica
atgctgtttgaacgtgaaaaaatgcttgcggtgatggaaaccatgctgggttcactggaaagtgatgaggtgacggttacccgctgccggcaggtactgacgctctggataaccgggctggatgcactggcccgtgaacgtaacagcagtgagctgctgccgagggtacacccccacagcagcggacagaccgatcagttgctgagtggtgatattcggccgctgcaatag

SEQ ID NO: 391824 - DNA, 810 bp, Salmonella enterica
atgggaaaaataccgacgcatccattccctgataaatccggagacggaaataacgtgaaaaatcagtttttagttgtaagcttttttattttttcagggctgatcatatctcctgctgttatggcggagcgaaattcggtacctcattctgacggggtaggcactggcgcaacccgcgtggtttatccgtccggcagtaaacatgttaccctgagcgttaataatacagccgaccatccttttcttgttgaatccgttgtgctggatgaaagtatgcagcaggaagccccttttattatcacgcctcctctttttcgtctcgacggtgggcagcgtaatacgctgagaattatgcgtacaggtggacatttccctgcagaccgcgaatccattaactggatttgtgtgaagccaattcctccggagcctgactctacacgggatgaaggcgaaaaagatagtgtcggcagagataacctttccgtgactacccgcctgctgtcaggaatctgtatcaagctgtttttccgccctgagattgtacacggcaattcgctggatatggctgacaaagtcacctggacaattaaaggaaagacggtcacggccagtaatccaacacacttctatatgaatatcagctgggcctccgttaacgggaaaaaactgaaaatggacaaaacatatatcccgccgttttctgaagaaaaatatcccttaccggaaggtgttgtaaaaaacaacgcgattagctggtcagttgtgggggattatggtgaggaaaagaaaatattatccattctgaattaa

SEQ ID NO: 391825 - DNA, 2508 bp, Salmonella enterica
gtgaaacattccatactggcgttatatatcagcgctgcgttattaccagcatctgcccgaacttacacttttgatgcctcgctgattggtgacagcaaaaagaatgtggatatttctctctttaatgaaggactgcaactgccgggtacctacaacgtcaccatcaaggtgaacgaaaataccgttgacagcgacgtgcctgtggtatttctcctggccagtgaccggaaaaagcgttcactgcagccctgcctgacgacggcgcaactgacccgttacggggtggatgtcagcaaatatccggggctgtccgcagacgtcgcctgtactgacctgaatcttatcccgcagaccacggcagattttgattttaaccgccagcagctgtctctgatgtttcctccccaagccatgctgccggttctgaagggcattgccccggagtcactttgggacgacggaatacccgcactgatacttggctgggatgcgagtacacagcacactgaataccacggagcatggtctggccgttcggatgcgaattatgttcgcctgcagccgggcatcaatttgggaccctggcggttacgcaacgcctccacctggcagaaaagcagcaaccggccgggcgagtggcaaagtgcatacacgtatgccgagcgtggaattaatgccatgaaaagccggctgacgctcggggagagttacacccccgggagcgtatctgacagtatccccttccggggcgtaatgctggcctcggatgaaagtatggtgccttacgaccagcgggagtttgcgcctgtggtaagaggtatagcccgcacccaggcccgggtggaagtcagacagaacggttacaccatgagcaccaccatcgtacctgccggcccgtttgaaatcactgacctgccctccaccggcagcagcggtgacctgatggtcagggtgatcgaaagtgacggctcactgcaggaattcactgtgccttttaacacgccggcggtggcactgcgccaggggtacctgaagtacagtgtaactggcggtcagtaccgttcctcatcagataatgtgaaacacacaccggtgatgtcggctgagctgatatacggcctgccgtggaacctgacagcctttggtagctttcaggcagcagatcattatcagtctggttcagcggggctgggactcatgctgggagcatggggcgcaatgtcagtggatatgacgcaggcacactcacagcattattcacaggactcgcagaatggtcagcgctggcgaatacgctacagcaaggcgctgaacacggggacatccctgaacatgaccagcgaggaatatgccacagacggatacagtgggctggcggacaccctgaacacctggtgcgacggtcaccgcggatgcagatataacccgagcggttcatataccctgcgtcagaagaaccggaccagtgtgtatctgagccagtcgctgggcagcacgggttatctcagtctgaacggctcccgacagacataccacaacgaccgtagcggcaacagctcatggggcgcgggatacaacaccccgctgtggggacgggcttatctgaacctgaactggtcccgcaaccaaagtactgaccgccacggacggaccacgaatgacacaatgaccagcctgtatgtgagtctgccactgggcagcgtgtcatcggtggttcctgtatatgccacatatcagatgaacaaccggactcatggtgacacatcccatgaactggggatgcacggcgacacgctggaacgccgcctgcactgggatgtgcgtgagcgttaccgcgacggagccggagacgacagaaccagcagcgcactgtacctggattacctcggggcttacggagaaatgacaggaaactacagtcacagccggtacagctcgctgatgggggctggactgaaaagtacgctggttgtgacccgtgacggtgtgacatcaggtcagccatcgggcgacacactggccctggttgaaacgccgggcgtatcgggtaccccggtgggaggctggacgggagtgagaacggacttccggggatacacgacgctgggttacctgacaccgtaccagaaaaacgagataagtctggatccatccacgctgccggatgatacggcggtatcactatccacggtgtcggtggtaccgacaaagggcgcggtggtgaaagcggctttcagtacgtcggtgggtaaacgcgtgttgctgacactgacccgcagtgacggaatgccggtgccgtttggttctgtagtcactgtggaagggaatgataacagtacaggcattaccggaaacaagggccgggtgtatctgaccgggatgccggataaggggaaggtgacggttctctgggggcacggacaatctcagaactgtgccgcagaaatccagatatccgatgaggccggacctgccgggctgtatatgtcgcaggcgttgtgccattaa

SEQ ID NO: 391826 - DNA, 492 bp, Salmonella enterica
atgagtggattacctcgaataataactatctgcgcgctcctccttggcaccgcagtgtccggtgcgtcggcgtctgttaccgccggtaaccctgaaccggcagtagccaaaagagtactacaaaatacggaccccacagacgttgcagttactgcacctgccgtcgcgtctacagtgagagtacacccggtcgtattgccagcggccggaaattccgggttaatcgcagcctgggacgtaattccggttgccggaaattgggtatgcacttcgggtagcatatggactccggaactggcggtgggggccgggaatacagcaggcgtgcaattatcgatgaccgatacagcccccagactggcagataacgtttctggttcagggtttgtgtgtggtacagctggcgaaactgtctacctgggagtcggttaccgggccttgaaggctggttcatacaaagccacagggtacttctatacggttgctccctga

SEQ ID NO: 391827 - DNA, 177 bp, Salmonella enterica
atggtgcccctgatcgttcgaaaaatgaaccagatgaataataaaaggtataccgaccggggttatggcctgaatcatccggcagtgaaaatattcatacccggaaacttatggggtaaacaggttaatgcctgcagaagaaaaaaatcaactacccgcgatgctgatgaaagctga

SEQ ID NO: 391828 - DNA, 420 bp, Salmonella enterica
atgcgtcttgaggatgcggtgtacggcggcgagatgagcgcgcatcactattttcgcgattttgcttactgcgacagcgggatgatcccgtggttgctggtggcggagctggtgtgcctgaagggacagtcgctgggtgaactggtccgcgaccggatggcggcattcccggcgagcggggaaatcaacagcaggctggcggagccggcggcggccatcgcgcgggtggaagcgtacttcgcggaagaggcgcaggcggtggaccgcacggacggcctcagcatgtcgttcgccgactggcgtttcaacctgcgctcgtcgaacaccgaaccggtggtgcgcctgaatgtggaatccaaagcaaatacagaattgatggaagagaaaacgcaagcaatcctgacattattacggaaatag

SEQ ID NO: 391829 - DNA, 564 bp, Salmonella enterica
atgaaaaaacaggaagtattgattattgaatcacgtagtgatcaggatatttatgatggtagaggtgaaggagaaacattaaagcgtatacttcaattacaaggtgtcaatgccaaaagcattgaggctattaatgagaaaatgctcattaaagcgttaaaagtcgctcaaagagaaaatataaaatatgtctacattagtgctcatggatatgatagaggctttgctctaacagatgatgctattattacatggcgagatttagatcgacttgcctggccgatattaagagggaaatgcatttgtttctcaagttgctctgttggtaatggcgcagaagagttatttaccctacacacatcattctgcaatgcgattattgccccaacaagagatattagctggggggaaggcttggtggcatattctgcgttttaccatcgagcacaattacgcgaaaaatcatctatccagaatgtaaaagtaatgaaccatattgttggtgctggaacgttcagggttattgaatctccctatgtatcccatacatatacaattggttga

SEQ ID NO: 391830 - DNA, 381 bp, Salmonella enterica
atggcccagttaccctcagatagtgcagacaaacaggtaggccaacgcattcaaatgcgtcgtaaagagctggggatgacagcccagcacttagcggagcttgtggatatatcccaccaacagctttcgcgttatgaacgtggaacaaacaagatcaacgtagcccatctcgtgaacatcgcggttaagctcaacacaccgattagctggtttttcattgattgtttctcgacgtttgaaaatgacgcccaaaaacaacaggatttcgcacctgtaaaagatgcagacttgaagagtcgacttgataacatatggcctcgcttaacacatgagcagaggcgcatattgattatgtttcttgataaatacaccaaacaataa

SEQ ID NO: 391831 - DNA, 519 bp, Salmonella enterica
atggcaaaaatggaaaagcgtttggaagatgatgaagtggcagcccgaaaacagagagacaaagattatcaaaatagacgtcaggaacgactgaaagaattaggcgagaaaaaaatatcaattaggattgataatgatgcctatgaaaaattggcagacttatgtgaaagtttggggcataaaagaccagtgccgggaatgcataaccttatagaaagttattctgctgccttagtttatttgcttcgtcttgaaaagatacagcagttgtatcagcctcaatcacaggcatcaaaagaattatacgatttatataagacagttgatcattttaaaaatgatctaggactttctgattctcaaataatcagtagcatgaaggaaagaaaaattcgacatccacgtgcagtatttaatggtgaggacacatataactggaaggaaatacatattaagaaattgttgaataagaagcttcttcttaaacggctatctatattagatgaagaagataaataa

SEQ ID NO: 391832 - DNA, 231 bp, Salmonella enterica
atgcacacctcacgcttgatcaaactgaaaaccgtccttgaatactgtgccttctcacgagcaaccctctatcgccagataaaagcaggccacttccctgagcctgtacgccttacaggtggaatagctactacaaacgaatcctcgcgtgctgttgcatggcgagaagaggaaatactgcaatggattgccaatcgtcaaaaagtgtcgttagcagaagccaaaatttga

SEQ ID NO: 391833 - DNA, 1068 bp, Salmonella enterica
atgttattacacagaagcaacatagatatatgccaatctttaaatatcggtaacgataatgacgggcataacctaagaataagaattgataagttaactgtagttagtgattttcttcctgaagaggaagaaaaggaagcgtatagtaaactggaaaaaatgaatcagtggagtgaaaggaaatatcgagttgaatacattaaaaacaaaaaggaaaaaccttatcgtaaatcactaaatatatacagtagaaagaaaaactccccagttctattgcacattgattatgttccgaagcatcctaatacaggagggctacgtttggattttaatcctcaacatatgacgaaagtaaaaatagatgaattagtatcatggataaatggcaacttaggtgagatattttatcggctacttgttcgagcatgggttacaagaattgatgtagctcttgatgtatataactgcaagctagatgattacctatggggattaaaaaacgcagggaagagcacgtattacgatactgaaaatggattacctggggttagaataggcagcaatcgcgctcttctacatattcattgttatgaaaaagttaatgcacgccgtgacagaaaactcattctgaaggatcgtgccaaacttattaatatcaatatggatgagcataagcgcttcttgcgtatcgaagctcgatacaagccaggcgctaaaccaaccagtaagaaaaaggatgccttgatgctgtcccaactcctggagatggagaacccgttcaagcgacttcaaatctactctaacagcttaggagaggagttacttactagagggtgtcttactaccctcccaaaagaccccagcgcaatagcgctgaaagccagcctcagacaacagctagggcgttcacgcttgactgccttacttgctagacataaaacagtgcttttcgatgaacgtgagatctggaatctgtggccacgctgcgttgagcaattaagcagcatatacaacatagcatctgcttacggtgtacttaagggtgtagctaatcgaaaagacgattag

SEQ ID NO: 391834 - DNA, 2076 bp, Salmonella enterica
atgacaacaaacaggacttttgaaatcagatcagggtacagccatacgcttggcgcgaattatgacggcgaaggcgtgaatttcgctattttttccgcccatgcggaacgcgtcgagctttgtctttacgatccgagcggggaacatgaaatcgctcgtctggagttaccggaatataccgacgaaatatggcacggctatgtcccgaatttgcagcccggcacgctgtatgggtaccgcgtttacggtccttatgacccggaaaatggtcatcgttttaaccccaataagctgcttattgacccttatgcccgtgagctggtgggcgatattcactggaacgatgcgcatttcgcgtatcaattactccatgacgataaagatttgacctttgatgaccaggatagcgcgccatttacgcctaaatgccgggtgattgatccggctgaggctaactgggaggacagccaacggccttccataccgtggtcgaacgccattatttatgaaacgcatgtaaaaggctttacccagcttaattccgcgatccctgagcctctacgcggtacgtttgagggtatggggcataaagccagcgtggattacattaaaagcttgggtattacctccgtcgagcttttacccgttcactggttcccggacgatcagcatctgctcgataaaggtttgaaaaatttctggggatacaactcgcttggcttttttgcgccggcgacgcgctactatggtccaaaaggtattcagggattccgcgatatggtgcgcgctttccatgatgccggtgtcgaagtgatactggacgtggtctataaccatacggcagaagggaatgagcttggccccacgctgtcatttaaaggtatcgataacttttcttactatcgcactatgcccgatcagcatcgctattacattaacgatacagggacaggtaataccgtcaatacctctcatccgcgggtactgcaaatggtgatggattcccttcgctattggacggagtcaatgcatgtcgacggttttcgttttgatttgggcaccattcttggacgtgagccggaaggctttgatcagcgaggcggcttttttgatgcggtaacgcaagacccggtgctggcaaaactgaaactgattggcgaaccctgggatatcggaccgggcggctatcaggttggcggttttccaccggggtggggcgaatggaatgataaataccgggatacggtacgcgaatactggaaaggtgacaatgtcacaaatgattttgccgcacgcctgctggggtccggcgatctctacgatttgcgcggccgtcgcccctggtcaagcgtaaactttatcaccgcccatgatggcttcactctgaacgatctggtgtcttataacgacaaacataatgaagccaatggcgaagataataatgacgggcataatgataaccgctcctgtaactatggcgcagaagggccaaccgacgatgaaggcatcaatgcgatacgcgagcgacagaaacgcaatttcctgaccaccttgcttttctcgcacggcacgccgatgttattagcgggcgatgagtttggtcgcagtcagatgggcaataacaatggctactgtcaggatagtgaaatatcgtgggtccactgggataatttgccggaaaccgccaatgcgctacgggagtttacccgtcatctgattcaactgcgcgccacgcagccgttgctgcgtcgggagagctggcgtgacggtctggagatccgctggtttaacgccgggggaggaccgcagcaatccgaacaatgggatgagggatcgacgataggcgtatgcattagtcgtcccgatctccagccggaagcggggatctggcatgacgccttactgcttttcaatccgtttgaaggcagcgtaccgttccgtattccgatgtggggagagggcggctgggtgcttgagctgacgactgacgatgacgcgcagcagggaatgcggattaccgaagagatagatttcgatctggccgggcgcagcatcgtgttattcagacgcccctga

SEQ ID NO: 391835 - DNA, 1008 bp, Salmonella enterica
atggcgacaataaaggatgttgcatccctggccggtgtatcaaccgcgactgtatcacgcgtcattaaccagactgcgtgggttgaacccgtcacgcgcgaacgtgtagagaaagccatgcgcgatctcaattatcgccgaaacgccgccgctatcgcactggcgaaacgcagcggcgatatgctcggattgttaaccggcaatctggccgatcctttttttgcccgccttgctcgcggcgtagaagatgtttctcgtaaacagcagtatcgcctgatggtatgtagcggcggccacgatgaagacatggaaaaagcgggactggatttcctggttaatcaaggctgtgaggctatcgtagtacacgccagtcgattagcggataaagagctgctgcgctacgcagcccactttccggcgctggttgttgttaatcgttatatcgctggtatggccaaccgctgtatctggctggaaaatcgcagcgccgccagggaagcgacccggtatcttttagcgaacgggcatcggcgcattgcctgtgtgacatctgacttgcccattatcgatcgtcaggaacgtcttgatggttatcgtcaggcgctggaagaatatggtatttcgccagatccctgctgggtgattagcgttccgtttaacgaagaaggcggtgagcgggccgcacatcagcttattaatagcgggcttccccttacggcggcggtcacgtttaacgatgttatggccgctggcattatgcgtattcttcatcaacgcggcgttcaccttccgcaacagctctctattgtcggctttgatgatgtggtgctggcccggtatctttatccggcgttaacaacaatgcattatccggtcgaacaaatggcgcgttgtgccgcgcaactggcgatacagttataccagggcattacgccgccgcccagcagtaaccgtttcaatgctgaactggtgatccgagattctgtcgcgccctatttttcacgttga

SEQ ID NO: 391836 - DNA, 981 bp, Salmonella enterica
atggaagataaagattacactgaaattagagagttttggaaaaatgaaatcatagcatttcttgcgttgacctgcttaaaaggtgttggttattggactctccgtaaaatatacgaatccaaactagggtttaaaaatcttttaaaagctagttcagctgatgctttggctgggtatctaagggttgcgttacccaaagatatcgcgtgggaggaatttcaacaaaagttgtgggcgaaaggattagaacgagcgagagaattaaataaaaaaggaattgttctaaccttttttgatcaacctactttcccaactaatttaaagaatataagtgatcctcctttttggctttttgttcatgggaatcaagatattcttaataagaaatcaattgcaatcgttggtacgcgaaagccaacagatgatggcatttttctggttaaactaattgtatctgggttgtatgaaaaagatatagttactgtaagtggtttagctactgggattgaccaatcatgccattatgaatctattcgttatgggatacctacaattgcagtgttaggtaacgggatttttgtagaatatcccaagggctctaaaaatctctacaatcaaatagttttaagcggaggtgcaattgtcactgaatatttgcctgaccaaatttatagcgctgaaaattttgtaagacgcaatagaattcaagctgcgctgtgcacatctcttattcctgtggagtggaagataaaaagcggtactgctcacacagttgaatatgcttataaatattcgaagaaaattgctaatccgtacttacctaatacatataatttaagaccggaattgagcttttcagaggaaaatcgaaaatctttatcttttctaatgccaactgaattgaaagaaatgatggattatatttttagtgaagatttaaatctgagagcagaaccaacacagcagagcttagatctctaa

SEQ ID NO: 391837 - DNA, 450 bp, Salmonella enterica
atgaatcaaataatcggacaagtcaaatctgatgttgtttttcataggggttcctcattcaaacattctattttttgcattcctttaaaaccagcaccactattttatataaaaatcatcacgaagtacgcttcttttaacgattacatcagatctccccctccttttgcatcaacttacgtatccctgaaatggcgaggcctggctgaatccacccgaggttcctcgctgaaaacctcatcccgggataagctcaaccgtccttccctgccgccgccctttcgccgaaaaaacgataatgggcataaatataccgcaataagctatacccatactctttgcattgtttatcccggtcaatcagatacgcttttttcacattatttctggcgatatacgccagtgcaaagtgaatcgggattgttttcgcgctcgcgcgtaacacgatga

SEQ ID NO: 391838 - DNA, 171 bp, Salmonella enterica
atggtgacgcgggtagagcgtctggcgcgcagcatccgggatttgcaggataccgtttacaccctgaatcagcgggggatcaccctgagggccacagagcagccggtggataccaggagtgctgccggcaaggctttcctcgatatgctgggggtgttcgctgaattttaa

SEQ ID NO: 391839 - DNA, 153 bp, Salmonella enterica
atgaatcggaagcaggcgtcatcacagttccctctatattaccggacggtcctggcacttgcgatagcggttgcactgggcggtggtaccgcaagtgccggggaaaaactggacatgtcatttattcaggggggggggcgatatggaccctga

SEQ ID NO: 391840 - DNA, 783 bp, Salmonella enterica
atgaaaaaaacattgattgcactggttgtggcagcatcggcagcagtatccggctcagctatagcatggactgcaaatggtaatggtgggactgttgactttggtggtacactgactccagaagtagaaggaaatccatgggaagtaaagatcggtagtgcggttagtggtttggatattaatattcagcaaggagtggattcagttactattcctgctaaggagaatatttcactgctgggtattcgcactcgaactaatgaagcatttaggcctcaaagtggaattattccacaaattgattatggtgatagcgttgatttaagatctggtgaatggggtaaggttgtgctcactctaccggtattaaattcagactcccaaaaaattggcactctccaaacatccatgcaggttggtggcggtctatctataaaaggttccgataataatgcagatggtgtttattcattgtcagctgaaaaatggggatatgctttccatggtggcctacctctacggcagaatattggtggggcaaacaatattactaaatattttgatggtgaagttaacaggaattttaccactcagggtcaaccagaaaactttgagagatttaaatccaccgtatttaatgatgggggggccagctatagcgcattttatgcatctggcattgcgcaacaagaggatattcgtattactcttgaatctccagtaagtagtaacgctcccattacatggaaagcatctatgccaattactgtttcttatcggtaa

SEQ ID NO: 391841 - DNA, 450 bp, Salmonella enterica
atgccctggttgtgctggaggatagtttcgagtttatcgagtgccttgacgatcctcgattccggcgagacggcatgctcgtattcctgccagagtgacagaatttccttcctttgcttttcaccaagagaatgtgttagatgcaacagggctgctttctcctgttcgctcttatccggatgcaattctcgttcgacagcaggaatatcaccatggattgaaaatccccgtgtccttggttcgattccgagtccgggcaccactattctaaagaacccgctcaaaaggcgggtttttgcttttctgcatccagactcttcatcgaacgaattcgatcattcgcaaaatttcacttatccacttcttccccaacaaacgcttactcagcctatcaaagcgcgttcagcacttccacctttaccgtttttatcgcctgtttcatctgtttaa

SEQ ID NO: 391842 - DNA, 1230 bp, Salmonella enterica
atgctggccggatgtacgcaatcaccggcggtatcttctgcctatgatgcggcattcagcggcagccttaaaccggctatgccggcagatatctggcagggttcaccggaggtgacccgcgaaggacgctacacgctggtcagcgtgaaaagtgctaatgcccagcgtgagcccctgaatcagctgattgatatcaccatgccggggtcgctggtaaacagtgtgggggacggctttcgttacctgctgttccagtccggctattccctgtgtggtcgttacggtgctgacttttcggagctgctgaaccggccactgccggccgtccagcggcatctggggcctgtccgtctgagcgaagcgctgcaggtggtggcgggacctgcctggcgcatgaccgtggatgaagtgaaccgtgaggtctgctttgtgatgcgggatgcttatctggtacaggcgcgtccggcgtcttcaccggttacagctgcgccgaccgtatctgcctccgctgcgggagtctcttctgccggtgtgcagacgcggccgggtgagacgcatcctcttccggcggtgccggcactcacggcttccggtacggggggcaagggcacagtgaaaactgcgccagtgtcgacgccgttttccactgcggcaatgaacctgatggtcacgagaggcgggcacgccgctgcttccccgttgctgacaccagcaacaacaaacaataaatccccggctgctgtggtcgtgtccgaagcaacatctccgggcgccacgtctacgccttccacggcaactaccgcaatcgggcgtaatccgttcaacggaaaacacctgagtggcaaaaccacggcacccacgtctgtcgtatcaacggcgtcaccatcccctgcacctgcattagccaccccggcacggaaactgatcggcaccccggtgaaggcgctgccgtccggtccggaatggaaggcggctgccggtatcaccctgcaggagtcactgaccgcctgggcggctaaggccgactgcccgaacggcggtcactgggtggttatctggcagacccctgtggattaccgcattgaggcgccgctgacattccgcggcagttttgaatcggcgctggatcaggtgtttgacctgtaccgtccggctgaaaaacgcctctatgccgaagcgaaccgggcgcagtgcctggtgtcggtgactggccggccggtggaccgctga

SEQ ID NO: 391843 - DNA, 642 bp, Salmonella enterica
atgccggtaagaaataaggcagccatggctgcagtcagcaccactgcggtactggtactgctggttccgttgctgacgggtggcgtgcgggtgcaggcggcagaaaacgttccgtcgttcgcgccggcggaggctaccaccccggtcgcagaagagacggtgcagccggaaagttccgttccaccgacacaggtatcagtgactgacgatatgccgccggctgcaccgccgggcagtatcacgctggggatgctggaggatgttcagcagaaaaacctgctgctggcggcaaaggttcagaccgcgcaactgcagcgccagttggaagaagcgggcagcgacgcacaggcagtggttacccccgcgtcgtcagccgcggggctggcttcttccgctccgggaacgggacagccggacaacctggtggcaccgcggatgaaagacgcgggagcagcccggccgcaggtgctgaaaatcagcggaaagggcagcgcgctgtatgccgtgctgcagatgccggacggctcccggccggaggtgacccgcggcagcagggtgaccatcgggaaggccacgctgacggtcagccgggtctcactgagcggcatcacgctcagcgacggttctgcgctgccgttctga

SEQ ID NO: 391844 - DNA, 417 bp, Salmonella enterica
atgaccaggggaaatcagtatcaggacgaggacagcggggttctgctgtaccacaacccggaaacccgcgaaacggagatcctgattgatgagcaccgccgcaaccagagcgccgttcagacgttggtgatgcggctgctgggcgagcatgcccgctcttccacccggtttgtgtcccgttcggtgctgcagaactgccggcaggcgcaggtccgacaggccgcgtcgaacgagccgggcttgtccctgaaagacctggcggacgtcagccagcgccaggctgaggtactcggatattttcagaccgcgcgccagatcggcagctccgatattcatgtgacaaccagccccgggctgacccggattgaaatgcgggttcacggtgacctggtgacggtggccgaactgggggagtag

SEQ ID NO: 391845 - DNA, 261 bp, Salmonella enterica
gtgcggatgttacagggaatgcagacagtgccggcggtgacagtgatgctgatgtcgctggcgtcattctccgcgcaggcgttctgctttgaggcggcgggggtgaagtacggcatttctgcgcgccttcttgaggcgatagcccgtggtgaaagccatcttgacccgcatgccatcaatttcaaccgggataaaaaaggtcgggtgaagagcacggattacgggctgatgcagattaattcagcccatatcctgaactga

SEQ ID NO: 391846 - DNA, 1326 bp, Salmonella enterica
atgaaaagtgaacgacgtattacgggaccggacagcggttttgccatgatgagcgtggcggtcgcgctgctgatagtgatgatgatggccacgatggcgtccgggtatatgtctgactatctgaagtcccggcagtggcaactgatggcggcacagacaaaccggttcacccaggcggtggagtcctatgccgggcgttattacatcagtgccctggcgtcggccaccaccacccggccggtgaccataacggcgcagatgctgaaaaacaccggatttttaccggcgggattccgggagaccaacagcaacgggcagcagcttaaagcgctgctgatacggaatgctcagcatgcggaggtactgcaggggctggttatcaccatgggcgggcagccactgccttataaggcgctgcgccagatatctctggatatcagttcgggactcggggggtatatccgtgacggccggacggcgacaggcgccatgaacagctgggcagtgccactggcggggtttggaaccagcggcggtaacggtcatatcgctgttctgctgaacccggaaacactgacgggagcacgtgaagatagcgacaggctgtaccgctttcaggttaatggtcgtccggaactgaataaaatgcacacctcgatagatatgggaggtaacaaccttaacagtacaggtgtggtgaacgggagatacggtaactttgacgtcagcgtggtgagtaatggcccggtgacggcaggaggcgatattcgcagtacaggtgggtggattatctcgcgtcatggccgtggctggatggatgagtcacacggcggcggattttacatgacggataatgaatggatccgcagcctgaataacaagagtatttacacaggtggacagttaaaaggtggttcactccggtctgacagtgacctctctgcggggggagtgttaaagctcgatcagacgagttatgcaggcacctggtgtccgcaaaacggggcgataagccacgacagctccggggggatactttcgtgtcagtccggtgtgtggatatcgagtggtaagttatctttgtttgaaatggtcagtggtaacaatgcatgtggtcgtttcgtcaactcgattgcatactgtccgacaggaaaacagttgatttccgggggatatgttctctcaaaatggtcaggtggccatggctggaacagccctgatctgtcgatgccttcgccatctgaaaatgcctggaaaatatataccggagggggtgtttctggcgggacttgtatgcaggcaatctcatggtgtgccagtaattag

SEQ ID NO: 391847 - DNA, 288 bp, Salmonella enterica
atggccgggcagcgcttttcatgtggttcgtatccccaactggcgcgtgcttatcctggctgcgttttacccgatctgaggggggtatttattcgtggactggataacgaacgcgggctggatccagaacgcgctattctcagtttccaggcagaccagagcaatatgatcgccagttacggtggggcattacgcgggcatcacagaggcatgacctattactacccgggagggcaggaagtacggcctaaaaacgtggcattcaactacattgttaaatcgggttaa

SEQ ID NO: 391848 - DNA, 138 bp, Salmonella enterica
atgagacttaaatattccacggcggaggtggtggagaagggagaggacggggtgctgtttgacagcatgccgaagtcggcgccggtgacgggccggacgcagtgggtgctgctgcagcaactgataaactatggctga

SEQ ID NO: 391849 - DNA, 138 bp, Salmonella enterica
atgcatgctaacgccttaaacagcgattgcactaaaacgaagaaagagcggctgaaccgtatgctggaagaaatgtttgaagaggctgatatgtggctggtgtctgatttcccgacagttcgccaggttggactgtaa

SEQ ID NO: 391850 - DNA, 1131 bp, Salmonella enterica
atgaacaaaagaatagaatctttacaggctctacgtggaatagccgcaattttggttatgttgtttcactaccgcttttaccttagaggtcaggatgaaagcggcacaaccatttgggatgcgttatttggatggggaattatcggtgttgatattttctttatcattagtggatttataatggtatacaccactcaaaattatacgcagtgtctgttttcaacaaagcgattcctgattaatcgtgctatacgaatatttccaatgtattacattggccttttgataacatttcttttatgtggagcaatgagtactttccattatcctgagaaagtgcaaaacttactaagtgcgcttacatttactgtctataagacagatataacaccacattatattgatgatggtggcatgtataatatacgctggacacttaattacgaagtctatttttatatagttttttccgtttgcctgcttgttaaacatcgtttattagctcttattggttttagtgcacttacgacatgcctcattcctgccattgcgggattccaaccaacaacaagtatacaaggctatcagttccattccccgactcttggtttgttaacaaatcctattttccttgagtttattataggggcaatagttggttatttatatttaaaactcaaaaatatcaaatcgtcaactaaagctcaagttatagccagttttatatcattatctttgtttatgtatataattcatggaatatataatgaaagtttaagagcgcttaatatagaaagcaccataattttaggcatgtttattctttttatcagttttgcagaccccttattaaagaaatatatccctcaaatattaacatatcttggtgatatatctttctcgctctatttacttcatggtgctataggtattgctgttatgaaaagaatggggccgattgaattatccaattacaaaggaataccgaccgtagttatagctattttcctgtctatattcatttctcatttaacgcataaatatattgagattagattaaccagcaaactaaaaaagagaatacttccagtaagttcattcaggcaaaaaccgtataacgtagctaactaa

SEQ ID NO: 391851 - DNA, 333 bp, Salmonella enterica
gtgaaaaaaggatttgtttgcgtatttttcctctgtttctttctaatgggatgcagtggtcgtgtgaacaataatcaacccagactgctgacttctgcatacccagcgtacccatattatgctgtggcaaacaggatcgaaggctttgtggaggtaaaatacgatgtcggaagcgacgggaaggtttcgaaaatctggattgtgaaatctgaaccacaacacctcttcgattcgtctgttatttcagcaatgtcgaagtggcgttttgaaagagataagccttatcaggggatgagaaagaggcttcagtttaaattgtcgaaaggcctgtag

SEQ ID NO: 391852 - DNA, 684 bp, Salmonella enterica
atgcttccaggcacctccagagtatcatctcacagtggaacatcctcatacggattaaataccgcagatacatctgttttccccgatattcccgaacatgcacaaaacccttcacagctacgccttgctcatgacagccttgccataaacagtgaattccgtctggagccggtatacctagtggagtaccttatctcagacgcgggtggaatagaccctgatacagaaattgatgacgatacttatgaagaatgccaccatgaactatcccgcatacttcaaaatgcgtacacccaaagcggaacatttcgccgactgatgaattacgcatatgaaaaagaactacgtgatgtggagcaacgttggttactgggagcaggagaagcctttgagactacagttactccagaagacttcactctttcagaaggcaggaaagtcatttgtcttaatctggatgatactgatgatgatttatctccagagtattatgaaagtaacgatggtccacaaccttttgacacagaacgttcatttatccatgaagttgtacatgctctgactcatcttcaggatgaagaagaaaatcatccaagaggccctgtcgtcgaatataccaacattattctgaaagagatggggcattattcacctccaagaatggcctacatcttcaataaatag

SEQ ID NO: 391853 - DNA, 783 bp, Salmonella enterica
gtgaagctcgagtctgccctcaaacatttcagcccccaggggatgcatatctgcgacagtgtgaaagatacatcgccggatcgcatcacagggacagatgtaatgttcgctatcggagcaaccagcagccgtgcgcgttttggcctggcggccttcttcggcaaggcaggcatcagcaaaagcgatgagcaactggcggttcaggcgctggcgcgacatgcgatggagacggctccgaagaacgtcaggaaggccgccggatgtgagttcggatggtgtatgcaggtactggctctgtttgcctttgctgaatattcccgttcggcagctaccagcgtgacatgtcacacctgcaaaggcagcggattaacctctcagtatgaggatgtgatcaaacatcctggagtcttcaactctggcggtatggaaatcgtgcctccgaaaatcaagcacgaactggtcaggcgtacatgtgtggcatgtaacggtaaaggtgagctgttggcccggtgccgttgcggtggaaaaggggaggtgctcgaccgtattgctaccaaagaacgcggcgcaccagtcttcaaaacctgtgaacgttgtagtggcgaggggtattcaagggtgtcttctgcgaccgttcaccgggctatccttaaacgtcttccggatcttcatcaatcctcatggtcacgtaactggaagccattctatgaaatgctggttgatgtactgcacaagggagagcgtcaggcatcatcagaatttgagaacgtaaccagtagttaa

SEQ ID NO: 391854 - DNA, 648 bp, Salmonella enterica
atgcgtaatacacaattaaatcaattttcggctgaatgtaaccagacagataaatatattcgtataaatctcctggaagcagaaaaaaactttgtactttatttccatcgtcaacagaacgaaagcgacaaaacagctcccgatgaagccattcagaaactcgaaagtggggagtatgacgccgatttagttgagggactgcgtctggttgcagccctgtggcatggtatgcacaccggatgttttattctgtcagatgagcaaaaccttgcgctctggcgctgggtagtggccgctgtgtttgtctgtgagatgcttgatacaaacggaaccgtcgaagtgaaaaatgagcagggagagcctgaggaggtcgccgtttatagcggagatcatggcggtattgttatttatccgtggtctgagcgtttttccctggcaaatcatgttgaaggactggcgtatgaaatgttcccggcgaacaaagccccggaaatggctgccgcaatttatcggagcatgatcgacatcagtcctgttactggcatcgatatgtctgaagaggggcttaaaggtatgtcgcttcttcacgacagctttattgaaacgctgaaaacggaaggtattccggcagcgccggtggcgcactga

SEQ ID NO: 391855 - DNA, 306 bp, Salmonella enterica
atgagtaacatcgaacaaattctttcgcgcagtgatttacggaaggaggatgatgaatccctggccagtatccgcatgcactccgaaggcgcatatgaggggattatgtcggggctgggggccataggtaatgctgtgttctgggcctgtgataataaaaattacaccgacgatatggcgcgtgatgatttgtatcgtctgggggaaatgctgatgtatttacccggtatagcttccgcgctgaaatttaatgcagatgaggctgacttcagtattaacgagcgaagaagaaagtcagggaaataa

SEQ ID NO: 391856 - DNA, 333 bp, Salmonella enterica
atggtcaaaaataccgttaacgacaagtcaaaacagatatctatacgcatcccgcacgatgtaatcgatagcatggaagcattaaaaaggccggatgaaagcaacgctgggtttatcgttacagcgatgcgcggcgaagtagcccggcggcaagcgacagcaactggtcctgaaagcttacagcttgagctaaacagggcacttgagacgctcgccaagattgaagaaatcggagagagagccggtaacgacattcgtgctatagtcgatattgcacatgccgaactggaagcccgacagcgcaaaaaatcaaaagacaatcccgaccagtaa

SEQ ID NO: 391857 - DNA, 1317 bp, Salmonella enterica
atgaataaattaaatgccctctccgggcagggccttgctcagcctgaaatcggtcagcaggatgtttcagaaatccgcaagcaggttatttctggtgactggtcgcccattaatcgcggcgaatatacgctcactgatctgggattgcgtcacaacggtagcgggctggtgtggctgcgatccggcgtgtccgtgcatgaggctgaccacgatgagggattcagcggaaaagccagagtgtcattcgactaccatgagggggtatgcccggcacgccccgtggatggcgcgggcttcagtcgtggtgtgcattctcataaagtggacagctactgcctccacattctcaccagttctccttcatgggttgaatactggcaccgtaatgacggtaaggcccttactacatttgcggcacaggtgctaaccaacgaacggcaggaggctttcgacggctgggtaatttatcgtcatccacagcaaatggacaaatacaccgttattcacgaagaacgggacaaatacctcattcaggaatatgtgaagcgcggctggaaatgcgagtcaacctatgagctttctcttctggtaaaaaatgacgctgagtttggccgccttatggctcgtcttggttacgttaaggtgcgcaccaggaagatcaccgggaagagggaaagcttctggctctatcgctcaacagaaaaagggctgggcgctgctgacaagcaacctaaagttgacgccagttatgcagcggttgtgcgtcgtgtatctcgtggtaaacaagaggtatgcccacaagatcccgcgctccgtaaggcttcggcggtaactgtgcaggcgtctgaaacagaacgattcgctttcaagcgtgttgcggtcgatggttgttacctgtgggtttatgcagaccatattcgttttctgaaaaaaatccgtactcgcgtaaacggtaagcaggtgcagggttactcggcgaaaggtgtgaatattgctgttgatggtcgtgtagaggtatgtccacaaaaggcactgaataacaaagataaaatgctgtctgtgcaggctgctgaaacgcgatacacatcagatgtcctcgcttcaatgtcaccacaggatatcctgacagccgcaaaaaacacgctcatacagatcaacgccactcatagctatgggatggcagcacacaacatcatgctcagtcatggcgggcgaaatcttgcatcggtacctgtggagaatatggccagttgcctggtggatcttgataagttgctggtcgtagccagcactggcgcggtggaggtgctgtcatga

SEQ ID NO: 391858 - DNA, 726 bp, Salmonella enterica
atgccgattattgaagacattcctgatctatcacattggaaaacagtacaggagttttctatttctcaggcggcaatgttattgtcaggaattgatccttatgattacgagggtggccttgatgaggtgaaaaagtttcaacatgagcgctggaagatggcgtggggaatttctgaaggaattgttagcgctatacgtcgtggggttctaactcctgtacaatgttttgcagttaggtgggtggaacatgatcagtggaatggttactgggaatattttgaaatcaaacctactgatcgcatgtatgaaatatcgaaagaaaaaacacttattactcgcgattcattatttgtctgggtgggtaatgagcgtgttgattttgtgcgtaaaccagctcccacaaaaataaataaaatttcttctggatggaatacgaattcgtcgaatgagataattgatatagaaccggttcaggtaaatgcttcaccattactgttacctagatatgagcacaattgtgaaggcttggagtttgtagaagaggctatcaagcaattttggtctacctatgatgagcatgatccttctactgcgccaacaaaagcggaggtcactgattacctgaaaaagaaaggggcatccagtaatcttgctgaggctgtagatttagttctccgcccattttctgtaagaaaagttggcagaagaaaagtaacaaaatcatga

SEQ ID NO: 391859 - DNA, 423 bp, Salmonella enterica
atgaataattcagaaataaatgacatgattatctactattcccgtctgatgaccgggaaagttgtgacacctctttatttaaattacgcacctgatgacttcaacagtgaattacgtttacttcttctttcagttaatgatggaataataaaaggaagggtgatttcagcgatgctggataaaacagaaaacgtaatacctgatgaaatcattgactgtctggaaaagaaaagaaatgaactcagggaaatccgtgattatctgaaactaagccgtagttcttggcataaaaaagagaagaaaaacgaagtttccgtgataattgatgaagctgttaatttttgcaatcagggtgggatacagatggaagaactcattcataaagcaaggaaaacaagatgtttactgtggcttcacccctga

SEQ ID NO: 391860 - DNA, 1026 bp, Salmonella enterica
atgctgaccgtctacagttcaaaacataaactgcaccacggtatcgaacttaaagatggtgtgttatccccctcttttgaaaatccgcaacgcgctgagaccgtgctggcgcgcgtgcgcgccaccgcgctgggtgacgtcatctcagaacgaacgtatgaaagaacttgctacgtggcggcgcacagcgagcggtacataaattttctggaaaatgcctggcaggagtgggctgctaccggaaggacacacgatgccctgccgctggtgtggccggtgcgcaaccttgccggggatcgggagccggagttcattgatggcaaactcggtttttacgccatggatgccggcgcaccgattaaagcagatacctggcaggctgtaaggagcagcgctgacgtggcgctgacgggagcggatctggttctgggcggcgcacacggcgcgtttgcgctttgtcgcccaccaggccaccatgcagcccgagagtatatgggcggctactgctaccttaacaatgccgccatcgccgccgaacggtgtcttgcctcggggtgtgaaaaggtggcggtgctggacgtggacttccaccacggcaatggtacacagagcattttttataaccgtcaggacgttttcttttcctcaatacacggcgagcctgcggtgtcctacccctacttctccggctatgcagatgaaaccggtacgggtcagggcgaagggtttaatctcaatcttccgcttgcgaagggcagtgactggcagacttaccagcctgcgctgaaaactgcgctggacgcggttaaaagattcgggccggacgtgctgatcatttcactaggactggacacgttcgaaggcgatcctatcagccatttccggttgaccagcagcgattttatccggatgggacaggagattacgcgggcgggcatcaagacgcttttcgttatggaaggaggatatatggttgatgaaattggcatcaactgcgtcaacgtgcttgtcggttacgaaagctga

SEQ ID NO: 391861 - DNA, 135 bp, Salmonella enterica
atgaattatctggcagcgctctcctccatgctcgaaaatcctcagatgacggatgtcctgcagcgcctgccgtcatggccagaagatcgtcttgaagatctgctgccgctgccggggttcgtcttctcagattaa

SEQ ID NO: 391862 - DNA, 1362 bp, Salmonella enterica
atgataagaatttcaattcgttcggtactgttggcctccgctatcgcgatgtcaaccgccacaaccgcattcgccgacagccactgggctaccgccaccactacctttcctggcagtatccgtgccgggtcacgggaagttccggttaagcccggtgataaaaccgctataacgattaagaatcttccggcgggcgcgactgttaccatactgaatggtgctgaagttctgacccctcagccactgaccgcagacgggacgggaaaactcagtattccgctgaccgttccggccgatgccgagacaggcctgcatccactcaccgttatcacgcaaaatcccgcgagcgtttcgcaggtgatattgaaattgtccggaatcgttccccagaaaaacaccgatgctttcaggctgcagacggctcccgtcggcgagcgggcgtaccagtcggcactttcggccgacgggcagttgttcgttacctctgcgcgcggaccgaaggatggtagccgtctgctgagtctgaacgccggaatgctggcagtcgaagcggaggccgtgctgcccaaagataaaaagggcgagcagattggcgtcttcggcgtcggtgttgataatgcccatgagcatgtctggaccacgaacaccctcgccgggacggtgaccgtgtatgacgcgaaaaccctttccgtcgtgaaggtctttccggaggattcggtttcgcatccacgcgatgtgattattgatgaagcccacaatcgggcctatgtcagcgctgcgttgaccggttttatcgaggtatatgataccagaacgcttgaacacatcggtcagatggaattcgtggtggaccgtggccgcgaccagttttacagtacaggtcttgccctcgacagtgccggagggaaactctacggcgtcagccgcgatacaccatgggtgggctggattgatcttaaaacgggacagagcacgacggtgaaaatacctcaggcgcagggtgcaactggtatcgcccgcgatccgaagaccggccgtctctatgttgtttctcaggagacgaataatgttgtggttcttgatgcgaacggcaaggttctcgctgatacctgtattggtgccgggggcgtatctgtcgtctgggatgcggtgacgtcacaggtttacgccgcgacgcgggcaggtggaacggttgctgttctggatcgggacggtaaactggtcgctaatatcccgatgaataatacgccaaatcacctgaccatcgcgcctgatggcaccgtttatctggtgtctatgtatggcactggcggggataagctccagacaggctcggtgacgaaaatcatgctcaggaaatga

SEQ ID NO: 391863 - DNA, 2316 bp, Salmonella enterica
atgacctttcgcaacacagcacctctggtaaaggcgattcgtgtaagcctgctcccgttcgccgggctgttttcactatctgcttttgccacgcagtttgacattgccgccggggatttagacaaagcacttaatcagtatgcggcccgcagcggtattattttgtccgtcgacgcttcgctcacccggggtaaacacagcaacgggttgcacggtaattttgaacgtgaagacggcctgtatacgctgctgaaggggagtggcctgcaggtcaagtcgttgggtgacaacacctggacgctggaacctgcgccagtgaccaccgaagagtcgctaactgttgtcggcgactggctgggttcagcgcgggaaaatgacgtcttcgaacatgccggggcgcgtgacgttatccgtcgcgacgacttcactaaaactggcgcaaccatcatgcgcgaggcacttaaccgcattcccggcgtcaatgcgccggaaaataatggtaccggtagtcacgatctggcgatgaactttggtattcgcggcctgaatccacgtctggccagccgttccactgtgctgatggacggcattccggtgccgttcgcgccttacggccagccacagctctcgcttgcacccgtatcattaggcaacatggatgccattgacgtcgtacgtggcggcggggccgtgcgctatgggcctcaaagcgtgggcggggtagtgaactttgtcacccgtgcaattccacaagattttggcattacagcaggcgtggaaggtcagctcagcccaacctcttcgcaaaataatccgaaagagacccacaatctgatggtgggcggtacagcgaataacggttttggcaccgccctgctctactccggaactcgcggcagcgactggcgggagcacagcaacacgcgtatcgacgatgtgatgctgaaaagcaaatatgcccccaatgaagtgcatacctttaacagcctgttgcagtattacgatggtaaagcagatatgcccggcggcctcgcgcgcgcagattatgatgccgaccgctggcagtccacccgcccttacgacagcttctggggacgccgtcagttggcaagtctgggctatcagtatcagcctgacagccagcataaattcaatattcagggcttttacacccgcacgttgcgcagcggctatttagagcagggaaaacgcatcaccctttcgcctcgctattactgggtacgcggcattgaaccacgctacagccagagctttatgatgggctcctcggcgcatgaagtgggcacaggatatcgctatgtcaatgagtctacacatgaaatgcgctactacacacctgccgtaagcgggcagttgccttcgacgtccagcccgtacgatcgcaacacccgttccggcacgcaggctcatgcgtggtatctcgatgacaaaatcgatatcggcaactggaccattacgccggggatgcgttttgaacacattaagtcttatcaggacaacaatattaaaaggacgcacgaggaggtgagctacaacgcgccacttccggccctcaatgtgctttatcacctcactgacagctggaatctttatgccaacactgaaggctcatttggcacagtacagtacagtcaaattggcaaggctgtgcaaagcagcaatgtggaaccggaaaaagcgcgcacctgggaagtcgggacccgattcgataacggtgcgctgaccgctgaggcggggctgttcctgattaacttcaacaaccagtacgactccaaccagaccaatgacacggtcaccgcacgcgggaaaacacgtcataccgggctggaaacgcaggtacgttatgacgctggcgattttacgccagcgtttgagaacatctctgtttatgccagttacgcgtacgttaacgctgaaatccgcgaaaaaggcgacacctacggtaaccaggtgccattttcaccaaagcataaaggtacgctggggggcgaatacaaaccgggcaactggacgttcaacctgaacagtgacttccagtccagtcagtttgccgacaattccaacacagagaaagagatcaccgacggcagcaccggacgcattccgggttacatgctatggggagcgagcgcgtcgtatgactttggtcctcagatggccaacctgaacctggcgtttgggataaagaacattttcgaccataagtattacacccgctcctatggtgacaacaacaaggggatctatgccggacagccacgcacgctgtatttgcaaggttcgctgaagttctga

SEQ ID NO: 391864 - DNA, 957 bp, Salmonella enterica
gtgaaaaccacgctcaccgactcccgtcgtctggcgctgcgttccgcctcacattggtatgccgttttaagtggcgatcgcgtgagcccgcagcaggaggcacgctggcagcagtggtatgaacaaaataccgatcaccagtgggcgtggcagcaggtggaaaatctgcgttgccagatggggagtatgcctggcaatctgaccagccggacgctgaaagacagccgtctgacacgccgccatgtcctgaaggggctgctgctgctgatctgcgcgagtggcggctggcagctctggcgttcagaaatgggcgaagggcttcgcgctgactaccgtaccgccaaagggcaaacccaccggcaaaaactggaagatggcactctgctttccctgaataccgacagcgctgtcaacgttcattttgacaacgctcagcgccggatccagctctggtatggggagatcgccatcactaccggcaaagatacccgtcagagaccgtttcgggtgctgacacgccagggccagatcaccgcgctgggcacggaattcactgttcgtcaggagggcgaagaaaccgtgcttagcgttcagcaacatgccgtggaagcgatcctcgcagcaaacacacaacaaccgcagattgttcgccagggcgagacattgcgttttagcgcctcgcgattcggtgatatacagccactgaatgctgagtcagtaagctggatgcagggtgttttaagctttagcgatcaacggctggatgacgttatctctaccctctcccgttaccgccacggcgtactgcgctgcgatcccgctgtagccggattacgtctgacagggactttctctctgggggacaccgatgtggtactccatgcgatcgcaaaaacatttcccgttaaaattcattttattacacgatactgggtcacgataagtcccgccacataa

SEQ ID NO: 391865 - DNA, 519 bp, Salmonella enterica
atgtctaatcccgctcagtgcgcctctctctcgtttgaatcgttctatagcgcgcatcacggctggttgaagcactggctgacacgcaagttgcagtcggcttttgacgctgacgacgtcgctcaggacaccttcctgcgggtcatcaatggtgagtcgctgacgactatccgtgacccgaaatcgttcttatgtactgtcgccagacgagtgatgatcgatctcttccgccgcaacgcactggaaaaagcgtatctggaaatgctcgcccggctccctgaaatgcaggttccctccgcggaagagaggcaattgcatctcgaagcgctacagcttgtcgaccagatgttggatggattgagttgtaaagcccgtaacgcattcctgctttcccagctcgacggcctgacctacagcgaaattgcttcacgcctgaacgtgtcggttagctcagtgaaaaaatatgtcgccaaagccaccgagcactgtctgctgttccgcctggagtacggactgtga

SEQ ID NO: 391866 - DNA, 186 bp, Salmonella enterica
atgcaatttaaacatctgacagccatcctgtttgttgcaggtataacagcgggtctgaatgctcaggccagtacagatatccgggttacctatgcggggtctatgggaaaagttatggatcaggctttaggtcctgcttttgccggacaacagggcggtaaatatggactgaccccgccccggtag

SEQ ID NO: 391867 - DNA, 492 bp, Salmonella enterica
atgtttgtagtgggtatctgtggttttattctgctggtggtcagatacttgtccggacggcccgggtggtgcggtctggagattaatgtcatctcagtctgcatcctcctgttccagtatccgggtatatttgtaccgcatgaaaagtcacctcattccttatctcctgaacagaccgttgctgatcaggcgcaccttacctggtgtgccctcatggcattacagcaggaacggcacgaaggacaggagttgtcgccacttacgactcatatctttttactccgccggcctgtaactgcacaaaaacagcgacgatttccccgttttatggttaccgacactggcaatcagcggcggcatgaacccttactccggccggagttaatttttaccgttacgtttcgaaatatattgtgtatttgtgattatgccagaaaccctgataatcgttatttagcttattatatagcgaggaatggaaatgcaatttaa

SEQ ID NO: 391868 - DNA, 1665 bp, Salmonella enterica
atgccagctaagttttcgctttcgatgattgcactgctcacgctgagttacagctcgctgagtttagccaccgtgacactggatggtcactccatcacgcctgccattatcgccagcattgctgatggtgaagcggtggcgattgcccctgccgccgctgagagggtgaaaaaggcgcatcaggtattgattgaggcagcgcagaacggccagaaaatttatggcctgacggtcggtgtcggtctcaacaaagaccgcccgatggtggatgtgcacggcaaattgacagatgaagtggtcgcggcctccaggaaattcaacattggtttactgcatgcgcactccggcggcactggcgagcctatgagccagcgagtggcgcgcgccacaatggtcactcgccttaacgccctgctgaccggcggtggcggcgtgcaaccagaggttatcgacgcttacgtggcttttctcaataaaggcattacgccggttattccgcgtgatggttctgttggcgagggcgatatcacggtgataagccacgtcggtttggcgatgactggcgaaggcgacgtctattatcaggggaaaaaagtccctgctcaggctgctctgaccagcagcaaaacgccggtcgttgcgccttatgctaaagacgcgttatcaattttaagctctaacgcctactctgcggccagcgccgcgctggcgctgaattcactggcgtactttctgccgttgaactcgctgatgtacgccatcagccttgaagcgctgaatggcaacgtctcgccgttcctcaaaaatacgctggcgttgcgcccgtatcctgaagtggtggcaatgggcgagcatctgcgcaatctactcgatggttcaagcctgtggcagcacgacgataaccgcccgctacaagacccgctgagtttccgttccggcgtctatttgctggcagaactgcaacgcagctatcagcaggcttacgaccaactactggtgcaactcaacagttcggatgacaaccccggcgtggcgattggcgtggcagcaccgactgaccggccgcaggacaaactcggatatgtagatcagggtggcgtgaaaggtgccgttttaccgaccgctaacttcgagccgctgccttgggtgctctctttcgagcaactgagtctggcgctggcgcataactcgttggcgaacgcccagcaagtggtgaaactgaataacccgtcattcaccggcctgacgcgtttcctcggcaccgacaacactgttcacgcctttggtgcgatggaaaaaccagtgatgtcgctggcgatgcgcaacagagagctggcgatgccggtgtcgatggactacatgccggtcgcgggtgacattgaagatatcgcgaccaatgcgccgcaagtcgcggaacgtctgcaacagcagatcgataacagctatcagttactgggtattttgctggtgcataacgcacaagcccttgatttgcgtaagcagaagaacaatggtttcgccatgtccgccccaaccagcgcactgtacgacgcagtgagaaaacaggtgaaatttatggatactgaccaaccgctcagcccggatttctcggcggcggcgcaggtattacgcgaatttgatgtgcaaagcgtgaaagccaaataa

SEQ ID NO: 391869 - DNA, 1338 bp, Salmonella enterica
atgacaaaaatcactacttctcccctgtcggcacagtcacacggtgcagtgctcaaggaagacaataaaggacacaaagccattgcggcggcatcgataggtaacgcgctcgaatggtatgatttttcagtttatgcctttttcgcggtctatattgcacagaacttttttcatcagacggatgcaggtgcgcagcttttcgaagcctttttggccttcggattaggcttcgtcattcggccgttgggcgcactggtgattggcgcttacggtgacagagcgggacgcaaagcggcgctcacgttgaccattatgaccatggcggtcggtacggcgattatcgcctttgctccgccttacagcgcgattggtatcggtgcgccgctgctgattctctgcggccgtgtgctgcaaggcttctcggcgggtggtgaagtgggcggtgcggcggccttcctggtcgaacatgcgcctgccaacaaaaaaggccaatacgcctcgtggttacaggccagcatgggtatctctaatatcctcggtgcactggtcgctaccgccgtgacgttaaccttaagccacgaacaggttggcgactggggctggcgtattccgtttatcatcggcctgtctatcgcgccagtcggcctgtggatgcgtaaaacgctggcagaaacgccgttgtttattgaagaacagacgcgtcgcaaaactgaaaaaatcaagccgatgatgccgctgttccagctattcaaaactcaccgcagtggcgtattgctgggaacaggattatctattctgtgggcggtcagcgtctactcgctgatcatcttcatgccaatttatgtccagcgcgtgctgcatttcgaaagccatcaggcgtttctggccgcgcttattggtaactgtttcatggtggtgtgttgcgtggcggcaggcagttattccgaccgtattggcacgcataagttactgatggttggcgcgggtttgctgctggtttgtagctatccgttgctaatgttgctcaacgcttcacacaccaccggcacgctgatttttgtgcaaagcctgttttgtatcctggtgtcgctgttcgtcggtgtggcaccagtcgcgctctccgagttgttccccacggaagttcgcgccagcggcatgtcggtttcttacaacctcgccgtgaccatttttggcggcttcgcaccggctattttgacctggttaaccgaaaacacaggaacacgttttgccccggcgtggtacgtgatgatagccagcgttttggcgatggtgacgctgataatgatttcacgccagaaagcccgcaagactttttaa

SEQ ID NO: 391870 - DNA, 1653 bp, Salmonella enterica
atgaagaaaacgtttagcgtcacgtccggcaatcaacttcgctgtttaggctggcgacaagaggcgttgttgcggttactggaaaacgtgctggcggtaggtgaaaaccctgacgaactggtggtttacgccgcgctgggtcgtgccgcgcgtgactggccttcgcacgatgccatcgttcatgcgttgaaaaccatgcgtgaagatcaaactctgttggtgcagtccggcaaaccgattggcctgctgcaaacccacgccaacgcaccgttagtgattatggccaactgcaatatggtcggtcagtgggccagtgccgaaaacttctaccgctgggaaaaggaaaacctaatctgctggggaggcttaaccgccggtgactggcaatacatcggctcgcagggtgtgattcagggtacctacgagattttctcacggattgccgaacgccatttcgataatgatctcagcgggcgcttcattttgaccgccggtttgggcggcatgggcggcgcgcagccgttagccggcaccatggccaacgcggcgatcctgactgtcgaagtgaatcaaaaaaacatggataagcgcctgaaaaacggcttcctgcaacagcaggcccgcaacctcgaacatgccctaacgctgattcaggacgcacagcgccagcacaaagcgatatccgtcgggctgctcggcaacgccgccgatatctacccggctatcctggcgaaaggcatcattcccgatatcgtcaccgaccagaccgctgcgcatgatttggtttacggctacgtgccttcaggttacacgcttgagcaagtggcggcacagcgtgaaagcaatatcgatacgctgatggacgccagccgcctctcgattatgcagcacgtcaacgccatgattggctttatggatggtggcgcggtggtgttcgacaacggcaacttaattcgcactcacgcacatcaaggcggcgttaaacgcgcttttgaaattcctgtcttcaccgaagcgttcctgcgcccactgttctgccgggctatcggaccattccgctggattgcgctctctaataacagcgacgacatcaaaaccattgatgattatctgttgagccgttttgccgataacaaaatcgtcagtaactggatccgtcttgcccgccaatacgtgccgttcgaagggttaccggcgcgcatagcctggctgggccacggggaacgcaccgaactggcgctggatgtgaaccgcatggtcgccgatggtcgcctgagcggaccgattgcctttactcgcgaccatctggacgctggtgctatggcacacccgaacatcatgaccgaaaagatgaaagacggttctgatgctattgccgactggccgttgctcaacgcgctggtcaactgcgcgtcgatggccgatttagtggctattcactcaggcggcggcggctacagcggctatatgaccagctccggcgtcaccgttgtggcagacggcaccgacgcggcggcacagcgtttgcaactttccatgactaatgacaccagcactggcgtaatgcgctatgcatccgcgggctatcaggaatcattggatgaaatagctgataaatcaatatcttatatacgcattccgtctactcgctaa

SEQ ID NO: 391871 - DNA, 1101 bp, Salmonella enterica
atgggtcgaattttaacactcagggatgtcgaagccgcagtgaaaggcggttctgtattcgcttgcggcggcggcggttgggttaaccacggtctggaattaggccgactggcggtgaccatcggtcgccctgagttggttaccatggaagaagtggcggacagcgcatggatagccaccgccgcagccattggtgcaccgggtggattaaccgactgggaaatgctgggtgtggattacgtcaaagcagtacaactggtgcaaaaagagttgggcgaacctatctacggtttaatcgtaggccagaacggcatgtcgagcaccctgaatggatggctaccgtcagcaattttgggcacaaaagtggttgatgccgtcggcgacctgcgcgcccatcctacaggagatatgggttcattaggactggcgtcgagcgtcgagccgatgatccagaccgctgtgggcggaaatcgcaagaataacgcctatatcgaactggttgtgaaaggcgcgaccgcaaaggtctcccctattctgcgtaaagcgtctgatatgtcaggcggttttattgccagctgccgcaacccgattcgcggcgcttacgttcgccaacacgccgcgctgggtggtatcagcctcgcactttccctcggtgaagcgattattgccgccagcaaaaaaggtggtaacgcggttatcgacgccatatgcaaccacaccgacgggcagattatcggcagcggtaaagtggcgcaaaacaccttgcgctataccgatgaagcctttgacgtcggcatcgttgacgttggtcagggggaaaatttgcgccatattcacgtcatgaatgaacatatggcggtggaagacaaccacggccggcgcatcgcgacctacccggatgtcatcactacgctggatatgctgggcaatcctgtcagtgcagggcaactcaaaccgggcatggaaattgtgattttccaccagcatcacagccagatcccgctttcttcctcggttatcgatcctgcagtatatccaccggtcgaaaaaaccctgggcgttgaactattcagccatttcgaacaaggagttacgcaatga

SEQ ID NO: 391872 - DNA, 897 bp, Salmonella enterica
atgcgcttaaatctcaaacaaattgaagtctttcgtgccatcatgctcaccggctcgatcagtggcgcggcaaaactgttgcacgtctcccaaccagctgtctcgcggttgatcagttacaccgaacagcgtctgggactgtcgttatttgagcgggtaaaaggccgcttatacccgacgccagaggcaaaacacctgtttgtcgaggtcaactcggtataccttggcgtgcagcgggttaacgaagtggcagaagacctgatacaaaaccgcatgggccacctgcggatagcctgtagtcccagcctcgggcaaggtcttattcccagcgcgatcgccaaatttcactgtaacatccccgaaacccgcgtcattttgtacagcatgatccccgatgtattaatgcaagccgttttaactcaacaggtggaattaggcattgccttcttgcatgaggggcaccccaacatgcaatcacgcgtgctgtatgagaatcatttggtggtggcgctgccagcgacgcatccactgactgcaaaaaatgtgatcagaatcaaagatttggttggacagccttttattggctatggttcggacattccaatcggccaacttatcatacagctgctttataatgaatctgtggctttaattcccacggtggaggttcagcagatccacgtcgcctgcgcgctggttcaggccggagtaggtatcgcgttaatcgacgaaatcaccgccagcggcccggtatggactaatgtggtatttcggcccattacgccaactgccaaaacaccaatcagtatcattcacgggatgtatgaaccattgtcccgactggcgcaggaatttatcaatacgctggaatccattcaggttcactggtcccggtag

SEQ ID NO: 391873 - DNA, 1368 bp, Salmonella enterica
atgggcgggcagcaaaaatgggatgtcgtggtaaaaggcaatctggttgatgctgatagcattcggctaaatagctggttagctatcagtcagggcaaaattgtcgccaccggcagcgaccagccacctgaggccgaaaaagtgatcaacgcctgcggtaagtgggttatccccggcgttattgacgggcaggtgcattctggcagtcaggctaatcaggaagggttaggccgggcgtcccgggcggcggcagcgggtggtatcaccgtgatagtcgatatgccgtatgatgaccctgaacctgtggccagcagagcacagctcgataacaaaattgccgaagttgagcgtgactgccacatcgacgtagcactgttcggtacgctcaatcaaaaacacggcttcgaagcggcagcggggttgattgaaggcggcgtctgcgcgttcaaattttccacttttgaagcaatgcccggtcgtttccctcgagttgaagaggacgacttgctgcacgcatttcaactgatagctccgagcggtttggcctgcgcggtacataaccagatgcaggaaatgacccgcaaaaatatccagcggatgaccgccgaaaacgacaccggctgggacgcctttatgcgcgcgcatacgccgttgattgaaaatttagcaaccgcccagttgtatgaaattggcgcggtaaccggcgcgcgagcccatgcggtacacgtttctacgtcgcgcgggttccagatttacaagatgtacaagaacgcgggttatccggtgactatcgaaacctgtgtgcaatatctgatgctgaaccacgaagaacattcgttcaggctgggtgcaaaaactaagcattacccgccaatccgtccaaaagctgagtctgagttgctatggacgcatatcgcgcagggcgattgcactttcgtctcttccgaccatgtgagctgggggctggaacgtaaaggtaacccgaacattttcaaaaactcctcaggcggaccgggacttgagacactactcccggcgatgtggacgggctgtgaacaacacagcatttcaccgaccacactggtgcagcttctgtgccgtaacccggcgcaacacttcctgttagacgatcgcaaagggtcgtttgaggccggaaaagacgccgatttcgtgattctgactcctgaaacctaccgctttgatccgtctgccagtctgtctgcggtgacctggagttccttcgcagatatggaattcaccgtgcgtgttgaacaaacatggtgccgtggtcagcaggtatttaaccacggcgatatcgtcaatcaagcgggcgatggtcagttcctgcgcccgcgtcgcgtagcttaa

SEQ ID NO: 391874 - DNA, 1284 bp, Salmonella enterica
atgacaacccagccttctgacacagtgatgctgcgtgacctgataaacgcagcccgcctgtgggacagcgccaaccagttggcgaccatgacgctgcccaatatgccgtggacccgccgcgcttttacgccgctatttgacgaagggcggcgctggttgaaacaaaaaatggagcaagccgggctgagcgtcatgctcgatgccggaggtaacctgattggccgccgggagggtcgccgttccgatctcgcgccaattattatcggttctcacagcgatactgtggtcagcggcgggcgctatgatggtacgattggcgtactgaccggtattgaaattgcgctgagtttacaagaacgcggcatcttgctggagcatccgctggaggttatcgacttcctgtctgaagaaccgagcgattacggtatctcttgtgtgggcagccgggccttttccggcttgctcgacagcggcatgctggcatcgaaaaaccatgccggagaaacgttggccgagggcatgctgcgagttggtgccaggcctgaattattaacggcgccactcagaattgcgggcagcactgcggcgtatatcgagctgcacattgagcagggaccagtgctggaaaatgccgggctgccagtcggtgtggtgacgcatattgtcggtattcaccgggtgttgattagcattcatgggcagcctgatcattctggcaccacgccgatggacatgcgccgcgatgccttagtgggcgcagcgctggtgataactcaggttcatcaaagcgccagccagcaaagcgataacccgcactacgtggtggcaactatcgggcggattgcgatgacgccgaacgtgccaaatgccgtgccgggccgggttgaactgatgctggaagtgcgcagtgacagtcagcaggtgctcgacgtgttcactgaacaggtgatgaagttatgtgaatcgccattggcggcgctggggttgtcggccactttgcaacacgtgagtcgcgccagccctacggcttgttcggaaacagtaatgcaggcgattggcgaggcggcggagtatttacatttaggctatcgtcgtctaccaagcggagcaggacatgatgcggtatatgtcgcgccaaccggtccggtcggcctggtgtttatcccatgccttgctgggcgcagccattgcccggaagaatccattactgagaaacaactggcggatggtgcagcggttatggcacaaacgctgctgaatctcgaccgccaactggccggataa

SEQ ID NO: 391875 - DNA, 204 bp, Salmonella enterica
atgttccagcaggatattgaatttgttgctgaagtacttgatcctgaactgcctgttttccggcgggaaatcaatccgctctggattgaagaagcattgcaaagcacccactcggccagcatccgccgaagacgattactcgctgagcaagctgtctggctggttctggtgatgggaccattacgggatatgtccatcaaataa

SEQ ID NO: 391876 - DNA, 312 bp, Salmonella enterica
gtgattgtcatattggtggtgttgttcatctcgctggtcaacgccattggcaccaacagtttgtcgttgctgttgcaacagcggggaaaacaggcgggcagcgccagcgcactggcgatttcactgcagtttggcatgggcgcttttctcgtcggtctgcacgaacgcctgctgcagggcggcacgcatcacagactggttggccctgctgacgcggctcagcacgttgcgcatgaagtgaacccggcagcgctgccagctggcagagaacacctgctgtatcgctcagaccactgtgcgagtcggagatga

SEQ ID NO: 391877 - DNA, 135 bp, Salmonella enterica
atgagcaatgaaatggttttagaagtcgtcctgcaaatgatgcgtgaagagctgcaactgtcacagaaacatgtagtcgaggttatgggtatcagccagcaatcacctaactggaacagcgcgggaacgagctga

SEQ ID NO: 391878 - DNA, 429 bp, Salmonella enterica
atgtttaataaaagtatactaccagcattaataccgttttttctgttcatcggaggttgcgatgacgcgtcaacagaaaaagtaaataattctattgaacaaactaaagataaagcggcagatctgaagagtcagactgacgataaggcttctgagttgtctgactcagcccgaaagcagtggaatgaggctaaggataaagcggcagacctgaagagtcagactgacgataaggcttctgagttgtctgactcagcccgaaagcagtggaatgaggctaaggataaagcggcagatctgaagagtcagactgacgataaggcttctgagttgtctgactcagcccgaaaacagtggaatgaggctaaggataaagcggcagatctgaagagtcagactaacgataaggcttctgaactcactcactaa

SEQ ID NO: 391879 - DNA, 249 bp, Salmonella enterica
atgggaataatttcatggattatttttggtctgattgcgggaattattgctaaatggatcatgccagggaaagatggtagtggattcattacaaccgttattttgggtattactggtgcagtagttggtggttatattagcacattcttcggctttggtcgtgtggatggattcaatatcgggagttttggaattgcggtcatcggcgctctaatcgtcttgttcgcttaccggaaaatacgaagttga

SEQ ID NO: 391880 - DNA, 387 bp, Salmonella enterica
gtggctgcagagctgtgtgcgatttacaatgcagcgaatctggaggccgcggaacacgctctggaagcattctctgccagatgggataagaagtatcccaccatcagccagtcctggttgaacaaccaggaacgcctgatagttatctttgattttgcaccggagatccgtaaagctatctataccaccaatgcgatagagtctcagaatagctcgttacgcaaggtcacgaagacacggcgggtattccctacagatgagtcggtgttgaaactgctgtatcttgcactacacaatatctcggcaaaatggacgatgccgatacaaaactggaaacccgcaatgagccagtttatgctgatggacggagaccgggttccccagtga

SEQ ID NO: 391881 - DNA, 978 bp, Salmonella enterica
atgaatgtactgactgcagtaacagaaaacgctgacaatctgaccccgaactctggagaattcaccttcactctctcggcgcaatcaccacgtctgcgggaactgaccttttcggctgacacgacagagaaatttctgcagcaggtggcgcagtggccagtgcaggcgctggagtataaatccttcttacgctttaaagttggcaggatccttgatgatctgtgtggcaaccggttgcagccgttgcttctcaatactctgcttaatcgtgaggaaggcgcgctattgatcaatgccgaagggatcgatgacgccgctcaggcagaagatatggtcaaactggcgacggcggtggcgcatcttatcgggcgctccaattttgatgcgatgagtggtcagtattatgcgcgttttgtagttaataatactgataattcagacagttatctgcgacaacctcatcgtgtgatggagttgcacaatgacggtacctatgtcgaagagatcactgactatgtgctgatgatgaaaattgatgagcagaacatgacgggtggtaattcacttctgttgcatcttgatgactgggaacatctggagccatttttcacccatccgctggcgcgtcgttcaatgcgcttttctgcccctccgagcaaaaacgtcaatcgtgatgtgtaccatccagtgtttgatgtagaccagcaggggcgcccggtgatgcgctatattgatcagttcgtccagccgaaagacttcgaagaaggcgtctggctgagcgaactgtcagatgcgctggaaaccagccaaaatatcctctccattccggtacctgtgggtaaattcctgctgattaataatctgttctggttacatggtcgcgaccgttttacccctcacccggagttgcgccgcgagctgatgcgtcagcgtggctacttcgcttattcaaccagtcactaccagacgcaccagtaa

SEQ ID NO: 391882 - DNA, 1269 bp, Salmonella enterica
atgtatgattttgtgatcgcaggcggtggcatcatcggcatgtcgaccgccatgcaactgattgatgtttatccggacgccagaatcgccttgctggaaaaagagtccggcccggcctgtcatcagacaggccacaacagcggtgtgattcatgccggggtctactacaccccaggcagtctcaaggcgcaattttgtctggcaggaaatctcgccaccaaagctttttgcgatcaaaacggtattcaccacgacatctgcgggaagatgctggtcgccaccacggaactggaaatggcacggatgcgggccctgtgggatcgtaccgccactaacggcctggaacgcaagtggctcagtgcggaagaacttcgtgaatgtgagccgaacattaccggactgggaggcatttttgttccgtcaagcgggattgtcagctatcgcgaagtgacggcggcaatggctaaaatatttcaggccaggggcggcgagattatctacaacgcagaagtcagcgggctgaaagagcatgcttccgggatagtggttcgtacccgacaggaccaggagtatgaagccgccacgctgataagctgttccgggctgatggctgacagactggtaaaaatgctcggccttgagcccggatttatcatctgtccgttccggggagaatatttccgccttgtgccggagcataatcagatcgtcaaccatctgatctaccccattccggatccggcaatgccgtttctcggcgttcatctcacccgcatgatcgacggcagcgttacggtaggacccaacgcggtgctggcttttaaacgtgaaggctacagtaagcgcgacttctcgtttgccgacacgctggagatcctcggttcttccggtatccgtcgggtgctgcagaacaacctgcgttcgggtttaaacgaaatgaaaaactcgctgtgtaaaagcggctatctgcggcttgtgcagaagtactgccccggcctgacaactaaagatctgcaaccctggccggcaggcgtacgggcacaggcggtgtcacaggacggcaggctgattgatgattttctgtttgtcaccacgccgcgttcgattcacacctgcaacgcgccttctccggccgccacatcagcgattcccattggcgcgcatattgtcagcaaagtgcagacactgctggctggccagagcaatcccggacgtacgctacgtgcagcacgcagcgttgactcattacacgtcgccttcacgcgttaa

SEQ ID NO: 391883 - DNA, 1449 bp, Salmonella enterica
atgcaacttaacgatccaacattgttccgccagcaggcattgatcgacggacagtggcgtaatgccaactgcggcgaaatgattgccgtcatcaaccccgccagtggccaactgctcggtaatgtcccaaaaatgggtgcggacgagacccgcgaagccattgatgcagccagtcgcgcactgcccgcctggcgtgccctcaccgctaaagagcgtgcatgtatactgcgtcgctggttcaacctgatgatggaaaatcaggacgacctcgcccgtctgatgacgctggaacaggggaaaccgctggcagaagcgaagggggaaatcagttatgccgcctcgtttattgaatggtttgccgaggagggtaagcgtatctatggcgataccattccgggacatcaggccgacaaacgtcttatcgtcattaaacagcccgttggcgtcaccgcagctatcaccccgtggaattttccttcggcgatgattacccgcaaagctggtccggcactggcggctggctgtacgatggtactcaaaccagccagccagaccccctattccgcgctggctctggcagaactggctatgcgcgccgggatcccatcgggtgtgttcagcgtcattaccggttctgccggggccatcggtaatgaactgaccagcaacccgctggtgcgtaaactgtcattcaccggctcgacggaaactggtcgtcagttgatggcacagtgtgccagagacatcaaaaaggtatctctggagctgggcggtaacgcgccgtttatcgtctttgatgatgcggatcttgataaagcggttgagggcgctatggcctccaagtttcgtaacgccgggcagacctgcgtctgtgctaaccgtctgtatatacaggatggtatttatgaccgttttgccgaaaaacttcatcaggcggtgagtaggctgcattctggcgatggcctgcaacccgacgtcactaccggtccgctgattgatgaaaaagcagtcgctaaagtgcaggaacacattgccgatgcgctggagaaaggcgccagagtgattaccggcggaaaagcgcatgagctgggtggtaatttcttccagcccaccatcctggtggatgtaccagataatgctaaagtcgccagagaggagacgtttggtccgctggctcctctgttccgctttaaggacgaagccgacgtcatcaggcaggccaacgataccgagttcggtctggccgcctatttctacgcccgcgatttaagccgcgtttttcgcgtcggtgaagcgctggagtacggcattgtcggcatcaataccggcattatctctaacgaagttgcccccttcggcgggattaaagcctccggcctgggccgtgagggttccagatatggcatcgaagattacttagaaatcaaatatatgtgcatcggcctttaa

SEQ ID NO: 391884 - DNA, 1287 bp, Salmonella enterica
atgatgagcaccaataaagagttaatgcagcgccgcagcgacgccgttcctcgtggcgtaggacagatccaccctgtttttgccgaccgcgctgaaaactgccgggtctgggatgtggaaggccgtgagtttctcgatttcgccgggggtatcgcggtgctgaataccggacacctgcatccgaagatcgtctctgccgtggaagaacaactgaaaaaactgtcgcatacctgttttcaggtactggcctatgagccgtatctggaactgtgcgaaatcatgaatcagaaggtgcccggcgatttccccaagaaaaccctgctggtgacaaccggttccgaggcggtggaaaatgcagtgaaaatcgcccgagcagccaccagacgtagcggcaccatcgccttcagcggtgcctatcacggtcgtacccactacaccctttcactgaccggaaaagtggatccttattctgccggaatgggactgatgccgggccacgtttaccgtgctctctacccctgtgcattgcacggtatcagcgacgatgacgccatcgacagtattcaccgcatcttcaaaaacgacgcggcaccggaagatattgcagccatcgtgatcgaaccagtgcagggggagggggggttttacgccgcctcacctgccttcatgcagcgtctgcgtgcgatctgtgacgaacacgggatcatgctgattgccgatgaggtacagagcggtgccgggcgtaccggcacgctgtttgcgatggagcatatgggcgttgcaccggacattaccaccttcgccaaatcaattgccgggggcttcccgctggcgggtgtgaccgggcgggctgaagtgatggacactatcccgccgggcggtcttggtgggacctatgccggtaacccgattgcctgtgccgccgcactggcggtactgagcatcattgagcaggaaaacctgctgcaaaaagctaacgaactgggccagatcctgcgcaacggtctgcttacaattgcggaaaagcaccgcgaaattggtgacgttcgcggactgggggcaatgattgccatcgaactgttcgaaaacggcaaccacagtaagccagatgccagactggctgctgaaatagtcgcccgcgcccgtgataaggggctgattttgctctcctgcggaccgtacaacaacgtgctgcgcattcttgttcctctcactatagatgatgtgcagatccatcaggggctggagattatagcccggtgctttgatgaagccagacaatgctga

SEQ ID NO: 391885 - DNA, 1401 bp, Salmonella enterica
atggggcaactgtcgaaatcacatgatttaggcggcgggctgaaatcacgccacgtcaccatgctgtctattgccggcgttatcggtgccagtttgtttgtcggatcaagcgtggccattaccgaagcaggaccggcggtcctgctggcctatctgtttgccggcttactggtggtgatgattatgcgaatgctggctgaaatggccgtcgccaccccggatacgggttccttttccacttacgcagacaaagctattggtccctgggcgggctatactatcggctggttgtactggtggttctgggtgctggttattccactggaagccaatattgctgctattatcctgaattcatggataccaggtattccggtctggttattttcattggttattacgcttgcgttaaccggcagtaatttactgagcgtcaaaaattatggagaattcgagttctggctggcgctgtgcaaagtgattgccattctggcatttattgccctgggtgcgacggcgattagcggtttttatccctgggctgaagtcagcggtatatcgcggctgtgggatcacgggggctttatgcccaacggttttggtgcggttctgagtgcggtgctgatcaccatgttttcgtttatgggggctgagattgtcaccattgctgctgcggaatctgacactccggataaacacatcatacgtgccacaaactccgtcatctggcgtatctccattttctatctgtgttcaattttcgtggtcgtcgcgctgatcccgtggaacatgccggggctgaaagagatgggatcttaccgttcggtgctggaactgttgcacatcccgcacgccagactaatcatggactgcgtgatcttactgtcggtcaccagttgtctgaattcggcgctgtacacagcttcccggatgctctattctctgagccgccgtggtgacgcccctgcggttatgggtaaaaccaaccgcagcaaaacgccttacgtggccgtactgctctcgaccggagcggcgtttttaaccgttatcgtcaattattacgctccggcaaaagtgtttacatttctcatcgacagctccggggctattgccctgctggtctatctggtgatcgcagtgtcccagttgcggatgcgtagaatcctgcaggccgaagggagggatatcaaactgaagatgtggctttacccgtggctgacctggctggtaattgtctttataagcttcgtgttgattgttatgttattccgtccggcgcaacaactggaagttatttccactggtttgttggggctgggaatcatttgtaccgtaccaattatgtcccggtggaaaaagctgttattgtggcaaaagacatcattacagaatacgcgttga

SEQ ID NO: 391886 - DNA, 696 bp, Salmonella enterica
atgaccgccactttacagccgacggccatagatggatatcgctggctgaaaaacgatattatacatggtgtttatcagcccgatgaaaagctgcgtatgagcttactgacctcacgttatgagcttggcgtggggcctctgcgagaagcactttctcaactggtggcggaacggctggttacggcggtgaatcagaaaggttatcgcgtggcaccaatgtccggacaggatctgctcgatatttttgacgcacgcgccaatatggaagccatgctggtaagtttagccattgagcggggtgacgatgcctgggaagcggaaattctggcgcgtgagcatatgctcagtaaacttgaggccagaaatgccagtgaacagatgcttgatgagtgggatcaacgccatcaggcatttcatacagccatagttgctggttgtggctcgcaatatctgctgcaaatgcgcacacgactgtttgatctggcggcgcgttaccgtttcatctggctgcgtgaaaccgttttatccgtcggaatgctggaagataaacatatccagcatcagttacttacagaagcgattctggctcgcgatgcaatacgcgccagcgaattaatgcgccagcacttgctcacacctgttcccgtcattcagcaaatcatatcgggactatccggaacacgtatccgtgattaa

SEQ ID NO: 391887 - DNA, 351 bp, Salmonella enterica
atgagtggactccttttggtttccgacagcgagataaaacaattatctgacattgtacaaaaacaaatcactgaaaatattattaataaatataatgcagtaacgaaaggggtttctttcgatagaatcccatataatacaaggactgctattattgatatattttatcaatataatattaacacagcatcagttaaggagccaaagacctggggatttatcataaacaatgactggaatggtttttataatgaacttatgaatgttggagactgctatgctcctcgccggaagcgtgaggcggatttagttttttctgatattaacgggaatcagtatatttacagataa

SEQ ID NO: 391888 - DNA, 477 bp, Salmonella enterica
atgtctgtgaaacacacctgtgtactgaccgcactgattttattcacgccgctggtttgctgttcgcaagactttagtccggagtttgttaagcatgtttttttaaatctggatatgacatcttttcccaattctatggggccaacacattatgctaaaggaactgtaatgaaaaaaatattaaaaacaagaggtgtgcatgaaataaaaaaatgtaaagatgataaaaattgtattgttattcatttccctgaacatgatgacaatagtgcatttattgatgacgggtggtcttattatttaacgctaatcaaaaaggaaaatggtaaaatactggcctgttatacagatatgaatggctgggatacctacaatgttacccagcctcttgagttaaaaaatgcaaaaggtaaattcatagtaactaaagcatataataaaagtattgacagatgtgaatatttactcaagggttga

SEQ ID NO: 391889 - DNA, 177 bp, Salmonella enterica
gtgggctatcaccgtctttcggtagcagaaatggcgatgttccgaatcaaaaccttgccaggcggtcatctgagcctgcaagactatgacgcgcaggtgggtgaagcaatggcgatggtcaaagcgccaaaccgaatgacgttgttgggtatgccgcacagcgtccggctcgcataa

SEQ ID NO: 391890 - DNA, 471 bp, Salmonella enterica
atggctgacaacagcatgacattcagcgacacactgatgcaacccggtggtgaagactttctgcgtgaactcaccgaatttatgctcaaccgtatcatggaggccgatgtcactcagcgcatcaatgcagaacgccatgagcgcagcaatgaacgtgagacttaccggaacggctaccgtgaccgccagtataacacccggcccggcacactggacctgcgtatcccgaagcttcgtgaaggctcatacttcccgtcgttccttgaggcccgcaggctgtcggagaaggcattgaatgcggttatccaggaagcgtggataaacggcgtctccacccgcaaggtggataccttgatccagtcgatgggaatgaccggcatctcccgaagccaggtatcgtccatctgtcgtggcatcgatgagcgtgtacaggcgttcctgcagcggccgttggaaggtgaatggccctga

SEQ ID NO: 391891 - DNA, 249 bp, Salmonella enterica
atgcagaattcagccagagccttgcgaatgaccaccattttttcagttttgtgcggatcgcgtatatacagagtgggggccgctctgcaccacaccagccccattgaaagtagccagcggcggacgagggacgggatgaagtttacaacccgttatctcattgatttttattgccagaagttcagtacttcagcgggaacgctgatagacaaaatcaccgggagaacggctgacaagctgtaccagtag

SEQ ID NO: 391892 - DNA, 456 bp, Salmonella enterica
atgccaatccccgggctcttcctgtttggtacactggtgctgcaacagggggccttcgctcctctgacattactcagtatcttcactactacacccccatccgccatccataacaaccgactcagcccctcacgaggcgtcgttgttcgtctgccggacgaacatcattatggacttcccttgttgcacgatcgatcaattgttatgcgtgctgtcaccactaccccggtgggtatgaccggtgcatttctcactctcttcccggtcatcgtcggccttccccgttattatagcgtgtcggcacccacgacggcatttcgaggcctgctcagtgttcactcacgttacggcccgcataacctgttgacttccttaagaagccgtttcagggagagcttcagcccatttgttacctcctggaccgccccctgtacttccggccggagcgagagttag

SEQ ID NO: 391893 - DNA, 1209 bp, Salmonella enterica
gtggaagcttacaggcgatgccgtctgaaccggggtgctcccggcgtggatggagagtcttttgctaccatagaacagcagggattagggcagtggttgcgaagattaaagcaggagctgagcacaaaaaagcagtatcgttgctcgcccctgttgcgtgtatggatccccaaagccaatggcggacaacgcccgttgagtatcccgacaataaaggacagagtggttcagacggcggtgttgctcgttattaaccccgttttcgataccgatctgtccccacggcagtacggtttcagaagtcacatagacgcgaaaatggcaatacgcagagtctactttagcatctctgaacgcttcgccagagaagtcgttgatgcggatttatctgactacttcagtacgatccctcacgggcaactgatgaaatgcatcgcccggaggataactgatggcagcgtactggggataattcgccagtggctcagggccccggtagtggaacggaccagacagggtgtcgaaatccggaccacagttgcccgtaacactcatcgtggaacggcacagggttcgccaataagtccgttgctgggaaacctctatttcaggcgctttattctggcatggaacagcgggactcctttctgggagaagaacagcgagatcgtcaattatgccgacgatctggtgatattgtgcaaaaggggaaccggggagcaggccatgataagaatgaagtgcctgatggagcggctggggctgaccgttaacgaaagcaaaacccggctggtcgtcctacctgaggagaattttgactttctcggatataccattggccgattttatggcaaaggtggtcgcccctactggggaacctcaatatcccggaaagcgatcaaacgactcaaacaggaaatacacgcccagacaacgtcacgctggaactgtacgcccgtagttgagagagcggaaagattaaacccgctcctcaaaggctgggccagttacttcagtcaggggccagtgttacagatttaccgtgacattgacaactatacggcgagacgggtcagggtctggttgcagagaaggaaaggtcagcggggaacgggatatcgccagtatcccgaccagtacctatacaaacagttaggactgatacgcctgatggatcttcctcgtaaccgtccaaacgcgaaggtctga

SEQ ID NO: 391894 - DNA, 171 bp, Salmonella enterica
atgaaggggggagatccggtaggacttcaagcctatttcctgaacaatcgagtatttgtaagttatcaggtaattctgaaagtgaggctatcatattacctgaacaatctaatgattgaagtgtatcaggtaaatgagaaagctctctcaaactattttttgagcaattga

SEQ ID NO: 391895 - DNA, 237 bp, Salmonella enterica
atgtggccagttggtgattacgcgggacgtattacacccacagcatcagaagcatcccccgcagcaaatacgagctattataccttatggcaaacctgggctaatgaagccattgtcggagaaggggaacaacgagatatagcggttgaaagattgtatgcttgcctttccaatcaggagagtattcttgatttaggggagcttaacctgcgcactttacccctattgcctgcatga

SEQ ID NO: 391896 - DNA, 1233 bp, Salmonella enterica
atgagtacgattagaagaaaaatgcgtccggtatttcaggggttacagggaggattatttaacagtgtaaagaaagccgatgttggcactgccgtactggagctaatggcgaatggcgtcgatatgctgtgctgggcagatcctttttttcccgactcggttttaccggaacatatttctcaggctgtgattaaatcaatggaaaatggtaacgccagccattataccatgcccatcgggaatcctgatttaaaagagaagattgctcttaaattattaagaaaaaataatatttctgttgatgcgcaaagaaatattcttattactcctggatctgattcaggtttgctatttgcaatgatgcctttcattgaggatggtgatgaagtaattattcattccccttcttatcccagcaactttctgaatgttgaattgctgggagggacgccagtcagtgtggaactgaaagttgaaaataattttcagatagaaattagtgattttgaagaaaaaattaccgaaaaaaccaaaatggtgattctcaccaatcctaacaatcctacagggacagtattacgccgggaaagtttacaggctcttgctgattttgttatcgatcacgatcttgtactggttgtagatcaggcattcgaagatgctattttcgataatattgagtttatttccatcgcctcactacccggtatgtgggaacgtaccatcagtgtgttttctttttccaaaggtatgggtttgagcggtttccgtgttggttatctggtggcagatgaccatattatggatgctctttacggttgtacggtcaatgttgtcggagcaacaaatacctcatcccaggccggaatgatcgccgcactgaacgagccttcttttatagatacttataatcaaatattcgatcatcgtcgtaaagttgtgtttgaaatgatgaacgcaattcccggagtcagcatggttatgcctgaaagcggttttctttcctggattgatatttctaaattaggttcttctgcttttatctgtgactatttgctggagcacgcacaggttgtagttaattcgggtgttccttatggcgaaggcggtgaagggtatattcgtctggtacacggttgttataaggatgatgaaaaactctgtgctgttctgacaagaattcagtcagctctgacaatgttggcaaaagagaaggggctggatcatgaataa

SEQ ID NO: 391897 - DNA, 1449 bp, Salmonella enterica
atgaataatgatgaactcacgtttcgcggtggtaaaaatatggcgttattgccaatgttcctttttatcgtatcgtgctcgttattcttttccgtattccatgttttcgacatgatagcattagccatgtgtgcttttctggctattatggtcggtgcaattttttcacgtaatgccagtgattactggaaagctgtcgtaagggaaggcattggcagtgaaatggctgtcactattgccactatcctgttgattatcggtatgtacgctaaaatgatcgcgcaatccggcgtagcggacagctttgccttgttggctaatcagttaggattgcatggaggagcctttaccgtatttactttcgtctctgtttgtattgttgctacggcgacagggacatccataggtacgttattcactgcttttcctgtattttacccttcagggatactgttgggtgccgacccgatcgtactggccagcgccatcctgtgcggagccatttttggcgataacattgcaccaatttcggacaccacggtagcatcagcgtctacccaaagctatcagtatcgaccgggtagcgctgaaattgcgggtgttgtcgcggcgcgttttcgcttcgctattgtcagtgcgcttattgcaagtacccttttttatatcttcggttcgaatccctcgcctctcgctgaagctaacatccatcaggatcatgaagcaacctataaaagtttgtggatgctggttcctatggctgtactactcattgtggcgatgaaaacccgcaatatttttaaggctatcccctccgggatactgacggggataattgttggtttactgttcggtatttttaacgtcacggacatatttgcacttgagagcggtaatgtcagtggttttttgtacaaaggattccatgagatggtaagtacgatcctttttgttctctctttatttggtattatcggtattcttcgtgccagtaaaactatggatcgtgtttcttctgctatctgccggagtcgtctggcgcagtcgtcacaaggagctgaatggtgtattgcaataggctccattatagcaacagcattagttggtggtgtaaccagtgcatctattctggcttttggtcctgtagccagtgaaatcggatcgcgtaaatcattacatccttatcgccgtgccgttctggttgactgttttgccatgacgctggctgctataattccttttctcagcgcttttatttttattgtcagtgctatcatcgtttctttacaaaaaaactatccgttcattcagactgtcaaccctattcatttatcattgacagcgttctatccgatagcgctttttatcgtgatgtcattctctgttatcgtcggatgggggcgtcgttttgaagataaaggtggtttacagtcaagagttgctcctgaatga

SEQ ID NO: 391898 - DNA, 396 bp, Salmonella enterica
atgaataaggtgaatcatatgagaggacatattattgtcagtgatattattgatgctccggtagaagatgtatggaataaattaagcgcttttgatcgttttgccgacttccatcccggtgcggtcaaaagtttttatcttcatcataccagctgtcagcaaggtagtatacgtcgtgttgaaatgtctgatggatatgtcgaggaattattagttaatatagatttaacgaattattacattgagtatgtaatattaaatagttctctgcctttagaagggtaccgggcggagataaaactttatcctgtcactcagagtaatcagtctctgatccagtggcaggctgaatttacaacgacacatccttctcctgaaacattttttctgaaataa

SEQ ID NO: 391899 - DNA, 633 bp, Salmonella enterica
atgacacaggatgagattattaattcatggattccaatggtggattttatcgcccgtacttatggtgaacactgtgaagtaatattgcatgatttacgcaatctggataaatccatagtagccataaaaaataaccatattacagggcgccagataggtggaaccattactaaatttgctttgaagttgattcatgaaaaatcctggaaggatcgtgattttatcgtaaattataaaggtacaattcctggaaagtcagaatttgtacgtgcttcaaccttttttatcagagatgaagacggtgaaataattgcaatgttatgtatgaatgttgatttgagtcaactaataataactcataatattatcggagatttaatttctttagaggatgaaaataaaaccaatgaagagacactgaggaatacatctataacggatatgttgcatgagttaataactgatgtattgaaggactatcatcgtgctccttctttactggttatggatgagaaaaaagagattgttaaaaaacttaatgataaaggtgtttttttacttaaaggcgctgttgcagaagtcgctatgcgccttgaaacctcagaacaaactatatatcgttatttaaaatag

SEQ ID NO: 391900 - DNA, 381 bp, Salmonella enterica
atgaaatcatccattgaaacgaaagaagcgcctgttgctataggtccttattctcaggcaatttattttaacagggttgtatatgtatcgggacaacttcctcttcatccggataccggtgaaattgtcggtgatgatattgaaaaacaaacccagcaagtattgaaaaatattgacgctattctttttaatgcggaaacaaataaagataacatattaaaaaccactatttttatcactgatataaatgatttctctaaggtgaatgatatttattccggatatgttaaaggaacaatttatcctgcacgttctactattggtgtattttctttaccaaaaggtgcattagtagagattgaagttgttgcgggagtttaa

SEQ ID NO: 391901 - DNA, 792 bp, Salmonella enterica
atgagtgatcttcagcatcaacgcattgatgaactatgccagcagttccgcctcgatcgtattgcatccgagtggcctgctctggcccagaaggcgatagatgacaccgcgtcattcggggattttcttgaacaacttctgaagctggaggcggacagccgtgatgagcgtcggcgccagacgctgttacgcctttctggtttgccagcgatcaagacgctggaacagtttgacttcaagttcgccagcggtgctccccgggcgcagatacaggaactggcaagtctggcattcatcgaacggcaggagaacatcgtgttcctgggcccctctggtgtaggtaaaagccatcttgccgctgctctcgcgtaccggtgtgccatggccgggctgagtacccggtttatcaccgccgcggacatgatgttgcagttggttgccgcccatcgtcagggtgaacttaaaggctatctgaaccgcatcattcacaagccacgactgctggtaatcgacgagattggctacctgccgttcggtaaggaggaagctaacctgttcttccaggttgtcgccagacgctacgagtcaggtagtctgatattgaccagtaatctgccatttacacagtggtcaggaacctttggggatgacgagacgctcacagcagcgatgttggatcgtttgctacatcatgcccacattgttcagattagcgggcaaagttacaggctgaaggataagttaaaaagtggtcagttgaagaagtctgcaaccgccgacatttctggctaa

SEQ ID NO: 391902 - DNA, 1029 bp, Salmonella enterica
atgctaacattggagttaagagtggagatcgctgttcttcgtcggcaaggcatgtccatccgtgctattgcccgtcatttgaggtgttcccgccagactatccggcgttatatccgcatgggagatgctgcgtcctcatcccgttattccaccagagctccacgcccgggcaagcttgatccgttcaaggcttatatcaacgaacgtgtcgaggctgcccgaccacactggatacccgccagcgttatgcttcaggagatccgcgcacgaggctattccggcggctacagcatgctgaccgcttatttatttccgttgaagcagcaacccgctgagccggtggttcggtttgagacagaaccgggcgagcagatgcaggttgacttcaccatcattcgtcagggttcgagccctctcctggcgatagtcgccactctgggctggagccgggccacttacgtccgcttttacgcgaaccaggataccgctgcatggtgcgacgggattgaacatgcactggccttcttcggcggcacgccacggcatctgctgtttgataatgctaaggccattattctggagcgggacgtctatggcgaggggcttcatcgctggaaccctacgctactggctttagccgagaagtacggttttacgcccagagtttgtcggccttatcgcgcgaagaccaagggtaaagttgaacgctttaaccgctatctcaaggagagttttgtcataccgctggcgacaacgttcaagcagtcgggccttctcctggatgttgactccgccaacgcccgtgttggggcatggcttgttcatacggctaacgcccggaagcacggtacgaccggggttcctcctgaccagcgattacagaaggagctcgcagcattgctgccattaccggtaccagggctgttctccgttccccgactagccgatgctccccgacgggctctgccggtagagagtattcagcaccctctgtcggtttatcagtccttactggaggagcgttcatga

SEQ ID NO: 391903 - DNA, 543 bp, Salmonella enterica
ttgccaggagaggtcaaaggtgaacgttattatctgtatatgatcatggatgtgtacagccgtaaaatcgtggcggcagaagtgcgggaagttgagcgtggtaaatatgctgcggctctgttgcagcgggccatcatcgtggaaaactgccggaatagcggtctgatcttacactcagacaacggggcgccgatgaagagcttcacgatgctggccaaaatgtacgaactgggtgtctgctcgtcgttcagcagaccgcgggtcagcaatgacaacccttacccggagtcgctgttccgtacgctgaaatactgccctgaatggccagtggatggcttcagcaatataagcaaggcgcgagagtgggtgcacagcttcatccgctggtacaaccctcagcaccggcatagcgggataaagttcgtcacaccagagcaaagacatccgggactggataaggggctgctcaaacagcgggagaccgtgtacgaagcagcacgatgcctgcatcccgaacgctggtcaggaaaaacaaacaactag

SEQ ID NO: 391904 - DNA, 675 bp, Salmonella enterica
atgaacataacaatccaggagcccggcacctccgccgggtctgctactatcaactggacgattcttaaagatactaatttaaattttacaaagatattcggtgccgtgatgggcactggtaatgagtgtagtagtgaaccagatacaccactacaatactattgtacttacgagcgtacagcagacatcgcggttaagttatttgtcgagaatgaatttaaagcaatcaacatatcaaagtcagttcagtcgataaacgatgttctgttcattgtaccagtcaccctgggtactacatcgggagcatcaggaacacctggaaaagggataaacacttcgccctttaatatccgtattctgtcaaaagatttatttaagctcgaggttaatccgcagacagctaatctgggccgtttatacaaaactgatacaaatttgttcaggtcgggcgattttgaagtgaaggttactcaacaagaaaacaccgcacccaggcagagtttcattcttccactggaaattgcttttcagagcggacaactctccctgacgacaaacaggggttgcaaattaaaaacgacgatggcgcgcttaacgacctgcagcttgcaatcagagataaaacttcagatgaacttatcacctttgatgaaaaaaatctatgggaacccttaa

SEQ ID NO: 391905 - DNA, 507 bp, Salmonella enterica
atgtgccctgacaatacacacgcaaagaaacagaatattttcccgggtaatgatattcattatccttcccagacgaaccatgatgcctgttttattccggagtgcgtccgtcagtatgccggcgagcctctgtatatcatcgtggcgcactggtgtatgcagcaacaggactgggtacagcgcaacctgatatcagaggcatttcatatcacagccaggcgggccagctacctgatttcctacctgagaaataaaacctcccgggtggtcagcttatgtcgtcacgagacgctgcccaataaagcacggcgttatgaaatctgtgtcatccgtgttcttgaagccccgaagccggcccgacggaaacagacttctgcaccaccggcctcacgccggcgggtggggaatgctgataaagcacaggcgaacgaactgtggaaccggttatgcagcaaccggaaggccggagaaattctgaagaaggagaacgaagatggcgaagtataa

SEQ ID NO: 391906 - DNA, 804 bp, Salmonella enterica
atggcgaagtataacccggcaccggcccggcaggtcatcattcacggtgactgctggccggtggtgagtgcggtacagtatgtggtcagggcgatatatcctgaatgccgctgtgatattgccggttcactgccgtacctgcttcagtatctgagaggagcacctgaagccgtgttaatactgtgcctgcggccacgggagcatatttatcttttttatgccctgaaaagtctgcttccggagcatccggtgctggtcatcagcgatgagctgcttttcagtgaccggctggtactgcacatctggggaggcatttcctgtgcgtcatattgtgaaactgaatccattataacgggtctgcagaattacggtcactgcccttcccctttaaaaaaaggaaaactcccccggttcttatctgcccctgagtgcgtgacaggtttttttgcagtcccgatgatttttaataacccggaacgcctgatgagatttatgtcattactgatgtaccgcgcgaccacggattgcggcatcacccgttcacagcagaaattactgcggacgctgtacaaagggcattacactctgtcaggtctgacaaatgctctaaacagaagcgagaaacaaatctggcaggacaaggggcggattttaatgaaactgggaatgagaaaccggctgcatgaacttctttacggtacacgcttctgcccggatatgcagcggacagcatttatttctcccgctgatgtggaaactgtgagttcagggaaatgcagtgaagtatcaggtgtgatgaggtag

SEQ ID NO: 391907 - DNA, 3612 bp, Salmonella enterica
atggcagtggaaaataaattcaaaattaatgttattgccgcgtcagtgctgatgggactgagtttgtcagccatgacatctgcagtggcggccgacaaaaaagaggcagaaattgctcccgcgcctgctaaaaccaccctcgcggaggtggtaaaggctgttaagccagacgaagtcaccttcgataaaggagccgcaggagctaacccatcccaaaaagagagtctgaaagacctcattgcgtacctgggtgataagaatccccccgttcacgatgatggcattaaatctgtcgaccatgcacgcggagtgctgggtgggaaatatcagacggcagcggcaggaacagacgctaaggcaacggcagccgcgctacagaatcttgttgcgtttaaccgggctaccgctgccgcaatggtgaagcttgacaccgccgcgctggatagcgctgtgaaaagtaaacaagttgttgccacaaaaatcagtaatgaaatcagtacagagctgaagaagttgcctgacgctgacagtaaagccagggctgcatatgaagcggcgatagctgattttctggaattgtctcctgaagaccaggctaagcaagggaaacgggatgaactcaagacaaaactgacaaaagaaggtggtccgctggtttcgggtgccgacatcagcgatatattcgataacggcagtgacgtcaaaggtggtttcaaaacctatgatgaactgttagcgcagaccaactcgggtaataataaactggcaagtcatgaggcgcttatcaagaaacaggtcgagctgggcaatgagctgagtactatcactggtgcccgtaagaacctcgccgacagcatgaagactctcgccggcaatatgccatttttcactcctgaagagcagaaaggcgcccgggaaacatatctgaccgcgctgaaggccatcagcaaaccagcaaccaatgcggacagccagagcaaagccgcgaatgccggacatgtcacgcatattctcggtagtctgaacgctgatgagctgaaggactttgacccgcttaccggtgaatataaatccgtaattgttaatgttgatgataaaggtaacgtcaccggtgtgaaggataactttacccgggatgacctgtataccggtacacaggataaaccatttaccaccactgttctcgatatccgtgccctggagctgggtaacggtgcgcttgctgataccaacacaatcaccgtgggtgaggctggtaccaaagacaagaaagcctctccggttgaggtctgggctaaaactgccgatagtgcaggtaccccggcggtaaaactgtccggtgaactgagaaccgccaccgcacagctggatgaaaacggcaagacggtggacgggcagattgttcgtggtgctgaccagattcatctgcagaacgtcaatatccacaacagcttcacgcttgatgataaagtgaagatgctggccgatgatgttgctgcgctgaaccagcaggccagagataaacttgcagcggggcagtctgctgtgactgttagtgagtggctgaaaaaatcgaataattcactgagcactaaatacgacggacttaaagtgaccggtctgaagattgacaccaaaactttcaatctgtcatttgaccctgaaaaggggggggttgttaataataaagacgctactaaggcaccggcggacgccaatatcctgctggataatctgaacatcaccctgcagaacgacagcctgaacggcacatcaactgcgattgccctgtccggagccagtaaccacattcaggccactggtggcgtgtttgatgccggtaaagcagataatctgccacaggcaaacgttcttggtatcactggtgcaaataaccgcgttgattttatcggctccacgctgaagggtgatattcgctccggtgaggcaggtaacaccgttaacctgaacagtggcagtaacctgactggtgatgtggtcgtgagagcgggtaatgacttctcgcttaatctggacggaagtacctggactggtagaacatctgatgaaacacacggttcttacgttgatgcggatgtcggcctgagcaacaactccgtctggaatgttgtcggtcagtcttcaataaacagcctgacactgaacggcaacaacacgcttaatcttgtttcctctgcaggccagacacaactgggcgggcatggttttgccggacagaaactggcctccactctgactgtcgatacagacctgaccagtgatggtaagggggtgacttctgttctggccgggacctactcacctgacaatctccacagtctgacaaataccggtcttgctgacggttatcagtttggcaggattgatgtgaacggtctggcgctgggtggaaaataccgcctgtccgtggaaagtgccggtgctgagccgtccaccgttggtggccgtctggctgatgaggctgacgcagccaaagcacacgcatttgtgtcatataaaacgtctgaaaatcgtgttgtgacggataaagacggtaagccggtcgtcacggacggtaagccggtaacgattaaacaatctgacgctgatttcaccagcctgagcgcaccggctgaactgggcgtgtaccagtatgccgctgagaaggtgatggacggggtgaacaaccggacaaatatctactacagcagcacaggtaagctgtccaacagtgctgccaccgtggtttctctggcggcagccccggttgatgtggctaatctgcagtctgacaccctggcgaagcacatgaacagcgtgcgtcatggtaaggattccggcgtgtggctgtcctacttcggtggggaaaaccgcaacaccacagcggcaggtccggaatacaccctgaagactaacggagtcatgctgggtgctgacaccctgacagagaacgactggctggccggcgtggctgtttcttcagcccgctcagacatgagcgtgatgaacagcagcggtgacctgaacacctacggtgcgcagttctacatgtcccgtcgttatgacagcggtgtgtttgtggacagtgcgctgcagtttaaccacttcagcaatacagccaaagcccgcatgactgatggtcagcaggcgaaggccgacttcagtggtaacagctacggtctggaagctaaggtgggctatgcctggaacagcgaaggattctttgctgagccgtatgtccgtgctgcggcccgtgcctttgacggtgagcattatgccctgtctaacggtatgaccgtgaacagcaacgactataagtccatgcagggtgaaatcggtgctgacctcgggtaccagtatgacatcagtggcggttacgtgaagccttacctgcacctggcggcgctgaatgagtttgctgacggtaactccgttcgcgtgaacaacgtttcactggacaacagcgtgaaaggcgccgccttccaggcgggtctgggagctgaagtgaaggtaacggataacctgggtgggtatgcagcctttgattacacgaaaggcgataacaccgagcgtccgtggcaggccactgtgggtgtgaactacacctggtaa

SEQ ID NO: 391908 - DNA, 1116 bp, Salmonella enterica
atgaagaatacttttattatagtcagcatcatcctgtcgtgtaacctgttaactgcctgcggtggcggagggggaaacagtagcaaaacacacagcactacgacgagtgaagcaaccggggtcgtcaatataaccacgtcagtcactcccggttcatctgataataattcaggtggaacagcagaattatccagctcaacggaaaacaactccgtaaatcattcagggtctacatccgtcacaactgaagaaaatgaaactactgatgttactgatgttactgatgttactgatgttactgatgttactgatgttactgatgttactgatgttactgatgttactgatgttactgaaaataaagtacaaaatgaacctgtgatatcaaccccatccagcgacccccgtattccggaggctgaatatcacacaggaacaatccttacccgtacagtcaatgataccgactccaccatgctccataaaagcaacgtggtaaacaaaacggatgcttatactctcagcatgaaaaacaatgagattgttgtggatataacgccattacatacaggcgatcctgatgattaccgaaaacttgtgtccagaactcttaatattctgagaaacagtgatggcgaagctgtcggattttacggcatagtggaaacgcaaacgagtgaaaccacccggaacctgtcaggtaaggagaaatatggcagaacagattatattgttgccatgaatgacggggaaaagaagctcccttccgtggaggctaattatatcggtaaactttattacgatcaggaacaggccccgcgaaaagaagctgatataagcctccgttatgaagaccgtcaggtgaccgggacaataatcgacaaaacgcgtccacatttcagcctgacaattgatacccgtgagcctcacgatgtggatgaggacggcagtttcatggccgcgttagtggggacaaataatcgtgcagaccccaaaatgcatggctacatcgatggcggtttttacggtaaggacggtgaaatcgtcgccggttcggttcgttccagagatgatgacagctggggtggcgtattcggaggagaaaagcaggaataa

SEQ ID NO: 391909 - DNA, 588 bp, Salmonella enterica
atgtataacccctgtaatgaaataacgcccctgattgaggtgtaccagcgctggcttaacgaccagacacgacttgccgttcgctatggcatcagtacccgtaaaacacaccaatggcatactctgacgaccaccggcatcacgctggcagacggacggcgggtagccatggtggttccgtcctgtctgctgtcggtttcaccgacggtgagagacaccgggaacgagggtactgtttctgtactggccgatatcagcagtctgcgggcttatccgcagttacccggtattttgctgagtgagtgtattcgcctgcggcttgatggtttacatgactgtcttgagcaggttttcagccgtctgaaggagccgggtctgcgggagtccctgacgctgctgtgctggtacgagctggtgaatggcctgcaaaacagcgactggcagtatctgccggcgttaagcgagcaggaggtgaaggtatggatggaaacccggctgtcgcagtattcatcgctgtacagcgtagtggatgaatatgtgttctttgcctgctttggtctctggtctgataaccctcaatatttgtag

SEQ ID NO: 391910 - DNA, 399 bp, Salmonella enterica
atgatgacacattgtcatacaacgcccactgacgcacacaaggcggaggtggaaaccctccgtaaggtccttcagcagtccaccgaccagtatccacgcctggcggtgtttctgctgacattacccggcataactccggaagccgtacagcggtttcacaaaagtgtttatcagcaggtcagcggactggcttccacccgtcagctaagcggcagaccggtgccaccaacgatactgcgctggatttgggcgtccccgccaggtcagacgggcaggatgttactgctgctgaaccaggacaccttttgtcatccccgttacgacagaccaccggaccgctgttttgaaacgatggagacattactccgtcagtcgtggaggacggaggatatcccatag

SEQ ID NO: 391911 - DNA, 399 bp, Salmonella enterica
atgcgcatgctgaaatgctacctggcaaataaccgtgacggtcactttgtgacggctgaggaagccatgaacgcacccgggcagatatggagctgcgcctcctgtggctgtcgtctggtgttacatgccggctctgctggtgacccggcgtggtttgaacatgaccagcacaccgtttcgacaactgttctgatgcagtgtgcctggcttgacccggaagtgaaagccgaagcccggcacagaaaactgcgcagtatcatcggcgggctggatacgccagtgacggtacggtcctggtactgcgtgtggtgtgggaaccattaccagggggagaaacgctgtgtcccctgcgggacaggcatctacagcatcgaagacacagacgctggaaccccgtga

SEQ ID NO: 391912 - DNA, 420 bp, Salmonella enterica
atgtacgccaaatcctttatcgcgctcgatggaaacggtcgtctgaccggagcccgtaccgcacagactgccccttacgactgctatacctgccatctctgcggcagtgcactgcaataccatccgggatacgacacggaacgaccgtggtttgaacacgctaccagtggtctgacgggggatggtcagcattgcccttacgtgaaccctgacacctgcgaaatccggctggtgaaacgtctgcaacggtgggtaccacaagcgctaccggtggtccgcaaagccgactggcgctgtacaaactgcaattctgattattatggggaacgctactgtctgaactgtcgcaccggtgaatacagccatatgctccctgatgctgaaaagcggactgcggaggtgacgtcatgcgcatgctga

SEQ ID NO: 391913 - DNA, 582 bp, Salmonella enterica
atgcaaaataaacctaaatgggaaccagactggtatctgggatctcttctgaacaaccatatcaatgaaatggttgaccgctactcctgcctgcgggcactacgcatcgatctgttctatcagcatcataccgctaagtttttcttgcaggatcaccggcaactcgaatgggatgtcagaaagctgatgaaccgtatgatgcaactcgaagcggttgtcggtttcttctgggttatcgaatggaccgaagatcaccactaccatgcccatgcccatgcccatgccgtatgctggctggatggtagtaaaactcagaatacctatccctgggcgcagcaagccggtttgtactggagcgatatcactgaccgggaaggctggtatcaccgatgtgagtttaaagagcattacgaggccaatatcaatattccggtgtgttatgacgatcctgacagtatcgacaacatccgtcaggtactggcgtatctgaccaaaatccagcagaagcatggcctgccgctctacggctgcaacgaagtaccaccgcgcccactgacgggacgaccacgacgcagtctctga

SEQ ID NO: 391914 - DNA, 234 bp, Salmonella enterica
atgaccgcactgaatataaataatacacacagtaccacgctgctttctgcagaagacccgcttatcgacatgacctttatcaccacgtacaccggtatgacggacaagtggttctataaactaattggcgacggactgtttccgaaacccatcaagctgggtcgaagctcccgatggcggaagagcgaagtggaagtctggctccaggagcgtatcgaccagtcccgtaaataa

SEQ ID NO: 391915 - DNA, 570 bp, Salmonella enterica
atgaattacacctgtaatccttactggcagcaacgcattgccgatacttttgactgtgcgctgaacgcgtacccgcgcgtactggccctgcgcgttgacctcaggctgccggatacgcctgcagccaccgatgccgctgttatctcccgcttcaccgatgccctgaagtctcgtattgatgcgtactttgtgcggcaacgtcgcgagggaaaacgcgtctggccgaccacgctgcgttttgtctgggcacgggagtttggtgaaataaaagggaaaaagcattaccacgtggtgctgttactgaaccgggatacctggtgtgggccgggggattacaaagacccggattcgcttgcaggcatgattaaacaggcctggtgcagtgccctgaaggtggatgcacagacgcatgccgttctggcgcgtttcccacagagtccggtgtcatggctgactcgtggagataatactcagttgcaacaggccctgtcgaaggccgcttatcttgccaaacaggagaccaaagcgaccggcgatggtgagcggaactttggctgcagccatggctga

SEQ ID NO: 391916 - DNA, 279 bp, Salmonella enterica
atggtggcggtatacaatgagatggcctccggtagtctctccagacaacagctcagcgtgctgcctgagcagattatccatgccggtaactttggaacagatgcacgttttgcaaaactgcgtgctgatcatcaggagctgacggccctgaataacaatatcagcacaatgcgcatgcaactggctgatatgccggagcgacgcgctgagctatgcgggaacagtcacttccagtgtgatcgtatgcgtaaactcatcgaatttatcgatgatgcctga

SEQ ID NO: 391917 - DNA, 207 bp, Salmonella enterica
atgactacccgtccctcactgaccgaagaccagttgattgatatggcttttatcaccagtctgctgcaaatgacagacaagtggatatataagctcattaaggatggagctttccccaaaccagtcaaactgggacgaagttcccgatggttaaaaagcgaagtcgaaaactggcttcaggaacgtattacccagtcccgtaaataa

SEQ ID NO: 391918 - DNA, 891 bp, Salmonella enterica
atggtcaaattagtgtcgagcggcaggggcaaaatcagctatctggagaaacgattgtctgataacaattatcattttccatccagtccagcggataaagattatccagcctatcagcaacgggttatacgttcatttatttctgcaggaggccaggaacagacgatcaatacatttctggcagagacagaccgcttatatgcagaagctttcccgtccgaaaatgaacttaaatggtatcaccatgatccacgtgcaagtttatggctggtctgcgaactatatgaggaactgaaaagcaacagggatgaaaatagcgccagttatttatcaccgacatcattacaacccgctcataatgtcagaatggatgccatccggtgctgtattgacgactggccattaatgctgtttacacctgcatactttctgaagaaaaaaagtattgaatgggctgacctgctcgacaaacataacttgtttcgtgacgttaatgccaggagcgttgatgtctgctcatggctgaaaaatcatattcatgaaaaaacagacatttccttaaatcgtacttgtggtaatacacctgaagaagtcatggcctggtgttatgccagctattttatctggagaaaaaacaacctgcattcgcctgacacagtggagctatttatccggaagtttaagagtgcctggtcaacacaaaaaaatcgaataaaaaataaaatggagaaaaagctcaaaccactcaacgtaaatatttcacaggaggcgcatgacatgctgagacacatcgccacagaggaaggcatctcgaatgatcgggttattgaaagtgcactaatgctgatttacaaaaacaaaacaaaaaaaataaaacatcattccaaataa

SEQ ID NO: 391919 - DNA, 216 bp, Salmonella enterica
atgggattctgggataccgccgggaaactggctaaagaagtggcaaaagacgccctcgacagtgcgcgggaggtaagaacgattcatgaccgactggaaacaaaaagtagcgcagaacttaagagaattgtcaccgacaacggtattttcagcagcgcaacggagaccgaaaagcgtctgacacgaaaggttttgcgtgaccggggcgaactttaa

SEQ ID NO: 391920 - DNA, 171 bp, Salmonella enterica
atgcctgaatccacagttctccccgaagggacgttcacccgggagcaggccactgcggtggccgacgaatacactaatatcaccattgaggacgaccagggtacccatttccgtctggtcattcgcgataccgacggcatgcttatctggcgagaccggaactttgcctga

SEQ ID NO: 391921 - DNA, 435 bp, Salmonella enterica
atgtttaattacgccgtgaaacttgagcacgatcccgacactaaaagctggattgccacatgtcgtgatctaccgctctttaactccgtaggcgacagtgttgatgacgcgctccttgagtctgttgatggggctatagttgcactgtcaatcgaaattgatgcgcggcgcccaataccggctgccagccagccagaagaaggggaatatgttattcaccttcctgtgctggttgtgatgaaggccgccctgcataatgcaatgattgccaccggcacacgaaaatccgatctggcgcgttctatgggaatgaagggaccgcaaatcgaccgccttctggatgtttgccactcatcaaaggtggaaacagtagagcttgcactacagcaattaaaccggaccgtacagattagcgttaataaggttgcagcataa

SEQ ID NO: 391922 - DNA, 183 bp, Salmonella enterica
atgaaatacaacgagttcaggcggtggctcatccgacaaggtgcaaagtttatcaatgcgccaggtggcgggagtcatcaacgcgtcatactaaacggcagggaatcagtatttccctaccacggcgctaaagagataccggagccactaagaaagaaaatactcaaggatttggggctgtaa

SEQ ID NO: 391923 - DNA, 390 bp, Salmonella enterica
atggctatttatactcaatccccacccccacaactcccacagcccctgcgattaccggatatcgatccactggcaatagccgggttattcggctcaatcccggcaggcccaatggagatagtcagtgacttcaacaccgcgctaatgggcttcacacgctgtacagataaagtgcccaacgttgcagaccctggctggccgtggggtacggtctggacgatatcatcaaagggcaccggacagactggcaagcgccatatccccgccgttctggagcagggcgaggtgacgtaccagttgttctacgcaacaaatggctcgctctattcgcggggtggtatctggttaacgggctggggcaaatggcaacaaaggtggcttaaatcatga

SEQ ID NO: 391924 - DNA, 375 bp, Salmonella enterica
atgataatactgaactcaaacacgctgggcgaacagtcaggacaatcagcgctgaatctggcagacctctcaggccgttttggactgttttatgtcaacgatgcgactgtatgtgaaaatctggataccgcgatgattggctatatgctcgtcactcccgatacaaaaggcaatcctcagtcaggcgaccaggcgttcggtatggtacagacgctggactcgctcggtgcaggtgatgacggacggcgaacgttgccaccagtgggaggctcgaaagagtgggtaatacaaatcctgttcgcggcagacggtagcctgtacacccgctacagggtgaacaacggcaaattttcattgttcatcaagcgctggtaa

SEQ ID NO: 391925 - DNA, 123 bp, Salmonella enterica
atgcttacgatgatccaggaaccgctcgccatttttttgttgacttccacccactgcaagcgcgaaaaaataattgttcctacgtatagcagagtgccgaaaggcaccatgttgttatcgtga

SEQ ID NO: 391926 - DNA, 324 bp, Salmonella enterica
atggtaggtatgagagtgtcaacgatgcagattaatgaggcttttgcgaaactttcggcaagtggcttaggtaaaaatttacaaacggaaatacagcgcaggcaggcggaagttaaagaaaaaaatagcgtaaaagcagaagatagcgcttctgaaaagaaacagacgtgcgaatgcaatcagaaaactgctgatattaaagcggagatcaagaatgcgatagcgcaaaaggattatgaaaaagcggctcagttggcaggagtaaagagtccgtacaatgcctttagttataaaggattatccctgttcaaagttaatgtctga

SEQ ID NO: 391927 - DNA, 468 bp, Salmonella enterica
atgaataaggtgatgtacggagaaaacaggagacgtggcggcaggaatatgttatgccggctgctccggtccggacggtggtttttatgtctggcgctgctctgttctgtcatgttgccgggatttgccaacgcggcagagcctgttccggctacagcgcaatgtacggactggaacaatagccagggagatatacaactaaagttgccggcctctgtcactattcagcccggtatggtcgacattcctcccatcccgtcgatcaccgttaagtataaatgtagcgtaccggacagtaacaatcacacagtggctatagtctctcttgccgatgcgaataatttaattagctcactgaaatcacttgggctgacactgaaaatgacgattactgatagctccggaggggccgtaggtcattggacttttcccgccccggggggggggggatataccctgaatatgtag

SEQ ID NO: 391928 - DNA, 1881 bp, Salmonella enterica
atgtccagaattaccggacaaagcgaatcaaaacatggcgatcttgatttttacgaatttctttatttatctacacgaattttccatgtggacaataatgatatacaagaaaaaatactatctgtcatgttaaggaaggatattatccagaagatgttgaggttagaaaaaaattatggcgtgatgacaacatatcttggactactacaagttgcatccaacaaaaataaaataagtagtgacggcatcatgactattttcaactttcttgctgataagaattcgttttttattaaaagaattatcgatagcaaagatggcgagcagcttttcagttcttatgtttctctgttggattacgccatcgatttcattgcgaaaagtaaaaccaatactgacgaggaattcaaacgtgtggttggggagatgaaatctcaacttcgtcagaaatggctgaatatggatgtgtttaaaaaacttgtcagtaaaaaacagcggcgtgattataaaaaattcatctctctgttgcatcatcgtgaattaacgcctacctccatggagttcgattctgaacagaaaaaaagacgtctcgacttcaggaaaaaagtgctcagaacgtcacaccgcataaataagtctattcgtatggagcctgaaaatagacaaccacacagtacagagataacctctctgggcttattacgatttgcacaaaaatacttccataccagtattattgagcctgagcgcatctacaggattgagcaagaagctatcagcatagttaaatctgcaattattcaacaagttaaaaaagaggtaataacaatcatctctcagcagtaccttgatgcagcgaatgatatattgagtcgttaccccggtaatttcgaagccattgaccaggccgacaaattacgtaacgaagctaagaatccatctaaagagatcgttgacaaaattgccagtgaactggcggaacagttttttagggaaagagagcaggattatattcccgttcttcggcagataatttccagtcatgcgaatttgcttccttttatgcaaacgtgggatgagcaagaagaacggatggtcgttcctcgttatgcgagttatatttcatccagcccagcattcaaccttttaattcaggatgttatcgtcggtgatcatgcttctgaacacaaagagccaatgatgcccaacagcgaactttctgttgaggattgtgcgagagtatccaaattaattgatgcgagtaaggatgtatcgggtataaatgcagatggtcaatatacaacggaggaattgtatattgaccagtatcgaaataaaacaggccagactaatgcctggattagcaaaaataaacgtctgcgtcttaatcataaatatccgcatacaagagatattaagatattttccgacgagaatatttttcctgcacaaagtgaactagcacaacaatcattcagtaaaacgctaaagaatagtacgagaaacagtctggaagatagtgaccgaactaaaattacaggagaaaccggaggaattcgtgttccaacaattgtatcgcatgcaaattctctgaacacaatgtctctacctaatggcatacaaaataatgttaatgcttcggtggatactggaaatgaaagagttaaagtaacgaattctcttgtagagaaccctctcactactgaaaagcttaaacctgaccttaactatttacaacctgtagagcatgagcgagagtccagagtggctcaagcagttactaccaatggcgcgttaagttatcacgctatttcatccacgtatgccattgacaaaaaagatgtaaaaaaattacaagacaaccttactctccagctctga

SEQ ID NO: 391929 - DNA, 249 bp, Salmonella enterica
atggaaaactcgaagtatcactatattgaaacgctcaaaaagatggttatcgatcgcagcgagcaggagataatcccggtgatcccgaacgaggagatggtcgccatgctggggattgcaccggggaaaccggtgctggagaaaatttctcgcggattcctgcaggatgagcgagtctttgaataccgccgcaacaccttcaaaagcgacgactataaatttacgctggttgccagacgacgccattaa

SEQ ID NO: 391930 - DNA, 1275 bp, Salmonella enterica
atgagtaagtttaaccatgtattgtccattaataccgacagggccccaaagagcatcggcccctgttctcaggctgtcgccttctcccattataataatctctctgcgcaattacctatcgaccccgacacaggggaaatggtggccggcgatgtcaaagcccaggcagagcagtgtttcagaaatattaaggctatccttgcgggcatccatcaccccatggatgacattattaaagtcactctgtttctgaaaaatatcgctgattttgatgccgtcagcctggtatacaaagctttctttccggattatgtcccggcactgacaatcgtctctgctgcggccctgccaatggacgccctcattcaggttgaagctctggtatctaacggcgaaggaaccattcccggagccccccaggctggcaatttgatcaaaatggcccgcaacaccgaaaatgcaccgcagaatatgttttccacccagacggtcgcattctctcactataataacctttctgcgcaattaccgattgtgccggagacaggaaaactggtgtcaggtggtattaaagaacaggttgttcagtgcttcaaaaatattaagtccatcctggaaaaaattgatgtaccttttgacgacattgtgaaaatcaacgtctacatgactgatgccgccgatattgctgcattcaatgaggtgtataccacctttttccctgactccgccattgccagagccgttgggtatttccctgcccgtagcgtcatgatagtacctgcgctactgatggatgcgctggtgcaggtggaagcggttatctcacacggtgatggtactccaccgcaggttactgaagaccgacatggtatcgtcattaagccgttcaactctgctaaagcgccgggggacgcgctctccacgcaagccgtcgctttttctcactacagccatattacggcgcaactcccctgcctgcctgaaagcggcaagctggtagcgggtggtgtgaatgatcaggcccgtcagtgtctgcaaaacattaaagaaatcgtcgggagtactggccattcgctggaggatatcgtcaagattaatatctgcctgaaaaatctcgatgacatggcggcggtcgatgaagtgtataccacattcttcccgaccagcacgccagcacgcagaaccctgggggtatcatggctgccggaaaacgtactggtacagattgacgctgtggtatctcacgctgaaggtacggccccggacaaagcctga

SEQ ID NO: 391931 - DNA, 378 bp, Salmonella enterica
gtggggcgcgatttacccgcctggggtactacccacgccgactatttttatggtgcgatcccgtgtaaccgtctgatgaccgctgacgaaattaatggtgaatatgagtatcagaccgggcaggtgatcattgaaacgttcgaacagcgtcagctggagccgtcgcaaatcccggctgtactggttcattcacacggcccgtttgcctggggaaaagatgccgctgatgcagtacataatgcagtggtgcttgaagagtgtgcctgtatggggttattctctcaacaactaaatccacaattatcagtaatgcagccgtatctactggacaaacattatctgcgtaaacacggtaaaaatgcctgttacggtcagtaa

SEQ ID NO: 391932 - DNA, 423 bp, Salmonella enterica
gtgattattaatcatctcggtgaaataatcagtgcccgtctgactgccggaaatgttgatgacagaaaaccagtaccggatatggcgagtggtatttttggcgatctcttcggtgacaaaggttatttatctaactcgctgaaagaaaagctaaaagatatgggaatcaatctcatcactaaagtcagaagaaatatgaagaaggtgaagcatactgactttgaaaaagcggtactcagtaagcgttctgttatcgaaaccgtttttgatgagcttaaaaacttatgtcagattgagcatagtaggcaccgctcaattaataacttcatagtcaatttattatcaggactggtggcttattgcctgatggacaagaagcccaacctgtcgataagtacatcagcccctgtgttgacagcatga

SEQ ID NO: 391933 - DNA, 282 bp, Salmonella enterica
atgagatttcgacaatttaagaagttttatcagtacgttagtatatttatgcgcagggagtttcctcgtctgctgtcttacaataggttcattgaactcatgccccggtgtatcgttttgttaatggtgctgtttgattctcttaaaggatcatgcacaggagtctccgtcgttgattccactccgctggctgtttgcggtaatcttcgtatcagtcgtatggatacgcagaacggggtaaaagctccacaggctggttcttcggattcaaattacacgtga

SEQ ID NO: 391934 - DNA, 165 bp, Salmonella enterica
gtggactatattaccgaactttactgtctcgtcgatgatttctggcaatccgtcaaagaacaaatcgataactacatgatttcagatgataaaaaacacagaagtcgtcaatccatactctcgctttcagagatgacaacgctggttattctctttatgccatga

SEQ ID NO: 391935 - DNA, 390 bp, Salmonella enterica
atgaaaaattggatgaagtggttagccgcctttgcggttgtgggtgcactggctggctgtgcgcgtactgcaccgattgataacatacaatcaactgtgagcgccggtcataccgaagcacaggttaaaaatgccattctgaaagcgggcgcacagcgccagtggatcatgaacgatgcggggccgggcgtaattaaagcgcgccagcagaaccgcgaccacattgttgaagttcgcatcacttactcagccactggctacagcatcaaatacgacagcagcctcaacctgctggcttccggcggtaaaattcacaaaaactacaaccgttgggtacgtaacctcgataaagacatccagatcaatctggcctccagcgctacacaataa

SEQ ID NO: 391936 - DNA, 1059 bp, Salmonella enterica
atgtacgaaaaggactccctcagcgcgcttgatgccatcacggaagcacagcgcatcgcatttgcccctatgctctttcaaaccgcgctcagcctgcgtaacgccggagtgctggcttatcttgataaacaaggtaaacagggagccacgctcgaaaaaatcgtcgctaatggcgcgctaaatgaatatgccgtaagcgtactgctcgatatgggactcagcgggcgcatcgtcacctgcaaagatgagcgctactgcctgtctaaggtggggcatttcctgctccacgacacgatgacccgcgtgaatatggatttcacccaggacgtctgttaccaggggctatatttcctctacgatgcgttaaaggcgtcgaaaccagcagggttgaaagtcttcagcgatgccgggaccatctatccggtgctgtctcagttaccgtccccggcacgggagagctggtttgccttcgatcactactattctgacgccgcttttaacgccgcgctgccgcatattttcgcaagctcgcccggagtcctgtacgatgtcggcggaaatactggtaaatgggcgctgcgttgctgcaaattcgatgaaaatatcgcgataacgatccttgatttaccacaacaaattgcgctggcccgccagaatgtcgaaaatgcaggattatctcatcgcatcagcttccatgcggcggatatgctaagcgatgcgccgctacccggcgaagccgatatctggtggatgagccagttcctcgactgtttttcacccgagcagattgttgccatgctgacgcgcattgccgcggtgatgaaacccgatgcccggctgtgcatcatggaactgttctgggatgcgcagaaatttgaagcggcttcgttcagcctgaacgcctcctcgctctatttcacctgtatggccaatggcaatagccgtttttacagcattgaaaagttttaccgctatctggaaatggcaggtttccgggtggaacagcgcctcgataatctcggcgttgggcatactttattgatatgcgagaagttttaa

SEQ ID NO: 391937 - DNA, 726 bp, Salmonella enterica
atgaaatttgcattaaaccttatcgactggcaggcacgagcgcctggactgagtgaaacatcacagtggcagcaatggtcacggcagccctttgccatcgatcccagcgccgcgcaggcaaaactgactgaattgccgatgatgaccgcccgacgtctgaactcaggcagcaaactcgccgtcgagtgcgggctggccatgctgcgtcggcataccatcgatgccgtgctctataccagccgtcacggcgaactggagcgtaactaccgcatcctgcaggcactggcaaccgaacaggcggtctctccaaccgacttcgcgatgtcggtacacaactccgccgtcggtaacctgaccatcgtggcaaaacagccggtggtttcttcatcgctgtctgccgggcgcgataccttccagcaggggttatgtgaaattatctgcctgctgcaggcgggctataagcgggtgctgatggtcgattttgacggtagtttaccggcgttttatcatccgggtctgccaccacaaatgcccacctggggctacgccgtcgcgctggtgtttgaagccggagaggcgctgctgtgcacctcgacgccggcagacgaaagcgcagaaacaccgttgccgcagagcctgcaatttttacagcacgttcttagcgataccccggactttacccttgcaggcgataacctgcagtggcgctggagccgcccgcaatga

SEQ ID NO: 391938 - DNA, 813 bp, Salmonella enterica
atgagcctggccgcccgtctcaatcagttctggcgtctgctgatgaccggaatgtgcttcgcgctgtttggcgtgggtgggttgctgctgtcgctggtctggtttaaccttctgttactcacggtgcgtaataataaccgccgtcgacgcatcgcccggcgcagcatctctttcagcttccgcctcttcctgcgagtcgccaagctgaccggcgcgctggattaccgcatcgagggcgctgaaattttgcgtcaggagcgaggatgtctggtggtggcgaatcatcccacgttgattgattacgtgctgattgcgtccgtgatgccggaaactgactgtctggttaagagtgccctgctgaagaatcccttcatgagtggcgttatccgcgccgcagattacctggtcaacagccaggccgatgccctgttgccgcaaagccagcaacgactggcacaaggtgacactatcctgatttttccggagggcacacgtacccgtccgggagaaaaaatgtcgctccagcgcggcgcggccaatatcgccgtgcgctgtgagagcgacctgcgcattgtagcgattcgctgcagtgaacacctgctcgataaacagagcaaatggtataacgtgccgcccgccaaaccgctatttaccgtcacggtgggtgaacgggtaagcattaccgattattatgatgctaaaacacaagaaccggcgctggcggcaaggcagcttaaccggcatcttttagagcaattacaattagttgaaactcctttttcaggacttaatgatgcaagcgctttatcttga

SEQ ID NO: 391939 - DNA, 258 bp, Salmonella enterica
atgcaagcgctttatcttgaaattaaaaatcttattattgaaaccttaaatctggacgaactgaccgcggacgacatcgatgccgatgctgctctgttcggggatggattaggtctggactctatcgacgcattagagcttggtctggcggtgaaaaatcagtacggcatcgtcctgtccgcagagagtgaagagatgcgtcagcacttttactccgtggcaaccctggccgcttttattcactcacaacgcgcctga

SEQ ID NO: 391940 - DNA, 252 bp, Salmonella enterica
atgacagaacaacacgctatctaccaggaagtctctgcacttctgtgcaaactttttgaactcgccccggaagacattactcccgaggcacgcctgtacgaagatctcgagctggacagcattgatgccgtcgacatgatcgtgcatctgcagaagaaaacgggcatcaagatcaaaccggaagagtttaaagccgtgcgtacggtgcaggatgtcgtcgacgccgtagaacgtctgatgcaagacgcctga

SEQ ID NO: 391941 - DNA, 564 bp, Salmonella enterica
ttgcctgtcgttcaggtagcgaccggggcgctactgctggcctggccgtttgtcatctggtttggtctggcacacaacagtttgcactggctgctgccgctgatggcactgctgctggttttacgcttacgccaggcgcggaaaaatgccgggccgatgtgctttgccatgcagagcgtggcgcttgcgggcatcgcgctgtgcgtggcaagcgtactgctgaaaacccaccagctgctgctgttttatccggtcgtggttaatgcggtgatgctcagcgtctttggtgggtcgctgtggagcgccatgccgctggtcgagagactggcgcgtctgcgcccccccgatcttcccccacagggcgtacgctacacccgtcgtgtgacacaaatctggtgcctcttcttcatttttaacggaactatcgcgctctttaccgccctgcacggcgatatgcgaatgtggaccacctggaacgggatgctgtcctatttgctgatgggcgcactgatggcgggcgaatggctgattcgccgcaaggtcatgaaaagagacacaccatga

SEQ ID NO: 391942 - DNA, 1359 bp, Salmonella enterica
atgaatcagacgcttcccctgtcgcagtggctttgcgccccgcgcagtgatgaaaccgtcatcgcctggcttggcgatcacagttggactctggctcagttgcgctacgacgtcgcgacgctgctcgcagacctgaataagcagaaaggctcccgctgggcgctgtgctttgagaacagctatctgtttatcgtcgcgctgctggcgacactgtatgcgggtaaaacgccggttatccccggccactgccgcgcctcgctgctggacgagcagcgcgcgctgttcgacggcgtattgagcgacagcccgctggcgtggcacggcccgcagctgctggtcgattccgtgaaatgcgctaagagaccagcaaccgcgctgccagccatagccgccgatgcttttgtcgagctgttcacctcaggctcaaccgggcaaccgaaacgggtggtaaaaaccatcgccatcctcgatgcggaagccgccctgcttggcacacgtttcgctgaacgtctggtgggttgccgggtggtggcctccgtggtgccgcagcacctctatggcctgaccttccgtattttcctgccgatggcgctggggctaccgctgcacgcagccatgctctactacgccgaacagctggcagcgattagcccgcagcaccgctatctgttcgtcagcagtccggcgttcctgaaacgccttgaccaccagcttgcgccgccgccgatagaaatgatcctctcggcgggcggtatgctgccctggcaggacgtgaccgattcgcagtcctggtctggtatctggccggacgaaatttacggcagcaccgaaaccgggatcctcgcctggcgtcaccgtcagcaggacgacattccgtggctccccttccccggcgtgcagataaccccggaaggcgatgcctttcgcgcacgatcttcgcttatcgccgatgccgacggcctgctgcttgacgacgtgctgcacttcaacgacgacggacgtttccgccttgccggacgtcgcgggcgggtcgtgaaaattgaagagaaacgtatttcactgagcgaagtggaacggcgtttgaccgatctcgaagggatccgtgaagcggcggctatccctgtcgcccgcggaggccgtcagggcattggcgtgctgctggtgctggatgacgctctccaccaccgctggcaggagacacacagcaaagcgctggagctgtcctggcgccgggcgcttctgccgtggcttgagccggtagccatcccccgctactggcgggtgctggacgagatcccggtcaacagcatgaacaagcgcgtttatgctcagttacaggagttatttgatgaaacctaa

SEQ ID NO: 391943 - DNA, 354 bp, Salmonella enterica
atgaaacctaatgaaattaagcgtctgcaggcgccaggcggggagacggagattgtgctgcatctcgatccggcccttttctggtttcagggccatttcgccgtacaaccgctgctgcccggcgtcgcccaactggagtgggtgatgcactatgccaccaccctgctggcacccggttttcgttttcacagcattcagaacgtcaagtttcaggcgccgctgcagcctgacaccaccgtcaccctgacgctgaagtggctggaagcgaagcaaatgctgaccttcagcttccagcgccacgaaggcgacgcccgccacaccgccagcagcgggaagatccgtctatgtcagtag

SEQ ID NO: 391944 - DNA, 1692 bp, Salmonella enterica
atgtcagtagcgttctctccctgcattctgatcccctgctataaccacggcgcaatgatgccgaaggttctggcgcgtctcgcaccgttcggcctgccgtgcattattgtcgatgacggcagcgacgaggccacccgcacggtactggaaacgctggtcgcagagcagcccgacgtgacgttgctgcgtatggcgcaaaacgccggtaaaggtgcggcggtgatgcatggcctgcaggccgcgcagcagatgggcttcagccatgcggtgcaggtggatgccgacggtcagcacgctattgaagatattccgcggatgctggcccttgctgaacagcacccgcaggcgctgatttccggtcagccgatttatgatgactctattccccgctcccgactgtacggccgatgggtcactcacgtctgggtgtggattgaaaccctgtcgctacagctgaaagacagcatgtgcggctttcgcgtttatccggtcgccccaacgctgcagatggcgcaccgggtgaagatcggcaaacggatggacttcgataccgaggtgatggttcgcctctactggcagggtaacaccagctattttgttcccacccgggtgacctatcccgaggatggactgtcgcacttcgacgccctgaaggacaacgtgcgcatctcattgatgcacacccggctgttcttcggcatgctgccgcgcattccttccctgctgctgcgccgtcgttcatcgcactgggcgcagcagaaagaggtcaagggtctgtgggggatgcgctttatgctcaccgtctggcggctgctcgggcgcaacgcgtttaccgtactgctgtggccggtggttgccgtctactggctgagcgcgacccgcgcccgccaggcctcgcagaactggctggcgcgggtgcgcctgcagctcgccgcccggcagatgccggtgccaaagcccttcaacagctatcaccatttcctgcgcttcgccaacgccatgctggataagatagccagctggcgcggtgagctgcactttggccgcgacgtggtctttgctccgggagccgaagccacgctggtactcgataaaccgcagggcaaactgctgctggcctcgcatcttggcgacgttgaagcctgtcgggcgctggcgagcctgaaaggtaccagccctgtcaacgcgctggtgtttagcgaaaacgctcagcgctttaagcaaatcatggaagagatggccccggaagccggagtgaacctgttaccggtgaacgacatcggcccggaaaccgccatcatgctgaaagagaagctcgaacgcggtgaatgggtagccatcgtcggcgatcgtattgcggtcaacccgcagcgcggcggcgatttccgcgtcacctggagcccgtttatgggccagccggcaccgttcgcccaggggccttttattctcgcttcgattctgcgctgcccggtgctgctgatttttgcgctacgccagcagggcgtacttaacatccactgcgaaccgttcgccgacacgctcctgctgccgcgcgccgggcgccaggccgcgctggagcaggccatccaccgctacgcagcgcgtcttgaacattacgcgctgctgtcgccgctggactggtttaacttttttgatttctggcagttgccagacgccgccgataaggagtaa

SEQ ID NO: 391945 - DNA, 423 bp, Salmonella enterica
gtgctgaccgatccccgctttaccgccgaggttgaactgaccgtaccgttccacgacgtcgatatgatgggcgtggtgtggcacggcaactattttcgttactttgaaatcgcccgcgaggcgctgctcaaccagtttgattacggctaccggcagatgaaagcctccggctacgtctggccggtggtggatacccgagtcaagtaccgtgacgtactgacctttgaacagcgttttcgcgtgcgcgcgaagctcgaagagtatgaaaaccgcctgcgtattggttatcagattttcgatgccgccagaggtaaacgcaccacgaccggctacaccattcaggtagcggtagaggaacaaagtcgggagatgtgcttcgtcagcccggcggtcctgtttgaacgtatgggagtcacaccatga

SEQ ID NO: 391946 - DNA, 606 bp, Salmonella enterica
atgaaattctggcccgttgttctgctgctactgagcccgttcgtcagcgccgtaaccctcgacgagctgcagcagcgctttaccgagcagccagtggtgcgcgctcattttgatcagacccggacgataaaaaatctgccacagccgctcagatcgcagggtgaaatgttgatcgcccgcgataccggcctgttgtgggatcagaaaacgccgttcccgatgctgctaatgctcgacgataagcggatggtgcaggtgataaaccaccagccagcgcaggtgatcaccgcagaaaataacccgcagatgttccagtttaaccatctgctgcgcgcactgttccaggccgacagaaaggtgctggagcagaacttccgtattgatttccaggataagggacagggccgctggacgctgcgtctgacgccaaccaccacgccgctggataagatcttcgccacgatcgatctggcgggacaaacctggctggaaagtattcaactgaatgataagcagggcgatcgcaccgatatcgcgctttctcaacatcaactgacgcccgccacgctgacctatgacgaacgccaacgctttgccgcccagtaa

SEQ ID NO: 391947 - DNA, 2322 bp, Salmonella enterica
atgacgaacgccaacgctttgccgcccagtaattcccgccgcccggcgctgctgtggggcatattgtgcctggcgcttgtcggcgcactgctcgtgctgctgccgcagtcgcggatgaacagcagcgtgctggctatgctgccaaaacaggcactgggggcaatccctccggcgctgaatgacggcttcatgcagcgcctcgaccgtcagctggtgtggctggtaagcccggggaaaaccgccgaccctaaagccgcacaggcgtggctcaccgcgctgcaaaaatcatccgcgctcagcgaggtgaaaggcccgatggatgcagccgatcagcaggcctggggcgcgttcttctggagccatcgcaacgcgcttatcgatagcgctacccgtgtgcggctgcaaaacggcggcgaagcgcaggcgcaatggatcctctcccagatgtattcggcgttttccggcgtcagcgggaaagagcttaaaaacgatccgctgatgctgatgcgcggatcgcagttggcgttagcgcagaacagccagcgcctgcagctcaaagacggctggctggtgacccaggacgagcaggacaactactggtatctgctgcacggcgagcttgcgggcaactccttcgatatgcagcaaacccaccggctggttaccacccttgccggacttgaaggcgagcttaaagcgcagtacccacaagcgcagctgctgtcacgcggcactgtgttctacagcgattacgccagccagcaggccaaacgcgatatttcgaccctcggcgtggccaccatttttggggttattctgctgattgtgctcaccttccgctccctgcgaccgctgctgttgtgcctgatttctactggcatcggcgcgctggcgggtacggtggtgacgctgctgctgtctggtgaactgcatctgatgacgctggtgatgagcatgagcatcatcggtatttcggctgactatacgctctactacctcaccgagcggatggtgcacggcgcggagcattcgccgtggcaaagcctgcttaaagtgcgtaatgctttgctgctggcgctgctcaccaccgtggccgcctacctgattatgatgctggcccccttccccggcattcgccagatggcggtgttcgcggcggtgggcctgagcgcttcctgcctgacggtgctgttctggcacccgtggctgtgccgtggtttaccggttcgcccggttcccgccatggcaccgatgctgcgctggctggcggcctggcgccgcgacaagcggctgcgcattggtctgccggtggcgttgacgttgctgtcgctaaccggcctggcgctgttaaaagtgaatgacgatatctcgcagttgcaggcgctaccgccgtcgattctggcgcaggagaaagccatcacccgcctgaccggccagagcggcgatcagaagtggtttgtggtgtacggcgatacgccggagcagaccctgacacgcatggaagcctttacgccagcgctcgaagcggcgcgcagagacggcgtgctgaagagttaccgcacgatcccattaaactcgcaggcgcgccagcagcaggatctgcagttgctgcgcgacgcaacgcctgcggttgagcgcacgctgcaaagcgccggactcagtgccgtcacgcccgatctcagcccgatgaccgtcaccgtcgacgcctggctgcaaagcccggccagcgaaggctggcggctgatgtggttgacgctgccaaacggtgccagcggggtactgatcccggctgatggcgtcaccgacagccacgcgctggcggtgctggcggcgaaacagccgggtattgcatgggtcgatcgtaagctgaccttcgatgcgctgtttgccgagtacagagccctgctgaccggcctgcttggcatcgcgctcgcggtgattgcctgcggcgcggttgcccgcctgggcttacgcaaggggctgataagcctggtaccgtcggtactgtcgctcggctgcgggctggcagccttgtcgctcagcggtcattcggtgaacctgttttcactactggcgctggtgctggtactcggtatcggcatcaactacaccctgttcttcagtaacccgagcggtacgccgctgacctcgctgctggcgattaccctcgcgatgctgaccacgttattaacccttggcatgctggtcttcagcgccacccaggctatcagtagtttcggcattgtgctggtgagcggtattttcaccgcttatctgctttcgccattagccatgccggacaaaaaacgagaaaaacgatga

SEQ ID NO: 391948 - DNA, 582 bp, Salmonella enterica
atgaaacactccctctggcgcgctgtcgccctgctggccgccttcacccttgcgggctgtagccattcggttcaggaaaataacggtcgcccacaggcctggctggaacctggcgcgcgcgtcacattaccgaagccgggaataagcccggcggtcaactcgcagcagttgctgaccggcagcttcaacggccagacccagtcgctgctggtgatgctcaacgccgacgacaaaaagctgaccctcgcggggctctcttccgtcgggatccgtctgttcctcgtgacctatgatgaaaaagggctgcataccgagcagtcgatcgtcgtgccacagctgccgccggcaagccaggtgctggcagacgtgatgctaagccactggccaatcagcgagtggcagccgctgctgccaaaaggctggaccctcatcgataagggtgataaacgtgaactgcgcaacgcccgtggcacgctggtgtcggaaattatctatctgcagcgcaaggggaaacgcgagcctgtcagcattgagcagcacgcctttaaataccacattaccattcaatatctgggtgactga

SEQ ID NO: 391949 - DNA, 1170 bp, Salmonella enterica
atgatctacatttctgccatcggcatgattaatgcgctgggcaacaaagttgcagaagtggcagcgaacctgacccgtggtgtgtcaccgggtatgcgcccacgcgcaggctggctgctgggcttccctgaggcggttctgggcggtgtggacgcggagctgccgcccattcccgatagtttttctgctcatcgaacgcgcaacaatcaactgctgctcgcggcgctggcgcagatccagccgcaggtggatgaagcgattgcacgctatggccgcgaccgtatcgccgtggtgatgggcaccagcacctcggggcttaacgaaggcgacgcgcacgttaatctttcgctgaaccagcagccgagcccgcactggcagtacccgcagcaggagctcggcgatccgtcacgttttctcaaccgctggctggggcttgcgggtccggcgtttaccctttccaccgcctgctcatccagcgccagagctatcatcagcggccgccgcctgattgaggccgggcttgccgacgtggccattgtcggtggttctgacaccctgagccggatgccggttaacggtttcaacagcctggaatccctttcccccaccctgtgccagccgtttggccgcgaccgcagcggcattaccattggtgaaggtgccgcgctgatggtgctgacccgcgaaccgcagcccattgcgctgttgggcgtcggggaatccagcgacgcatggcatatctccgcgccgcatccgcagggcgaaggggcgattcgggcgattacgcaggcgctcaacgacgccgggctacagccggatgacgtgggctatatcaacctgcacggcaccgccacgccgctcaacgatcagattgaatccagagtggtgcatgacctctttggggaacgagttccgtgcagctcgaccaaacatctcaccggccatacgctgggcgcggcggggataacagaggcggcgatcgccacgcttattctgcaaatgcagctgccgcttccgccgcaggacttcaaccgcggcgagattgacccgacgctgcctgcctgcggcgttctgcgtgaagcacagccgctggcccgcccggtcatcctctccaactcatttgcctttggcggtaacaacgccagcattctgctggggagagtgtcatga

SEQ ID NO: 391950 - DNA, 477 bp, Salmonella enterica
atgagccactatttagcccctgccagctacctgccgcacgaggcgccgatgctgttgctcgaagaggtggttaacgtcactgacaataccgcccattgccgggtcaccgtcagccgccacggtgtgctgacaccgtttatcgatacccacggtcatctgccaggctggtatgcgctggagctgatggcccagacggtcggcgtatggtcaggctggcaccgtcagcacgacggcaaagactgcatcgcgctcggcatggtactcggcgcgcgcgaactggtctgcgccgaagggcattttccggcgggagcaactctcgatatcgaggtgaaactgctgatgcaggacgagcgttttggcagcttcgaatgcaccattaaagcagatagcgctcagcttgccagcggtcacgttaacaccttccagccgacgaacgaagaattaaccacgctttttaatcagggagatagcgcatga

SEQ ID NO: 391951 - DNA, 732 bp, Salmonella enterica
atgagtcgctcagtgctggtcaccggagccagtaaaggaattggacgcgcaattgcccgtcaacttgccgccgatggatttaccgttggcgttcactaccatcgcgatgaggcgggggcaaaagatacgctggccgccattgagcaggcgggcggcacgggccgcgtactcggtttcgacgttggcaaccgcgagcaatgccgcgaggtgctggagcaggaaatagcccaacatggtgcctggtacggcgtggtcagcaacgcgggcattacccgcgacggcgcctttccggccctgagcgaagacgactgggacagcgttattcatactaatctcgacagcttttacaacgtcattcatccctgcattatgccgatgattggcctgcgccagggtgggcggataattacgctgtcgtcggtatccggagttatgggtaaccgcggccaggtgaactacagcgcggcgaaggccgggatcatcggcgcgactaaagcgctggccattgagctcgccaaacgcaaaatcaccgttaactgcattgcccccgggcttattgataccgggatgacagaaatggaagaggcggcgctgaaagaggcgatggcgattatcccgatgaagcgcatgggtcaggccggggaagtcgccgggcttgcccgctatttaatgtccgacattgcgggctacgtcacccgacaggtcatttccatcaacggagggatgctatga

SEQ ID NO: 391952 - DNA, 1230 bp, Salmonella enterica
atgactcgtcgcgttgtgataaccgggatgggcggcgtcaccgcctttggtgagagctgggatgcggtttcccgccgtctgctgggctatgagaacgccgtacgcaaaatgccggagtggcaggtttatgacggccttaacaccctgctcggcgcaccgatcgacaatttcacgcttcccgggcactatacccgcaagcgcatacgcgccatgggccgcgtttcgcagctctcgacccgagccagcgaactggcgctggaacaggccgggctgattgatgacccggtactcaccaacggtgaaaccgggattgcctacggctcttccaccggcagcaccggtcctgtgagtgagtttgccaccatgctgaccgagaaacacaccaacaacatcaccggcaccacctacgtacagatgatgccgcacaccacggcggtgaataccgggctgttcttcggcctgcgcggacgggtgatcccgacctccagcgcctgtacctccggcagccaggccattggctacgcctgggaagccatccgccacggctaccagactgtgatggtggcaggcggtgcggaagagctctgtccttcggaagcggcagtgtttgatactctgttcgcgaccagccagcgcaacgacgaacccaaaaccacgccttcgccgttcgaccagaagcgcgacgggctggtgattggcgagggtgcgggcacgctggtgctggaagagttagagcacgccaaagcacgtggggcaactatctacggggagatcgtcggctttgccaccaactgcgatgcggcgcacatcacccagcctcagagccagacaatgcaggtttgcatgcaaaaggcgctgaatatggcagggcttggaccgcacgatattggctacctctccgcgcacggcaccgcaaccgctcgtggtgatatagccgaaagccaggccaccgcggccatttacgctgataatgtgcctgtctcttcgctgaaaagctacttcggccataccctgggtgcctgcggcgcgctggaagcatggatgagcctgcagatgatgcgcgaaggctggtttgcccctaccatcaatttgacccatccggacgagcagtgcggtgcgctggactacatcatgggggaagcccgccgtatcgactgcgagtatctgcagagcaacaactttgctttcggcgggatcaacacctccatcatcattaagcgctgggcgtaa

SEQ ID NO: 391953 - DNA, 237 bp, Salmonella enterica
atgcctgaaaatctaatatcattggatattgctgagttgtatgcctgtgggtgcaacttttggttgggctttgacggcgatgaagatcggttgatctatactttagattttgaaaatagttttattaagaatcgttttcctggaggaacgatagagaaattgattaggaaattgcctttagcagactcgttgattatagataaaattaacggtattttaattacaaaaataaattaa

SEQ ID NO: 391954 - DNA, 219 bp, Salmonella enterica
atgttgtctgcgatattttctctgtcagcaaaagtaacggtcagtctgcatcagcaggctaagcagaaagtactgcaggagcagcttgtgcctgtcgttcccgacgttcgttttgttcctgatagttcgggtgctggtattgagccaaaaattccttatagttatttgaaaaatctgtatcaattgatggaaataaggctcattatagtatggagttga

SEQ ID NO: 391955 - DNA, 294 bp, Salmonella enterica
atgactgattattcgcggtatacagccggcagcagcacggctgatgctggttttatccgtaccatccttcagcaggccaccgaccagtatccgcgtctggcggcatttctgctgatgttacccggcgtaaccccggaagccgtacagcattttcacgacagcgtttatcagcaggtcagcgggttggctgccacccggcagctaagtggcagaccggttcccccgacgatactgcgctggatttggatgtctcctccaggtcctacgggcaggatgttactgctgctgaactag

SEQ ID NO: 391956 - DNA, 234 bp, Salmonella enterica
atgtaccgtggccggccaccgggtgcgcctgccggaaaagaacctgtacagtatcagcagcttactgttgaattatcctgcgaaggcactcacaggccgcttcaaaatgctggttatctccggctgtggcgcggcgacagcgtgtccgttgcgccttctgcagcgcctctgacgccgctatctgccatgcccggcgttcgttatcatcaacacagcctgagaacatatcattaa

SEQ ID NO: 391957 - DNA, 375 bp, Salmonella enterica
atgtattatctgaccaccatcagtcatgccgttaatgctgacggcaaacgggtgaatatccggaccccggggcttcgtgacggcgaacgtttcctgtgcaaatactgcggcagcacgctgcaactgattaccgatcaggagggtatccgccggttcatccacaccctgcacaacaacctggcgatagtgaaagccgttaactgcccgctgctgcccggggaacgaaaacgcaggatggcgtcgccaacggtgaccgggaactggcagtgcagagtctgtcactcacgctggtatggtgataaacggtgtccgggctgcgatgactggatcagtgctgttccggttttacaacagcaggtgtgtcgttatttttaa

SEQ ID NO: 391958 - DNA, 1407 bp, Salmonella enterica
atggctaaatgcgtacgtaaaaaatgtgaacttccggtctcttctgtcccggaggcaaaacaaaaaagattgtgtgaaaaacactatttacgcttctgtgagttacaggagggaaaaaatgacaatctggccgcccggattaactccggaattcctcgtataataaataaaaaaaagaaaggacactgttgcagaaataattgtcataatctgatttcagggagtgacgttgctaatgaaatgcgtctgtgtgaccggcattaccggatatatgaagaaaacaggaataagcggtttaagaaaaacgtgaggcgcatagcagacaggataccttcagccaggcggatacgaaaaattgtagatactttttcctgtgcacaaaaaaaagaagaatatcttcaaaaaaaagccacgcgaaaatggatgggttacaataaaaaaagacgctttcgggcactgccagtaatgcaatcgagagagtggctgaatacacaggcactgatgcgcaggaaagaaattcagtgttgcggacatagcttcatgaattacatcagggatgtatttaacctgtattcagtaaagttattacacagcagagagtatctgaaaaagaatgcatataaaaaacaggtcgtattcaatcgtgataccggaatggttatttgtttaaagattgaggtagtgtacctttttaacttggatttggacattagcgtcagcagtaaagacgttgctttaattccggaagttataaggaaaaaggttttcattcaaaaaagattattaaaaaaagaactggtcaggagagggatatttccctcttcatctctttgcaaatccagaaaaaaagttaaaacaaataaaaactctgggatctacactaaacttaaaaaagaaaacacccctgcagctgttactcagtttatgtcagaattaaaaaatatatatacaaaaaatacttacataacacaccactacaaaaaaatagacccaccttacatagcaagtatattgccactatattacctggcgcagcaggagtatgtgagaatatacccgggaagtgagtgtcatttatttttaagattaaaacaactatggacttcatctggtataaaccttgaactactttcttttcttgcattgtatttccttatgctcaacgaagggtcggattttttaaacagtttatctgaatggggggagttacaggagaaatcgtataaatcaccgcttgatcattttccggaagagtttcaggaactattttcaaagaaactgaacgtcaacttttctgaaaaaaagaaactggctaaactttacaattcttgtttcacacataacgtcattgaatatgatgaaaaaagcaacagactccttccggtaataaaacaccccgtcatttaa

SEQ ID NO: 391959 - DNA, 897 bp, Salmonella enterica
atgccagatattcccggccctcagcaggagccacgcgatatgctgcgtgactgcctcagtctcttacccccgcaggccactgaacgcattctcacccacctgcaacagaccatcagctatgaacccgtgattggcattatgggcaaaaccggcgcaggcaaaagctctttatgcaacgccctcttccggcagcccgtctgcctgacccacgatttaaccgcctgtacccgagaaccccagcgcatcaccctgaccgtggggggacacagtttgactctcgttgatttacccggtctgggtgaaacgccggagcacgatgatgaatacctgacgctttataaaaccctgctggctgaactggacctggttatctgggtgttacgcgctgacgaacgggcccgggccatggatattgccacacatcgtaccctgacggagtacggcgctgacccgtcccgctttctgttcgttctgagccaggctgaccgggttccaccgccgcctgacgccactgaacctcccggagtgattactgccgggcaacaactctcgctggcggtactctgtgcacaggcagcagtccagtttccgtcatcattcccggtcatggccgtctcagcgcacaccggccacaacctgtctgcatttgttgaactgatggtgcatgccctgccgccacaggccggcagtgccgtttaccgccagctgaaacccgaaaataaaacagaagaggcagcggccactgtacgcgatgcctttggcaatatggcaggcacggcgtttgattcggtgtttaaccctgatgcgtattccccgggctgggcggtgatactgcgaaagctccgacgaaaactggtccgcctcgccatgcggttatgggaccggatttttggctga

SEQ ID NO: 391960 - DNA, 663 bp, Salmonella enterica
  misc_feature (178)..(187): n is a, c, g, or t
atgataaaactcattaatattaaaaaaagtataaataaccggtgtcttctgaatgatgtcagtctggagataggcaaaggggagtttgtaataatcacagggccgtcgggtgagggaaagacaacattactgaatgttatcggcttgctggactgcgactatacagggagtcttttcnnnnnnnnnngtcttttctttaacggaacagaactttctccggaaatgagaaatgattactttgaaatcaggaaaaaaattggatatgtctttcaggatgcattaataaatgacaaccagacggtttgccgaaatttaacgcttccgtcactggctgtgcccgttcatgatattaatgagagagtttcttttttattaaaaaaaacgggactttccggttttgaacatcagaaaggtattgttctctctggcggtgagaagcaacgactttcagtcgcaagggctgtattccattcacctctggttgttcttgcggatgaaccaaccgcaagtcttgatcatgataacaaaagaaaagtgattgattttcttgagagtattaacagggaatatcgtgtgacagtcattgtagttacacatgaccttgattactttatggacaagagaaggataacactgaaaaacggaatgttatatgaaggatag

SEQ ID NO: 391961 - DNA, 1329 bp, Salmonella enterica
atgaaggatagtactcgcttttttttatttttatgcttaatttctggctgttattttattgttttttctgactgtcaattgctgtcggtaatcgtctcatttttaattattcctgtgatgatatttttttctgggaaatataaaggtctcactttttttcttcctttatcatggtgccttgtcctgctttatccggtttttctggttttgctgagtggtcataccccagttgtttcttttttttattactttattatatgtggtgccctgtcagcgcctttgtctttttttatattaacatccctgttgtgtaagtacaggttcgtgtccccttttatttatgtgtttttattgtattgctttaagtccgaagtttttcagatcctccctgtaataatggtatttcagagttctgccctccggcatattgttggatattcggtttctccatggggaaccacgttggcactgttatatttttctctttcactttatgaaataatcataagaaattacaaaaggtcactttgttatttcttgttcgtttttttatttttcgttccggcaggtgacagtcgttatcattacagtgcaaaaaacattaagattgcaggaattcagctttcacgggtaatggggaaaaatacggatctgaatgatataattgcttatactgatgattttattaagcaacattctgatgtaaaaatggttgtttattcggagtcaccatggctggggtttaaaagttataacaatcaggtctttacagaaaggtttgttcgcgacatgattaagcgttcggctgaaaacggggttgtttatatatttcaggttgattcgcttaagttaagtaaggaatacataaataaagtgctgactgttaaggctgaaaatggagaattgtggtacactggtaaaagtcatcttgttccgggctgggagcggggtatcactgacggtgggggaggtttttctccggaggagcataaaataaaattcagtgcttttggttcaaaattcaagacgttaatttgttatgatgctctttttatgccttctttttttgacagggattatgatattgcactggttcagtcaaactatggtgttttcctggaagtggcgggtgtcagggcttataatcacatgataaaaataagtaatcttttatcatggttttcagttgcttcaaacggaaagttttatattaatgttgagaatgaaggtggtagtgaattttttggtattaacggtcagatgaatgatgggggcttttttgattcccctcagaaaaaattattcacagttataataggtgagggctga

SEQ ID NO: 391962 - DNA, 423 bp, Salmonella enterica
gtgtcctgtaatctgattattcccccgttgttactgagcgtgttgttgctgtccctgtctgcccgggcgggaatggtggtgtacaccgaccatgcccacccgccatccggggggaccggtgatacccgcgtggtctggctggatgcacctgaacaattacagcagtcgatgtttggtagtctgacatcagaccccaaagaagcagaacgccggacgcagaaggtgattcactctgccggctgggaaaagaaacagactgaactggctcaggcttaccgggggctgctgcaggcgtggtcgctggggctgcaaaaatatccggccgtggtgtctgacgaccagtacgtggtttatggcactgccgatgtggtggtggccgaaggactgttccacagtcaccggacgcgggagggggggcgatga

SEQ ID NO: 391963 - DNA, 423 bp, Salmonella enterica
atgaccgcgaacagtattattgaatacattctggtgttcttcggctgggtgctgaataacgcgatgtggaacatcatttttggtaccgggttatatctgctgcccctggtgttcaaatgtacagccgtctggctgaagacccgggaagaaggatttgatgaggggaacaaggggctactgctgcagccccggctggagcatgcgctgtatgtgccgtatctggtgattttgttctgtatcctgccggttgcgccagtggatatcagtacgatgaagtttgacagcaaccgggcgaagcagtgccatgtgtcggtgaccagtccgcaggactctcgctacagtacgctggtgaatgatatgggggaaaaacggcgaatattcccgtgtggtggtatctcgtacaccggctgtcgaaaggggtga

SEQ ID NO: 391964 - DNA, 150 bp, Salmonella enterica
atgggctttgatattgaatgttatagtcggcgagctctgattgtatttactgctgtggtgaatatggttggatggttaattgttgccatgatcctgtggggagggtatgaatttatcaattggattagtatcattaaggaggttaaatga

SEQ ID NO: 391965 - DNA, 1416 bp, Salmonella enterica
atgtcccgaagccacgtaattgaaaataagacggtggactacgttccggccaatgagcggcacggccaggcgcgcagtcttttcaccttatggttttgtaccaatattgcgccgctggcggtggtgaccggcgcgatatcgacacaaacttttcatcttaatattctgtcggcgataagcgcgattattgccggacacatgtttggcgggctttttcttgcgctcacttccgcacaggggccgcgggtcggcattccgcagatggtgcagagccgggcgcagttcggccgctacggttcgctgctggtggttgcttttaccagcatgatttatctcggattttttatttctaacgtcacgctgtccgggaaagtcatcaataatgtgataccggcaatcccgctgaccagcgccacggtgattggcgcgattgccgccaccctgatcggcattattggttatcgatttattcatcgaatcaataaaattggtgcctgggtgatgggctcggcgctgctggtagggttagtgatgatgctcacccaacccttgccagccggcttctggcagcaaggcacattcagtcttaacggctggttcgcaaccttctgtatctgcgcggtatggcagatgagcttttcaccttatacctctgattattcccgctatttgccggaaaatatcggcgtatttaaaccgtttatctgcacctgggtgggaacctgctgcggcacgattctggcctttctggtgggggtcgtggcgattaacgtcgtcggcggtgagggcgatgcgatggcggcagtgcgccaggcgaccggggtattaggaccggtgcttatggtactgtttctgctaaatattatttgccataactcgatgaatctctatggttcggtgctgtcgttgattaccgcggtgcagactttccgcccgcactggcggccggatgcgcgggtgcggatgctgttttctgccgtggtgctggttgggggagtgctcgtctcggtggtggcggcggccaattttgtcgctttcttcctgaatctgatctgggcgctaatcggcgtgctcattccatggtgcgtcattaacctgcttgatttttacgttatcaataagcagcgttatgacatcgacgccatttttagcgccgatggtgggcgctacgggctggtgaaccgccgcgcgctgctggtctactttggcggcgtgttggtgcaggtgccgtttgttgaaaatgctttttataccgggccgtgggcacatgtggttcccggtgccgacatctcatggatgataagtcttgtgttaaccagtgtggtataccgctgtctttttaataaaaaaatgaagacaaaaaattcacagaaaaaagaaagtgttcagaagggacttctagataatagtgcttaa

SEQ ID NO: 391966 - DNA, 1467 bp, Salmonella enterica
atggaatcgttcgatctttatatagacggtgtgtttgagcgcggcgcagcgcgcttttcatcactcaacccagcaactgcccaaccgtgggcggagattgccgaagcgcgggaagaagaggttgatcgcgcggtagctgctgcgaagcgggcattttacgatccggcctggcgtgggttaaccgccagcgctcgcggcaaactgctgttgagactggctgatctggttgagcaaaatgccgatgagctggcgcggcttgaaacgctggacagcggaaagatcattcgcgaaacgcgatcgcagattgcctacgtggctgaatattaccgttattacgcgggcctcgctgacaagctggaaggccgcacgctggcgattgacaaggcggatactgaaacctggacgcggcgtgaagcagtgggcgtcgtcgccgcgattattccgtggaacagccagctctttttatcggcggtgaagatcggtccggcgctggcggcaggttgtactgtcgtggtgaaagcggcggagagcgcccctacgccgctgctggcctttgcccgactgattgccgatgcgggattcccggcgggcgtctgtaacgtaatcaccggctttgccgggacatgcgggacgcggttaacaacccaccccgacgtggaccatatcgcctttaccggcggccccgataccgctcgccatattgtacgcaacagtgcggaaaacctgagtaaaaccacccttgagctgggcggtaagtcgccctttatcgtctttgaggatgcggatttggacagcgccgccaatgcgcaggttgcggcgatatttgccgcctccgggcagagctgcgtcgccggttcgcgcctgctggtggctgaaagcgtcaaagagcagctgctggaacaattagtcgagcgggttaaacgaattgtcatcggcagcccggacgacgcggcgacgcaatttggcccattgtgtacccagcgccagaagacgctcatcgagcaggtggtcagccgctcgctggagcagggtgcccggctggtgaccggccattatgctatcgactctcctggttactactatccgccgacgatccttgattgctcggctacgccgcaggcggaaagcgtggcgcgcgagctatttggcccggtgctttcgcttgtcactttccgtgatgaagcggaagccatacggctggcgaatgccaccggttacgggctggctgccggcgtctttacgcgtaatctcgctcgcgcgcatcgcgcaacccgcgatctgcgctgtgggatcgtgtggatcaatacctatcgtatggtatcgccgctggcaccttttggtggatatggtctgtccggacacgggcgggagggcggaatggaagcggcactggaatttaccaccacgaaaaccgtgtggctgcgcaccagcgacgagccgatcgacgatccctttatcatgcgctga

SEQ ID NO: 391967 - DNA, 1038 bp, Salmonella enterica
atgaaactgtctctttttattcatatggaacgcatctcgccggatgagccgcaggataagctctacaacgagatgatggcgctgtgtgaaatggccgatgaagccggcatgcatgctatctggaccggcgagcatcatgggatgaattttaccatcgcgccgaacccgtttatcaatctcgccgatttagccaaccgcaccaaacgggtacgtttgggcaccggcaccattattgccccgtttaaccatccgctgcggctggccggcgaagcggccatgaccgatatcatcactggtggccgtctcgagctggggattgcgcgcggggcttacaattatgagtatcagcgtttgatgcctggactcgacgcctgggaggccgggcagcgaatgcgtgaactggtaccggcggtaaaaaaactgtgggaaggagattacgcacaccagggggagtactggcaattccctgcttcaacctcctcgccgcagcctaagcagcaaccgcatccgccgatctggattgctgccagggacccgaacagccatgagtttgcggtcagcaacggttgcaacgttcaggtaacaccgatgcatcagggcgaggaagaagttgtccgactgatagaatgttttcaggatgcctgccatcgcctggcgcctgagaaaccactgaaaattatgctgctgcagcatggcttcgtcgctgaagatgaaaatgacgcccaacaagccgccgaagaacttaaccgcttttataactattttggcgcctggtttaaaaatgagcgcacggtaagccaggggctgattcagccgctgagcgacgaagagatcgctgccaatacctattattccgccgccgccatgcgcaaaaatctcgccatcggcacgccgaatgaaatcatcacccggctgaaaaaatatgaagcgctgggctatgacgaatttgcgttgtggattgatagcggaatgccgtttgagcggaaaaaggcgtcactgacccgctttattcagcaagttatgcccgaatttcgttaa

SEQ ID NO: 391968 - DNA, 927 bp, Salmonella enterica
atgcaaacagataaacgtagacaactccgcgacgctttcggcgcatttatgactggcgtcaccgtcgtcaccagccgcgataaaaacggcgagccgattggctttaccgccaactcgttctcttcggtctcgctggatccggcgctgctgttggtcagcatcgataagcgttcggccaatttcagcaacttcaccgagtgcgactatttcgccgtcaatattctggcggaacagcagaaagaaacctccaatattttcgcgcagaaagttgaggaccgcttcgctctgatcgactggcgcgcgagtgaaaacggcaccccgcttatcgataacagttccgcgtggtttgattgcgcgctgcatcaggtcatcgacgctggcgatcacgcgattttgttggggcgagttgaaggctttgattccgttggcaccgcggggcttggctactatcgcggcgcttatttcactccgtaccacaacgctgaggtattgatgaatcggctcagcgttgaagtcagcgcgttgattgagttcaacggtcaggcggtgatgatgccgcatggcgatggttatcgtctgccgacccgcagcgtggcgaaaggcagcgtcgacgacaccttaaaagcgctcatggcagagttggggattaatgccagcccgggctttgtctattcggtatatgaagaccgtcagaacaataagcagcatatcgtattgctgtgcgcgctgccgaccgagccggaaagtgagcgaccggccctgcggcaggcgcaatggtacgacctggaaaagctgtcggcgctgccgattggcgattcagcgctgaaatctttaatgaaccgttttgtacgggaaagcgccgtcggcaattacagcatctactacggtgacgaattaagcgggtcaatcaagcaattcgctagctga

SEQ ID NO: 391969 - DNA, 846 bp, Salmonella enterica
atgatgcgcaaaacccagctgctgtctgaacgtcagatgcgggttagctatctggaggctggcgcaggcgagccgctggtgctgatccacggcgtcggtatgaatgcggcgtcctggtacccgcaaattgaggcgctgagccgctatttccgggtgattgcggttgatatgccggggcatggcgatagcgatgcgtttcagcagccggtgaccttaacggactacgtagcctggctgaatgattttttgcgtacccagcctgagcgccgttttgcggtagccggccactcgatgggggcgcttatcgcctccgggctggccattgattatccgcagcgagtgagtcacgcggtggtgatgagcggcgtctaccgccgcaatgaacaggcgcgccgcgccgtactgcagcgggcctgtgaactggcggctggcgaggcgcagttggattcgccgctggcgcgttggttcagcaacgatgcgaaggaagcgattctgcgcgaacaggtcggcggctggctggcggaagtcaatctgcagggctatgccgcagcgtatcaagccttcgccggcggcgatcgggtctatgccgaccgttggcaggagatccgctgtccggttctggtgctgaccggtgaactggatgccaactccagtccacaaatggcgcgggaaatggcagcggcggcgccgctgggtcaggcgatcattattgatggcgcccggcatatggtcagtctgaccgatgccccacgcgtcaaccatgaaatgctgagcttcctgcagtgcggctcggcgcgacagagcaacaatgccaatacggcgggacttactcatgcaaacagataa

SEQ ID NO: 391970 - DNA, 603 bp, Salmonella enterica
atgcatccggcaattcgtaaaacgttagtcacaacggaaacgttgtatgtcgatggcggtaaagcagcagaaaaaccgctggtgatgattgccgccgccgcggtgatccgcaatccgtgggcagggctgggctatgtcgatgaccttgcgccgcaaatccgtgaattcgcgccaatccttggcgagctgctcaccggcctgatcctcaaggaagctggtagcggtgaaaaagtcgaagcgtttggtaaaagcgcgatcgtcggccttgatggcgagctggaacacgcttcggcgcttatccacacgctgcacttcggtaaccactaccgcagcgcggtgcagagtaagagctatctggcgtttaacaatactcgcgggccggcgaactcaccggtgctgatcccaatgatgaacaagaatgatgaaggcagccgtgagcactacctgaccatgcaattcaacatctgcgatgcgccgcgttatgacgaaatcgttattgcgctgggcgcggcgctgggcggacgcccgcatcaccgtattggcaaccgttattccgacctgaaagagttaggccatgatgcgcaaaacccagctgctgtctga

SEQ ID NO: 391971 - DNA, 678 bp, Salmonella enterica
atggttgataaccattcactcaaaattgacgccgtcccggtcacattacgcgagctggcgctcacaaaagtgcgccaggcgattatcgccggttattttaaagcaggcgaccggctggtcgaacgccagcttaccgagcagcttggcgtcagccgcagcgtggtcagagaagtgatccgctaccttgaggccgaagggctgattgagacgctgccgaaaaaaggcccgatcgttgccgttttaaactgggaaagcgcagagcagatctacaaaatccgtatgctgcttgaacaagaggccgcctgcgattgcgccagactcgctagcaatgatgataagcgccagctccatcagcagctccagctaattgcccaggcctcgcgcgagcaggatgatattaaacgggttgaagcctcacaggccttctatgaaaccctgttccgggttgctaagcacaccattgcctgggaaatcgttcaacgcctcaatagccgcattagccgtttacgtgcgctcacgctggcatcgccggagcggcaagttgccggctttgaacggatgtcgcgcatctatgacgccatcgaaaacaacgatcctcagcaggccagacaagcggtactggagcatctgaccgaagccgcgcagcttgccaaacagattctatcctcacaggagtaa

SEQ ID NO: 391972 - DNA, 309 bp, Salmonella enterica
atggctgcttactggattgcacacgtcaacattcacgatcccgagcaatatcagcactatatggatcttgccccggcggcgttcaaacgctatcacgcgcgctttgtcgcccgcggcggccgggcgcaaacgctggagggacaacccttcactaagcacgtgctcattgagtttaatgacatggaaagcgcgctggcctgctaccactcagaggaatatcaacttgcacggaaaaagagggtatctgcatctgaagcattgataactattattgaaggagaatctggtctggttaaaacagatttatga

SEQ ID NO: 391973 - DNA, 600 bp, Salmonella enterica
atgcgtaataaaataacactcgctatggcgattgtcggtatgatgagtaccgtacctgcttttgcagcacctatcgccacaactgatgcaggccagggaacgatacaatttaccggctctgttattgacgcgccgtgcagcattgtgccggaaagccagaatattaaggtaaacctggggcaggtgagtttaaaaacacttgatgccgcaaataaatactccagtgcagtacctgtcaccatcaatctggcaggatgctcatttgaagccccgactaccggggatacgacggttaaatattcaaaagtgtccgtaaccttcccggatgctcatgtcccggcaggcggagacgcaactaaaggagaaatagcaaatgatgcccctgatgcggcagaaaatgtggtgattcagctcctgaaaagtgatgcatctacgggggtggatttgactaaactcagtcccacaactggtgatattcagctcgataccacttcggcaaccagtaagctgcaattttatgcccgcatgatgactctttccggggcagctaaagccggcagtgtcggtgccactgtcacttacaaactacactatttctga

SEQ ID NO: 391974 - DNA, 1167 bp, Salmonella enterica
atgaataacatcatgtgcggaaaaatgaaagaaaaagctgtccggctgattcggggattttcccgccaattcagtctgctgtcccttataatggtctgtgtgcttgtattaccctggtatgtttatgcttccgactgggatacgtctccttacggctgtatcgctgacagtggaagcgataatatcacactgaacttaccctcgtcggtcagttttccgcccgagaatgctccgggtatcggtcaggtcatctaccagagcagcgaatacagaataaattttaaatgtaaatcaaaagtcggtgggtatctgatattgcagaggcttggagatttagttcctttacaaaatgctctggatgctgcaggactgacactggaatttgaggtaaaaaacagcgctgattctttttcagttatatatgaaccacttacttcaccagaccagttcagcgtcagtaaatattatggctcgaccattgaaggagttttatctgtccggtttttactgaaggtaaagcgtacatccacggccacattttcggctgtaccaggcctgtcggccttcaaactgaatgccctgactggtgggggcggttatcccggtattcgtattaataccactccattcaggatacagtacgttccgacatgtttcgtgcgaaccagtctgggcacgaataacgttaactttggaccggtgctgacgacagatgcggacaactctttttcccgaacaatcccttttaatgtcactgcaaacgtaaatgaaaactgtggtaaaggaaatctccagggcgtttacacagtaaatgtgacaggaggaacaacggattattaccttgaactaccactaaaggtcacatttattctgaataatggcggggaagttgcgctggacagaaaatccatactactgtatacagacaaaaacaataagaagctaaaaaatggacttcgtctgaaaataaatacaccagacggtaacccggttacatttaatgaagccagtttacctgtcaataaattcggtgattttcacggtagtccgaagggaggcgtgtggaatatcagtaatatctataacgctgttctgtcttccacaggagaacaggtaataaccggaaaataccaggcgcaggttaccgtaaaagtagattactactga

SEQ ID NO: 391975 - DNA, 1842 bp, Salmonella enterica
gtgggacatgcatttgcaaaactgatgtacgacgtctgtcagattttgggagtattcagggaagggagtaaacaacgggatagacgtgcatatgggagtttttggcgtcatcaggcgttttttaatcagcgctataatgagataactggaataattgataaagaaagggtattcagtgaagaagaacgtcgtagtttgttctacaaatacgaaatgttttataatcaaatcatgtcttatcccgtgttcagcactctgatccggagccagatattcgaacgttatattcagctcggggtttcttcatgcctggcacttgatatacacaaaactttcaacaccactaataacagcggattctactttcatattcatagttttttgttgagtgatcattgcccaatactggaaaataatggaagggatatcctacaaggagtgaagaactatttaaggggccttatcaagtcacctgacgggagttataaaaaagttttcatcccattgtctgaacatataagaaatatcagaaaaaacagcacaccgataaaatcatggatggatatcgtcatagatgaatgtactgaatatgctaaagtagctttagacaaggatgagtttgataaaattaaaggtcagctggatacttttaaattcgcctactcttcacttcgaaccctgctggcttttgaacgaagaactggtctgattaagcatctttccagttattacaaagttctcaatcagggagagggaatgaatgacagctactattttgcattacatcaatatctttatgaatcgaaagatttcgatgaacgactgctggattctgtagttgaagagtttcaaaaaaaagtaaccgggcctttctcgatacagataggtgataatgcatggctggatatcaaggtaatctggcatcttgttttcaattctcttaaaggtgatgtgttttctgaattagatttgatagaattggctatcaaccttaaaaactctccagactcagttgtactggccccttatctgacgttatctacaataatacataacatttgcattgacgatttaaacgaggcaaataaaaaaatcaatgaaatattaattgatgaactacctcccggttttatctcagcggctatcagtactattaagttagctcttaatatcaaattaaacggaaagacgataaaacatggagagttactttcagatataaatacaattttaacgtatcgcggcgtttttactgttcatgttaatatcgatcacaaatttaaacaacccgatttgatattagtaatgtgcgccaataacttgataataatgagtgcgataaaacagtataataacatggttcagatgacaagcttctacaacgagcttgaactttctgccatccacccacaatctattacaggcattctggatgaagttgaatctgcattgggcaaaataaataaacggcttgatgcaaccaagaaagttattaatagcgaagagctggccaagttaattatagatgagaaaatattaaccgttcgggagtgcagacaaaacctcgtaagctatttgaatgaatttacattgtacaactgcattctcaacctgaattatataaaatcttacctgacactccctggggagaagttggtgcatatttccggacttgtcggtaattcagaagagcgtgtaattaagcgaaaatttttagctgaggctatcagaattgtaaatgacagagaagggaaaattaaacctttagctgaaggtgagaaatctcaaaaaatggtgctaatacacgacttgagcagtaagtgtttcaaaaatgatgagtga

SEQ ID NO: 391976 - DNA, 1512 bp, Salmonella enterica
atgagcaataaatttaaaagtaaaattaatcatgaacttaacctgaactttggaaaattaccacggcagttcaggtattgggcttcacatttttcctacaaaacaggagtggctcttgagatagcaacagttgcgctattagcctttttgggtttggcttgtcaggatttgtactgtgttaaactagtgggtagaccgcgaactttcctggcattgtatctgctgctgctttcaaggtctggtattggaaaatcaagtatattcagactcttgaaggagccggttttacaacttgagcgggagtttgaagacgattaccgtgcggagcttgaggtatttgagcgaaacattgttctttgggaagcgcagtttaaagtattaaacaagcgttataaaaaagaactgagccagggcgaagacacaacggaaacggctaaggaacttgaagagtgtattgctcgaaagccgaaggcaccagttagaaaatccattattttaacaaatccgacaagcgaagcactcgcaaaagcaatcgggcaggggtatcaaaacagggctctcttcaacgatgaagcagcaactgtgtacaggaggctcgtcaataattctgcgtctctcaacacatactggtgtgcagataaggaaactgtagacagagcatccagtgaaagttttgttattgaaaattacgtgttttcatcatttttaatgatgcaaccgcagccatataacaataccctcagacagaaaatggcaagcatcagagatactgggttatatgcccgtaccctgatgattgatatggataagattactgaaccatgcaccgccaatggtcgttatgcacatgatgagtcagcgctttgtgaactgtattcacttttgacgcggcttatgaaagccggtgttaagcgaagagaaaatgatggtgaatatattgaacttactctggctcctgatgcacaggaactctacgaatcaacattgctgaacttacggcaggagatgaaaccgggcggcctcttgtaccactatgatgatataggtgctcgccttcctgagcagagtctcaagttggcaggtatttttcagatttctagtgatcctgattcgacagtaataacaaaggaacatttgtcgtcagctttggggcttacagactggtttgccaatcacgccatcacaaaaattgattcaacaagagagcttagcgatgaagagaaaatatttttctggctggagtcgcatcttgtagaaaatagatctttcgaattcagaagaaatgaccttatcaaaaagggtccgaactcagtcaggcgtgctgagaggttgataccagcgctggaaaaacttgagtcgagagggaaggtgcaattattcgaagtggcgggtataaattatgtcaaatttacgggttcagaaatggatcctgttgaactggctgataaaactaatacgcccatataccagtctggatcactggcactgagcaagctggctaaacctgaataa

SEQ ID NO: 391977 - DNA, 813 bp, Salmonella enterica
ttgggcgatattaccagatttgtgatttttggggacagtttatctgactcgatggggcgtatgtttaaaaaaacacatcatatcttaccttcctatggtcaatactatggaggaaggttcactaatggatttacctggcctgagtttttatcatcccctctatttttaagtaaggagatgattaattttgccgaaggaggaagtacatcggcaagctattcatgctttaattgcataggcgactttgtatcaaatacggacaggcaagttgcatcttactccccttcccaccaggacctggtcatatttctattgggccccaacgactatatgacactacacaaagataatgtagcagagattgttgagcaacaaattgatgatattgaaaaagtaatttccggcggagttaataatgttctggttatgggaattccaaatttgtctgcgacaccttatggcaaacattctgatgacaaaagaaaacttaaggatgatagtatcgctcacaatgccctgctaaaaaattatgttgaagaattaaaagaaaaatatccacagcataagatatgttattttgagaccaccgatgcatttaagcagataaccgatgtggctaatggtattggttatgatacagaaaatccttttactcaccatggctatgtgcatattcctggaactaaagatccccgactagatatatgtccgcaatacgtttttaatgactatgtccatccaacccaggaggttcatcattgttttgccataatgctagaaagttttatagttaatcattattctaacgaataa

SEQ ID NO: 391978 - DNA, 4422 bp, Salmonella enterica
atgttaaacgaaaatgcatcttcatccacggcctcacttatggtaacccccccttccttaccaaaaggaggcggcaccttaagcggtatgggagaggcgctcggtcaggcaggtcctgacggcatggcgtcaatgacattacctcttcccgtaagcgcgggtcgcggttttacaccttcattgtcactgacttacagcagctctgcgggaaatagtatttttggtattggctgggcgtgcgctacgctgcgcattagtcgacgaaccagtcatggcgtaccgcagtataacgacaacgacgaacttcttggccctgatggcgaagtgctggtcaaaaccattagtacaagtaagacccctaaccccaccacctgccaacaatatggcagtacgaaactatctcaaacctggacggttacccgttatcagccacgtacagaaggcgcgtttcatcgtctggagcgctggcaaggtaaggccccagaggatgatttttggttactgcatgaaagcgcgggtaatgtgcatatgctgggtaaaaccgcatcagctcgtatcagcgacccgcataataccgcacatattgctgagtggctggtagaagagtcggtcaatcccgtaggggatcatatttattattgctggcaagcggaaaatgacagcaatatcaaccaggtagacaaaaataatcagcgagattgctccacacaacgctatctcgccaacgtacaatatggctgtcaaacgcccgctgctgatttgtatctctggaaaagtgataaacctgacgcaaaatggctgttcacgcttatcttcgactatggcgaacggtcactcgatcccggctcggcccctgctttctcaacgacgacaagttggcctgctcgtcaggacgcgttttcccgctacgagtatgggtttgagattcgtacacatcgtctgtgtcatcaggtattaatgtttcatcatttccctgatgaactaaaacaagataatgccctggtttcacgcttattactggaatataacgaaacgccggtgctcagccaactgtcatcggcacaaacgcttgcctatgacgctgacagctcggtactctcatgcccgccattagagctttgttattcacaacctgatatatctgatacccagtggcaagagatgtcatcgcttgccggcctcgattccccgccttatcagttggtggacctctatggtgaaggcgtaccgggcatactgtggcttaatggcaaagactggcgttatcgcgcgccttgccggggcaaaacgggtacagacgaggttgtctatgccgactgggttaacctgccgcaaatcccggccttgcaaaacacagccgcccgcctgatagatatcgacggcaacggccggctcgactgggtagtcgcaacaccaggcatggcaggtttctttactcaacaatcagataaaagctggagccgttttaccccgttcagcgccctacctgaagagttttttcatccacaagctcagtttacagagttaatggggtccggacttatcgatctggcgatgatcgggccaaaaagtgtgcgtctgtatgctaatgagggcagcgcgttcagcgcaggactgaatattaatcaggatgaaaatattgaactgccaggccctgggcgggatgcccgcgaattggtgctttttaccgatattctggggtcagggcaatcacacttatgccgcatccgttataacagcgttacctgctggcctaatctcggcggcggtcgtttcggctcgcctgtccagttgtccctgccatcgccgttagacagtgaagaacagtttaatcctgaaaatttgttgttggctgataccgatggttccggcgcgcctgatttaatctatgtgcagcataaccaggtgacggtttggttgaatcagggcggtaatggtttcgtttgcgggtccagtattgcttttcctgacggcgtcgtttatgaccgtctttgccagcttactgtggcggatattcagggcaatggcatggctgaactggttcttacggttccctggccaacccctgcgcactggcattttgctttttgtgcacaaaaaccctggctcctggcgggcacgaataacaatatcggcgccaacaccacgctcttttatcgcagttcagcgcaagaatggctggatgaaaaacagcaaaacccacaggcgacgccggcattacctttcgctatgcatctgctggttaaaacaaccacagaggatgaagttaccggcaaccagcttagccagagcatccgttatcgtaagggggtttatgatggcaaagagcgtgaattccgtggttttggttatgtcgaaactgaagataccaatgatgatgcgctcccggttggcgacgatacccctgtcgccgcaacgctcctgataaagtcctggtttcattgtggccgtgaagaggatgaaaacacactatttggcacgccctggcgcggtgatacagaagagatcgcgcttaatgccacgcttctgacaacctggcagtcaggagaggatcaagtgttgaacaacgccgatgaagccacgcgctggtggatgttccgtgcattaaatggaacagagctgcgcagcgaaacctatggactggataacagtagcgtcgccacttctccttataccaccacacaacagcgaatgcaggttcgtctggttcaggatggcgcgatgcccgttgtattgcccgtcgcactggagcaaataacgcatcattatgaacgtctggttggcgacccacaggtttcacaacaggtgacgcttcaggctgacgactatggttgcgttacccggcaagttagcgttgcgtacccccgtcgcgcttatcatgcccttcaaccctacccggccaacttgcctgatgatgcctgggaaaatacctatgatgaccaacagcaaaaactgcggctggtagagagcctggcatcttttattcacctggaaaattcacaaacctggcgattggggcttccctctcaacaacgggtaaatcaactgcaattcgattctgttcccgctagcggtatcagctacgaaacgcttcgggcagataacggcctgttaagtgccggacaaactcgctatctggcccaacaaaacgaaattatctacacgtcgacgccccctgatttgccggcgctggtacactatcaacgcacggcggtactggatgaaacagcgcttaaagcctatgacgggataactatccctgctgaatacagtttcgataagctaggttatgttaagacaccggcactcttttcctttacaaccgaagccgacctttgggcagttgagcacagctttacgctctataacgatgccagccagttctcaacggttgcaagccagcaatctaccggactcgtcggggctataacctgtcagtacgactcgtattatctggtgccaattagccaacaagatgtgctggataacaccgttaaaatggaatacgactatcgtttcctgagcccatggcgcatcactgatatcaataataattatcaggagtgtcaactggatgcgctcggccgtctgctggcaaccagtgtatatggaacagaaaacggtggtcaggcggtagggtttgcaaaaatcgcagactatccggtctcgtcttcgcttaccgttgagcaagccattgcgatggcgacaacggcggggtatctccagcaactagccgccatcaacgtcactgatatgttcagttggatggggtgcgtttccgctgaccaggcaaacagtgtcactgctgatggctggtcgactctgctgcagaaccgctttattacctttaccgggcatattcgttcatcaggtcatctttgggcgcgtaaaaatccacaacatcctctggcaaatttactggctgaggcaacccgtaatcccatccacagtgtgaccctgaccgcagataactatcctgcaacgcttgatccagatgactcaacgacccccttgcaacaaacccgtatttcgctgagctacagcgatggttttggccgggcattgcagcaatgtgtcctctttccggatgggaaagcctggcacagagaaagcgatggagaaatcagtacaacagagatcgatgccagccctcgctgggccgtttccggacacactgagtatgacaataaaggccagccggttcgcaactatcaaccctttttccttgatgactggcactacgttgtcgataccgctatgcgtacgaatggctatagcgacacgcattattacgatgcaacgggccgcaatattcgcacggttacggctaaaggctatctgcgccgcaatacctactatgcctggtttacggtcgcagaagatgaaaacgacacggtgggcctggagaatattcccgtatga

SEQ ID NO: 391979 - DNA, 225 bp, Salmonella enterica
atgttcgttgaactggtttatgacaagagaaacgttgaagggttacccggcgcaagaagcattattcttaacgagctgaccaggcgtgtacaccggatctttcccgatgcagatgtgagggtagaaccgatgcaggcgaacagcctgcatcgcgatgccagcaaaagcgatcgggaaaagctgaaccgtctacaggaggacatgtttgaagcaacaaataagtag

SEQ ID NO: 391980 - DNA, 864 bp, Salmonella enterica
atggaatataattatgcagtcgatacactaaaaagtcattgtgaatatataagaggaaaattaaccgaaaatactcaatcgggtttagaagaaactgaaatattgagtcacttctttaaagccacatcagattttgtagttaaaaacattcgtgatacgtatgtagcatgctttacaacaaagccagacgacacaaatcattggcaagcttatggtaacaaacaagtaagttatgcaattgaatttgatcttagcgagttagaacaggcaattaatatgtcaggtagagcagaatactcttctaagttaattgaatatttaggaaaccctaaagaaaacgatgaaggaatacccggtggatatttacttcaacattttaaaccacgtattatgccagtttcatataacccctcccagatcattaacataattgattattcaggatttattgaactgacaaaatcaaccaataaatctaatcctgctgaaacgcaagaaaaattagagcaatttacattgggaatgattaacaaagcgttatttacatttccgacaacaaagaaaaaagaatggtcacatgagtcagaatacaggattgtactctctgagtctaaatcagttaatccagagaaaaaacttagagaatatataaaaggaaaggaaaaacttattaaatggtatgatgcaggtgcatatccagtaccattcgttgaatttccaattaatcctaaaatcattaaaaaagtaacattcctagccgctggtcacaatgagagaatcattgaagcgctagaactccttaaaggcttgtatggcctcaactttgatattaaagcatctaaaagttgctactataaaaactaa

SEQ ID NO: 391981 - DNA, 1080 bp, Salmonella enterica
atgaacaatatagtatctggaatcagttttcctgcaatccgagggattcaggccggacatgaatactatattgtaatgtgccccctcaaaaggcttaaaaagattttcactctagatgagtctatgcttgctgaaagcgataaagctcagcgtgtgttaaatcatagccgtattccacaaattgcccgctatattcatagcaatagaaatgattatacgttttctgctattacagcatgcattgaagggcaaacatactttgagcctatcgcttctgaggggcacggtaataaaattggtaatcttgttgttgatgaggatgccgaattttatctaaccgatggccagcatcgtagtgctgctattcaacaagcattggaggaagaccctgctttaggtgatgaaactatatcagttgttttcttcgttgataagaatctgaaacagcgacaaaaaatcttccgtgatttgaatctatatccggttccggctaacagatctatcgcagtcttatatgggtcttctcctgaagaaaatctgactaaccatgtagttcaatgtagtgaattttttaatggtgtcgttgagttttctagccgaataagtaaacgttcagctaagttttttatgcacagctctgtacatgcagcctgtatggaactttgccctaatattacaaaagaagactggcgagaacaagctgaaaaggctgttgaatattgggatgagctggcaaataatttacctctatggcagcaggcaaaaaatcatcagataaagccagcggatagagcaaattatgtattattcagtgctattttactgaaaagctttgcgatgtttggttacgagcttttatgtgataactctgattggaaatcccagctaaaaaaatttcagggattaaattgggctcggaccaacaagttatggatagagcgctgttttaataaaggtcgtatggatcatagtgttcattccgctttgttgacgttaaatgccttgaaaaaacatttagagcttccactgaatgctgagcaacaaaaagtcgaagataaatttttaggaataaaaaaatga

SEQ ID NO: 391982 - DNA, 1125 bp, Salmonella enterica
atgacagtctatctagattacaacgccacaacacctgtacttccagaagtagctgatcttgttcataaaatgatggtcgaagaatacggaaatgcaggcagccgcacgcacgaatttggagccaatgcaaaaagggcagtggagcttgctcgtgctcaagttgcggcagtgattaaagcggataaaacagatgtaatttttaccagtggtgcaacagaaagtaataatatagccatattgggtttacgtgaatttgctgagcaaaccgggaaaaagcatatcattaccagcaagatagaacataaagccgtcttagaaccaatagcatatttagaacaaaatggttttagtgtgacctatattgatactactctggatggacaaattgatactgagcaattagaaaaatcattgagagaagacacaatacttgtttcgattatgcacattaataatgaaacaggagcaattcaaccaattgataaagtatgtcaattattgaaaggacatgatgcttattttcacgttgacgcagcacaaagttttggcaagtttccttttactcttgaaaacacacgtatagattttatcagtgttagcggtcataaactttatgcgccaaaaggaatcggagcccttatcatgcgacgtcgtggttattgtaaaccaccattaaaaccaatatttttcggaggggggcaggaaaaagggttacgccctggtacgctagccacccctctaatagcaggcctaggtctagcctgtgaattagcaattaaaaatgcagataattggtttaaccacgtatccattttaaaaaatgattttcttgctgctgttacaaaaataggtgctgtcgtaaatggtaataatacttcaccttatgttttaaatttttccatcccaggaattaactcagaagctgcaatggtaaaattaaaaggcgttattgcagtttcaaatggctcagcctgtacttccagtaactacaaaccatcccatgtactggttgctatgggtatggatgccggacgaatagatagtgctattagggtttctttcggtgctggcactcaaaatataccatataaagaaattgttaatttcttgaaaacattacaataa

SEQ ID NO: 391983 - DNA, 249 bp, Salmonella enterica
atgacaagaatgacaggcgtcgatgcgcatcgcgcagcaggtgaattgatagaccatttaaaccgtaatacgcctcttcacctcacctggaatagcgtatccttcactgctgtcgaaggtagctctgacgagtttctttttacctttcacgaaggtgatagagagtatgcaacttcttgcagattaccgctgacatcactgtcagtggcactcacatgcaacgagatatatcaggcattaagagggtaa

SEQ ID NO: 391984 - DNA, 927 bp, Salmonella enterica
atgacctttgaaaaactcctggaggagtactttttcgcccgcctgctgcgaccggcgacccaagattgttatcgcacggcagtggagcagttcactcactggcgcaacgtactgcccgccgaagtcacgccacatatggcgctggaatggcgcggctatctgcttaacgaacgcgatatcaagccggtgagctggaatcactacatgcgccacctgcgggcgctgtataacttcgccatccgccaggggctgctgacgcagttcgtaaacccatttatgaacattacgctgcgcgaatcgcgccgccggaagaaaaccctgactcatgaacagatagttctctcacgcgacgtgctgcatcactacatcgagcaggagaaaacgcagtacggctaccgttcgccgttttaccccgcgtggttctggctgacggcaatagagacgttcaactacaccgccatccggctgaaccagcttctgcatctgcgtagccgcgatatcgatctggtgcataacaccctgtttatccaaagcgagggcagtaaaagccacgatgagcatgtggtgcccatctcctcccgactgcggcctcatctggaaacgctgctgtatgaggcgcgaaaacgagggatcgcctccggcgagcagttatttaatatcaactgcttcaaccagcggacgctgcgccagggtaaaccgatgacagaaaatcaggttagctacttctttgccaaactgagcgacgcctgccacagtcgtttttcctcacaccgctaccgccacaccgtggcaaccgaactgatgaagaaaccggagcaaaatttatacgtcacgcagaagctgctggggcacagggatattaaagtgacgctcagctatatcgaacataatgtcgagatgctcagaagttgcgtggagagagattga

SEQ ID NO: 391985 - DNA, 1071 bp, Salmonella enterica
atgtgtataagagacagcttagaagatatcttacggaagcattggggagagtttacgtatttatgtcgagctaaggataggagtattcctggaaaacctacagctgatgcaactaagtatgtacttaatttgatgggatggcaaagtacagaaactttatatatcggcgcatcactaaacgacatgcaaactgcagtaaatggggagttgctttttttaagagcaacctggtgggccgataaaacagattacgggtttgaattttcatcgcctaaagatattgctagatttatagatacattttgtttgagagatcatctctggtgccatgaaattcatgatggtgattttaatttttatgcacttgcccctttcagtacaatgaaagaagaatataccttatattcggaggatgctcgtgcagcggcaaagcatggtttggggcatcctgagttctggacaggtgctttggtgtctagcttatattttagtggcatccacaaacatataaattatgttagtgtttatcctgggcataaagaagggcatggtaataacataatggatgaagctatttcactatttggtaaatgcttccgaaaaacatacatacctgatcttattttaagacacacaacatcaacaaaatcacaaaaggcaagaaatgaaggtattgcaattgatcattgcaaccaattaaatacaatttgtcttaatcctaaaccgcatagaaacccaacgactatttataaaagaccacctttgggatttggaaaaacagttctccttatagacgatattacgactcgaggttacagttttgaatcagcccgagcctacattgagaaaactggagcaaaggttatacttgtatcttggcttaaaacaatcaatactgatatttctactcttggtgagttgcctaactttgatccttacaaaccgaaccattttgaaaatgtaactttaggaaaatttcatagatacagggacaatatcgttgatatattagcaccggctgagttaactcgattgtttacagcttacaagcagtgggattggcctgtataa

SEQ ID NO: 391986 - DNA, 1032 bp, Salmonella enterica
atgtccggtgaaaaccacacagaaaacatcacgatggtcagctttgattacagtccgcaggcgcaacagccccgggtggaagccatgctggcgctgattgcgcaggaaatggcaaacaccaccgatacgctgtatctgcttattgacccggtgccgctggtcctgcggcctgacatcaccttctgcgaccaactggtggcacgcaaacctgtccctgtcagtctgccacataaggccatcagcatgcaggattacccgtggctggtgccgctggacctgagtcgcgaagatgaccggcaactgctggcgcagagcattgccgtggcgctggatgaaatccatcccgataagctgtgtcgcaaaatgggtcgtgccgtctgcggctggctcaccagcccgcatcccattgatgatgtggcaaagcagctcggccacacggccattcagcaacagcctgaccaccggatgatgcggatgcgttactacgacccggcggtgaacagcattctgtggctggtgctggaggattatcgccagaagcggctgatgggtatcctctcccgctggatgctggtggacggcgatggtcagccggttattcgccgccaccgcgccgacagtgcgctacatctgactttcctgctgggcctgtcgcaggcacagacggactttattctgcacgatgcggggattatcaaccgcgccctgcgccgctatcgtctgctggccacccacacaccgcgctatcctgagctgactgccgcccggtgggtcagagaagcccttgagcgcctgcgctctcatccggctttccacgatgacgacgagcgggaagacctggcttttcacatcctgcatgaccatccacgcatcgacctgcacccgaaaatcgattatctgctggacccgtacacctttacggcggatgtgccgtggcgggaacgcatccggagcatcgggcagcagacctgggcgcagtacgcacgtgaatgcctcgctcaggaagaacaacgcgccacggagaacgcataa

SEQ ID NO: 391987 - DNA, 2850 bp, Salmonella enterica
atggctgaaccgacctgtaccatctgccagaaaaccggaccggtgctgatgccgctgcgctatgccatcgccccggacaccattacccaacagttacctgcctgggccacaccgcagactgcgtttccggcgctcagcggctatcactatgccctgcgtgctgtacgccagggctttatctacgtgttctataacacgggcgcgttaccggaaaatgtcggatttgactgggaatgctggagtgtggcggagaacggagacctttattaccagggcacgaccgggctcggtgctcagctggtgtttaacccgccgccgtgcgggcgaccggtccataaggctactaacctggagcatatggcgctcagcgagaaagcgttgaaatacgaaacctgggtggcgttttcccatgcgccctgggaggccgaagcgctggatttatacacccgcgatgctaatgcccgtgcgaagcggatgcagaacatcacacctgccgagtggaacagccacatcctggcccaggaaaacgggctggtgcaggcgagcgaagcggcgttgaatacggtgctggattaccagaccacgccgcccttcttgctgcgtgatgaagagcgatcgacttaccgggtgagttcgctgattgacggtcagtacggtttttatcaggagagcgtgaacccgcacaccactttccatgcctggagtcgtcagcgtgccggaggggctgaacgttccatgaaggcgatgcagtcccgctgtcaggccagttccggtaagccgatttcaccgctgatactggccctgcaggacccggtgggtatcacccatgaactggcccactggggcgacactctggcgctggcgcatcagtgctacctggacgagctgagcgtggagtttgcgacctggcgcaacattaacggcgtgaagagccaggtggagcagatgaccaccgcgcagcaggctgaatacgcaaatgagcatggcgggcaggatttgcaactgctgtaccgcacgatgggcgggacgtacagccgtgaacagattaggcagttttacgaagaagggaatgcctgggccagaaaccagggcattgcttacgactggagcacctacaccgcaaagctggctccggggaaactggatcagtttaaagatgcctatgatggcctctgtaaagagctggataagcaaacccgtgcgctgatggggttgcgcatcaactggctgcaggacagccgctttatcacctgcattcaggaccataaccgcagccgggtggaagataacctgtactaccgggaaatcgtgggctatgcggtggcgtcactgaatgtagccccagcggggcgtcagctgatacagacctggatcaacgcctacagcagtcaggacaacaccaacctgttctggcgcagccagttctttaacgatccggccctgatgtcagaaatggcaccggctctggaagccatgaaaaaacaggcggcgaagaaggatgaaccggaaagcgaaggtgaacgtgctggcgtgatgccgctgatgagccagtttatgggctggatggggaaactgaacgaatccgctgaccgggcgctggaggcgctggagcgtgatgcgaaagccgctgagaaagggctgggacggtcggctactcgtcagatactggcgaaggcggatcggtggttacagggagctgctgagcaggtatttaacacgaaaacgctggggaaagtgagcgatcgtgcgctggagttgatgcacaaggcgttttttgcggcgcatgtgggcattgttccggacaaggttatggcgctgtttgaaagcgaggttgatcctggtcctgaaggcgcgaaagcgtttcgtactcgcgtgatcgaacgaatgaaggcccggactgatgtaaaggccgatatttataataagtacactgaaaaatataaagaatttatcgaggagccgggcggcgcactgtcaatgcggatcaaaatcctcggtgcagcgctgtcaatctatgaatatggcaaagcccggcaggagtaccaggagctggaagagaaaggcggacaggcgtcatccggcaagaaaaccaaagcctggatggaaatgtcatcggcggggctgtttgccattaactggcatgctaacgccctgatgccagcgcttgaggcgatgggaaaaagcgccgggggcggatcgaagcaggccatgcgtttgttggccgggaagtacatcgccaacggggcaggcagtatggcgtccattctggcggtgggcgtggatttcatggagtttgaagaatcatgggaagaaaacggtactgagttctggaaatcaatctcactgtctggtgcgaaattagcttctgatagtgcttatgccattcaaaccactgatgagctgctggcgctttgtgggcggggatttatggaggaacttacagtatttgcagcgaaaaaattaggggcatttgtactttctcagactattgctcgtatcgttgttggttggggcggttttctcgccagttggccggtaatgattgcggtcaacctggctcccgtgctggtgatgttactgacggacaataagttgcaaagctggtgtgaacagtgtgtgtttggcgttaatgcggatgaggatgtaaagaatccccgctctttacccgaagaacagcgtaagacagtggaagaagagcaacaggataagctggagaaagcgctgcacgaggtctttggcctgcctttaagtgaaaaactggagaaaaaagaagtaacagaagcaggggataatgtgcaggagaactattcgcacggtatcagttcaaaaatcatgatgatcaactactga

SEQ ID NO: 391988 - DNA, 954 bp, Salmonella enterica
gtgacgacagaacatttttatcccgagtctctggatgatgaatacatggatattatgcatctgatggatgatttatcaacggtgaaaattgatattaaagtcagaaaggcatctatctataaatacagacagtctgaacatcagagtaaagagcgtgaagattatttttcctccagcgagaaagaggttatctatttcgaagaacagaaaaaacgactggaagcgaaaatagatagcttccctccgttgccggtattaccaccgcttgaaccgttgataaaaatcagcggcaccgttgatgaaataacctgtaccaaagcactggcctgttttgacgtgggggcgtacaccacgatgcaggagcaactggagcgcaaacgccgccgtgacagtatcggtacatctgcggcaatggttgcacaggtactggcgggtagcgcaccgcatgtagggaaaacggataacgtttggcagcgggacaagagcgtttatgttcagggaaagattgatggcaggtcttttgccggatgggtggaagctgcggatgttcagtcaggtgagcaggtgatgatggctgcggtgccagatggtgacggatatatgatttacgctattgtagcctgtgaaagaaacgtcttttttttaccgccaaagtgtcagcggggagaatatacgaatagtattaaaatctatgtcgttaacatactatgtgcttacattcttttatcgccgatttttgttccaccattatttaaacacggagcatttattggctcctttgtgatttacaacatattttcactttttgtaggcactgctgtttattttcgaatattaaaaaaatatcgcccttacgctatttttttcaaaaaaatagacgatgtattgcacttggatggttataccgaaatgacactatggaagcttgagcaagccgaaaaaaacaaaaattag

SEQ ID NO: 391989 - DNA, 546 bp, Salmonella enterica
atgaacaccccccactcattaaaaaacagtactgagttttggaaatcattgggactcacaggaaccaaattggcttcggacagtgcctatgccattcagactaccgatgaactgctggcgctctgcgggcggggatttatggcgcgattgattgaaattgcggttgccaaaggggcctattctgctgctggacttgccattgacatcattggtttccttgccagttggccggtaatgattgcggtcaatctggctcccgtgctggtgatgttactgacgtacaataagttgcaaagctggtgtgaacagtgtgtgtttgctgttaatgcggatgaggacgtaacgaatccccgctctttgtccgaagaacagcgtaagacagtagaagaagagcaacaggataagttggaggaagcgctgcacgaggtttttggcctgcctttaagtgaaaagctggagaaaaaagaaataacagaggtagggaaccatgtgcaggaaatttattcgcatggtatcagctcacaaatcatgacaattaaactgtga

SEQ ID NO: 391990 - DNA, 1245 bp, Salmonella enterica
atgataaaacagaaatattttctcagttcactggatgatgaatatctggatttggtcgatttgctggatgatttatcaatggtgaatagtgatattaaattcaggaaaaaatcgaactataaatacagtcagtctgaacgaaagagtaaaattgatgatgataaatttgcatcctatacccaggcgataattcaactcgaagagcaaaaaaaacggctggaagcgaaaatagacagtttccccccgttgccggtattaccgtcgcccgagccgttgataaaaatcagcggtaccgttgatgaaatcacctacaccaaagcgctggcctgctttgacgtgggggcctacaccacgatgcaggagcaactggagcgcaaatgtaaccgggacaatatcggcacgtcagttgctatggttgcgcaggtactggcgggcagtgccccgcatgtgggtaaaacggataacgtctggcagcgggataaaagtatgtatgtgcagggcaaaatcgacggaaaaccttttgccggatgggtggaaactgcggatgttcaaccgggtgagcaggtcatgatggctgcggtgccgaatggcgatgggtatatgatttacgcaatcgcagtacctgaaaaaaatatcgtgtatttgccacctaagtgcaggcggagcaaaaaaagcggaattattagtgataatattagagcgatagcaatgatgcatgttgttctttctcccttctttattattatcctttttatgtccaggggatttcttaactcatttctttttatatttattgcatcagttttccttgggccgatcattaaatatcgaatagacaggcgggaggggccttactgggcattcttccagaaaatagacgatgtacttcaccttgacgggtatacgccaatgacgttgtggaagctaaaaaaaaaacggaaaacgcccgtaattaacaatctgaatacaggaattcttatgtccaaaggaaatattcgcctcggcgataaactgaccagcggcggggaagtgattaatgtgacctccacttcgatcgttgaaggtaaaaaaattgccctgatcggcgatctggtcagttgtccgatccagggccatggcattaatcgtattgtcagctctgaacccggctggatgtctgatggtaaagccgccgcctttgacggcgcgttatgccagtgcggctgccgggtgatcgccagtaccagcacgtcgataatggggtaa

SEQ ID NO: 391991 - DNA, 939 bp, Salmonella enterica
atgtactggacgataccggaaccgtacgcgatcccctctgtaaaaccattgcgctggagcggctggtggcggggtttttcgctgtgcgccatggcgatactgctcgtgggatgcggtggctatttctggcttaaagacccgtgtttgctgctgtatacctttggcggcgtggtggtgctgattctggtatttgccggtatcgcaggctggaatatgtaccgctatggcgtggaagcggagcatgcggaggacatcagtaatcttaaccggttgacgacgcttcagtggcagcgctgggcgcagcagtcggtggcggtgctgggttttcatgcctttttcccgtcggcggtattgtctccgggtcacaacgaaggcccggtcaacggggacaaaccgttgctgttgcccccttttaacgggtgtaacgcagtattccaggacctgttgttgtcgttgttgccggagttacagcaactggttgcggaacgtattttgctggaggtcactctgccggaaggctgtggtatggatgagtggcagcagtttacgggagcctggcagatgctggggttgccagtatcatcactgctgatatcgccagtggcgccggactcctatggcgtgcatatgaaaaactggctttctgccccctctgcgacggcccgcctggtgattgttcatcactgggatgctcagcatgccgccaccgaaggggctgttatctggctgctggccccacaaaccgggcacgagtctgggcttccggtacgttgctccctgcatcgcccgatgcgaaccccgctgcccgtacaggccgccacatttcgccgcttccttgattaccagcctttaaccacggacatgaatggcctgtggacggatgccatcacccgtgaccatgcggatgcactgttgattgcacacagtcagcgcccgtag

SEQ ID NO: 391992 - DNA, 453 bp, Salmonella enterica
atggcacgcggaacaaaaaagacggatgccggtgaagccaccaacgaacccggcgttacattgccggaaaataccgccagttctgatactggtgcagatgttgtattaccggaaaataccgccagttctgatactggtgcagatgttgtattaccggaaaataccgccagttctgataccggttcagatgttgtattgccggagatgacgggcagcgcggatctgtcaacgacagacacagcagttactgaaaccaggggagcggatgacgttatggtgcagccagtgcgatatttcaccgattcggcgacgggggtgtttcgtacaccgtctgatgaacccttcagcgtaaaccggcgcagggcagcggaattatccgcaggtggactggccagagaggttaagcctcagccggataacaaaatgaggccggacccgcagacgaaagagtga

SEQ ID NO: 391993 - DNA, 279 bp, Salmonella enterica
atgagtacaaccgttaagtttgcagcaccagactttgcatttgagctggaccagcttgttgatatccgcatcagcgatgaatgggggcaggtgagagcccgtgctcagtacgccaacagcgagaaccagtatctgatccactatcaggcagcagataaatgtgcccgcagcaaatggttcgatgaatcaatgcttacagcaactgaagacgataatcaccctgattgcccggtctttgctcctgtcgaactgccggaaggtgtgaagcttgacggatag

SEQ ID NO: 391994 - DNA, 465 bp, Salmonella enterica
ttgaatcgtataacgactggcgcaatagtttcgttgctgattgtgaccgcagtgctggcgtggactaccgaccactaccacggtaacgccgtgaagtacaaagaccagcgcgacaccgttactcataagctggcgctggcgaacgcgacaattaccgacatgatgaaacaccagcgtgacgttgccgccctcgatgccagatatacaaaggaattagctgatgcacagactaggaatactgatttgcagcgccgccttgctgctggtggcagggtgcgcgtcaaagggcgttgtacagtgccagtcagcgccacacccgccagcaccggcagcgtgggcgatgctgccaccgtcgaactctctccagattctggacagaatgttctcagtatcagatccggaattatcagcgaccaggcaaaactgaggtatctacagcagtacgtccgggaacagtgccaataa

SEQ ID NO: 391995 - DNA, 1317 bp, Salmonella enterica
atgattcaagtgcgtgagtacgcccggctgaccacagatgaacgcgcaacaccatctttggattgtgcggtagtaaaacgtgagacgttagaatgggtgcagaaactggcctcagaatggaaaggtgaggaaccattgctattgtctgatggctatcacgtatttaaattaggtagctatatcggatacttgcaaagtccggatggagaagggattgaaattttacccaagacaaactttgggcaggataaccctcagcaaacaaggaagatcttacagcgcatgctcctggctgctttaaatattcggccacgggtcgctgggccagcggaactaatgcggatgaatgttcctttacatgaatggatttttcgacagttcctatctgagttgcaggtcttagtcaccagagggttgtgttttgattatcgccgtgtagatgaagaaagccgcttcatacgtggacaactacaaatccagcgtcagcaaaggcaatctccggcacatcagcatcttttccatatcagtcatgacatttattcaccaaaccgtctggaaaatcgcctgttgaaaaccgcactcaattatgtgttggcaacttgccagaacagtgaaaattggcgattggcgaatgagctctcacatcgtatggctgaaatccctttacaggcaaagccgcaacgagaactgcgtttttggaacagtagcaagctgatgcagatttacaatgatgtgcgcccgtggtgtgagttaatccttgagaaaatgaacccgaattttcagcaaggcagccacaaaggtgtatcgctcctgttcccgatggaacagttatttgaaaaatatgttgaggtctcactcaggtcatgcatacgtagaggatgccaacttgtatcacaagccagttatcaatatttgcttgagcacacggtaggtaatagtgataagccacaagctatgttcctgcttaaaccggatcttttgctgagaggttccaatggcgctcagactctggatacgaaatggaaactcattgagcagacttcttggcaaacagataaaaaatataacattgcccaatctgatctttatcagatgtttgcatatgggcataagtatcagaatgggcaggggcatatgatgttgatttatcccaaacatttatcttttaaccaatcattacccccctttcactactcgaatactttgacggtctgggccgtccccttttgtttggatagccagcaattggttccgggcagttggcaagaatattttcccaatctctacaggcaagagttattgacgggagctacgtag

SEQ ID NO: 391996 - DNA, 2628 bp, Salmonella enterica
gtgtctaagtatagttgggtccctgtattcaaaaacgtttgtagatggattgctgactacgagaataaacagcaagaattggtccaaattctacgtgaaataggcgttgataaaggtctggaggacgaactttctgatggaagtagagagtcgctgaaagtgatagacccgttcactttttttgctacttttatgaagtatggcatggtcaaacgtactgagctctttgctgctctgcttaaaagagcaaatttaccaatttccgcacccagtgatttcaacggcgttccaaatgcgcagccactcaaagtctggctctttccttatgaaaaagaacgttctgatgatatggtgcccagcctttggacactgtttcatcagatgcgtgcagggaaaattgatggtgaattgttcgataaaattctaaaaattcctcataccggtttcgcaaaacttactgagtgtttgttttatttatcaccggaagaatatttccctgtagatgcccagacgaagcactggctcaagaaaaaagggcgtgaattacctaaagagaactggcaatcctaccaggagttgttgtcatggctcgatagtacacagtcaaaatcatattatgaaatatcgtatgaagcctggtatgaaaatcagagtggttcgtttacctcggtaattgcagatgaatacttaagtaaccgcttccctgagagtcggtcgtcaaccatacatttgattgcgtataaaacgaatgcaatgagggagttggcatttgatccaggtaagactccggagaaaaagaataagattaaaatctttgttgatgagcagcctaccgatccacttctttcccaagttattgcctatgagagcggcaagagccgcaaccaccacctcgcaacacacgctccaacgcttgctcaggggaatgcagcatgggctgttgagattagtacgcttgatcaattaattacactgtgtgattggtatgcaccccacctagcgaaggacctacctgccatggaaaataaagagaaatcagtaaaaaatcacacatcgctgaatcagattctttttggtccccctggtactggtaaaacctattcaacactggaacgtgcagttttgttggcagaaccttcatggtatagcgatctggaaagtcagaatcttagtactgaggaatatcggcaagcggtcaaaaataaatacgatacgttatgtgcagacaaacgtatcgtgtttaccactttccatcagagtttttcgtatgaggatttcattgaggggatccgtgctgaggtagctgaggaaaatcagggcataaaatacaggatagagaacggtattttcaaagatattgctgaccgtgctgctaaggcagttgcagctaaagagataggactttctcaagctcctgatatctggaaaatctctattggccgtgcccatgaaaaagaaatgcgtgatcgctatatcaatgcaggtgaagctcgtattggttggaatgacacgggggatttgtctcagacctttgaacagaagacacaggaacaacaggattactggaactccttgagtcatcctaaccacaatgctcttaacgccttttcacatgatgtaaaggttggggatgttctactgtgcttgaaaaatgcggaaactgttcaggcagttggaattgttacttcagactattcatttgatgaagacgccgctacttcggatgaatacgcgcatatgcgcaaggttaattgggtattaaaggatattgaactgaatattcttgcgcttaatggcagtacaaaaatggttcagcagacattgtatccactttatcgaatcagttggcatgctttgattgctgaattagataaacaacacattcccctgccaccctcatttcataaggccagcaacatcagagaacgccagaattatattttgatcattgatgaagttaatcgtggcaatatttcccgtatttttggggagttgattacattgctggaaccggataagcgattgggaggctatgatgagcgctcagttattctgccttattctaaagagttgttctctgttcctgacaacctgtatgttattggtactatgaacacggcagataaatcattggctcaacttgatctggcattacgtcgtcgctttgagtttgtagaaatcatgccgcagccagctttactgtccgacctctcagtatttggcgttaatatcgctgatctgctgactgtaatgaatcaacgcatcgaagtcttactcgatcgtgatcataccctagggcacgcatacttctggccgctgaagactgccacaactgaggatgaaaagtgcaaactgatagctgatatttttgcgaaacgtatcattccgttactgcaagagtatttttttgcagactgggaacgtatcggttgggtactcaatgatagcgaaaaagcacctgaaaacagatttatccagacagatattatagaacatggaattaaaagcttattccccgagtctattgcgagccaattaaatgatcgcagataccggattaatcaaagagctttctcaaatgcagccgcttaccaagggattttgcccaatgagggggctaccaactga

SEQ ID NO: 391997 - DNA, 258 bp, Salmonella enterica
atgaagcggctgatgctgtctggcatcatgttgctggtttgttcagcggtggtgttttatctggcatcgggtaacacgccgcagattaaccgcagtgatctgctgctctggcgtataactctgtacggcgtggtttgtggtgtgggctggcgtctgtatgatcgcttaccgccacatcgtccggcaatccgtcgtatcgcgctgatatttatcgtactgattgtacttaacgaaatcgtgccggaggtattccggtga

SEQ ID NO: 391998 - DNA, 1317 bp, Salmonella enterica
atgactacgcaaagtaacaacgataataaaattaatgcaaatcctactaaagaattcttcatagaaatgttaacccgagatattgcattagatcgagcgattcttgaccttatagacaatagtgttgatgcttcccgacaggaaaataagcctacttcatggattaaattatatcttagcgaagataagtttgagatatatgataattgtggaggcatggatcgacacatagcacaaaactatgcgttccgatttgggagaccatctaatagccctgaaacgccgaactcagtaggacaatttggtgtaggaatgaaaaggactctttttaagcttggaaaaaatttcattgtagaatcaaggaaaaatgacatcagtttccgtataaaaatagatgttgatgaatggaaaagtcgagaagagaaagattggacttttgatattgaagatgctcaagatttagatcttcaaaatggtgaaactaaaataaccgtcacaaacctttatccggaaatatctagccagttcagcctcgatacattcaagaacttattaagcaatgagatctcctatgctcattttaagagcataaataaaggactaaaaattttcataaatggtatccaggcatcagagtacaagctatcattgttatccactcaggaaataaaaccattcagaaaggaaatcactagtgatgatgtgcatattaatattattgctggcatatcagaaagggattttaaaaaaggtggatggtacatagtttgtaatggaaggttggttgaaagtgcagaacaaagcagtacaactggttggggagaggataaaataccacagtatcatgctgattttgcttttttcagggggatagtcgagtttgattgtataaactcaagtaaactcccttggacaacaacaaaaactggcgttgatagcaataaccaaatatataaaaccgcattgcaccacatgaagattgcaatgagacaaatcatagcgttcttgaggaatagatcgaaagaagactcacagtataaagagtcgttacttgataaaaggccattgaatgacgcaatacatactgcgattcataatagcaaacaaatagttcctacagatgtagaaatttcagaacaatttattgcacctgatccaattgaaccattatccgagccaaaggaaacatcaattcaatacaaagtgttaactgaagaaataaacattgtaaaagagagtttgggagttactacaaattctgaagtaggaaaacaaacttttaattattatatggagtatgaatgcaaaaatgtctaa

SEQ ID NO: 391999 - DNA, 348 bp, Salmonella enterica
atgaccgctcgcgggcgacggtatgcgcacgtgtcactggtggaaggtatcaccgataaaatgaacctgaacgccggggacctgctctgggtggtgtgcgataacggcaatctgttgccggaccataacgggccggagcgcccggtatggtggagtaatctgctgcctccggcaaaagagacgatgcagtttgataccgtggtctgcccgacaccgtacccgatacggtccggggatgccatcgggcatctggggtattatcaggcaccgaaggatggcggttataacgggcgctatcaggtgcatattgagtgcgttaccactggacttgccgcgctttctgagtaa

SEQ ID NO: 392000 - DNA, 969 bp, Salmonella enterica
ttgagtgcgttaccactggacttgccgcgctttctgagtaattctgaacatgtggagcgggataaacccgcgtttggcaaatacccggcgggtataccgctctatatgaagaacagcgtaaatgcgatatatcaaagccagttgactacccatcaggacggtatttttcccctgaatggcagccagcacacagaagacaatcaggtgacttactggcaggctggcgcatcgcggggctatcttgcagaatccgacctgaaactgctgtcacgctatgacctggcggagcggggttttgaaaccgttgaagccagcccgcgtagctttgaccacctcgacggcaaaaaccagcctgcgggactggtgcggcatatttttcagatgctgtttaacgcttcctcaaaagacccgcgtaccagtcatgcgcaggtgaaacacaactaccagcggctgctggataaaatcgacagcggtgagccacgctattcggcccaggagtaccgccgggcagtacagaacccggattacattgatcacctgcaacacctgtgtgtgaaacatccgggtgactggtactgtacgtcagatgaccccgtctggcaggctttcttcaccacattgctcaaaaaggaagcgccggaatggtacagctatggtatccgttttctgaacgccactcgctggatggatcaggtaccggacatgtcgcgaacgccatggcatatgcacccgctggtgtttctggatgccatcagcacgtcgaaaaaacgcggctgggcgcacagtccgtttgcagacctgctgggctgcgtggagtcaaagaacgattacacggcttacaaccagatatttcatagtccggaaaggtcggagaatttgcatctgctggagttcgaaaaggtaagcaaatcagtaagggacgaattagcgcgaatgatgggcatggttattatgatggcgatggtttaa

SEQ ID NO: 392001 - DNA, 255 bp, Salmonella enterica
atgatgtcaaaagatcccgttaaaacgcttcatgactatgagagttcacactggaaaacccggctggataagcctgaccctgttcccgcagatattacagcagccctgcaggataacctgttactgatggaaaaacttggcagtaatgccacacccgctatctattatctgtctcctgaaggccgtctgcagcagcaactgggactgccgccggatgatgacacgatgaacacgataatgggcggtaagccttaa

SEQ ID NO: 392002 - DNA, 363 bp, Salmonella enterica
atggtgcagagagacaataccgacggatactaccttaatatcggcaggaataacgggcagatacgggagattaatcagcctgcgtccggctccccggaaaacctgatccgttatcctggctacctgttctgtcagttccgcctgaccggcacactggttgagggccgttatggcttcattttctatttaaagctgcagcgtcagccattccttctggtgtggccctggcaaaccaacgatgtggcagaagtgcccgcagatttttttaccgacttcaccgttgttccgcgcgtgttctggaggcatcttccctggctgacagcaaataagccaaaccgggataatgcacgcttacttctgtga

SEQ ID NO: 392003 - DNA, 1254 bp, Salmonella enterica
atgaaaggaattatattagcaggtggctcaggaacaaggctttatcctattacaatgggaatatctaaacagttacttcccatttacgataaaccgatgatttattatcctctatcagttttgatgctagcaggtttaaaagatattttaattattaccactccagaagaacagggtatctttattcgacttttaggtgatggtagtcaatttggtattaatttatcctatgctattcagccgtctcctgatggactcgctcaagcatttattattggcgaagatttcattgggcaggactctgtttgcctagtattaggtgataatatattttttgggcaagggtttacaccaaaattgagagcagctgttgaaagaaaatcgggagctacagtttttggctaccaagttatggatccagagcgttttggtgtggtcgaatttgataataattttaaggcattaagtattgaggaaaaaccacttaatcctaaatcaaattgggcggtaacagggctctatttttatgataataatgttatagatattgcaaaatcaattaaaccatcaattcgtggtgagctggaaattacagtagttaacgaaatttatcttaaaaataatgaacttacagttgaggtgttaggtcgtggtttcgcatggcttgatactggtacacatgatagtctaatagaagcgggtagttttgtagaaacagttcagaaacgacaggggatgatggttgcatgtccagaagagattgcatggcgtaatggttggctaaatgataaaaatcttttcgatagagcaaacatgcttcaaaaaacacattatgggcagtatttgctaaaaattttgactaaagaaaatatatctttacaagagcatagtgatgaacgtggttcgcttattgctttagaagaaaacaataatattccatttcaaattaagcgagtgtattatatatttaataccaagaagggtgtaagaagaggatttcatgcccacaggaagttgtcccaagttgctatagtcatcaaaggatcatgctattttttattggatgatgggcttgcgcagaaaaatataatattaaatgatccttcgaaaggtctgctaatagctcctatggtgtggcatgaaatgtatgatttttcagatgattgcattctcatggttctagcaaatgatgtatatgatgaatcagactaccttcgtaattacgaatattttttaaaagagctatctagttaa

SEQ ID NO: 392004 - DNA, 993 bp, Salmonella enterica
atggatatcaatgagttccgcgaatttttacaggcaaaccaagatgcttatgcagcttggggacagtttgtgtctgaagaaatttacagtgctctttgtaactccttgggggacgacaaagccgcgctcctgctaaagatccactcaaaaccaagactaaaaactatcgcctcagcattaggaaaggtcagtcgtaaagggtatgacaatccagtggtgcaaatgactgatttgattggtgtgcgttttgtagttctgctctctgttgaaattagaactatcagtgacatcattgaaagttgtgataaatgggatgcgactgtttctaaagactatctatctgaaattgatgttaaccccaaaatttttgactatcaatcacggcattatgaggtaaggccaaagtctcaattcgagtactgcggagaaattataacgcctgaaatgtgctgcgaagttcaagttagaaccttgcttcagcacgcctatgctgaattagtccatgatagcgtttacaagccttccggtgacgtgcctaaatcggctgaacgacaaatagcacgtagtatggccttgatggagacaacggatgatctgttttgcaaaacaatggaaattttggccgataatagcaaggaaaggaatgagcttttagagtttctttcagggtattacgcggaaaaaatagggaggcaatacattgacgaagatatacatgtcaatttctccgtcattgatagttttaaagaccacattgacgacaatctaccaaataaaatccacgtgcttcttggcgagaaaaaatacatcccagcaagaataattagtagagttgaatacaaccctttattcactcaaccaggcatattgtttgtatactggttagcaagccagttagactccggagaaatgctttcaaaatggcctttgccgggtaatattaatgggctagagttggtgctaagtgatttaggaaagagcgtgtctcgctag

SEQ ID NO: 392005 - DNA, 1086 bp, Salmonella enterica
atggcgagtgtggactttagctttgagggacttctaatagaaagaattatcgcacacagagtttttcctaaaagtgctgataaaaccttaactcccccaaaaaccagcaagtctttaatggcattcaaacaagatgcattagatgcttttcaggtgaggattaccgaggctttggcaagtaaatctcatggaatcgaaatgtctattggcggtgttggtgatgattgttttttaaatttgtcggcttcaacgttttctaatgatacaaatcatttcatcaaggttactgaacggcttgcaagtaaacttagcgaggcacaatacaacagttctgctcctggtgggatattggctgtattgtctgggcgcgttggaaatgactcactcccattccttgcagtaataaaagctgaaacccagaatggctttagaactgttgaaaatgatgaccaggtgacaatggagtttattgcagaacttcttttaactcctgcgcaacgtttttataagattggttttatagtccaaaccattgctttaccacctgatagcgatggtaattataacagctcatcttatcgtgcttttttgtttgaccatttaatgacatcaactgaaactaaaaacgccgctgggtatttctactctcggtttcttgatatggatataagtaagtcttcaaaaaaactgactcaagacttttttgaaagtactagggacttcattaataccgcacagatagaggaaggtaataagcttgcactacatgaggccttgagaagtgagatgcgttcgagaaagaccacgttaagtacagcggatttcgctgaaaccaaccttcccgaagaaatgcagggtgagtacttggaatttatgaagaataaaagcttccctgctgccgcggtaactaaggataatggttatattgaatctaagctaaaaataagaagtaaactcgtattctctaatgacgtatgggtttccgtccctccagatcaactaaaaaatcttgtggaaattatcccatcggatgataatgaatcaacaactttgaaaataaaagggcggcttaaaagtcaacagtaa

SEQ ID NO: 392006 - DNA, 420 bp, Salmonella enterica
atgaaactgagcataggcgatataaaattttccgaatcttacgcatccacgaccgttgaggttgggagcggaacatacccttatctccatctttcaatatgtacgatggacgtttccgttccgctggtggaaggtaaggccctggaacagtacaaagaagaactactggcaaaagcacgcgaacgaatcgctagcatgtataaagagattgtgtgcggtgggagtcaggtgcttaaaccctttaagatagaaattacctcatcccccagagacaagctggaagagcgtgttgctaatctggagttgcagcttgcggaagtaaaagaatctacaagctgccatatgcaattaatgcagaataacattcaagaaataaagagcagaactattcagccccatctcagcaatcgcagttgttga

SEQ ID NO: 392007 - DNA, 198 bp, Salmonella enterica
atgaaatacaagctaagctctattggtctttgccacgcaaacgaaaaaatctacgtatcgctgctgggtggcgatgactcccagcatcatttctacataaatattagcggtatggatgttcctgatctgaccataaaggaaatagaggttatggcaatcaggcatgcacaagagaacttcaacaactgcgattgctga

SEQ ID NO: 392008 - DNA, 831 bp, Salmonella enterica
gtgaagaaatttctggctatcagtgcattagcgatggtgcttgtaggttgcgaccaaccaattattgacacaacttctgatgcttctatcaaggagtctatagcaaaagtcagggagtcattacctgaaaataaaaaaacagagtttgacaatgctattaaggttacagtattcagtaatattgattttgctgatctgatgaagattggattaagtggaaatcaagatgaaataaataaaaaaatactagagccactttctggaaaaactggtgatgaagtgatctcatatgctaatcaggttgtagcagatagagaaatgaaacagaaggagcaggcgctacaagaaatcaaagaattggaagaaagaaaagatgaagcaactaaagcagtggaagaactgaaaaaatttgaggttatcaagtcacgtttttcaatggaaaaggagagttatggtcgcgatcaaccgataataacattggttgtgaaaaataatactaataaacccgtagcaagagcttattttcacggtgtgatagcaagcaaagagcgagccgtaccttggcttgaaaaagatttcaattatgaaatttcaggcgggattgagccgggtgaacaggttgaatggaaccttgcgccgaataaattttcagaatgggggaaagttgatgctccttctgatgcgatctttactgtaactgtagtgagacttgatggagcagataataagccaatatttgatgcaactactttttcagcaaaagaccaagaccgacttgaaaaactaaaaaaagatttcgacaactttaagtttactggcggaaataattaa

SEQ ID NO: 392009 - DNA, 558 bp, Salmonella enterica
atgagaatatttggctggtttgttttagtcattggcgttatatggatcatcgcagcaatgaatatgaacgttaccgtttccgtgggggatgggcgttacgtgaacaacataggtctaatgtccgaacggcaaatgcatgtcattattggcggggtaatgttgttgtgcggtgttttgatggttgcattcggtcgtaagtcctcagaaagccaggaagataaagttaaatgtccattctgtgctgagttgataaatccggaagcaattaaatgtaagcactgtggtagtgatatcaaaaaagaagtcgaagcaattaaaacgtttcgtgttagcgatatggagtttaacgaattcttcgttacggataaaaaaggtaatcatgatattgactacgcgaaaattcatgcgcttgcgataatcatgaaacaggccaatcccggagtcaatccggcggatatatgggataaaaataaagacgaaataatggcgttaaaaaatatgatgccaagtatcgtaagagaaaaatttgagaaacagttacatagttatttttcttaa

SEQ ID NO: 392010 - DNA, 420 bp, Salmonella enterica
atgtttattcttgataccaatgtgatatctgagttacgcaaagctggtgacggtaaagctgacagccaggttatgcgctggctttcgtctgtaaattcgcgacaactctatttatccgtcataaccttactggaactcgaacgcggtattctgcgggtggagcgtcgtgacgttcttcaggggcagatgttacgtcgctggctggatggtaatgttcttccggtttttgccgatcgaattttacctgttgatgtggctgttgtgcgtcagtgtgcccgtctgcatgttcccgaccccagacctgaaagcgatacgcttattgccgcgactgcgcttgttcatgggatgactgtcgttaccagaaatgtagctgatttcgagccaacaggagtagcaattattaatccgtgggtttcgtaa

SEQ ID NO: 392011 - DNA, 255 bp, Salmonella enterica
atgacgacgacttttaccagcagagaatttaatcatgaggttggcaaagcaaaacgtgctgcctgccagggtgctgtttttatcaccgacagaggaaaagccacgcatgtgctattgtccattgatgaatatcagcaaatatcccgccagaacgccgtaaatattgtcgacgcgctgtccgttcctggtctttcagacattgaatttgacgcaccccgcgtgactgttttacttcatgaccgggacgtattctga

SEQ ID NO: 392012 - DNA, 456 bp, Salmonella enterica
atgaacctgcctcaggatggcatcaaacttcatcgtggaaatttcgcagctataggcaaggagatccagccgtaccttgatgacggtcagtctttccggctgatacttaagccgtggcgcgagaagcgcagcctttcacagaattcactcagccatttgtggtacgccgaaatcagcgaatacctgatcagacgcggcaagtccttcgcgtcgaaggagtgggtgaaagatgccctgaaacatacttatctcggttacgaaacaaaagagcgtgtagatgtcgtttccggtgagataactacagttcagtcattacgtcacacttccgatcttgataccggcgacatgtacattttcctgtgcaaggttgaagcatgggcgatggacatcggctgtcacctgaccattccgcagagttgtgaatatcagctattgcgcgacaagcaggaggcatga

SEQ ID NO: 392013 - DNA, 171 bp, Salmonella enterica
atgaccacaccgcttaaccgggtcatgaatggccacatctacaacgtaccaacccagcgtaagaacaaacaggaggttaagccttctgatattccgacattcaaagattatactgcccgtctggtggatcagaaatggctgcgactcgcagcgaggaggggccatgagtaa

SEQ ID NO: 392014 - DNA, 606 bp, Salmonella enterica
atgagtaaacctgtccgccgtaagtgcaaggtctgtaataagtggtttcatcctgcatacgataatgttcgctggtgttgcccggaacatggcaccatttacgcgctggagcttcgtacaaaagaaaagataaaggcagaagcgaaacgaataaaggaaaagcaccaggcagagaagaaagaacgacagcgccatgcagaccgcctgcgggcagtaaagccactccgtcactggatacagatgacccagcgagtatacaacgactggcggcgggagtatctgctttctcaggggggcggttgcatatcatgcggaacgaaaacagcaccagtctggcacgccggacattaccgtaccacggcagccgcgccgcagcttcgctttaccgacaataacgtatggcttcagtgtccatcctgtaacgtccacaaatcaggaaatatagaggcataccgcgccgcactggttgaactgattggcgaggcaaacgtacaggaactcgaatcaagcaacgaacgacaccgttacacatcagaagaactggcagagatccgcgctgacgccagggcaaaacttcgtgcattgaaaaagtggaaagccgcgtga

SEQ ID NO: 392015 - DNA, 675 bp, Salmonella enterica
gtgaaagaacaatacctggaatatatcagacagcaactgacagtcgccctggctgatttcagtggaacgacgaaaggtcaacttcaggcatggctggagaatgcacagttcgtaacaggaacctttaaacgcaggcggataaggattaaggatgagactacaggaaaatggtacacgctggataatcctcctgtaccgggtaaacagtctttggctaaaggtgcttctgttgcgctggtgttgcctgtggaatttggaacagcatcatggcgcagggcggtgctctcgctggctgaacatcagaaagcgtgggttatgtggatctatggtgaaaatacccgttttgaatatcagacggaagtcacccggtgggcgtggggtgaattcaggcagattaataaacgccggattgccgctaaaacgatggggaggctaaaaacgctgatctggctggcggctcaggacgttaaggcagaaatggctggacatgcaagttatgagtacaagtttctggcggagatggtgggggtaacacctaaaaactggtcagaaaatttcactgctcactggcgtaatatgcgggaggtttttcatagactggatcgcgaggttctcctgcaagtttcaagggtgcgtgtggagcaaaaagagagaaaatttgcaaaaatggattaa

SEQ ID NO: 392016 - DNA, 381 bp, Salmonella enterica
atgaaactatccccagaagcaaaacaggctgtaaaaacagccattgagcaacttcgcctcctgctggttgatgaagatgatgtcgaaagccttgagcggctgaaaaaaacgtttcttcatggggctaaaaatatcattgatggacttgacgaaaaactgaaggcgcaggtagctatgctacagacagaaaagcgccccgacaatgaggcgcaagaggtggaaaaagtcatatcagatattatgcggattgctgcctcttccgaattattgcgtcaactctcgcgctccgcagaagatgcgcaggacggcattaacttaaaacgcgtcaaagagacattcttacaaatagcgtgtgaagttattgcgaaagaaagagcttaa

SEQ ID NO: 392017 - DNA, 255 bp, Salmonella enterica
atgagcgatatttattatataaagtatcaacttattggtgttactaacgttatttcattaatcatcagtgagttacctgaagaaaacagggacaggataatgaaaaagttaaatatgctggcaagtgctgactggctctccttgcacaaagatctatggcccgatttcgatcccagggatgaagataatggccgcattgttactgatgttttcaaggaaatccaggagactgttaagctctttctttcgcaataa

SEQ ID NO: 392018 - DNA, 2361 bp, Salmonella enterica
gtgaagcccgtggaaccaaaacgcacatactctgcagcggagctgaatacatccagcgagagtaagccgttaactgaatctctggttgttaatgttgcgccgtatgccactgaggctgcacctgtcattgtcacgatgggtgatgcggcatctaaaggagggaaggtcacgccatccagtgtttgggcacaatcagatgttgcgctgaagttgggaggtgatctgcgtacggcacaaccggaactggataaggatgctaagcctgttgcgggtaaattagcccgcgaagcagataagattgtgctgcagaatctcaacattcataacagcatgccatcacttgctgaccgggtggacatgttgcacagtgatattgttggtattcagattggtacgcaaacgacatccgctaccggggcattatctgcagctccgaaagacgccagtatcctgctggataacgttaatatcaccatgcagaatggtgggcgggggactaaagccattgacctggtcggaaacagtaaccacattctggctaaaggcggggtgattgatgccggagagggttataacgccagcatccttgatatcactggtagtaataacgtagttgactttgttggctcaaccctgaagggggacattaagtcatcagagatttacagagcggggcagtttgtgcagcctgtagataacacagttaatcttaaaggaagtacactgacaggtaatgctattgccggtactggtagtctgagcctgatgctggatggcagtacctggacagggcgttcaggtgagcacagtccggatatcaccctgcgaaacggttccgtctggaatgtaacgggttcaaatgctggtgcatatggagtctggtcagagattccttattcttcagtcaacagcctgaatctgtatggcagtaacactctgaacctgattgctcctcctgaaggtaaaggtcagcttggcggtcgtggttttgtcggtgatggagacaacagaagtcgaatgctgcaggttgatactgacctgaagagtgacgggaaagggattaccacggtgaatatcggtgcctattctccgggtacgcttcatcgcctgaacaatactggtattggtgatgattacgcattcggtcggattgaggtcgacggactggctctgggtggtaaataccgtctgaatgtggagagctcaggtgctgagccttacaccatcggtggtcgtctggctgatgatgcagatgcaaccggtgctcatgaatttgtgtcatataaaacgtctgaaaaccgtcctgttacggacaaggacgggaaggctgtttctcaggttgctaagtctgacgctgacttcatcagcctgagtgctccggccgaactgggtgtgtaccagtacgccgctgagaaagtggtagacggggtgaacaaccggacaaacatctactacagcagcaccggtaagctgtccaacagtgccgctactgttgtttctctggcggcagcgccggttgatgtggctaatctgcagtctgacacgctggcgaagcacatgaacagcgtgcgtcatggtaaggattccggcgtgtgggtatcctactttggtggggagaaccgcaacaccacggcagcaggtccggaatacaccctgaagactaacggagtcatgcttggtgctgacaccctgacggaaaacaactggctggccggtgtggctgtttcttcagcccgctcagacatgagcgtgatgaacagcagcggtgacctgaacagctacggtgcgcagttctacatgtcccgtcgttatgacagcggtgtatttgtggacagtgcgctgcagtttaaccacttcagcaatacagccaaagcccgcatgattaatggtcagcaggcgaaggctgacttcagtggtaacagctacggcctggaagctaaggtgggttacgcctggaacagtgaagggttctttgctgagccgtatgtacgtgctgcggcccgtgcctttgacggtgagcattatgccctgtccaatggcatgaccgtgaacagcaacgactataagtccatgcagggtgaaatcggtaccgacctcggataccagtatgacatcagtggaggttacgtgaagccttacctgcacctggctgcgctgaatgagtttgctgacggtaactccgttcgcgtgaacaatgtttcactggacaacagcgtgaaaggcgccgccttccaggcgggtctgggagctgaagtgaaggtaacggataacctgggtggatatgcagcctttgattacacgaagggcgataacaccgagcgtccgtggcaggcgacggtgggtgtgaactacacctggtaa

SEQ ID NO: 392019 - DNA, 150 bp, Salmonella enterica
atgaaccagaatcagtcttttcatgttgtatctctctcccttatgttactcatctttttatcatcagaactgaccattgacgttataaattttatcggttatgtgatcggaatctctggtatatgtaatatttttcctggtgtctggtaa

SEQ ID NO: 392020 - DNA, 171 bp, Salmonella enterica
atgcatcaaatccttcggaaacagcagataaagcggcttctgcatattgttccggggctgttaacatggatttatctgcactttttccccaaccaaactgcaattgactggcgtaagtacgaattgattcccgcgttttaccaccaagcaacttatatacaggaacattaa

SEQ ID NO: 392021 - DNA, 183 bp, Salmonella enterica; identical to SEQ ID NO: 391780

SEQ ID NO: 392022 - DNA, 393 bp, Salmonella enterica; identical to SEQ ID NO: 391779

SEQ ID NO: 392023 - DNA, 150 bp, Salmonella enterica; identical to SEQ ID NO: 391778

SEQ ID NO: 392024 - DNA, 480 bp, Salmonella enterica; identical to SEQ ID NO: 391777

SEQ ID NO: 392025 - DNA, 585 bp, Salmonella enterica; identical to SEQ ID NO: 391776

SEQ ID NO: 392026 - DNA, 402 bp, Salmonella enterica
atgatttatgtcggtcgctctgccgatttacataaagaacgtagatggcatctcgtcattcctatgctggtaggcatggttggacttctgatagcagcaaagtttgcccatagtccggtaatcgcaatgattggactgacactttccacaattggtgtcctgacctctttgccgatgttctggacagtacccagtgcaatgttgggttccgcagcagcggccggcgggctggcgttgataaactcaattggcaacctagctggattctgcagcccttatctggtcggctggataaaagataccactaacaacacagatatcgcgttgtatattctggcaggtagtgtattcataggcgcactgttaattctgcgaattcctaaaaaactgctggcccattaa

SEQ ID NO: 392027 - DNA, 450 bp, Salmonella enterica
atgaaatatattaaaaatcaggacgagctgattactgctcgccccgaagaaaaattacgccgggatataattgatatcgcagaaaatgtccttgattacgtaaacccgggtttaatcaccagaaagattgtacaactgaacgataatcagttaatcattcagaataaatcatatcaacttactccagaaacccgaatttttgttatcggcgctggtaaagcaacttttccggttgcaaaagcacttgaagatattctgggtaaaaaaatttataaaggtgccgtgatttgtaaaaaaggagagaaaggaacgctcaattatatttctctttatgagggaaatcaccccgtaccagatgactcatcactaaaaggagcacaggcagttaccacaatcctgagagaagtccggtctggagacattgttatcgcctgtatctcgggggggtga

SEQ ID NO: 392028 - DNA, 144 bp, Salmonella enterica
atgttttttattgacaactactacctgcaaacacgaaaaagacacccagcacttgatttacccaataaagagcgccataaggtgccgattcctatccatgttgcaacagggcttcgaaagcgacccttcttttttaccagatga

SEQ ID NO: 392029 - DNA, 480 bp, Salmonella enterica
atgacaaaatacgctgttttatctggatttctggccagcattacattcgctgcgcttgccgcccccctttcacagcctaacatcagcctacaacaggcgaataaacttaccgaatctgcaatagcagcatgtcaacaaaaaggctacaacgttagcgttactgtcgttgatcgttcaggaattactcttgccatgcaaagaatggataacgcaggaccacacaccattgatgcaagctacaaaaaagcgtggaccgctttatccacacgaactccaacaagtaaagtgatggaaaatgcacaaaaaaatcctggagcccaacatctgtccgatatctcaggttttcttttattagccggtgggcttcccataaaatctggtgataacgttataggtgctattggagtgggcggggcacccggaggaaatcttgatgagtcttgtgcgcttgaagcaatagaaaaaattaaagaccaatag

SEQ ID NO: 392030 - DNA, 366 bp, Salmonella enterica
atgaaagagattgttttaaatgaaagtaataaaatggcgataaatcttatcacaaatgtattacagggatattgcgaaacgatctatagcatctctgaaaaacagcctgaaacagccatgaatattttagcaggggaaatgttatcagagatactttatgatgttttgattgtctgtgaagttgaagactatgttaaaagtggaagaagcaaagatgtatctgagatcaatatggatgagttaaagaacacgattttatactggcataaagagcatatcattgagcttgtactgaaaaacataaaactggatgatgctgatgagcgtatttactggaagttaaaaatgactgtgaatcagttttga

SEQ ID NO: 392031 - DNA, 243 bp, Salmonella enterica
atgattgatgaattccatgttatgtatatgtataaaaaaatccaagctgaagctgcgacaacagatatgaaaacactggaacagcttttgaagaagttccgtaaagttgttgcggagcgccgggaagaatattatcgggagattggtgagaaaaaggctcagaatttgaaggctaagagattacaaaagttgcttgagaaaatggcgtgtaaccgggtttctccagaagatctacaggaatga

SEQ ID NO: 392032 - DNA, 651 bp, Salmonella enterica
atgacaactttttactataaagatgtacccaattatcttataaatagttttgtagccgtaagagattcatttagtaatctagaaaatttattatgtgtagtaaatatcataaatcattgtcaagttcatcgggagagcaatgggcttgattttgatattgccattttgacctctggtataaaccgtattttagttaaaagaaatgacggtttttttactatgagttttccattccaacttatagattatggatataatttatccgcacatcttgatgattatggtattacaattgatgctgcgttcatttcttatatgaagaatgctcttgaaacagccacatcaaatgtttactgtcatgatgatattgctttatcattgaataatagttttggcttggagggattggattgcactatatatgccgacattttttcacatctattattaaaagatcatggttattttagatttgacgatgatccagtcaatgaaaatgcaagaatacacccacggtaccattttgattttttttgtacgaattcttcaagcgtcaagcttggtcatcctaatttaataaattcggacttcttttttgacttgtttgttctaaaactgaaagggctggatttcacatggctagtatcttga

SEQ ID NO: 392033 - DNA, 1983 bp, Salmonella enterica
atgtcaaattactgttactatgcagatgatgcccttgagctagtcgaaaaatctgaattaaagaaaattatagatgaatatgctgagcataatacaaagcaaacatttgtccttcgcagaccactgtctaaagatgattcacattatgactataacaatgcaatcgtcatcttctctgctggcatcaaaccttgcttcataaatctagatgacgacgaagaaaactttgaagaatatatcgacgaatttttggaagatgtagcctatttatctgaaaaatttaaatatcgagaaaaaataggtagaaagaagaaatggcaagatcttttcatatctgtgaatgaaaatgatttttctttcgatgatttaacccttgatacaaaagagtctcggattgttgatttaatcatatcacttattgttggtagcattaatgatatgtctcgcattgatttaaatgcaaataacatccttgactcagttaagtcaaaaataatacttttcgatacagatcaaactagttttgtatttaaatccggcataggaaaaaaattcgtaatacaagggcttgcaggctctggtaaaacagaactattattgcacaaactcaaagaagtttactcaaagaatagcgaagcaagaattgcttttacttgtttcaataaaatacttgcttcgtcaatgaaaagcagaatccccgatttttttgacttcatgagggtagaaagacaaatagattggaataataaattattttgttttcactcttggggcagtagtagagatccattttcaggaatgtatcgttatatatgccactattacaacctcgctttcgggacatattcatcaggcacttttgaagggctttgccaaagagcaattgaagagattaaaaaatcaaactgggaaaagaaaaaagcatttgattatatttttgtggatgaaagccaagatttcccacagagctttattgaattatgtgaattggttacagaaaagaaagtatttgtcgctggggatgttttccaaaatattttcatgcctatcgccgagaatgttaaccgcgcagatatggtactcaaaaaatgttataggacagacccaaaaaacttaatgttctcgcatgcattaggaatgggactatacgaaacaccagttcttcgttggttaaaaaatccagagtgggattcttgcggttacacataccaagaaaaaaatgatcgtgtgctattatcaagagatccacttaggagatttgaagatattcctgtagattatgaaagcacctcgcttcacttaattgacagtgggaataatatttctgataaaataatagacttaattcataatattaagcgcagacatcccacacttcagcaaggagatattgcggtaatattccttgatagaggaggatatatttatgacgaaattgatagacttgtgcctaaaattgaatccactttcggttgggagacaaacgtatcttttgagagcaaagctcgggatgcaaataagttcttcatatctaatataaataatgcaaaaggtttagaatttccatttgtcatctgcttcgcaaaggcattaactcgtaactcatcatttagaaatgccctatatactatgatggctcgctcatttattgaaagtcatttaattttgaatgaatccgctgagtcgccagtaattaatagtattacacaagggttagattaccttataaaaaataataaaatggatgttagaaagccttctcaagaagaaatcgaaaaacaaaatgattttatagtccttgatgaagcagtatctgtagaaggcttagtcaagagtttttgtaagagccggggtgccacaccaagacatattgcaaaacttattggtagagttaaaagcatgttgagcgaagatgaggattatgacgcagaatatattaatggtcttatagaattagagtacccaaggactaaaaagctatga

SEQ ID NO: 392034 - DNA, 360 bp, Salmonella enterica
atgctgaatatcagcctgaagctgccagacgttacgctgctggatggcctgcagttcatcagcaatacggtgcagttcttcgtcctgcggtgcatgctgtctgatgttttgtgcggctccggactgatagcgatagtgaccctcaaagcaggcaccatccccctgactccagaagccggagaaccagacacaggctttttcgtggtatctgccgccggtggtggtgacggtgcgggtgtggagtcttatacccaggatgttgcaaatcagggtgaaatcctcataaacatcactgtaccagtcatactccagccccacttcgcagtaccaggagcgtgctttctcccgggcagattctga

SEQ ID NO: 392035 - DNA, 144 bp, Salmonella enterica
atgaatttctgccaaaatctctttcagcataaaatggttcccttcggcatccttaacaacgttgccaaaacggggattagccgcaataaactcatccaggcgagtttcatttttactgataagagatttataaaaatctactga

SEQ ID NO: 392036 - DNA, 231 bp, Salmonella enterica
atgctgctggacgggaagcccgttcctgataatcgtgccgatgtgacccgacgactggacgatcacattcacgggaacaggggaagtaacagttacgaggatgagatgtttgcaatcaagtactttcagaaggggacggcgcatatcacttttaagcgaccagggctggttgataaaatgaatgatatcgtggcgaagcattatccggggatgttagcgtgcgttaactga

SEQ ID NO: 392037 - DNA, 765 bp, Salmonella enterica
atggcaagaatcgttactaagctcaacgacactcagatcaagaaggccaaggcgacagacgataacaaagagataacactgtatgatggcgatggcttgatgttgagagttaagcccagtggtaagaaagtgtggtatttcaactatcaagtgccagcgaccaaaaaacgaacaaaaacaaaattaggaaactatcctcatcttacccttgctcgtgcaagagctatgcgtgatgaatacctgtctttacttgcaaacggcatcgacccacaagttcataatgaaaaagtggctaatgacctgaaagatgctactgaaaatacattgcaagcagttgctgaacgctggttagaagagaagaagaagacagcaggactctcgcaagaccacgctaacgatatctggcgtagtcttgaaagaaacatctttccaacgctgggtaatgttcctatcaaagagattcgccccaaaatgctcaagcagcatctagacccaattgagcaacgaggtgtacttgaaactctacgccgcatcatttctcgcctgaatgaaatttttcgctatgctgccacggaagagcttatagagttcaatcctgccgacaatctcgctcagcgtttcagtaagcctaagaagcaaaacatgcctgcccttccacccgatgagctaccacgcttcatggttgctttatctaacgcatctatacggttagaaacccgtatgctgatcgagtggcaattgttgacgtgggtaaggcccggataa

SEQ ID NO: 392038 - DNA, 312 bp, Salmonella enterica; identical to SEQ ID NO: 202828

SEQ ID NO: 392039 - DNA, 1437 bp, Salmonella enterica
atgagtaatattcagccagttattctttgcggtggaagtggtacgcggttatggcctctttcacgagaggaatatcccaagcaatttttaaaaattaattctactgagtcaatgctccaaaggacaataagtcgtctgaatgggttatcgataagcgaaccagttatcatttgtaatgaaaaacacaggtttattatagctgaacagcttagggggacaaaggttaatagaggttgtattatcttggaacccatgggaagaaatacagctccagcgatagccttagctgcacttaataatattaggaaagggtctgatccattaatgttagtactcgctgctgatcatatcattaaagataacaaagcattttgtgctagtgtggaatgtgcagcaatatatgcagaaaagggaaagctggttacatttgggattgttcctacgtaccctgaaactgggtatggatatataaaatgtgggagccctatagctaatgatccatcagtaaatgtatcaaaaaatttacattttgcctacaacgtatctgcttttgtcgaaaaaccggatatcgagagagcagaactttatttatctaataaagattattattggaatagtggtatatttctttttagagctagtatttatctcagagagttggaaaaatatcggccagatattcttgatgtatgctcacgtgcattgaatgaatctagcgaggatttagattttattcgtattgagcccaatatcttttctaattgtctatctgattctattgattatgctgttatggaaaaaactactgatgcgattgtagtaccagttgaggcagggtggagtgatgttggttcttggtcttctgtttgggatattacagacaaggataagaataataacgttttacatggtgatattataagtttggatacaaaaaatagctatttatattctgagaattgcttgcttacaacaattggtgtaaataatttggttgttgtgagtacgcgtgatgctattttggttgcggataaaaactccactcaaaatgttaaatatatagtggatactataaaaaataattctcgttatgagtattttaattgtcatgagatttatcaatcatggggtaaatataagtcattggcatcgggagagcgctaccacgtgaaacatattatagtaaaacctagtgaaagaacgacttttcaggtacataacgatagatcgaaatattggataataattactggagctgcgagagtaatacttggaaatgaagtaagatttgtaagtgaaaatgagtccgtttatattcctttcggtgttcctcatggtttagaaaactccggggacattccgcttgagttgattgaagttcgttcgggtaattatatagcagaagatgatgttgttagattaaaaggacgttattga

SEQ ID NO: 392040 - DNA, 465 bp, Salmonella enterica
atgattgagaagagctattttatgtcttatcatgattatcggcatatgagttgtgatggcaaaatggtaggtgatgtggttcgtggaccagagattttagactggaatattcatcattatcgtcgtggcgttgggtgtttgactataatgtttgatagagcattaggtgagttgccattttttcccagtataaaaaatattattgcagaggattttttagcatggagtaatattttaaaaaaaggtcattgtggttatcgtataccgtatgatttagctcgttatcgattatcagatactgctcgctcatctaataaaattaaagccataaagtctgtttggtttatatatagaagtatagaaaaaattccaattctttattgcatatttttttgggtgcaatattgtattaattcctttatgttacacaggcgtgctaggccttacctcactattgagaaataa

SEQ ID NO: 392041 - DNA, 753 bp, Salmonella enterica
atgggaaagacggacgcactcaatctggagatgccgggcatggcaacccttctcctttacggggatttgcaacgatttggaaagcgcttcgatatctgcataaaaacggcggcggaagggctacatgcgctttgccttcagataccgggactcaggcagaagatacaggaagggtggtatcaggtcaggattgccggtaaggatgttacgccggatgacgtcacggccaggctgcacgaaccgttgccatccggcgccgttattcacattgtgccgcgtatggaaggagcggggaatgccgggatatttcagatcgttgcaggtgttatcctaatcgctgtggcatggtggaacccggcaggttggcttggcgcggctgccgttaccgggatgtatggcgccggtgctgctatggttgtcggtggttttgctcagatgttggcaccaaaacctcagtcaccctcaatgagccacgccgataatggtaaagctagcgtttacttttcttctgtcgataacatgattgcccaggggaatccggttccgatcccctacggtgaaattatgtgtggctcccgcgttatcagtcaggaaatcacaacccgtgacgaaagtacgccggacaaggttataaatctcgggggaatgccgttcttcagtcgtaaggcgagagaacgtgcgcaggataagctggaacagcaacttattgatcaggggctacccatcacaaagccaagagtgctgatccgataa

SEQ ID NO: 392042 - DNA, 480 bp, Salmonella enterica
atgacattctggcgcatgcccgacagtgtgcgcctgcggagtcgtgcggctatatggtcagaacgccgcagggcgaacggtattttccgtgtgaaaatctgtctgctgaacccacaatgtattttcgcatttcaccggaagattacctgctggcctgcgcggcgggtgaggtggtggcgctggtacacagtcatccaggcggtaaaccattccttagtagtggcgaccgcaccctacagctacagacggcgcttgcgtggtggctggtctgtgatgggcagatttataaattccgatgcgtgccacatcttacaggccgccagtttgagcacggcgtgtacgactgttacacgctgtttcgcgacgcctaccatctttccggtattgacttgcctgattttcaccgtgaagaagactggtgggataaaggccataacctctatctggataaccttgaagtcaacggattttacctggtga

SEQ ID NO: 392043 - DNA, 489 bp, Salmonella enterica
gtgctgtgggagttcaatttaaccccaatcggtggcgagcgttattttttctgcaatggagtgaacgagaaaggagagccggtaacgtggcagggcagacaataccagccttacccgataaagggcgatggttttgaaatgaagggcaagggggccagcaaccgccccacaatcgaagtctcaaacctgtttggcctggtaacaggcatagcggaagacttaaacagcctggtggggtctcgcgtttatcgtcgccaggtgtattcaaaatttcttgatgcggtaaactttaccgctggtaatccgaacgccgatccggagcaggaaattgtgatgttttttatagttgagcaactgagcgccctgaatgccaaaggggcaaagtttacgcttgcctctccggttgaagctgatggtgccgttatccctgcaagaaccatgctggcaacgccagatggcttcccgtcaattggtaaactttcccggtaa

SEQ ID NO: 392044 - DNA, 438 bp, Salmonella enterica
atggaacgtaaattcggtctcgctggtcctgacggtcgtcaccagacgggctggctcttcctccgttccggcccccacagtcagacgcagaacaaacagcactcccttaatgacgcgcggcgtgtcccaggtcgcttttgcctggtaaaggctactgtctgcggaggtgttcacggcaaggtgctgtaccgctggcggggtcacgccattaagcgtgccggactccggttcaaacgtcgcccccttgtccacgatcgcctctttttccggtacatgctgaagcgcggaaacagcaaacgtgccgtcctctttctcctgtatcgccatgcagcggaacaggcggcgacgcagcgtcggcagtttcagcccccacacgccaccttccataacaccttccggcagactgctgagagcaacgctgtttttgtctggctgtga

SEQ ID NO: 392045 - DNA, 234 bp, Salmonella enterica
atgatgccccggagaattcctgcgctggcaggcagtccgtaccgtgtactggctgaaactccctgtacctcaacaagctgccactccggcgtgaaggcatcgttctggctcagccaaaaagcatacgccggagaccgtttgtgttttcaaaatcatgggggaaagggtacgggcaggttaggcagtgaaatgaaggcgctggcaaagcactgtggcggcagcctaaaacagtaa

SEQ ID NO: 392046 - DNA, 729 bp, Salmonella enterica
atgaaatcaagtgatataattatttatgaaccaactgatgtacttatgtctatcagtaaattcagacgtgagcatggccgttgttcatgtgccatgtttgatccttggtataataaaggtgttggtggaaccagggatgattatattgaatacataacaaatatattaaatgaattagcgacgatagctgaccatatatatttttggggattcccagagatagtcgcgaattttataggcttaatcccaagcactcataattacaatgcatggttaacttggtattataaaaataatccttctgttattaggggatggcgctcagctcaaatgacttgcctacatataagtactcctgatgctaaaatgtaccctgagcattttttaaatgaagcccaattagcaaaaaaatcagagggtaagctaaggtatatgcccgggccaccatcagtcatagaagcgccacttaatattggcttcattcggaaaaatgagcaaacagggcatccagcccaaaaaccaattgctgtatatacccctttaattgaaatggtcacaaaaccaggtgatatagtatttgatccaatgtgcggttctggtactacaggtgccgtctgcatgaccctaggccgtaaagccgtactatctgatattaatccagaatatatatcaatgacgaaggaaagactgcaacggcaacaagaaaaaaccatgacaaaaactagctga

SEQ ID NO: 392047 - DNA, 780 bp, Salmonella enterica
  misc_feature (72)..(81): n is a, c, g, or t
atgcccgagcgtttaaagcagaaagcaatcttcatcacgccgcaggaaattatgagaatacattggcaacannnnnnnnnnattggctatggaatttttcgattaattgaagattgtcgtaacgttagacctaaagtggctgagttttgtgctaatgcagagaaaatttatgccgcacttgctatacgggtcgccttacaaagtgtcgataaaactgtagaagtctggcttaatgatggtcgtcttttaacgttagaagaatttaccgcctggccaagcgacgaaagacatgtcagaatatccgatggcgaacacacggaagaatttgtcggtaccttccatgatatttgtgcaaaactggaaaaagactttgaaatgatgccggggctttatggtcttagcgagcatcacagaacgcttgcctcattgtcagagatgagtgccagcaaaatagcccctgttattaacttttctgagtccgacgttcgtcccaaaagtatatataccagtaatatgcgtattattcatcagcgcctgagtcaagccgttgccgaaggcaatacaaatgtgatagttccgttgcatgaggggctgaacgatgtaggagaggttgaatttatagaggcgctaagtcgaaatagtgtactggttaaaaacagagaagctactaaatttgttgaagggggctgcgcgatctttgtcaggagtttgaaaccatatttcatactcttgacccaaacgatgactttaaatccgttgatgactggattaagcagttaa

SEQ ID NO: 392048 - DNA, 432 bp, Salmonella enterica
ttgtcagccggactggctccgacttatgaaggggggcatgttaattacagcaagcctgattatcaggtttcggttggtttgtctgttaatttatccacaatatttaaacagaataatgataaggaaagtgaaattacacgactccggcagagtgaattacaattcgaagaggcggtaataagctatgcagagaaaagggatgaagttatcagtgagctacagaacaccaggcttcagctggaggtgctatataaaaacatggaaacagaacaaagaaaactggattttgtgaaagaacagatggaaagtggaaaagaaagctttttatattatatggatatgctgaacaggatgcttttactgaaatccggaataagtgatatgaataacaggaaagaatattatgaagtccttttttctttttttaattag

SEQ ID NO: 392049 - DNA, 609 bp, Salmonella enterica
atgaaaaaaaaagttttggcttcagctcttacatttgtgttggcctccggttctgctatggctgctgttactacgggacaactgacatttaactggcaggctgttgtgcctacagctcctgttacaagcacggcttgggcatttgtcgatggacttgatattccttttgtaccgggtactgaacagctaaatattgcaagaactgccactggtattaaagcagtctctttgaaaccgtatgatttcttcattgttcccgttgatactacttccaccataacaaacggaacgcctgtaaaaagggatacgactaagccattacttgctaccaaggtattcctgggaagtatgccagtttcaaatggtcttgtaggcaataagcaacttgaattaagtactacgaaggatgccgtggacggacaaatcgcgattaatgtaaatggaaaacctctgaaagttggaagtaatgctgctacttctataggttcagctacagatcatgaagaacatattgttatcgatatgaatgccagcatacctaacgctgatgtcaaggatggtgcttcgctaagtttcgttgctccagtaatatttgcagtggatatctga

SEQ ID NO: 392050 - DNA, 405 bp, Salmonella enterica
atgaagaacacatatccatattaccaggaaattagagcaaaaatagaggatgctgcaaaagaagacgtcgataaaagcgagatcttctgggctatcgcggatagtggcacggcactgatcgataccctgacagacatacctatatttaatgtaaccactactatagtccaggaactctacagcttaattaatgatcatccggtaatgcccgtaccgaatccatggttcgtatggaatcagcatgatgacaatactagtccagaaacaattaagtatctccaaaaacgaggctatgtttcggcagcatcatcagccattgctatcgcaggtgctggaggggcgctggtaacatgtattgatcttggagtcgtcggacagggggagctgcctgtgcatccacaatga

SEQ ID NO: 392051 - DNA, 288 bp, Salmonella enterica
  misc_feature (246)..(255): n is a, c, g, or t
atgtcagcaatgattgctaatgatgaagaaaaagcatggatgtatccgttattagcactgcgtaatgaaatagacgttaatgatgtcgatcatagcaagaaactagataagctccgtcgtgataagtctcgacgtgattttcgtcgcatgaatgggtcattgactgtacacataaccaaaaatggagctgatattgttcctggtccgtatatacagagttttcgtgaagaattatttgagaaagtnnnnnnnnnnacaaatgggacctgccgaagtaaaaaatcttga

SEQ ID NO: 392052 - DNA, 297 bp, Salmonella enterica; identical to SEQ ID NO: 202817

SEQ ID NO: 392053 - DNA, 210 bp, Salmonella enterica
atgtttcttatgggtatctatattaaagataacgataggttcattattaggcaccttatccaaggccaggaaaaccgtttctgcctgaccgcgggtttcagcagtcagaacaacgacttcgtagtctttaattcccatatgttgcagttcagctttaacaaacagtggtgtatcgtacacatcacggcagataaaaataaatttttctga

SEQ ID NO: 392054 - DNA, 162 bp, Salmonella enterica
atgctatgggggctgctactgaactacgaactattgagcagatcaaaaaagattttggtggatgggttactgattttattaaaccgccagcggatacgtttggtcgttgcaatgaagcggctcagtgtactgacgattttatacaaggttattatatactga

SEQ ID NO: 392055 - DNA, 1254 bp, Salmonella enterica
  misc_feature (1041)..(1083): n is a, c, g, or t
atggcgttatatcctgctgatgttcttgccagtaaattaacggttgagcaacggctcgaacttctggaatctgaattatctgcaaataaaaaagaattgcagaaaacaaaatatgaacttagcacatataaaaataaaattgcgaccttacagaaaagtgttgctgaaaatagctatcgtaatactgccattccagatattacggccacatcacctgtttctgaaaacattaacaatgaaaacggtgaaatcaaccaatctggttcccatgttccagtcaaaggcacacaacaagtagcagtaatagacagcaatggcaaaaatacaactattgaaagcgttactctaaaagatatcagtaaatatgtaaaagatgatattggctttagttatcagggctacttccgttctggctgggcgacgggtaatcatggttccccggaaacctatgccgccggatcactaggacgctttggtaacgaaacaagcggatggttcgatttaacgctaaaccagcgtgtttataaccaggacggtaaaacagctactgctgttgtcacgtatgatggtaacgttggtgaacaatacaatgatgcatggtttggcgatagtgataatgaaaatatcatgcagttcagcgatatttttctgaccactcgaggatttttaccatttgctcctgatgctgatttttgggttggtaaacataaattaccacaatatgaaattcagatgcttgactggaaaactctcacagcagatgtggctgcgggggttggtattgaaaattggctcttagggccggggatgcttgatgtttcgttaagtcgtgatgatgttgatgtatattctcgtaattttgagcatactactcaaatgaacacaaactctattgacttacgttatcgaaatattcctttatggaaagatggcacattatcattaatggctaaatattcttccccgaataaaaccgatcagcaaaaagacaatgaaaataatgatagttattttgaaatgaaagatagttggatgttaacnnnnnnnnnnnnnnnnnnnnnnnnnnnnnnnnnnnnnnnnnnncttcaattattcagcaaaatcttgaccgggatgcctttaacgaattcacattacaaattgctaataattcatttgccagcagtttttctagtttctctgatgcaagcaatactatgtctcatggtcgttattattatggtgatcatacaaatggtattgcctggcgtttaa

SEQ ID NO: 392056 - DNA, 747 bp, Salmonella enterica
  misc_feature (727)..(736): n is a, c, g, or t
atgactaacatcacgccaaatattgttgtatcacaaccaagccagttatttactttagcgcgttcttttaaagcaaatgctaatggcaaaatctatattggtaagattgacactgacccggtaaaccaagaaaaccagatccctgtatatctggaacgagaagatggtactcatgttcaggtggcacagccaattgttatcaattctgcaggctatccggtatacaacggacagattgcaaagttcgtgactgtgcagggacacagcatggctgtgtatgataggtgtggggtgcaacagttctatttcccgaatgtactgaagtatgatccagaccaatttgagaagagactgagcgggaatgatggatttaaattcattggtcgagttcctgatattgatactctgcgtactattcatggtaaagatggtgatgctgttattctggaagcgtaccgggtgggtgatggtcttggcgagagcgtcgtttattgggatgctacatcaactaaaaatgacaatggcggaacagtatttgcggtatctggtgttgcaactggaagatggattcgtaagtataaaactctagaagcaaaaatgtttggtcttccaaaagaaggggactgttacgacgagatggcggctatcgaggccattatgtttgaggaaggcgtggattgtattttctatgacggaatctatgcgattactggatccagaaatatgnnnnnnnnnntggcgcggtag

SEQ ID NO: 392057 - DNA, 576 bp, Salmonella enterica
gtgctttattcggtaaaaatgcaggggacatccggctatatccatgtcttgattgaacaccaaagtaccgcagacaaaaagatggcgtttcgtatgatgcgttacgcaattgcggcgatgcaccgtcttttaaaagatgaaaacgggccgctcccgctggtggtgcccctgttgttttatcagggaaaaacgtcgccttacccgctgtcgatgagctggctggatatgttcgccttacccgagctggcgcggcgtatctatagtgagccttttccgctggtggatattaccgttatccccgacgatgacatcatgcagcatcgacggatcgcgctgctggagcggctggtaacgctgataagcgcagagtacactacggaaagtcagctgaactcgctgctcagctatatggtgcagcgtgggcatactgatcaaccacaggtattttacagggaactggcgaaccgattgccgcaggaggaatctatgatgacgctcgctgaatggtttgaagaacaaggtatgcaaactgtctcttatacacatctgacgctgccgacgatatgcagtgtgtag

SEQ ID NO: 392058 - DNA, 129 bp, Salmonella enterica
atgattgttcgtttaaatttgggttacaaaaagaacaagccgttgattctgctaaatctttacctgcatttaacgtgcataaaatatacaacaaatcacatatgtgtgatgcaagtcacatttttatga

SEQ ID NO: 392059 - DNA, 582 bp, Salmonella enterica
atgcccgtaacattagaacatgtatcttccagaacggtacagcagaagttaaatacaaaaggtatcagaacttgggacaccatacagtacctttcagctttggatggagcgcataaggatactgtttttcatgaacaaatatctaatctacccgaagagtatattcatctggatgaaatggcccgagatgaaaaagaatatagcttaaatatttatgagttcttttttgagtcaacgtctgaaattatatgtgaagatattaaatcaactttagatttttattatttgaatagtccaacatttcgtcggttggttaattatagagtcgattatagtataaataacgatattgataccagtaagtgtgaagtaatagtatccccaaattatagttatgaaaatgctgaagggagtcgtgtgtatttatcgttgccgtttaataagaaaggttttcctatcgatcctgaatctaacgactgtgataataatatatcatcagaaaaagtattgttagatttattctacggctatggcacatgcatcgttgtgtttttctcaggcagcggtgagcgatgggcatga

SEQ ID NO: 392060 - DNA, 447 bp, Salmonella enterica
  misc_feature (291)..(300): n is a, c, g, or t
atgaaaagcgcgattgaacgtcgcatggaaatcgcgaatctggttggagtgagaggtaaggtcagtgttggggatcttaccgaatattttggagtatccggagcgactatccgtactgacttacgtttcctggagtcaatggggcacattgtccgctctaacggttatgtcattttaaacaaaggagtcattgccaacttttcagcggaatcccgaaatcgtaaagaatctgtaacggtagggcatgaacaggatgttgccgtatcggcagaagagagtaataaagccctnnnnnnnnnnatcttattcaaatggcgacggatgggagcagaagctgacggaaataataggcagcctggaacaatcattgttcattggtgccggagcgttaacccgacattgggcacaaattcaaaaatgggactctgggttaatactgacaaatga

SEQ ID NO: 392061 - DNA, 741 bp, Salmonella enterica
atgagtatgacagccactttatctctcaaaaagttagaggagcattttggaatacaggaccaattatccaaccgcggatattattctatatttgatatcctgaagctatcaaaaagtgaatttactcgccagtatcaaggcctttttggtgctaaagccagtaaaatctacgataccgcttccggttacgcaacgcagattatgctgttgtttcgcaaaaataaccttgctcaggcggtgcagacgtcggtgtattccactcagttgcaggataacgattctgtagtgcccacaaagggcggcccgacgtggcaaaccctatttgctgatgactggcgtgaatattgtcagaatagcgcaccggaagccaatgactctccggtttcttatctctcctggctgtataatcaggccacgaattttgaatcacagatgggggtcgataatattatcccgctggctgtccgccgccctgacttagcagagcttatgctggataatgacgcgattaatcaggttgtgccctctttgcaattggttaataaagtacttgagcagtccgtcactccatacgttaataacatcgtcccgaataccagcgttagcgaaacgctagctgccacccgttattcaacgcttctaccttatcattacccacatcagcagacgttgctttctctgaaagccagtgacgaatctctacagaatacaattaaaaacagcatggcaactgggcagtga

SEQ ID NO: 392062 - DNA, 14688 bp, Salmonella enterica
gtggctgagcctggggcaacggtttccatctatattggaattaagcacctgggggatgttgttgctgctaaagatggttcgtggagttatacgcttactgagcccctgaaagatggcgaataccatttaacagcgacagctacagatatcgccggacatacctctgaaacatcagatcttacatttaccattgatactcgtatcagttattttagtgcagagcttgatcctgccgatgatagtggtatcgttggcgataatgtcactaataatagccgccctatttttatcgggaaaagtgaaccaaataccacgataaatgttaaaaactctgaaactggtgaattagttgttcttaaagccaatgctgaaggtgagtggcaatttgcttttacttcggattccgctgaaggggttaacaacctggttttcactgttgaggatgtggcgggtaaccagaaagatttttattttagttatgttattgatacagtagcgccgacagccccgacagtttccctggatgattttgtaacattaccaaacggcattattttatcaggggatgatacacctgcattggtcggtacggcagagcctaaatctacaatatcaattctgcgagaaggtaaattttatgccagcattgacgtcgactcaaatggctcatggagttatcaatttaatgaaaaactcccgcaaggggtatatgacattgagattgtttctcaggacatagctggtaataaatcctcggcaattaaatactcttttactatccagactgaagttgtaatcccaaaagccgaacttgacgcggttgatgactctggcgagaaaggggactggattaccaataagcataacgctctgactttactcgggactgctggtaaatttgctaccgtaaatattattattgatggcaaagctattggagtgacaacagcagatgaacacgggaactggacttttgatatttcccgtaatttgtctgacgatgtttatacagtgacggttgaggcagtagacccattaggtaatactgcatcggctgattatcaacttaccattgatagttttacaccaatccctactgttatgttgcatgatagtgctgactctggggttaaaggagacctgattacaagagttaatacgcctttatttaccggaagtgcagagcctaatgctaaagtctcaatctatgttgatggtatcttaagcggtgaggccattgctggcgatgatggtgtatggaacttccaattttcaaatatattgcctgatggcatgcatgaagtgatggtaaaagcggaagatattgctggcaataaagcatcatcatcaatttataacttccaaatccttacgcatacacaaaagccaaccattgagttagtcgatgacacagggttggataatacagatcatatcattaatgaaaaacgacctgccctgacagggactgctgcaccttattcaatcgtaaaattatatatagataatgctttggtggctgaagtcaggacgaataaagacggtgtatgggattatactctgaaaccagatcaaagtctggctgatggtgatcataaaataaccgccacagtagaggatattgctggaaatattgcacattctgacgcctttttatttagtgtggatactaccatatctataccggtagtttcactaagccctgattctgagtccggaattttagatgataatttaacgaatataactaaaccaactcttattcttagaaatattgattcagatgttagaaatgttcaggtatgggatgctatctctaatacacagataggtattgctacccaacaatctaatggaacatggacatatacttttacttcagatctgattgatggcctgcatcaggtatatgttaaagctgaagatatcgctggcaataaagttactggtcctacatttgattttactatagatacgacactttccattccggttatttctttgattgcaaaagatgatactggcgtggcggatgataatattaccaatattaataagcctgactttattattagtggtattgattctgatgcacaccgggtagttgtacaggtgacacataatggcgtgaatgaacagattgtactgactcaagatggcggtaactgggtatttacacctgccagcacgtgggatgatggcagctatacactgcaagtgacggtggaagatgaggcgggaaatattcgccagtccacaccattaacagtgaaagtggatacgcaaatcgcgattaatagcatcgaactgatcaatgacactggtattgctgacgacaatataactaacgatatgcgtccacacttccgtgttgaagtgccaaatgacgtaaatatggtacgtctgagtattgacgggggcaagacatgggggagtgcgacgaaaaatacggcaggcatttgggattacagttggccgacgaatgtaactgaagggtcacatatcctgacggtagaagcgaccgatattgctggtaataagttaacgcagacactcgactttactatcgacactttgttgactgtgccgaccatcgctctggatagcgccgatgatagtggtgttaccggggataatattactaacagcaaaacgccgggctttaccctcagcaatattgacggcgatgtgattcgggtggcgctacaaatcacgcataatggcaagaacgaggtagtggcgctgacgcagagtggtggtaattgggtatttacgccagaccacgactgggcagatggcagctatacgctacaagtgacggtggaagatgaggcgggaaatatccgtcagtccacaccgttaacagtgaaagtggatacgcaaattgcgatcgacaatatcgaattgattaatgacaccggtatggtcggcgacaatctgactaacgacattcatccgcagttccgtgtgacggtaccagatgatgtggatagggtacgcctgagtatcgacggcggtaaaacgtgggttaacgccacaccaggcttaataaaagggagttgggattatacatggctggggaaagttcccgaaggtaaacacacgctgatcgtagaagccaccgatattgcaggaaacacggcgacacggacgctggattttactgttgacaccacactgtcagtaccaaccatcacgctggataccgcgaatgacagcggtgtggctggcgataatatcaccaacgaaaaaacgcctggttttaccctcggcaatattgatgccgatgcgagccgggtggtggtacaggtcacgcacaatggcaagagtgaagaggtggagctgacccagaccagcggcaactgggtattcacaccaaccagcgcgtgggctgatggcaattacaccctgacggtaaaagtgaccgacgaggcggggaatactcgccagtcagcaccgttgtcggtgaaagtggatacacaggtcacgattgacggcattgtgctggtcaatgacagcggtatcaccagcgataatataaccaatgaggtacatcctcatttccgtgtgacggtgccggaagatgtcaacgttgtacgcctgagcatcgatggcggcacgacatggattaacgccacaccgtcttctaccggtatctgggattacacctggccggacgcggtacctgaggggaaacatacccttgtcgtggaagctatcgacatagctgggaacaaggcgacacaggcgctcggttttaccattgacaccaccctgtcggtaccgaccatcacgctggataccgcgaatgacagtggtgtggctggcgacaatatcaccaacgaaaaaacacctggttttactatcaacggcattgatgcggatgcgatccgggtggcagtacaggttacgcataatggcacgaaccaggaggtggaactgacccagatcggggggcagtggcactttacgccggccagtaactgggtggatggcaattacacgctgacggtgaaagttgaggacagagccgggaacgtcagccagtccgcgccactggcagtgaccatcgacacgcagacggagattaacaacattgtactggtcaatgataccggtatgccggatgacaatctgaccaacgctctgcgtccggagttccgggtgacggtgccggaagatgtgaatgcggtacgcctgagtattgacggcggcaagacgtgggtggatgcgaagaaaacgtcggcaggtgtctgggattatagctggacaacagacatcactgagggcgtacacacgctgacggtggaagcgaccgatatcgcagggaacacggcgacgcggacgctggactttaccgttgacaccaccctgtcggtaccgaccatcacgctggataccgcgaatgacagtggtgtggctggcgacaatatcaccaacgaaaaaacgcctggttttactatcaacggcattgatacggatgcgagccgggtggtggtgacggttacgcatgatggcaaaagtgaagatgtggcgctgaccaaaaacggaggaggatggacgttcacgccggacagtgcgtggacggatggccgctacacgctgacggtgacggtggaagacgacgcggggaatatccgccactcagcgccactggcggtaaccgtggacacacggaccggcattaatagtattgaactggtgaatgactccggtgttgctggcgacaatctgactaatgaaatgcgcccgcacttccgggtggaggtgccggaagatgtgaacgcggtacgcctgagcattgacggcggcaagacgtggatgcatgcgtcgaagagcgcggcaggtgtctgggactacagttggttgactgatgtgccggaagggacatacacgctgacggtggaagcgaccgatatcgcagggaacacggcgacgcggacgctggactttaccgttgacaccaccctgttggtcccgaccatcacgctggacaacgcggatgataccggtgaacggggtgataacctgaccaaccgtccccagccgaattttatcctgcaacatattgatgccgacgtcgctagcgttgtggtaagcgtgacgcatgatggtacgacaagtgtatttgatgcgagtcaggaagctggggggtggcgttttacgccggatcgcgactggacggacggcagttacactctgagtgtgacggtgacggataaagccgggaacgtaagtcagtccacccctctgacggtaacagtggatacacatatctcaattggtaaggttgagctgattaatgacagcggcgtcgttggcgataatatgaccaatgacatccacccgcagttccgtgtaacggtgccggaagatgtgaattcggtacgcctgagcatcgacggtggcgcgacatgggttaaggcaacgcagggcgcggcagggatctgggattatacctggccagatgacgtgaaggatgggaaatacaccctgcaggtggaggcgaccgacaaggcaggcaacaccatcacgcggatgctggaatttaccattgataccacgctgacaacgccgaccattgcactggaccataaggatgacagtggtattactggcgataatctcaccaacgcgaaaaagccaggctttattctcggtaatattgatgtcgatgcgagccgggtggtggtgcaagtaacgcatgatggcaagagtgaagaggtagcgctgaccaaaagcggggggcagtggagctttacgccgacagcgccgtggggtgacggcagctacacgctgacggtgacggtggaagataaagccgggaacgtcagccattccgccccgctgacggtggacacgcagacagccattaacagtattgagctggttaacgacaccggcattccggacgacaacctgaccaatgcggtgcgcccgcacttccgggtgacggtgccggatgatgtgaacacggtacgcctgagtatcgacggcggcaagacgtgggtggatgcgaagagaacttccgccggcgtctgggactacagctggctgacggatgtgaccgaaggggcgcacacgctgacggtggaggccaccgatgtggcgggcaacacggtaaaagagacgatgagcttcaccgtcgacaccacgctgtcagtaccgctcattgcgctagacagcgcggatgacagcggcgtcaggggggatgaactgacccgggtgaacaggccgacgttcttactggacaacattgataacgatgcgcgtcatgtcacggtggaagttcagcatggcagcaccagggaggtgctgaaggcgacgcagggtgcgaacggacgctggagtttcaccccggcgggcgactgggcggacggtcagtacacgctgacggtaaaagtggaagacgaggcggggaacattcgccagtctgcgccgctgacggtaacggtggacacgcagacggccattgatggcatcgagctggtgaacgaccacggaatttccggcgataacctgaccaacgccctgcgcccggagttccgggtgacgacaccgggggatgtgaatacggttcgtctgagtctggacggcgatacgaactgggtgaacgcgacgaagaatgccgccggggtctgggaatacaactggccgggcgacgtgggcgagggtaaacacacgctgacggtggaggcgacggatgcggcgggcaacacggcgacgcggacgctggagtttaccattgacaccaccctgtcggtgccggtcatcacgctggacagtgcggatgacagcggcaacaggggagataacgtcaccagcgtcaggtcgccgggctttaccatcgaaaatatcgatcctgatgcgaaccgggtgacggtacagatcgcgcatgacggcagcagccgggaggtggagctgacccagaccggtggccggtggcactttacgccggacagcgcgtggacggacgggagctacacgctgacggtgaaagtggaggacaatgcgggaaatatccgttattccacgccgctggacgtgaaggtggacacacatacgtcaattaatcgtattgagctggtcaatgacaacggcgtcccggatgacaacctgaccaacgagatgcgcccgcagttccgggtgacggtgccggaggatgtgaacagggtgcgggtgagcctagacgggggtaagacgtggatggatgcgacgaaggcatcggcaggcgtctggagttatgcctggtcgtctgatgtgaccgaaggcgcgcacgtgctgacggtggaggcgaccgatattgcgggcaatacggcgacgcggacgctgggcttcaccatcgacaccacgctgtcaacgccaaccattgaattagcgccagatcaggataccgggcaaagtaagaatgataatctgaccagtttaactcagccggtttttgttttgggtcatatcgataatgatgtccaaagagttgaattacagattgagcataacggtacatttaaaaacattattttaaccgaatcggctgatggatggcgttatcgacctgacgcggcattaaacgatggtagttataaattgaccgtgacggtaactgatacggcgggtaacaaaacgacatccgctcctttaacggtaacgatagatagtacgttgagtaccccggtaattgcgttggctaatggcgaagacagcggcgtggttggcgatcagcttactaaccacgatcatccggtatttgacttgagccatattgattctgatgccttgcacgttatggtcagggttactcataacggtagctctcatgaggaagcggcggtatttaacaatggtaaatggagtttcagtccttctgtgagttgggcggatggcttatatcaattagctgttgttgtagaagatcgggcggggaatgtaaaagaatctgcgcaattagatgtccgtattgatactacgaccactatcaacaatatcgtgttgcttaatgacactggcgttctcggtgatcaattaacgaataacgctaaaccatcattcagagttgaggttcctgcggatgttgcccagatgcgcgctactcttgatggcggcacaacctggattccgatacggcgaaatgcggatggacagtggatttttgcaagcacaaataatctgactgatgggcaacatacgcttcgtatcgaggctacagatacagcaggtaacgttgcgagcaaagatttagtctttaatatcgatactcacttacagattccgacaattgctttgggggccggacaggatactggagcgaatacttccgaccatattacgaatatttcacggcccacttttgttattggcaatgttgatgccgatgttattaaggtaatggtaactattggtaccaatacttataacgctactaaagtgggggggacatgggagttcagaccggataatgcgattcctgatggttcttataatgtgagcgttactattgaggataaagcagggaatatagcgacatctcaaccgttatctataatggtagatacgagagccgaaattaatagcgtaacgctattaacagatagcggtgatagctcttcagataatataaccaacgtaaacaagccgcagtttgaaattgtggctgccaatgatactgtacaggtacgcgttaaaatcgataatacgggtaattggattgatttagcgcagagtgttgaaggacactgggaatttaatgtaggaactgcattacctgatggtcaacattcactattagtggaagttgtcgatgttgccggtaacgttgcacaacaaacgcttaattttacggttgataccacgctgcgtgagccaaatattgtgcttgaccctacgcaggatactggcgatgacagtaatgacaatattactaatattaataagccgacatttattattggcaatgtggataatgatgtgtcacatatcgttattcatcttgatggtcgggattatatcatcgaaaataatggcgctaaattaacatttacaccagataagccgctgacagatggtcatcatacgcttactgttacagtgacagatattgcgggtaatacaaaaacatcagctgaactgcaggttgaaatagatacccaggtacaaattgacagggtttcattaacaaccgatagtggtgttaatgatagcgatagaatcactaatgttgctcgtccatcgtttaatattgtaacacctgatgatgtgaccaaagtattggtttctttcgacggtgttaactggagcccggcaagtaagaatgcagccggacagtgggactttacggcgggtagcgctctattagaaggtcattatgtactccatgtgcaggcaacggatcgggcaggaaatacggctaattccagtcttgcatttacggtggatacacatgttgatggccttaacattaccatgctggatgatacagggaatgacgcggcagaccgtataaccaatattacatcgccgcgttttgaaatctcagccagagaatcgctacaggttgtagcggtgacgttaaatgggaacgtcacgactctcaacaaagggatgggtaataagtggatatacactcccgaaataccattacttgatggacattataaactagaggtcactgctgaagatattgctggcaatactattaaccaggagatatcgttcactatagatacgactgtacctgtgcctgatgtcgatttgttggatgccgatgactccggtgaaagcgctgtagataatattaccaatgtcactaaaccacgtttcattattagtgatattcctaccgatattgacactgttacgataaaaattaacggtgtctcttatcctattactctggatggcagtaacaccgggacattccaggttcctgtggcgctaaaagatggtgtctacgaagcggttgtcgtcttcagagatcttgcaggtaatatatccgagacgaaactaccatttaccattgatacggcaacaagtgttagtgttcgaatggatcccacatcagatacgggaagttctaatagtgataatctcactaacagaaaaagtcctaaattcggcggtactgcggaaccggatgcaaagcttgttattaccattatcgatgatacatcaggtcatgaggtgctgaaaaaactggtcacggttggtgttgatggtaactggagtatgacgccagatgccctggcagatggtatctacacaattaaagttgtctcaacagacgttgcaggaaatacggcggaggcgcaagatagatttactatcgatacggtaacgcccgatccaacaattcagcttacggattcatcaattgatgatatgcatgaagctaccagcctgcgacctgagttcaagggtatcgcagaagcattttcaactattatgatccagtgggatggcaaagttatcggctcagccaatgcgaattcgaatggcgaatggagttggactcccccatcaatattaacaccaggttcttatgtcattagtatcgttgccaaagataaagcgggtaatgaatcgtcacaagtcgactttccagtcgtaatacctgttattgatgtaacccctcctacgattaagctaagtgatgatagtgatagcggggcattgggggattttattactaacgataaaacgccgactcttattgggagcacattacccaatactattgtcagcatttatatcgacggtaagaaagttggcgaggcaacatcggataccgcaggtcgatatgccttccagatgcaggaacagcctgacgggacgtacgttgtggaagttggtatattaaatccacgcgtcaatgaagaaattcgctcagcagccgttagcctcgttattgatactcaggtcgctgaccttgaatggcatatatctgggatacatgaagacaaatatattaatactgtaacgccggagattagtggcacaagcgaaccaaacagtaaaattacggtttttgttaatggggttgaaaaggctgctgcttatactactgcaggcgggcattggggcgttatattacctactttagggaatgatggtaattacgtattaacgttcaaagttgaagacattgcaggaaatgttaaagagtttggtcctcaagaaataacgttagatacggtaattgctccgttgacagttacactgcgagaagttgatgattcgggtaaactgggagactggatcaccaataaatcacatgtaaatatagatggtactgcggaggcaggaagtaccttaactattaaaactcagggaggagtcgttgttactacttttgaagtaggaagtgatgggcattggagtgcagagttagatctgagtaacggtaataatatctttgttgttgagtcagtagataaagcgggcaatagtcaacaaaaagaacttttagtagaatatgacactcagatcgaaatcagtgctatttctttaagccgagatagtaatagtggtgataaatatgatctcattaccaacgataaatcgccagagctagtcgcaatgaccgaacctggagcaacagtacaggtttatattaatgatgtattgcaagctacggtagaagctaattctgcaggtaatgttagttataccatgccagcgaatagcgccgatggtaactatcatgtgcaatttgttgctaccgatatagccggcaaccgaactgaatctgctgttgcgacagtgacgatcgattctgaaattgctgtgtttactattgatgaaggttcattaccgactatatcaaatagtcgggcattgtcagtcactgggcaaggtgaggcaggcgctcaggtaagcatctttgtcgataataagctggtcaatgtggtcatggttgaggctgatggttcctggcgtgctccgatattgctgcaagatgatggtacgtttaagattcatttcagcattactgacattgctggcaacacccaggcgagtaaaaatttcagtgtcgatgtcgattcatcaaccgaatttccaacaataacccttgaagattcgagtaactcaggtttggttgacgatctgattactaatcataatacgccatcctttgttggtactgcggaagcgggtgctacaatccatttttatgttgatgaaaaaattgtggcaaatatcctcgttcaagatgatggaagatggtcatatcaatttgataattctctgaaagatggtgaatactccattcgtgttgttgcggaagataccgctggtaacagggcggaatcacctcgcttaattgttacgatagataccagtacatacattgaacctcctacgctgacagcaggatctgataatggtatgtatattaacgacggcgtaacaagtcaaaccagacctcagtttagtatcaacggtgagtttaaccagagtgtccaaatttacattgatggcaagctagtcgatacggtcactgtgacagacagaaaccaggtttatcaacctgtggctccattgggtgacggttctcatagtatttattatgtcattaccgataaggcaggtaacactgcaacatctaaaacactagatttttcaatagatacatcgaataaaactccagtggtgatagaggccattgatggacatacactagcggagatgaccggcagtgatggtaaaatatatataacagatactactcataatataatttttcgcggaagtgcggagcctgatagtttaatggatttaactatcaatgggctaaacgtaggccaggtttgggttagtcagacaggagagtggcagatgccagtcaactctgtttatctctctcaaggtcttctggagataaaaataaaatctacagaccgtggcggtaatgtaaacgagaaaagttattctatctgggtggatacgatgattgaggactttaccagtgaacttgatgacaataaatcatcgtcgcaaaatgactggtggagtaataatacccttatcactatgagaggtctgggggaggctggcgcgacagtatcactagtgctggcaggtgtcacattggcaacgacagtcgttgcggctaatggccaatgggcattatcgaccgatcagcttccggaaggaaaatacgatatcactttgagtattgaggacaacgctggaaacaggaaggaagagatccgtgaaatattcatcgatcgcgctgcaccggtagcacctgctataacatattcggacattgtcgatgatctcgtcattatgaaagggacgggcgaagcaaaatcaaaattaacgataactgatagcgagggtaatatatatacattaaccgttcctgataacgggaactggagtatggctattccctatccatcagaagggaaatttactatatcgagtacagatcgaattggtaacaccagtgatgttgtctcagtcgatttaataaaagagatacccactatttcgttagcggtagattcgaacagtggatctaaagatgacaatattacgcatgataaacaacctacctttattatcggaaatttagaaagtgatatcgttaacgttcaaatagatattaacgggatggcatataatgctgaaaaaagagcggatggcgtctggttctttacgccagataccgctttagctgatggcacctatacgatatcggtaactgcgaatgacgcggcgggtaatcagaaaaactcgttaccgattactgtcacgatcgacactacgctgaaggtgccggagatcgcgctggcggcaggcgaggacaccggcgcgtcaggcagcgataacgtgacaaatcacacccagccgaagttcactctgcagcatattgacgcggatgtgaccggagtgaccgtcagcgtggcgcataacggaaccaccgacacctatccggccacgaagggggatgatggctggagcttcagtccgtcagcagcctggagtgatggtagctacacgctgagtgtgacggtggtggacggtgcggggaacacgcagcagtcatcatcgctgacggtgacggttgattctactataacagcgacagcgcctgttgaggctggtgatgttagtgagttcgccatggcaaccgatgtagctcaaccggaatctgaaagggtcagcattgaaagtgaaaaaaatcatagcccagctatgttttcaatgatgtctgcggttggagaagtggctgcgcaggaggatgcctataacatcgtattattaaataccgagtctggtgatgtaactgaacgttctattagtcagacaccatcttttgcaatatcagtacctgataatattgtgaatgttagtgttatgttcgaaggagaagagattgatttgccgattaataatcagaaggcaatatttgaggtgccagtacctttgaatgatggtgagtatactatagatgtgaaattcatcgataaagatgctgattatctgattaaggaaaaaacattctcagttgatcattcttcggcagatatagttaattccatgagtgaaagaggcaacaccgaggatgaagttaacgtctcagccccagaaagtgctgtaacacaccataataatggtgctgttgagatattcactattagtgaagtaagtctccctgtagataatcaagaagaacacgcataa

SEQ ID NO: 392063 - DNA, 219 bp, Salmonella enterica
atgtgctgtccctttatgccattgcctgacgacatcctgactttgcagcattttttacgcctgaactataccagctctgtgactatcggtgctgacgcagacaatactgctttagtggcgctttatcgcttaccacaaaccagtaccgaagaagaggcgctcgctggttttgaattacttatttcaaacgtgaagcaatttaaagaacattatacataa

SEQ ID NO: 392064 - DNA, 1290 bp, Salmonella enterica; identical to SEQ ID NO: 377746

SEQ ID NO: 392065 - DNA, 441 bp, Salmonella enterica
atggatacactacgttctgcgttcggtttacccgtaggttattctgatcatagtgaaggtattattattcctgttgctgcagttgcccgcggcgcggtagtgattgaaaaacactttacgcttgataagaatatggacggtccggaccataaagcctcgctagaacccgatgaactgaatgcgatgatacgtgctgtgcgacaggttgatatggcattaggaggcagcatcaagtcaccaacagtatcagaggtgaaaaataaagttattgcgcgtaaaagtctggttgctgcaaaagcgattgctaaaggtgaggcattcaataatattaatctaacaataaaacgtccggggaaaggaatgtcaccttatcaatattggaatttgctaggtaaaacatccagtaaaagctatgcagctggagatttaattcttgagtaa

SEQ ID NO: 392066 - DNA, 384 bp, Salmonella enterica
atgaatctcagcgtcggcttaatcagcgggagttaccttgcagaggtgtttagaggggcccttaaattagttgagccatttgaaattacggcagcgaaagtagccggattgagtcggttacagattataataaacattgaactaccacagatgctgcgcttttccgtacctggcattatcaatgaattttcttctgtattaaaagcgacgccctttgcttataccgtgggtatttctgagataacgaagcaggcaatgtctttgacagccatcactctgaacgggttacagatatatactcttgctgcgctcttatatttcattatttataaaatttttgttcttctggctggattctttgcgaaaaagtatcgcattagttga

SEQ ID NO: 392067 - DNA, 357 bp, Salmonella enterica; identical to SEQ ID NO: 377728

SEQ ID NO: 392068 - DNA, 276 bp, Salmonella enterica
atgccagttcatggcgatctggcggaatgtctgtccgtttttctttttctgtcgttgggctggataatcgccctctggaacgctggtttttacgtcctctggtttcccttttatgaagataaaaatggcctgaacaccgggcatattccgcccgggcaagccatcctgctcccggatattccgggcttgctttaccccgaacatccgttattttcagccatctttcgccatcatgcagcagacagaattgaaccgttccccttatgcggccaataa

SEQ ID NO: 392069 - DNA, 276 bp, Salmonella enterica; identical to SEQ ID NO: 388231

SEQ ID NO: 392070 - DNA, 627 bp, Salmonella enterica
atgttaaaaattggtgataagccgatattggaaacacttattcgcagttttgttaaagctggcttcagtaatctttatatttcaacacattacatgccagaagttatccgtgattattttggtgatggtgaagcattcaatgctcaaattcactatgtccatgaagataaacctttgggcacaggtggagctttggggttgctccctgaatcgttatctgctgacctgccactgattatgatgaatggtgatattcttacaaatgtcgattttgagtgtttgttgaaattccataacgaaagccaggctgatgctacattatgtgtacgtgaatatgattaccagatcccgtatggtgtgattaaaggcaacggtagtagaattatatctatggaagagaagccggttcatcatttctttgttaatgctggaatctacgtcatttctccagctattttcaagagtgttggcaagaaccaacatatcgatatgccaactctactcgaacaatatatacaaaaaaatagcaatgttttaatgtttccaatacatgaatactggctggatattgggcgtatggatgattttaagcgtgctcaggcggatattttttcactggggttataa

SEQ ID NO: 392071 - DNA, 438 bp, Salmonella enterica
atgctgaaagagattttggcagaaattcataaagccatcaatcctgaatcccgttcatcctttgtccatggggatttctgcttcagtaatatcctttatgacttcaagaaaaatgatatcaaagtcattgacccgcgcggtatcgactttgacggcaatttaagcatttatggcgatattcgctacgatctggctaaaattctgcattccgcgattggtaaatatgactatattgtttctgatcgcttccatatacaggacgacggtgaaacgttgattctggagcttccggaaagtagcatagatttaactaagctaattaagaaacaatttgaaacgtccagtttttcttatacggaaattttggctttaaccgcaacgctatttttatctatgctgcctttgcattatgaccgattaatttatacaaggaattaa

SEQ ID NO: 392072 - DNA, 375 bp, Salmonella enterica
atgtcaggatttaaaagtgattttctatgggggggagctgttgctgcacatcaactggaaggaggctggaacgaagggggaaaagggattagtattgcagatgttatgacggctggagcttatggtgtttcgcgtgaaatcaccccaggaataatagagggtcgtaattatcccaatcatgaagcaattgatttttatcatcgctataaagatgacattaaacttttcgcggaaatgggttttaaatgttttcgcacatcaatagcctggaccagaatttttcctaatgggatgagattgaacctaatgaagaggggttacaattttacgatgcggtatttgatgaatgtttcaaatacaatatcgaacctgtaa

SEQ ID NO: 392073 - DNA, 603 bp, Salmonella enterica
gtgaagaaatcagatattagtataattttcgataaaaatattcccgatgaatttttcaaagattttgaaaacgatgtagaagtacaaggtttaaatcttgttattgagtccagagaaccaacaggtccaatggcctgtgctgaatggttcatccttccagttgtttttgcattcatcggtaaaagctactttgatggcttcctgaaagaaatggggaaagatcactaccaatccatgaaggaaagtctatcaaacttaacaacaaaagtaatgaagccccccagaattgagccaacactatttagcaccaaggggaaaattagtagccgcaatccattttctcttgcattctcaattctggcagaagcagaagatggttatacattcaaactactaatacctaaagcaacaaatgaagctgattatggtttaatcgctaagaaatttatggattttctttctgactatcatttagggattgcgaccctggaatccataggctatatatctgaaggatgcagacttacctctggattaatcttcgtgcattacaattctgacaataactctattgaatggttaaatcaaaaagactatcgttaa

SEQ ID NO: 392074 - DNA, 1230 bp, Salmonella enterica
atggcgcgtcagacaaagccccttaacaacaccgaagtcaaaaatgccaaagcgactgaacgtgccactatcctgtacgacggggatggcttagagctactggttaagcccggaggctcaaaactctggcgattccgctattacaaacctttcactcgcaaacgcgccatgattagctttggtgcttaccctgctgtatctctctctgaggctcgtcaacttcgtgaagatgcacgtcttctattgagcaaagatattgatccgcaggagcataaaaaaaccgaacagttgcggcaaaaaagtgccactgagagcacctttgaaaaagttgcaggagactggtttaaaaccaaagaatcagcggggctggcaactcatacattaaacgatatctggcgttcaatgagtaaatatgttttcccacatattggctctatgcccattgctaacatcacggctcagcagttcatcggagcattagagccaacacacgctgccggaagactcgaaacggttaaacgtctgagccagcgtatcaatgaagttatggattatgcgctcaattccggtctggtatctgtaaaccccgccgcacgaatcggacgaacattccataaaccaaaagtaaagcaccgccctgccttacctccaaagcaactccctcttttaatgaaaactctggcatttgccagtattggacgtcaaacccgatgtcttatcgaatggcaattgcttacgatgattcgtccagcagaagcatcaacgactcgctgggatgagatcgactttgatgcaaaagaatggcgtatccctgctggccgtatgaagatgaagcgtgaacacatcgttccgctttctgaacaggctctggcaattctggaagtgatgaagcccatcagtaagcacagagattatgttttccctggctaccgtaatccacttgaaccgatgaatagtcagacagcgaacatggcgcttaaacgaatgggcttcaaagatcttcttgtcgctcatgggatgagagcgattgcctcaacagtgcttaacgagaaaggttttcctcctgatgtgatcgaagctgcgttagcacatatcgatactaacgaagtcaggagagcttacaatcgcgctcaataccttgaacaacgtagagagatgatgaactggtggggagaacatgtggaagcggcttcttttggggcaacgagtattacttctgtggctggataa

SEQ ID NO: 392075 - DNA, 351 bp, Salmonella enterica
atgaatatactgcgctggagatggcctcgtaccacgcaaaatagatcggctgacaaagaccatggattcaacatgggatacatagcggttagcaaaaaaaagcccgcgctcggcgaggcgggcaaacaatactggaagcaatgtgagcaatgtcgtaccgaacaggtgggttataaactcaaccactcggtattgataaagataatcgttatcattaaaggatgcaaccctgatgtttatgtgtctttatttacgacgctaaaaggtgatagtcatcacaaacttcattttcctgacgatgtgctattctttttaacggcaaataaaccgctaacgttaagacataagtga

SEQ ID NO: 392076 - DNA, 627 bp, Salmonella enterica
ttgccgctggatgatctgtttcctgaggctgaccgcgccctcacgccggaaggcttcttgcacgttttcccacaaatttacgactgcgaagggttctttgtcgcacgtctgcgtaaaatttcatcccttccagccatgcccgcgccgacgtataaagtggggaagtttccttttacccccctcaaaggccgcgaagcattacacgttacccaggtggccaacgccgtcggactgatctgggatgaaaatctccatctttggcagcgtgaaaaagaggtctggctgttcccggctgcgattgaacccctgatcggaaaagtccgtttttcccggctcggcattaagctggccgaaagtcataataaaggctatcgctggcaacatgaggcaacgatagcccttgccagtcggaatcatgctcacgcgttcgaactttccccgcaagaggcagaggagtggtatcgcggacgggatatttatccgcaaaccccccctgccgctgatgatatactggtgacgttccagcatcagccgctcggtctggcaaaacgtatcggctcacgaataaagaacagctacccgcgtgaactggtacgagatggtaaactctttaccggtaaccgctaa

SEQ ID NO: 392077 - DNA, 336 bp, Salmonella enterica; identical to SEQ ID NO: 377671

SEQ ID NO: 392078 - DNA, 1092 bp, Salmonella enterica
atgaagttaaccgaaaaagaatctttatgtcttgatttaatccgggcaatagcttcgcagttggttttgataggccacggtataagttattttgggatttttaaaatattgcatgagcctaatttcccctggatgcaaaacattgccgttgtcatatttttcattctatcaggattcgtcataacatatagcacaataataaaaacaaagaacaaagattataatttcgagaatttcttttcagatagagcttcaagaatattttctgcatacatagtcgcattatttgtaatcttcttaatagatttttgctctcaatctattgatgcagctaagtacatatatcaaccagcatataacgccagtacttttgtgtataatatatttatgctgcaagattttccgttatgggggcttatattcaacaatgaatataaaccaacgtcctttggctcagccagagttctttggacaatatcaattgaatggtggttttacatgttttttggtgttgtattttttaccctcatcaggaaagagagaatatccccccttaagataactatgttcttgttttccattatagtcgcatggcattacttgtatggttcgagagggggacacctgacattatactgggcacttggcatgtttataatgctattttataacaaatacaaaaagataaccaacggacttaaaaccaatctaattattttcaccttagctttctctgcgtgcgtcatcacccaaatcagggttatcgatggttataacctcatattttctatatttctcgcattagtcatgctgagcttaataaatatatcaaactatattgatttaaataaaattcactcagtgatagaaatcacagcaagttactcatttacactataccttatacactacaccatcctagacttcatctttaggcatatacacctcaaaaataattacatcacctttattttatcttttgtaatctccaattttttcgcatatttcatatcaagatactctgaggttatcttaaggaaaaaattaaagaaattactttatgacatattatcaacaccaagagtcatttaa

SEQ ID NO: 392079 - DNA, 723 bp, Salmonella enterica
gtgaatgacgacatcattaaccgctatacgctaatgctgattaagcagtactgggaaaagaaaaaagcaaagtcagaaattcaggccatgctcaggcactggcaaatcatcgccgattttattcgtaacccagataactttgatctcgaccgggttaccggatatcggcttgatgttattggccggatagtcggccttccccgcagcgtgccggctgtcattgcccgtgtatttttcgggtttgacggacacctgaataccgcaggcttcgacagtaaatctaatgcggcgtatgtcggagcacctttttacagcaagttttccccggtatatggtgactaccaactggctgacaatgagtatcgtaggttcctccgagtcaaaattgcgcgaaacgcagcaggtgcaacgatagcttcagacgatcgagtcagcctgcaggatgttatacagacagcattcaacggcgaagcttacgtgaccgacagaaaagagatgacgcttgcgctgaacgtttccccgcaggtatcagttgaagagttacgcctgattgtgaagcttggtttgctgccgaaaccggcgggcgttcgatacgattatttttatcaggtgatacctggcctgacattcggtttctcgcgaaaccattcagccagaggattcgccagcaagttcaataccgcctaccagggcggttttttttcgaggaaaatccatgtctaa

SEQ ID NO: 392080 - DNA, 1182 bp, Salmonella enterica
atggcactacagtttagcgacaacggtctggagataaatacgctcagagatttgtttcagatgctgagtgatggctacaaagggatttatgggcaagatatcgatttagaccaggagtctcctgacggtcaacgggtggcaatcgaagctcaggcgcgagcggatattgaagccgcgctgcaatggctttattcccaaatggaccctgattttaatactggtgatatgcagcagatcattgccaaacttcacggtcttttcctgcgcccgggttcacgttcgcaacgtgaccttaaagtcacaacagacaggccgttacttctctatagcgggtacaagatacgtgaccaggcaaatcaggtctgggttatccgacaggatgttaccgttccggcgggagtcacatcagtcaccttttttgctcaaaattttgggaaagttacaggactggtgacggataccttcactcaactcacaccagaaccaggggttgtgagcattatttctgattcagcggttgtagtcgggggggatgaggaaacgcctgaagaattcaggcaacgccggaaccggtcacttgagaacccggcaacaggtagtactggtgcggttttcgctaaagttgctcaactgacaggcgtaattgatctgaatatcggtgagaacgatacgaaaatcgatgatcaaacaacgggtattcctgcgaattctatatggcttgtcgtagaaggtggtgcgatctcagaaatagtggaagttatggttaaacagaaaggcggcggaacgggaacgaaaggcagcataaccgggcgccacaccgaaaccctgattcggcctgacggtacctcatttctgatagcccatgaacttcagtttgatcggcccatctataagccgcttcatatcaggcttaatgcccgtcggaagattcaaagcgaaccgatagatatcgatactctcaaaaaatctcttgcatcacgcaccatgcatattggcgagtctgtggatgccaacgaattttatgagaatgggtatggcataggtcgggtgaattttgtgctgaccaaccttcaaattagcagcaatggagttgattacactgatgctgagctatcgccgggctttcaggggaagttcacattgactgtggaaaatatagacgttaacgaggtggtccagtga

SEQ ID NO: 392081 - DNA, 381 bp, Salmonella enterica
atgattgtttcagtacttgataaaaatgacgactggggatttgggcgcgggaaggcaaattatattaccggcggcgctgctattgcgcagaaagccaaatgccgaatccgctcgttcaaaaacgataattctctcaacatggatgacaacatcgactggctttacctgttatcagaaaaaaacaccgagcgggagattttgcgagaaatagaacgtgtgacgctggcgacggacggggttatgcgcatcaccgctctggcgatggaggtcaataagtccacccggtcacaaaaaatcgaactcagcattgagaccgtctatgacgagcagacgatcactttcccggtcaacggagctttgaataatggcactacagtttag

SEQ ID NO: 392082 - DNA, 618 bp, Salmonella enterica
atggttgaagaacttcacgacactatcagcctgggtgttgaatttgctctggccgatgttcacaccattgttgtcgcaaaaataacgtctgtaaatgacaaaacaatcagttgcgtccccgttatcaatcgggttgtgaaaggaagcagcaagcaactcccagagttcattgaagtccccccggtaattttgcaaggcggtaatagttatatcgctgaaccaattgcggctggtgactattgcctcgtccttatctctgagcgttgttatgacgcctggtatgcgggtagcgactttgtttcaccacttgaaatgcgtatgcacgattattcagatggcttcgctctgtgtggggttaacccacaggctaccgcgatcactatccctaagaagaacaggatgatgaagggggatactgaccatgagggtgatttaaacctcacagggaatattacccagaaagaggggaagacgactctggaagaatgcgatgttctaaatgtactccaatattcacaggtaaagacaggcggtaagtctggggtgtctggttcatttcgaagcgatgacgggaaaacaatcacagttaccaacggtattgtcacggagatctcatga

SEQ ID NO: 392083 - DNA, 681 bp, Salmonella enterica
atgagaaaggtagtgatgttgggggcggtagtggtctcggcgctggcactgaatggctgcaaaattgacatgggggcatcgatacccctgtcaggattgttgggcagcgaactaaaaacaggttctgcagatttatatgttgaagtccccgcttgcaatagttacgaggattcccgccaaccatcgaaaggattagttgatgctaagaatgaaatagcaaaaataattcctgaaagtgagtttaaagaatgttttcagaagaaatttaatagttttgcatcattttcagtccctattgcatatggcccagccaacaaggtggcagactcgacaagtcaaattagggtattgcgtgacactgagaaaaattttgcttatgtcgcattcggtcaaaagctaaagcaaagtcttgatcaggcgagaaagaaaccaagcattgcgggaggtttctctccttcagatgtatctttatctcttaatttgacgaatgacaccgataaaacaattacagcgaattttgttggggtatatataaggaaagcccctgtgattgtggaaaacgatatagaaattggcgcggggaaagtggtttctttgacactatctaatgtcacaacatcaatgcttttttccgacattaaaaatcgatctgcatggtttatggatggcatgaagcaataa

SEQ ID NO: 392084 - DNA, 945 bp, Salmonella enterica
atggagactttttatcgtgactatcggctgacggtggggctcggcaatcaagcagtgattatcgagccaccgatcaccgtgtcattcaaggcgctggaaaccgtggacaagaagtcactcggcaagctgagtgtgtccatcaacgggctaaagccctccacgcgtctgcaattgctcaagtccgaagatgaagagaagtatatcccggtaaggctggagattggttacgacggcaagctgcgtcaggtgtttcagggttcagttaaaagcggggcagtaaagcgcgagggtgctatccacatcgttagcctggaatgtgaggatggcggtcatgactatatcaattccttcacatcgcgcacggtacacgggaaagagcaggtcgtcgattctgtcttgcaggacatgccgaacacgaagaagggctctgtgacgaagcaacaggcactcatcaggccgaaggttctggtaggtagttccagcaaaattctcactgatacccttgcgcctgacgagtcatttttcatcaaagatgagcgcgtacacatcctcaaggagaatgaagtcacctcggggaatatcccggttgttaacgcgcgtagcgggctgctgaatacgcctcaggcaacgaagatcagcgcgcaggatgatggcgggaagaaggggaaaacgccaaccaatgaacctgataccgatccggcaggcaaaaaagacaccgactcgagcaccttagccaagtcatcgaaagggcaaatagtattcgacacgaaactgaatcctacgctggtgatcggtgggctttgcgcagttgaaagcgtgacgaaccccgcgttaaacggggtttataagatataccagattgaaaccagtgggcagaacaacggggccgcatggtatcagaagatcgtgtgccagcctgcggggaattatcgcgttgttagataa

SEQ ID NO: 392085 - DNA, 336 bp, Salmonella enterica
atggatctgataaccaatataactgatgaatctatccagcggcacgccctgatctttgaccgtggcgaggctgtggttacccttcgccacttgcctaccgttgaaatgtggaaaatgcgcgtggagtacaacgatgattacatcgatggcgtaaagctgtcgctgggaacgcttcattttcgtcataagaactggcctttcgatattgcgttactttgcactgacaactccggtattgacccgtatcgggctgatgacttcgccagtggtcgaatcgaaatgtacctagtcacaccggaagaaatgactgagatacgagggggagacgtaccgtga

SEQ ID NO: 392086 - DNA, 798 bp, Salmonella enterica
atggggattctagacggcctcatgcaggcgcaatcttctggcaaagatactgttaaaaaggtagggatcggcgggttctcaatatttgcgcgagttagcgacgctactgaatacccatctcaagttccggtagacgtgctggaggacggtagtaacgcgtctgacgatattatcaatggcccgctgacgataaaaatcagcggtgttgttgccgatatttttgtcgatgcgaaaccaaactcttcttttagcctgatgccagattattcgaagtatggtgaggtgctggagtacatcccctcaaagacgcaacagcagttgcagaaaatgaatgaaattgccgatatggctgaacaacagatcctgaaagcgaagcgtctgctggataaagggtctgatctgtttggcctggtcggtaatcctgttgcaggtagcgcgaaaggtgtgcgtgagcagtttctcgacttcattgaggctgtttactatggcaagcagcttatttctgtagaggtggattaccgcacccatgaaaatatggcgttaagcggcctgaccatcagcaccgacaatcagacgatggaaacgaagtttgaggccgtctttacgaaaatcagctttacccaactgaccaccacacccattgagcaatacttcaaatcaccatcagtcgcagcaaaatcaaaaacggcgggcgttgctaacaaaggggcacaaactccggcagacaattccagaagtagcggccagtcaaagtctgtctggactgcgctgaatggggcggtacgggatattttctga

SEQ ID NO: 392087 - DNA, 1797 bp, Salmonella enterica
atggcgatagttaacgagcttattaccaaattcggctttatcggtgatctggcgccacaggaaaccttcaatgcgaatctgaaagcgtctattggtctgctagccgggcttggggctgctatcgccggttcggctgcaggggttgctggctgggtgacgtctgtcagtcagtctattgatccgctggtccagttttcccgggaaacgggcgtggcgatcgagaccgttcagacactgggctacgcggcatccgtaaatggttcaagtgttgatgcgctgcaggcttcactcggtgagatgacaaaaagagtgggggagttcgtttctaccggagagggggaagcaaaagacgttgctgaaaggctggggcttcagttcaaggatatgaacgggcaggtaaaaaactccgatgtgatatttcgtgaactggccgacaaactgcacggcatgagccaggcagagaagttttctgttctggataagatgggtatagaccgttccatggtgcagttgctatccatgacgggcgaagaaatatcttcgttgcagaacaaggctgaggcgcttggtgttgtgacgcaagaccaggccgatcagtttgcagcctacaacgattctctgactacgctggggaaaggttttgatggtatcaaatttcaggtcgccgtcggatttgtgccagtgctgaaagacctggtggatgggtttacggactttctcattgctaataaagacctcatcaaaaacgggctggcccatcttggtgaaattattttctccgtcatgggtatgatccgccgcttcctgccgattattggtcttattactaccggatttgtagcctggaaaattgcagctataggacttagaacggtgctggcaaccatattctctcctgtcgtactgatcactgccgccattgtcgcagtcgttcttgttatcgatgatttgctgacggctatggaaggtggccaaagcgttattgctgatttcttcaaagataactggggaatagatattgttcccgcactgaaagaggcgaaagcgtcgctcatggctttcataaactacgccattggcgtgtttgaaccgcttgctgatgcgatagcctccatgttcaggatggtgtggcatctcatcacaggtgcgtttacgggtgattttcaggatgcgatgaaggatgcgcagaatgtctttgattcttttatagcgtttatcactggtgcatttggtgtcgttggtgatgcgattaaatacgtgtttggcgatgccggcgcgtttgtcgttgatgtattcactactgccatcgaaaacacgaagctgatgttctcagcactatggaagttagtcacgggcgattttgaaggtgcatggggggatgtggttaaaatcttcgataacggcgtcgaactgatgaaaaaaccgttcacggcttttattgactgggcgaaaaacatctttgctgggctgggggaatatatcagcaatattatcagcaacgctgcttcaaatgcctggaatgcgacaaagtcattcttcgggttcggtgaggatgaacagcagcagggagtaaccggcggcggtaacggcggcatgagtccagatggtatcccttatggcatgaatgctgcggtggggatctctggtggtggcgtgacaagcaattcaagcgtcagccagcagaacacgattcacatcaacacatccgatccggttgtcgccgggaatactgcggcagatagcctgcaacaaaacatgaaggatgccaaccggttgagtggcagaggagggcggtaa

SEQ ID NO: 392088 - DNA, 159 bp, Salmonella enterica
atgagcatgtatctggcgctgtcaaaggccggatacggcccctatcacgaacttgttaaattagacacaccagaactgtttgacatgcttgagttcgagaatatcagcgcagacattcaacactataagatggagaaggcccggaatggcgatagttaa

SEQ ID NO: 392089 - DNA, 414 bp, Salmonella enterica
atgtctaaagaacagcagaaaaaagcactcgagatgatcaaggcggtctacgatgacggttttgctgagattaacggcaaccgctacgactttgcagcgatgacgcacaaaaaacgccgcaaggtttttgccttcttcacaagcattgcctctgagttatcgcggcagtctcttgagtttctggactcagagcgattcgaggaaattgaacgcctgatgttcgattacgttctgtttgacggtgtgcaactgtccaagcagccggaacacttcgaatcctaccctggtgattacgtcatgctaatcacaacagcgcttcaggttatcagcctgccttttatgggcgggagcaatatgaactcacgttcagaagctccagacgttcagaaatttatgttaaatcctcgaacataa

SEQ ID NO: 392090 - DNA, 432 bp, Salmonella enterica
atgtctcagattgttatcagtgcagataccgcgaccatcgttctgaatgggcgaatcatcacggatatcgctgcgggggactacatcacgctgacgccatccaatccgcttacaagccgcgccaatagtgcgaataacggcgtcacaatctccgggcgtgttgatgccggggtgcatgtgatggtgatacgtgtccagaaattttctaacgatgatatctggcttaaccagcagcgcaacgccgcgatccccgttgtccttaacggctcagttaaagagtcgttcgtgcgcgacggcgcggcactgaaggaaacctacgatctacaggccggttctatcactacacaaccgacgcaaaccaaaaacaaccaggacgttaacgcactaatggaatacaccattgagtaccgcaatgtcgtgcgtaacgtataa

SEQ ID NO: 392091 - DNA, 1503 bp, Salmonella enterica
atgtcggcatcaattaataacgtcattaatgtgacgcttctcgaagaggggcgtgcggcggcgcgcgataacatcaacgtctgcgcaattctgaccagtcagacaggggtgttgagtgctgctgaacgctggcgttcatacaaaaatgcacctgctgtcgaacaggactggggggcttcttcggtcacagcagcttttgcgaatgtgtttttcgggaccagtcctaacccggtatccgcaggtggcacgctgatcgtcggttactggaatgcagccggggaaacgctgcccgcgacaagcggtgcactgcgtggcggtgagatttctcaggcggtcgtactaccagcgttacgtgagaagtccgactggtcattcagtattgagattgacggcacgaagcacgatgtgaccgcaattaatggcatgacggcggcgacactggcagatgtcatcgcccaaattcagacgaaaatcacatcagcggtcgcatcggttgtttttgatggcagccgtattgttatcaccagcaaatccacaggggctaactctgtggttggtttttcgaaagcgatggacggaggttcttttattggtgatctgctggcgattgctgagggttctggcgcatcacagactaacggaagcgcatcagtgaagatttcacctgaaacgcaactggagtctctcagcaaacttaaagcacaggtcaacgtaaaaggcgcggccttcatcgacaagattctcgatgcgcaggtgccattaatcgcttcatgggcgaaagcgaatgctgtgatcgtctatgagacgtttaccggttcggcagcgctggaagttgatccggctaaccctgcgtgggcggtaacactcgccagccagagtaatttccgcatgctctacagcaaagcaggcaaccggaaatttggtgtcagctatatggcgcgcacgcataccgtcaattttagcggagagcgtaccgcgatcactttgcacctcaaaacgatgaacgtgccggccgaaagttatgagcagacggagatcgacaaagcgaagcgcgtaggtctcgacatctacaccacgattaaagacgttccctgcgtgctgtcgagcggtgccaatgattttgtggacaacgtctataacctgatggcctacgttgacgcagtgcagacggattccttcaatctccttaaaaccacgccgaccaaagtcccgcaaacctattatggcactgatcagttagaggactgtgtagaaaaaacaacgcatgggtttgtgaaggccggggtgttcaatccgggtacctggacgctgcctgacttcttcggggatcgggatatgtttttgcgaaatatcgagcaaaacgggtattacgtgctggccggtgacctgaaagaccagtcaactgcagacaggcaggaacgcaaatccccggttgttcaggtagcagtgaagaatgctggtgccgttcatagtgccgatatcatcatcaatttcaataaataa

SEQ ID NO: 392092 - DNA, 489 bp, Salmonella enterica
atgacacaaccccatctgaaagcggtcgcgcgtttcgtgcgtgatcttctggactacgacgagcaactgatcaagttcgaccgccggaacgtgcaggcgtccgacttttccaccggttatatcgtggtcaacggctcactaccgcaatcagtgatggcccggggccagcgttttaatggtgacgcggaagtgatgacttatagcgcctcagtgagccactcgattgtcctggagttttacggggataaggcttacgtcaacgctgaaagcttcctgatgctgagtgaaagccagcacgcgaacgaactgcgccgcacgcattcactcaccatcatggccgtctcaaacatcatcgatgtggggcaactcctgggacagtcccacggcaaccgtgttcacctgagtttcaatgttcagtatgccccgaggcgggacgtgcaaacgctgcgcatcgatacgccgcagtttcaatttttagaggacaagtaa

SEQ ID NO: 392093 - DNA, 357 bp, Salmonella enterica
gtgagcgacttatcagaccttgatatgagcgatgcgctaatcggttgggagcagcctgtaaaactcaaaacacggacggaaacaaccatcaattttgaaccgtccgtgactgttagcagccaggacattctggcggtggtgcaaagtgcgaataaagagaatctgacgctggatagtctggactggtcgaaagagtatctgctgattcacgcgcggctgaaaattgaaaccggtcagtttatcgagaagggcgcgaaggactacaaggtcgtgtccacggctgattacatggattatggattctgcgccgtcattgctgaggaaacccggctcccgctactggtgccaacgccatga

SEQ ID NO: 392094 - DNA, 573 bp, Salmonella enterica
atgactccggaagaaacgctaaaacttaccaccgaatacctgaagaacctggaagcgatgaagacgcatttcgttgccgtaggtttaccagcgggcaaggtgggtaataaaacccacgatgacggaacatcgattatcgagatcggggcggcacatgaattcggtgctgaaatcgatcaccctggcggtacggggtatatggcaagcggtggaaaagctacttttacccgcaagacgttcatggggccggtcagtggttttacggcagcccacaagataacactccctgaacgttcctttcttcgcgctcccttcaccctcaaaaagtcggaaattaaccgtgcaatcgaaaaggcatgtgaggccgtaggctccgggagaatggatgctgataccgctttaaatttgataggcgcgacggcgcgaaatatcagcgtgaaagcctttgatactgccgggtatgggacgtggcccgacatcaagacggcgactaaaaaggccaagggttcatccgcgccattaatcgatacaggcgccctacgcggtgccataacgtgggaggttcgtaagtga

SEQ ID NO: 392095 - DNA, 363 bp, Salmonella enterica
atggaattcaccgttcgttaccccgagttcgccagtgttgcccctgctcgcatagaaggggcgctacaggatgcagccaaccagatgagtcgcaaggtatggaacaagctctacgagcaagggcttcatgctttagcggcgcatctgttgtatgcggctggcgcgctcactccctcgggcagtaacaatggcaagcctgtccagagcatgacaagtcggtcagtggcaggtgtatctctgggattttccgcgccggatgccgggtttgggaccagtcatgatgggtacggttcaagctcattcggtcaggagtacctgaggcttcgtaagctggtaggtgtgcatgtgctggcgatacggtag

SEQ ID NO: 392096 - DNA, 969 bp, Salmonella enterica
atgcctatggaatcagcagatttcgaagaagtgctgcaggaagcgctaactgagcgtgatatgcagttgcaggaaaaagaactgccagagatcaacatcggtgaagccctcccggttaaagacggcctggatttttctctggaatacgtggatttcggcgtgtcagaagtggtcgggtcggttaaagacggaatcattggtaacaaaacaaacagcctgaaaaccattgatagtgaaatcgaatggctgaaagcgcctgttggccagtgggctaaagccgcaacctggactcagcaggaactggagaagatcgcacgtctaaacatcaacctgcagaccaaaaagcaggacgatctgtatgccaacgccctcgctaccattcagtatgccggttacgtcggccatcgcggcgttaaaggtcaggaagggttgctgacaggggggaaggttcaacttatcactgacacgtcaggcaaaaccattgccgaaatgacctctgatgagttcgtgaaactggtgctggatgcttacaacgcggcatggcgcaaatccggctatcgtatccagccaacgcatatcgcaatggacgccagcgactttatgctcgccatgcagaaatttgaccctaacccgatcgtcgtaggtactgacctgctgccgattgcggcaatggatcgcattatggcggcgctgcgtaaggcttctggtaatgagtccttcaacattactttcgtgaaagtcccgagcaattacgcggtaggtatcaaatcgggtaaaacccgcctggccatctacacctacgaagccgattacgtcgaaatggaagtgcatatgccggagctgctggcggcacgacagcgtgatctgctgacatatgagtgtggctatcgttctgccttcggtggcgcgatgtggaaacagccgcagtctgcggtgtatgtggattacaaatcctcgccggcagggtaa

SEQ ID NO: 392097 - DNA, 492 bp, Salmonella enterica
atggctttcggatttactgactgggatggtgccgacggcactattaaacctggttcaatcaaacgcgcctccagctcaaacgataaagtctggggggaagagaatcttaccgaaacgaagttgccctacggcacgtttgtagctgtgaacccggacggcggtgtgatgcctctcgctgctggcaagcgtattcacgggatcgtggtacgcgatatttacggagatggagcacagcataacaagcaggtcaacgttggtcacttctctcatggtgattgtgttggcgcgttgacggttgcagacgtgaattttaatcgcggggatgctgcatacatcgtggcgaccggggatgatgctggaaaagtcacaaacgtggccgccggcaacattgatttagggtactgggtagaggatgtcagcgcgggtaataactgtgtggcgatcacccttggctatgtacaacaggcagttcagcagacggaaggagcataa

SEQ ID NO: 392098 - DNA, 1143 bp, Salmonella enterica
atgacgtggaaacgaacagcgcaggggtacgtgattaccactgcgacgatcacccgcgccggaccgattgagtattacggttacgagctgggattaaccggcagcgatgccaacaaaaaaatcaccgttgttcgcaccctcgacgaactgtcaaaacccgaaactctcgcttcattcaatggcctcccgttcaccataacgcaccccgacgacggggaggtcaccgcagcagaccacaaagacaaagcatccggacacatcgccaacacccgcatcgagggcggcgaggtggtctgcgatgttttcctgacggatgccgcggcaatcgagactctggaagaaacggggatacgtgaagtttctgtgggatatgagcctgctgaactcgaggaaagaggcgggaggttttaccacatcaacattcgcggcaatcacgtcgcgggcgtggcagaggggcgttacgggcctcagtgtaagttaaacgacaaaaaaggtaagccgatgttcaaaacattaactgacgccctgagtttcctgaagggcaaaaaactgaaggatgcggacggtgcagcgctaactcctgacgagctggtgggcatgatcgccgccctagaaaaggcgttggaggatctgaacagccaggggacagaagaggctgcagcacaggcgcagcaggttctggcgcaactcgccgaactgaagtctcaactggaagggatgacttcatccggtccaactgatgctgatggatcaggcgctggtgatgataaagatgcaaaaatcaccgcgctggaggctgaaaacgagcaactaaaaacggagaaccagcagcttaaagaggaactggaaaagctgaaggcgggtaacgaaacagaatccaccctgaatgatgccaaagctcgtttccctaaggtcaatttcaatgatgcaaaatcagcgcgtgatgttcgttctgccgtgctggtgagcaccaaagcatttaatgatgctcaggtcaaagctatgaccgacagtgaagtgcgggcggcttatgcagcaattcaggctacctcgaagccacgcagtgaaatcggtactcatctgtttaacgactccgctaacaaaagcactaaaaccgcaactcaacgccttgggggtaaataa

SEQ ID NO: 392099 - DNA, 852 bp, Salmonella enterica
atggaactccaacaacttctggaacgcaagcaggggcgcaggcgtccccgacggcgtaaaatgcgcccacccacgcccagcaagcgcgcggaagtatggtatcgggatcggttgactgaatttatcgacggcatggtccgggcgtttatagacgaactgggaaaacccacgcttaccgacgccacggatacaaccccgctgtcgataacgtcgcgcctcgccgctgttatgcagcgattatccagtatttctatttctgaagtggctgcccggttgtctgccgggttcgtggcgcgggcaaacctgcagaacaaagagcagacgcagcgcactttctcccaggcttttgggatcgacctgaccgggatgctcggcgatggtgcgataaagccagaaatggaaaaggcggttaatgacaacgttgacctgatcacctccatccataccaactttatccacgatatcggcgcggcgattttcgacaacatgaaggacggcggccgacatgaaaacctcattgacctgattaaggagcgtggggaagtcacccgaaaccgtgcaaggttcatcgctcgtgatcagacctcaaaacttaacgcagatctgacggaagcgcgcaatgtggcgcttggccttgacctgtacgagtggggcggtactggcgacgaacgggagcgcgatactcactttgtgttgaatcacatgctttgcaaatactccgatccgacggtctactcggacgacggtggcaaaacctggaagaaacgctcaaccatcggggcattcatcggcaaacccggcgaggatcaccaatgccgatgcctggccctcccttacgtctcatgggattaa

SEQ ID NO: 392100 - DNA, 1359 bp, Salmonella enterica
atgacgagaaaaaatatcgttggtcgtctgaatgatggcctggttagcttaatgacctcgctcggcgagaagatcggcgcggtacggtatagcagcagtaaacccgacgtgccggataaagagctgctcgcgatgtataaaaaatcgtgggtggtgaaaaaatacatcaacaaaaccgctgacgacatgctgaagttgccccgtaaattttcgggcgatgttgacagctcactaacccagcgcattgctgacgctgaaaaagaactgaaattgaacgcagtctttcacagcgcgctgggatgggcctccctgctgggcgactcgcttatagtggctatcactgattgtgcagatgaccagatcgccttgccgctcaatttgcagggcgaagatatcgttaaatttctggtgttccgtaaaggggagtacacgccggacagtaatgtcatcaccgacatacgttcggattgttttggtgagccgctgacgtatcaacttgatgtcgggacaaagcaactcaggtttcaccactcccgctgctgccggacaaagctgggcaatcacagcattaaggatcgagccaagtttggcacgtcagacctacaggcgccctacgagcacatcaaaacgttcgacaccgcaatcctgagcaccggcgacaccattcaggaggcaaacgtcgatgtgctgtttatccccggtatgaataaccagattgcagcgggtcaggaagggcaggttcgcgagtatgccagggtgatgaaggacaccaaatcctcaaccggaatgttattgattgatgctggtgatactcaggcgcaggggcgctatgagcagaagaacgcgcaatttaccgggctgtcggatgtgatcagcaagatggcgattgtgttggccggggcgctggacagacctataacggttctgtttggtgagtctgccagtgggttcagtagtggcgaggaagataacaaatcctattacgagacgattaacggcctgcaggagtccaggcttcgccctatgcaggattttgccgaccagttcacgctggacaaactcgccattacggaaagccttacctacgaatacccgacaatcgacagcattaacgaggctgacgaagctaaccggtttagccagtatgcgacgggcttcaatacgctggtttcgtcctcaattctgacggaagaggtcgccatcagggagatggtaaaccgtggcgtgctgaaaacggtaaccgaagaagaaataaaggggattgtcagcgcaggcgcagattctgatttatggggaagctatggaactccaacaacttctggaacgcaagcaggggcgcaggcgtccccgacggcgtaa

SEQ ID NO: 392101 - DNA, 1419 bp, Salmonella enterica
atgagcagctcgccgcaattatcgctggtaagtaagcaagaagcggcagcagaattactcaagcgacgtaatgcgcgggccagccttcacgactttattcagtacatcaaacctgaatatataacaagtaagttctcgcagacggtttgcaacgctctggatcagtttctgctggatatgatgaacgggttacgcccgatactgattctcggtgcgccgccgcagcatggtaaatcggatattgtctcgcgctacctgccagcgtattttttcggaaaatatcctgaaatgcgcgtaggtgcgctgtcgtactctgctgaccttgccggggacatgaacgccgacgttcagcgtattatgtcctcgcctgaataccgaaacatattcccgggagcatggctaggtaataagcctgctgatggtgtggcagtaaagcgcaacactgacgaattcggcatagccaaccataaggggacgtatgtctgtgcgggtgtgggcggtccgttaacaggtaagaaaatcgatctcggcatcattgatgacccgataaaaaacgccaaagaagcactcagtccgacgacaaaaaaatctatctggaactggtacgtttcgacgttcaaaacgcgcctgtcgaagaacagcggcgaaatcatcatggctacccgctgggcgacagatgacctttccgggcgtgtagtggaaatcacgccacgagctaaggtgctggcgttccctgcaatcaacgagcaggacgaagcgctggtgcctgaactgcacccgaaagaaaagctgctcgaaaccaaaatcatcctcggggattacttctggtctgcgatgtatcagcagtcacctaagcaggctggcggctcaatcttcaaagacgagtggatcaagtattacctcccgaaagacttgccgaccaacttcgacatagtcatccacagttgggatatgacgtttaaagacggtgaaggcaccgactacgttgtcggtcaggtatggggcaaaaagggcgccaatgcatatctgcttcaccaggtacgcgcccgcatgagtttcaccgcaacactcaaagccgttaaacgcatggccgacgaataccccaaaggcttgcgcaagctggtggaggataaagccaacggcccggcggttattgattcactgaaaaacacggtggcaggtctcgttcctgtcgaaccggacggcagcaaagttgcgagggcgcatgcgatcaccgctgtatgggaagcgggtaacgttttccttccccataaagacatcgcctcgtggatcaccgagacggttgaggaaattaccacgttccctgtcggtgcgaacgatgacgttgtcgatgcaatgacgcaggggttacgcgatttgtatcagagaaaaacactcagcccactggacatcatgtaa

SEQ ID NO: 392102 - DNA, 480 bp, Salmonella enterica
atggcgacattaaaaggcgaagtgaaagccttcatcgttcagtctcttgcctgcttcgatacaccctctcaggtggtggaggccgtcaaaaaagaatttggtatcacgatccctcggcagcaagttgaatcccacgacccgaccaaagcgaacggtaagtgcttggctaaaaaatgggtcgagatgttcaacgaaacccgcgaacgcttccagaatgaaatttcagatataccaatcgccaataaggcgtatcggctacgcgtgctcgaccgtatggctacacgcgccgagggcatgaagaacctcgcgctaacagccgagattatcgagcaggcggcgaaggaatgcggagacgcctataccaataagcacaagtttgaacattccggcccgaatggtgagcccatacagcataatcatacagtaagcgcggaggatctgactgatgagcagctcgccgcaattatcgctggtaagtaa

SEQ ID NO: 392103 - DNA, 651 bp, Salmonella enterica
atggcaaaaccggactggggtgagcttcagcaacgcccatatccgccagttaacttcattgactccgacaactggcagccatacaccaggatcatccccgctaacgaagtacatgagtggataaaccgacaaatactcagcgataccggaagcatccataaccctgaccacggacatttgctagaggccgatctctgcttcatgtgggcgtccgactcgttcgcgaagaaagggcgctatgttctcggacaggccgaactggtaatgctccgcgccggtgggtggcagaaagccagaatggagcagcagatgcatgaatggttcggtcgcataccgaagttcatcatcacgctggcagccgattactgttcacaatgcagtgacctggagttctgctcgctggtggagcatgaactttatcacatcgcacaggctaccgatgatttcggtgcgccgaagttcaataaagagaccgggcagccagtactaacactgcgcggccacgacgtcgaagaattcgttggtgtggttcgccgctatggtgcgagccgagacgtgcaagagctggtggacgcagcccatctacctgcagaagtggcaaaacttaacatcgccagagcgtgcgggacgtgcatgctgaaactggcttaa

SEQ ID NO: 392104 - DNA, 255 bp, Salmonella enterica
atgtctgatttagagaataggattaaagagttagaggctgaaaacgaagagctgcggttagatgttcatgccctaaaagttgcagtagttaccatttcaaacgtagtaaacgaggctattggtaaatcaaaggggctaatggctgaaactgtcgaaggttccttagtctatgaccccaaccttcaggatagtgaagaatatttcaataaattaaagactaagacagttcggttgttaggaaaagcaccggattaa

SEQ ID NO: 392105 - DNA, 309 bp, Salmonella enterica
atgaatatcgtcccactgaattacaaaggcgaagccatccgcttcaatactgatggctggattaatgccactgatattgcaaaacgtttcggtaagcgtctggatcactggttgtccaacgctgaaactctcgaatacgttagagcattggatgaggtttattcaggtgaaccatcgaaaattctacatacccgtgattccgggtatgtaaaaacaagcaaggcacgaaaggacaggggcggagaaactgtctcttgtcgaaaggctaaacaaactaaaagtagagcctggtgtcccgatcccatctaa

SEQ ID NO: 392106 - DNA, 138 bp, Salmonella enterica
atgacattcgaatcctactttgccgatcatctccgtgttcgctggcagcggttgcgcttataccatttccccggttctgtgctgacggactaccggatactgaagaactacatcaaaaccataggcggtgctgtatga

SEQ ID NO: 392107 - DNA, 798 bp, Salmonella enterica
atgaaatgcaaggtggcagggtgcgagaaagaggcaacatatgtgcagcagtgcgtatgccaaaagcactatttcaggatgatgaggtatggaacctacgatcttactaaatcaggaaaaagaaaagagcgctcgcaaaacgataggggctatcaaatgcttcaccagcctgatcatcccctggcaatggcaaatggttctgtctatgagcatagagcggttatttacgcaaaatatggcgacaacctccctgactgtgagctttgcggtaaaaagcttaattggcgcatagctcacattgatcacattgatgaagtcgtaacaaacaatatcgagtccaacctgaggccgctttgcggtgcatgcaatacaaacaggagtaaaaagcctgctcacaacagaaaggacgctgttgcaataacgtatctttgtgagactaagacagcgaatgaatgggctcgagatccaagggtaaaagtaagcaatgccacgattgtgcgcaggaagaagctcggcatgacagattttgagtgcttatttgcgccaaagataactcataacggcaatgtccccattaaaccgccaaccccgccaaagtacacccgcaaaaatagtattgctatcgaatgggaaggcgaaaagaaaaccccatccgaatgggcgtgtgacccaagaatcaccttaagtgatggaacgataagaaacagagcaaaggcggggatgtctgcctttgactgcttgttcaagcctgcatccaggagcggaaaaaaagccctaaaacaacgggaggcagcatga

SEQ ID NO: 392108 - DNA, 363 bp, Salmonella enterica
atgaatacctacaacatcacgctgccgtggccgccgagcaacaaccgctactaccgccacaaccgcgggcgcacgcacatcagcacagaaggtcaggactaccgcgaccgcgtcgcccaaatcatcaaagatgagatgttggatatcggaatcacctcgccagtgaagatccgtattgagtgccacatgcctgaccgccgtcgccgtgacctggacaacctgcagaaggccgcattcgacgcgctgaccaaagccgggttctggcatgacgaccagcaggtagacgattaccgggtgaaacggatgccgatctttaaaggcggcaagctggaattgacaattactgagttggaggttctatga

SEQ ID NO: 392109 - DNA, 291 bp, Salmonella enterica
atggctgatttacgcaaagcagctcgcggtcgcgaatgtcaggttcgtatcccgggcgtctgcaacggaaaccctgaaacctctgtattggcccatatccgcatcgctgggctatgtggaactggaattaaacctcccgacctgatcgccactatcgcctgttcatcctgtcacgatgaaatagaccgccgcacgcgcctggtagatgcggagtatgcaaaggagtgcgcgctggaaggtatggcacgcacacaggttatctggctgaaagagggattggtgaaagcatga

SEQ ID NO: 392110 - DNA, 177 bp, Salmonella enterica
atgggtatgcaatgtcttctcgctaaagtcatggagcgcggcatcttccgcgtaccggcgcgccgcaagcgcaaggttgaagttaaaccgtcagatatccccacctttcactatacggctcacctggcggatgtccgctggctgcgccgcgctgcccggaggaaaagccatggctga

SEQ ID NO: 392111 - DNA, 570 bp, Salmonella enterica
atgaccactcaaatttccgtagaatccatttcgctgaccacccatcaaaatatccctgttattactaccgaattgttggcacagttgtacggtactgaagtaatcagaattcaacaaaaccacgcgcgaaatgcggaacgttttattgagggaaaacattttttcaaactggtcggtctggagttaagggagcttaagcacagactatctttaagcgagtccgtgaaaatcgctcgcaatgtacgttccctcatcctctggacagaacgcggtgcagcccgccacgcaaaaatgctcgaaaccgatcaggcatgggaggtattcgagagactggaggactgctatttcagccagaggcaaccggcgacgacacgtcaggttgagcctgccgtcgatatgcttaacattgatattctgattcaaatccgggacggtaatgtgaaagatatccggcagattggtcccgatatgttcgttggcaaagttgaccagatactgagtggattacgcaatagcggctggatcgttatcaagcgcgagttactggcagaaaaactagcgacatggtga

SEQ ID NO: 392112 - DNA, 942 bp, Salmonella enterica
atggatgcaggcagcaattcggaaactaatgatatgaagttcaggatagtatacgacggtccagcactggagacgcacgaaatgaacgtgcgcgaccttgctcctgccctcctatccttgtcagatgcattagaggaagctggaaaaacagtttatggaaacaagaccgttgtttccgtaaaggttaacgcatcattcaaagctggatcatttggaatagatctgattgcctcatctacatcttggttcaagcaggctgttgattttttttctggcgattcagcaacagccgccgctaatcttattgctttaattggtttttgccctggccccagagaaaaaatttgcaagggtctaatccaactagttaaatggattggaccaagagaaataaaaaagttacacaatctgcctgatagcaatgttgaaatatttgttgatgacgatagtgaaatttttgacagcaaagttattgaattgtatagaaatattaaacttcgctcttcattgcaagaagttataagcaagccattagagcaagaaggtatcgacagttttgcttccactgtcgatgatgggctgacattcatgacgatcgacaagcaagaggcgcattatttcaaagttgagctacctgcagaatcaataatttcagagtccacggtagaaaaagctcttcaaattaaaaacatttcttttaatgaaggcagccgatggagattttctgatggttccagtagctttttggctgagattaaagaccagaagtttattagtgatattgataacaacaccttaaacttttctaaaggtgatatgttgcttgttgacttaaaggtaacccaatacatgattggcgatgctataaaaaccacattcgaaattgagcatgtaaaaaaacaactcaatccacaaagacaaatagatctcccattcgaataa

SEQ ID NO: 392113 - DNA, 378 bp, Salmonella enterica
gtgggcggctggctcgacctgagcggcaacagcatcaccacgctgccggacaatctgaccgtgggcggctggctcgacctgcgcggcaccagcatcaccacgctgccggatcatttctcctgcaattcgctttatcttgaggcagaacgcatcagcaatatcgcataccgcaagaactgcggttactccagtcgtaccatttttgcagcctggaccggcaaagagttccggatcgctgctggttgcttcttcggctccattgagcagttcgaacaggctgtagacgacaaatataacggcagcgcagcagaagcatacaaaaaggccgcgcgtgattgtgtagctgaactgacagtaaagcttaacccaaaagactga

SEQ ID NO: 392114 - DNA, 192 bp, Salmonella enterica
atgagcaatattgatatggttgacgagaaagaggttatgagaatggccagaatatcgtcgcggatgactatctggaagtacaccaggcaatacaatttcccaaagccgatccgcacccaccccaagcaatacctaaaatctgaggtggaggcttggatactgaatgggggaattaaccagaaatcttcttga

SEQ ID NO: 392115 - DNA, 552 bp, Salmonella enterica
atgaagaaacagtattataattattttgacgattttaatgaaaaatttatttcctatatgcttgctacaataagaatagagtcttatgcctacaggcaaaaattgttctttaaaccaattagtgaggatatttcatatgataaggcggaagtagattatggctcagggccaacggcatctaaccgacaaagagctatactgaaccacaacaccaatattggtgatggctataaatatcgcggacgtggtttagttcagttaacatggaaaatttcctatgagaatttcaagtctataacaggtatagatatagttgctagtccggatctttgccttgaaatgagcactgctgtttcgattatgatgaaagggatgaaagatggtggttttagaaccggatattcactagatacttatttgggagaaggtaaacatgattactttaatgcaagattaatcatcaatggttatcgagatggtattcctgataaagctaatgagtttaaagattatgctgagttatttgaggtgatcataaatgaaacaatttga

SEQ ID NO: 392116 - DNA, 501 bp, Salmonella enterica
atgaaacaatttgatagtgtatggtttctgattttatttatatgctctttttatgtatatgcaaatgatgacttaggtgttattgactgttctttaagggaaaacacgtcttgcgatgtttttttaaaaatggaacggaatgttaatgaagtatcttacaaagttgaattggtagatactaaaaatgaaaaaatattcccttattttgatataaacgaaacaacagaaaatgttactttgcaaaagtatggagagcaatacgttttttcgaaatattatcttgatagttccagggctatggagtttattgcgttcaagtatgataacaaagccctttcacctgtaaggtattattatattgagagctcaattgatttcagtaacaatgtaaagaaatggtctggcaaacaatgcgatacatcgacagggataattccagaaaaaaagatggattattattacaggttgcttcggagttgtgtattaataaatttaaattag

SEQ ID NO: 392117 - DNA, 1116 bp, Salmonella enterica
atgtttttggattggttgactgttgaacaggattttggctaccaactgccgatcatttcggcggtagcttatcaacggatacaccttgaaacgggggaggccagtgcgctttctcagccgaccttccagcatcgtggatcgttctgtgatgttgtatcagtttcgatccgtggctctgtcttaaaaatgtcggggaatccgtccagatggggacgcctggacaatctttttggtctcccaagtgttgacatgtgtgtcatggtctttaatcagatcctttcagatctgggtttacctgtatttacccggtgcacaagactgatgcccggtcagtcaaaagaaaatgaaaaagtacatttatttaccgatggtgcattaattaaagaattacatataacgtccaataaatcagtaggcaaaggtaatgaggatgattatatatcaggtatttccactcagccttacagaaatagtgttccccgtttacattctaacggtaaatctgttgactggctttcaaaaaagggaaatgttaacttaatctatcctactgtttataataagtctcacgaacttgaattacacacattatcaaaagtgaaaaataaatttggttcagactcaaaagagtataattatttattaagtgtcatcgagtattgcaaggataacggaattgtaagatttgagcagaaactaaagtcccgctttctgcaaaaaaaatccctgtgctattggggactgtctgattattcagtcttgaataaactacatactgactttattgaccttgataaaaagttatcggtgaatgctatggactttgaaactattagtgaatgccttattaataatggtgttgtcgacagtacccgaaaggcgaatattactgccatgtatgcgatacaatggtttcatggtcatactttcgatacaaagaaaaaacaagttcaaacacatcgagcacgactgcgtaaaattggaattgatatagcgcaaaagtgcaatatatcgaaattctcacctgttgttgtgaaacaaacgagagaaattaaagtgtctgaatgtattattccgcaatggtatataaaaccatcacatttacgtgttgcataa

SEQ ID NO: 392118 - DNA, 324 bp, Salmonella enterica
gtgtctgattatggtctgtttataaaagggaaaatgctcggagccagacaacaaccgaaaagaaacgggcaggggtattataatgaaatcggcgtggagcttgaaatccccaatggttttggaggagtgaaacaggatttgattattattcgggtgtctcagtcgctggttaatgcaggggtgttgaattgtgccagtaaactgaccggaaaattcgtacagatacccgtatatgtccgaccgtggtcaatggatgggcgtgaaggtgtgacttataacctttcttctgattcagtaataaaagagattaaaaaggaaagttga

SEQ ID NO: 392119 - DNA, 228 bp, Salmonella enterica
atgcaatatgtgaaaattttactgatatctcttgccggattttttattgctgcctgtgaagaaaaggttaatgatattgactggtacagaaataattatgagcaggcaaaggcagtagtggataaatgcagggacgggaaaatgtctggtcagaattgttttaatgcccggcagggaataagggaatataaggccggaaaatttttagaacaactcgacggtaaataa

SEQ ID NO: 392120 - DNA, 576 bp, Salmonella enterica
atggctgaacatacattagcaacaccggagcaaaagatcacggattctttaaagtataaaattggcgaacttgtcttgatggagctggcgaactatgtcaccagtgaagcacggctgaatgcttataaattttctgatgcaatccccccggaactcattggcgcccttgagtcgctcagtctgggagctatacgggatgtgtccagacagtttgccgagaaatatattactttccggcttgatttcactgcactggttcatgactttgcacaggagaggatcaggaaaaatatcattaaagagctgattctgcggctggcgtcatacagctatattaaggaagtgacaagatgcagcataaaggaaattaatgatattgaacgggaaattaacttttccggaagtaagacaggtaaaaaaattcctgttggtgaacatgattatatacgccgggtatattctgaacattatgactttttaaagggtgttgaattttctcaggcaagggcattaattgccacatccaggaaaaccggttatccggtgtttcgaatagaaaatatcatcttaaaataa

SEQ ID NO: 392121 - DNA, 150 bp, Salmonella enterica
atgtacagtgttaataaaatcgtggaatcttttattgactggtcatggagtcatcatattccctggtatattcttttggtgggtataatgtcaggtcttgccggatggtttcttgaacaaaaggcaaagtccggaaagacaggggattaa

SEQ ID NO: 392122 - DNA, 960 bp, Salmonella enterica
atggatgttcagattattcagccagtttttgaggcaatagataacggtttaaatggtacgctggctaccggaacatcaagaatgatggcggtcgtcagtgttatcattggcggtttctgggttgtatatattggaatgcgctcgctttactggtattttcaggggctgacaactgttattgaagatatattccggcaggtgctgaaatgtacattcattacattttttgcttttaccattcagccttatatttccgtggtcgttccttttgtcactaatgccccggttgaattatctgccttattgacgggtaacagttcgggacataacaatcaggttgatatattaatcagttcgtttattaatactgtggtacaggtatttaaggctgtagactgggggatctggggagatgaactgaaagccaccattgccggagggatttgtctgatattgttaattccttcaggaattatgtttctgggggtatgcatatctgtcctgattgttctgaaagtatccacaacattattccttgccgtaggtccgttatttattgcgctggcattatttgaacagacaagacagtatttttatgggtgggtcagtgttattggtggttttatgctggcaagtctgatgtttggcgttattatttccatagagattaattatatcatggaaaatgtgattggttccgacggaattattaagattcagtggacaagcatagtatccattcctcttacatttagtgcatttaccgccattgctcagtcattgcctgattatgcggctcaggttatgggcggtgcgtctgtgggtaatggtggcggactcaggggaatgctgggttcagggactggcatcagagccggaattaatgcaggtaagggaattggacgggggattaataatgtccgcaggatatacagtaaacgcaggattacaggagggtaa

SEQ ID NO: 392123 - DNA, 684 bp, Salmonella enterica
atgaaaagaaaatatctggcagtgtgttttgtttttatattatcaggcggtatcacatctccggctgcggcagccggtgttccgaccgtcagcgttccggaattatcacaactgatacagaacgcccagcaacaggcaaagcaggcgctggcacaactggaaaaagcaaaagaagccattcagcaggcgaaaagtcagtacgagcattacaagtctgttacggaggggaatgacaaattaggcgcatttctgaacgatccgtatgttaatcaactcctgcccgttcgtgactggcaggatatttataatcagactcaggatttgacggacttacgtaagcggtatggtgtaagcgggtatgaaccacaggaacagaaattcttcgacagtctgttaatgcaggtcggtgttcttgaagagcaatataaggccacgaatacccggataaaacacgccgaagggttacgccagcaactggataccgtgaccacgcctaaagaacgtgagcagctcgcattacgttatcaacaggaacggcttgaactggaggcgcaacaggcacagctacagaatacccgctacttaatggaagaaaaaaagcgtctggaaaagcagaaaaatgcgcaggattttcttgattatatggatggcaaacgggacaccttaccggagatacggcgatga

SEQ ID NO: 392124 - DNA, 204 bp, Salmonella enterica
atgaatgactggcgttctgcaccccgcaggggtaaagcgcggtttatgaagcacctggacgaaataaaacagcggttacgggatggatatacaaacagggagatatatcacgatctgacgaataaagggcttgatctcagtgaagcgcagtttaaccgttatatccggcgttttctggcggacccggcagcacgggaggattaa
